United States Patent Application Publication US 2008/0034453 A1 - sequence listing, part 27

SEQ ID NO: 222690 - DNA, 529 bp, Glycine max
  unsure (1)..(529): unsure at all n locations
agaaagaatataatagtactaatttttattaagattaaatgatagtactaaacaatgatggaggtgcgcccggcacacaattaagtttagtgcagtggcggcatttccttgtaattttggtggcctaataataaaattggagatcatattttcttattcaatcccatgctaaccaataactaataagtgtgtgtggtttttataaaaatgatagaaataaatgtgtgctagattttgatgaaatgaatatttctatactcctggatggtcgtcttgtggatcgaaaacacggttgtgacaagtggggttgcaagggtaagggcaatctatctgatggaaaggccttctttcataaaaccaatctgctacagcctttgcaattgatgtctttttcagctctggagagtcacttctcaaccatgtcttctgcatttcaaattggcagtgggcatagcaagagtctatgaacattcctttagatgaagagttgcctagcacagttatagcncttaaaaattctgtcctgaag

SEQ ID NO: 222691 - DNA, 553 bp, Glycine max
  unsure (1)..(553): unsure at all n locations
ctcccactctctctccaaaaccttcgatacccatttcgcccctgccccgaaagtcaacgtctttgtgaacttcagggcgaggaggcacgttggggtgcgagtttcgaacgcgctgatcgaaccagatggagggaagctcgtggagcttgtggtgacggattttgagagggatttgaagaagggtgaggctctttcgttgccgaggatcaagctctcaaggattgaccttgagtgggtccatgtcctcagcgaaggatgggccacacccctgaaaggcttcatgagagaagccgagttcctccaaacgcttcatttcaactcgctccgactcgatgatgggtcggtcgtgaacatgtcagtgcccatcgtgctggctattgatgatgcgcagaagcatcggatcggggataacaaaaaggttgctctttttgattccaagggagaaccccgttgcaattctcaataatattgagatttataagcatcctanagaagaaagaataacccgaatttggggaaaccattgccctggcctaccttatgttgaacaaac

SEQ ID NO: 222692 - DNA, 426 bp, Glycine max
agcacaaccacattatattacagagagttggcatgcacaattgcaccataagtgcaagaggctgtctaaatgccatacatacagagagaggcaatgtgtccgtgcttgtgcctccccaaagttttaatttattattattattagattgggccagaggatcctcgtgaagtatgtcttagcaggagaatacataagcttaaggtttctcccaatcatgagatatatacattatgatatgatacaagattaagctggaacagcttcctgcactttgccgttgcttgagagtactaagctatcatagtaatcaaccagcacctttcattcaccagggcacataaatccatcaggaggactttctttgttccttgccagtgtgcgcatctttgtgcctgatatgaacaggaagtcctgaggccttgaagg

SEQ ID NO: 222693 - DNA, 514 bp, Glycine max
catataaaaagcacacaacacttgcgagtgggatacttttacttcttaaatggataaatacattcgtggtttcaaaaagtaaccagagcttcaattattacagcttatttacaacacgcttaacaaatttacaaagaaaatcctccagaaagcgtaattagactgcttcggcaaagccaacttggagatttccatagtcaaagacggtgtgatatgccctcatgaaaacatcgccaagaatccacaatggaccctttggtggaggaacatcaaaagcaataaacccactaaggcagacatttgtaatgccttctccagttcttagaatatactgctctggtgggaggacaaaaggcttatttccaattgtgaacgtattgtttggcatcttggaaagactattacaggctatcactgactctccagaggacttggtaggctctcacacagttgattacatagttgaatactctgtccttcgatgccttttgttttaggtgattttggatccaag

SEQ ID NO: 222694 - DNA, 520 bp, Glycine max
aacaatcggtcaaaaaccttagttgagatactcttttaatcagtacacaaactattaatgctgtcatttgattcctctctttctttgcctgtgtaccttgttatagtctttgttaaaattttcttgtattaacacttaatttttttattaattttaatattattctttttttgtacatatatatacaaactaattaagttaatagatcaattatattaaaaaataattaatattattatatataattaaaaattttaatgtatatttaatacatataaatttatttaatgaactttataataattaatgttaatttaataatgtattttttatataataaaaatttatatatgatcaaaattaattaatataaaacttatgtatgtgttaataattgatttattagtttattcgataaaatagcatgctaataacaggaatgttatacttatttcacatatatgttaaaaaatgataatgttaaaattaataaaaaattgaatgatatatgtgaaatttg

SEQ ID NO: 222695 - DNA, 480 bp, Glycine max
gtctgcaatcataatcaacaaagagccgagtacatcagcaagtatataataatccaaaaactccatcccctacacagaagagacaacaaaaaaaagcttaatgctcctaacagggtaacaacaccggttcccgaaaccgatttattcatacttctcatttctgcccgagcaagaagacactaaatcgcaggtagacaccagcacataatgtctagacaagctacttttttttcagtacaaccttaaaaagacttcttggcaacgaatacaagcaggtcaatgacacgtgagctgtatccccactcgttgtcataccaagagacaagcttcacaaagttcttattcaatgcaattccagcctttgcatcaaaaatacttgatctgctatcgcccacaaagtcggtggagaccacatcatcttcagtgtaaccaagaattcccttcaacttgccctctgattccttcttgatagcattttta

SEQ ID NO: 222696 - DNA, 565 bp, Glycine max
cttttaccggttgttgcgttggcgcaaatggcattcttcagaagcgtttctgcactttctcgacttcgctctcgcgtgggccaacaatctaatctggcgaattcagttagatggctccaaactccgagctccagtaacactgatctttattctgagttgaaggaactggttccagagtatcaggaacgtgttaagaagctgaagaaagatcatggaagtgttgaattaggaaaaatcactgttgatatggtacttggtggaatgagaggaatgacagctttagtatggctaggctcagctgttgacccggatgagggaattcgctttaggggcatgtcaattcctgaatgccagaaaaagcttccaggtgcttttcctggtggggagcctttgcctgaggctgtactgtggcttctattgacaggaaagataccaagcaaagcacaagttgactcattatcccatgaattgcgaagtcgtgcaactatcccagattatgcttataaggcaattgatgcattgcctgtttctgctcatccaatgactcaattcacaactggtgtca

SEQ ID NO: 222697 - DNA, 488 bp, Glycine max
taattattgtgtataaaaagtttataaacttttatttaataatcttaaaagagatatcaatcataatatatgtgactttgtgcggataagtatgtgaaattgattgaaaggtgtcacatgatgatagatggattaacacagtgtttgtatgtggcagtggtgtcatcatgtgagaagaagaagaagaaaagtgtgagtgcagaaaagaagagtggtgggcgagctcggaagaacgtgtacagaggaatcaggcaaaggccgtggggcaagtgggccgcggaaataagggacccacataagggcgtccgcgtctggctcggcaccttccccaccgtcgaggaagccgcccgagcctacgacgacgccgccaagcgcatccgcggcgacaaggccaagctcaacttcccggccaccgctccgccaccctccaaaaaacaacgctgcctcagccctgacaccaccaccgaacaaagcagcagctcacaatc

SEQ ID NO: 222698 - DNA, 508 bp, Glycine max
  unsure (1)..(508): unsure at all n locations
ctcgagccgaatcggctcgaggagtgagagggagcgaagagaagaaacaaagatggagactcctcctccccaacaaggcgtcgtgaagaagaaggagacaaggggccgaaaacccaaaccaaaggacgaacacgggaagggtttgaaggaaggtaggaaaacacaacaacaacaacaacaacaacaacaacatcatcatcagcagcagcaacagcaacaagatcaaccttcggtggacgagaaatacacgcagtggaagtcccttgttcctgtcctctacgactggctcgccaaccacaacctcgtctggccctctctctcttgcaggtggggcccccagcttgaacaagccacttacaagaatcgccagagactctacctttctgagcagaactgatggtagtgtgccgaatactctggtgattgcgaattgcgaggttgtgaagcctanggttgctgctgctgagcacatttcgcagtttaatgaagaggcgcggtccccatttgt

SEQ ID NO: 222699 - DNA, 530 bp, Glycine max
ctgcttcaggcatttctggcacaattttttccacctttatttcaactttaagactccacagaaagaagcatattcctgagtcaaatagttctgtccatatagaatttgtgaagtgagagtccaacctttcattttcaattttcaaagatgcctcgtggaacacttgaagttgttctgatcagcgccaaaggaatcgatgacaatgattttctctccagcatagatccttatgtgattctcacatacagggcacaggagaaaaagagcactgtgcaagaagatgctggatccaagccacaatggaatgagagctttcttttcactgtctctgacagtgcttctgaacttaatctgaagataatggataaagacaactttagtcaagatgattgtcttggcgaggcaaccattcatttagatcccagtgtttggagccggtagcattccagaaactgcttacagggttgtgaaagacgaagaatatggtggtgagattaaggtggctctcactttcactgctgagagaaatg

SEQ ID NO: 222700 - DNA, 487 bp, Glycine max
gacgcataaaagataatatatcaagcataatgtactttaatatccaaagggaggaatgcaacctaaaagcacaacactattggatcttcacaccagaaaacacaataatggaaattgcctaaaagtgacaccaaaactgcttatttttcattataaaggtaagtctggccattgaagtatgtaaattcttctttcactttaatattccccactggattctttccatccaccatagctctcttcaggtgcatcataaccctgctcctcatttctctcagcagtgaaagtgagagccaccttaatctcaccacaatattcttcgtccttcacaaccttgtaagcagtttctggaatgctaccggcttcaaacactggatctaaatgaatggatgcctcgccaagacaatcatcttgactaagttgtctttatccattatcttcagattaagttcagaagcactgtcagagacagtgaaaagaaagctct

SEQ ID NO: 222701 - DNA, 393 bp, Glycine max; identical to SEQ ID NO: 208347

SEQ ID NO: 222702 - DNA, 507 bp, Glycine max
  unsure (1)..(507): unsure at all n locations
cgtttgttctcatagctcccactcactttctcgcagaaacgtattgtttttctctctttccgcggcctagatctgagcagtttggaaaccctaactgctctcaccaacgacatcaccactctctccgatcaactacctctttcgtcgccctaagtcatggcaggaattgcacccgagggatcacagtttgatgctcgtcaatatgataccaagatgaatgagctgcttacgtccgatggacaggatttcttcacatcctacgatgaggtttatgacagttttgatgctatgggcttgcaagagaatctcctgagaggcatttatgcatatggttntgagaagccatcagctattcagcaaaggggaatagttccattctgcaagggacttgacgttatacaacaggcccagtctggaactgggaaaacagcaactttctgctctggaattctgcagcaacttgactatagtgtgactggatgccaagccttggttttagcaccaact

SEQ ID NO: 222703 - DNA, 521 bp, Glycine max
ctctttttctctctccttctttctttgtttctgtgtgttcgagattgaagaagatgatgcaggctggacccggcggcatggcccaacaagcgaaccaacaatacgcacagcaacagcaacaaccctacatgatgatgccgccgcagcctcagccccctcagatgtgggccacatcggcccagcctccgtcccagtcggtggctcctccgcaacccaccagcgccgatgaggtccgtaccctctggatcggtgatttgcagtactggatggacgaaaattatctctacacctgtttggcacacaccggcgaggtggcttcagttaaagtcattcggaacaaacaaactagtcaatcggagggatatgggtttattgagtttactagtcgtgctggtgctgagagagtccttcaaacatacaatggcaccattatgccaaatggcgggcagaacttcagattgaactgggcaactcttagtgcaggtgagaggcgtcacgatgatagcccagatcacaccata

SEQ ID NO: 222704 - DNA, 566 bp, Glycine max
gagtttttagatcatggagtgctaactttattgaagaattggcttgagccacttcctgatggaagcttgccaaatataaatatacgctcggaagttttgaagatattgaatgattttcctatagatctagagcagtatgatagaagagaacagctgaaaaagagtggtctgggaaaggtcattatgtttttatcaaagtctgatgaagaaatcagtgcaaataggaaactagccaaggagctggttgataagtggagccggcctatatttaataagagtacccggtttgaagacatgagaaatgtggaggatgatagggttccttatcggaggccatcagttaaaaagccggcaaataaatctgcaggaatggaatctaggacagtgatcttgatttggactttcacagcctaggtctggacagtcctcttctaggcagcatgcatcaaggccggaagcaacacctttggattttgtggtccgtccccagtctaaaattgatccagaagaaattagagcacgagcaaaacaagctgcacaagatcagcagcgtatgaagatgaata

SEQ ID NO: 222705 - DNA, 468 bp, Glycine max
actactgatatcaaagttgatacagattctaatctcttcacaactatcactgttaatgaacctgctcctggtctgaaggctatttttagcttcaaagttcctgaccaaaggtctggaaaggtggaagttcagtacttgcatgactatgctggaataagcaccagtgttgggttgacagcaaacccaattgtcaacttctctggtgttataggaactaatgttcttgctcttggtgctgatctttcttttgacaccaaaattggggagttaacaaaatccaatgctggactgagcttcaccaaagatgacttgattgcctcattgactctgaatgacaaaggtgatgctttgaatgctgcatattaccatgtagttaaccccttgaccaacactgctgttggtgctgaagtgacccatagattctcaactaatgagaacactctcactcttggtacccaacatcaattg

SEQ ID NO: 222706 - DNA, 534 bp, Glycine max
gttcactcttcttctcttgcggctagggttttagcgcagcttcttctagatttaaggaagatgggtaaggaaaaggttcacatcagtattgtggttattggccatgttgactctgggaagtccactaccactggccacctgatctacaagcttggaggcattgacaagcgtgttattgagagatttgagaaggaagctgctgagatgaacaagaggtctttcaagtatgcctgggtgcttgataagcttaaggctgagcgtgaaagaggaatcacaattgatattgccttgtggaagtttgaaaccaccaagtactattgcacagtcattgatgcccctggacacagggatttcatcaagaacatgatcactgggacatcccaagctgactgtgctgttcttatcattgattccactactggtggttttgaagctggaatttcaaaggatggacagactcgtgaacatgctctgctttcattcacccttggtgtgaaacagatgatttgttgctgtaacaagatggatgctact

SEQ ID NO: 222707 - DNA, 508 bp, Glycine max
gaacacaaatataaagttgacatttaaaaagcaaaccaacaacgcaacggcaaagccctaaaactcgctgcgcttaacaaaaatgtaatcaggggttctcacaaacacaacacattaaaacagaatgataaaaggagtcttgccaccgtcgatcaagaacccaattctgggaacaaaagttgcgagatgatggtggagacttcaaactatgtccgaaaaacaagctacctagaaacgaagacacaagggcaagaaaccaacatttattgtaaccataagaaacgacatcccctgatgaaccaaaccgcacgattcacttcttcttctgggcagccttggtgaccttggctccagtaggatccttcttctccacgttcttgatgactcccacagcaacagtttgacgcatatccctgacagcaaagcgaccaagtggggggtactcagagaaagtttcaaccaccatgggtttggtcgggatcatcttaacaaaaccagcatcaccatt

SEQ ID NO: 222708 - DNA, 426 bp, Glycine max
ctggtttcgaaccctcgttgtggttaggtcttcttcacctttcgaattttggaatccatgggtcagggaactccgggcggcatgaaccggcagggcgaccggaagccggacggcggcgacaagaaggagaagaagttcgagccgtcggctccgccggcgcgcgtggggcggaaacagcggaagcagaaaggtccggaggcggcggcgcggttgccgacagtgactccggtgacgaagtgcaaactgcggcttctgaagctggagcggatcaaggactaccttctgatggaggagggagttcgtggcgaatcaggagcgactcaagccgcaggaggagaaggccgaggaagacagatccaaggtcgatgatctccgaggctctcccatgagcgtcggaaacctcgaagagctcatcgacgagaatca

SEQ ID NO: 222709 - DNA, 431 bp, Glycine max
ctaaaatcaaggaaattgaaagaaaactattttgaattaaaatcgttgttgagattcaaagcccctaaaatacaactgacatttgttcgcagaatacaaatgaattggcatttgttcgcataactagaacgttaaaagaaagacaagagggccagagataatagaggatagtttttcacatatacagcccttcaggcaccccttttttttttttaaacatcactttatccttggccttcttaaagtcggcatgagtcaccttcattcgacgttctcgtagagcaagtaaaccagcttcagtacatattgcctttatatcagctccggagaattcgtctttagtcataacaaattcttccaagttgacatcatcagctaatgtcatccttgacgtgtgtatctggaagatgcgtctccttgttttgatatca

SEQ ID NO: 222710 - DNA, 525 bp, Glycine max
gggataagaaagagcttactgtcatttattcaggtacaccattaccctgtttcttttctgtacaatcattctgtactaattttcaaaggagtacagcaaagagaaacataacatcagtgccccttttgctgcaccaaaagcagaataaaaacaaagagatacaattattcatgaagacgagcacgtttgcttgcaacaggtaattcaaagttagggcttttaaaaatcagagtctaagtccagctgaaagcaatgggactagtaaccttatgtttcccatccgaccattccagataagcaaagctgtttgttccagaaggctttgacgaagacgtgaacgtaactgtgtagttcttcttctcattaagtcccccgaaactaagtgtttgtggttgaaccataatcttcaccgagggagactgcgacaccgaaactttatacgttgccggggcacccacgtttgttaaagtccttgtatattggacagtggctggtttgcgagaaccaccctttactccataagct

SEQ ID NO: 222711 - DNA, 427 bp, Glycine max
aaacagacaaattagaatgtatcatttcaatgaatatatcaacttaaccaaacaaaacttggccgagaaaatgttgaagtcatacaaaatccgtataactgacagatatcaaggggaagttatatgatggagcaggcaaaaagggaaaaggtgcaacagaggcatacgatacgggaggacgcgcttcagtccgatagggacgcctggccttgatattttgatcgccgttatcatcatccaactctgaagactccgtagaggatgcagatttcacaaaaccctttgctttgtcttctaagaattgttcgttttcagaacgacggtgaatcaaaagcccagacataaacacagggaggtaaaagaagactggcatggaacattctcctttggcttttttttggtacggtttctatagaatgaaaatgct

SEQ ID NO: 222712 - DNA, 438 bp, Glycine max
gaaatgaagattgttttttcatataaaaagcacacaacacttgcaagtgggatacttctacgtcttaaatggataaatacattcgtggtttcaaaaagtaaccagagctacaattataacagcttatttacaacacgcttaacaaatttacaaagaaaatcctccagaaagcgtaattagactgcttcggcaaagccaacttggagatttccatagtcaaagacggtgtgatatgccctcatgaaaacatcgccaagaatccacaatggaccctttggaggaggaacatcaaaagcaataaacccactaaggcagacttctgtaatgccttcttcagttcttagaatatactgctctggtgtgaggacaaaaggtttatttccaattgtgaacgtaatgtttggcattttggaaagactattacagcttatcactgac

SEQ ID NO: 222713 - DNA, 358 bp, Glycine max
tgtcctttttttttttttttttaatttttttttttttttttttttttttttttttttgggttggtgtttttttttttttttcttttttcggaaggaacccgaaaggcccacccccggggtatcaaaaaaaaaaacgggccctcctataagattcaaaaaccagctttaaacccttccaaaaactgatgacaaggggggggtctcctccactctgagacgaaaaaaaaaacggggtatcttttctctgctcacaccctggcagctaaagaaagaagcaaaaactccggggggaagacttcctcctcctaaagggaagccggctcaaaggcaccaaccccccaagaaaacgtgggggggg

SEQ ID NO: 222714 - DNA, 464 bp, Glycine max
aaagaaatgtattctatacttctcttcatttaaaaataaataaatagagataattacaaaataaatgagtcaaagaaatcaataaccctccaaagtaatcataatgatttattacaaaccgtaacgctaacgcatattttttaaaagcctaaacccgtgctacgaatggataacaaagaagagaaaagctcctaaaaactccggcaaatcccagttaaatccaaatcaaggcttcaccagaaacaatccatctccgtggtccattcagtatcctgtggggaattcgcagttaccatacttagggggctgagtgacgacataagcagtgccaccaaaatcgcacgtgccggatgcacgtgccttcttttgatagtaactgttgaaggcgtaagaagcatgtgcctccaaggtgttaggattgtaacacgtggcacctggttgaattggagtgcaatcagccccac

SEQ ID NO: 222715 - DNA, 469 bp, Glycine max
  unsure (1)..(469): unsure at all n locations
atattcaactctgtttttatttaaattataaataaaattacatttcaaatcatcattcatatgaatttacattatttaataaattttattgttaaactcaataagcacacactcactctttaccatgcatacccacccgaaagagtgcattcccatgttcgattcacaacctgaagcggttcaaggaagattttccatcaagggcctttgcatagtagtatgccacgaaatcttttatggtagtgtctctgtacattggcggattttcttctgaaattagttccttaattggaccatataacttctgtaaaccttcaactgggtcatccgaatgtccaaagaaggtcccaaagaagcttgctacagaaattcttgggcatgtcttctttgataagacccggtggcacacacttgacaacttgtcatttgtgatgagctgganaaagtctcctacgtttacaacaagagc

SEQ ID NO: 222716 - DNA, 549 bp, Glycine max
gccgtaagttcgaatctccttgctaacaaaaactaaaagctaacattggctgattaaaaaaaataacaagttccttaaactaaacaaaccaaattgcctcaaaagtcaaagccccattatttttttttcttacccaagtatggggatcaacgagggattaacaagttcatcattcaacagaaacaaacatgacaggtaaacaggattgcaagggaaaataaaccactttgtgccctcatttaaggagagtcttcacaattgatttgacattgagcttcttgaggtcagtataagactgtccacagcccacaaacatgacaggagctccagatatgtaaaccattgaaagtgcagctcccaccttatcatctatggtgtcaaatttcgtgagcaagatcccatcaatcaatcttggattaagtgatgttgcaaggtcagctaatttctgattgaactttgaaagctgatcaacagcgtcattaccaaccagtgcttctccaacaaattagactagatctggattgtaaggtagatgagttttgacagtgc

SEQ ID NO: 222717 - DNA, 442 bp, Glycine max
tcccattctactcactcacacacacacacactctctttccatgggtccgtttcgtagacccttccttgcatttctctcggttgttctatttctgggtctctatgaggcagcagcagaacagactcagactcacaagaggacttacattgtacacgtggcgaaatcggagatgcccgagagcttcgagcaccacgctgtgtggtatgagtcgtcactgaagaccgtgtctgactcggcggagatgatttacacctacgacaacgccatccacggttacgcgacgagattaaccgctgaggaagcgcgtttgctccagcgccaaacggggattcttggctgttttgcccgagacgaggtacgagcttttcacgacgcgaaacgccttggttctcggacttgacaagagcgccgacttgtttcccgagtcgagttccggaagtga

SEQ ID NO: 222718 - DNA, 348 bp, Glycine max
tttgagttttttttggtttttttatgctcattttttttttttacctttcttttttctcgggcggtagaagaaaaaagccatttcaatcattgttaactccagaatactattcccccactttttccacaatcacaatcattatcactgccctgctagagaaaatatagactatggctgcaagtgatgaaatttatgaactccctactctgacagatgacccacagtacccaaaaacattattctttttagacgactttcatccagacacaacaatccttttccattcgagcaagaccccctctgcacttgcttttggggtatatacatcggcaatcggtttttttagac

SEQ ID NO: 222719 - DNA, 312 bp, Glycine max
ttcagtttttacttctttttttcttgcggtttgggttttagcgcagctattacgagaggaaggcagacgatgaaaagaaccagttcacatttgaattttggcgacaccccttttccaccctgggaaattcactacctctggtcccctaatttacatgcttgccggccttgactagcgtgcgatggagaggcttgagtccgtagctgatgagatgaacaagaggtctttcacgtatgccagcgcgctggacatacataaaagcttgcttaaaaagaagatgtatcctaagatctcactttcttgaaaagggga

SEQ ID NO: 222720 - DNA, 326 bp, Glycine max
tttagtttttattttttttttttttgttttttttgttttttctcttttttaaaaaaaaaaaggggaaggattaatgaaaaagttcacttcattttattgggaattccccatgtggtccctgggaaatccactaccgctggacaactgatttacaagcttagaggctttgaaaagggtgtacaacccaggggggcgaaggaaggtaaaaaaaaaaacagcacttttttgaagtttgaactaattctttacagacttttagataaccgggaatgtaaaaccacggacaatcattgttttggaaacatttgtttcgctaaggaggaaaa

SEQ ID NO: 222721 - DNA, 430 bp, Glycine max
tttagttttttttttgataagtaaattatattaggacaaacttagccaggattgaacgggagggcgctaaatcaaactaaaagctctacaacagatagccctcccttatctaaacagtgggatttagcgattgaattggagagggctgcgttgcttaagctcttcacgatgagacacgacaagctactgacggaaggaggagcctggatatattctttggaaagagaaggatggttgtaatgaaaggaccaaaccacctactcggatggacaagatcatcaaaacctacctaaacgctattatcatccgtccattctctgaaagctatccttctgattggcacggccttcctggtaatcatacttatgattcaccatagatacagactcctgagattgttcttcatgcccaccagtaggaccttccgcct

SEQ ID NO: 222722 - DNA, 434 bp, Glycine max
  unsure (1)..(434): unsure at all n locations
cggataaagctcgagcctcattccacaccgaaacctccaaaaccctatcacgccggggttcatggcgactacactatccgtgccgctcctcaagcacctcctcacccgtctcaacccttctcgctacgttacgtacatgccccgtgccggcgacagcaccccttgcggcgtgacgctgatcccgggcgacggaatcaggcctctagtaaccggcgcggtggagcaggtgatggaggcgatgcacgcgccgctgtacttcgtgaagtacgaggtgcacggcgacatgaaggcggtgccggcggacgtgctggaatcgatcaggatgaacaaggtatgtatgaagggaggactgaccactcccatgggcggtggagtgaactcgctgaacgtgcagctgaggaaggagcttgatctctactcctngctcgtgaact

SEQ ID NO: 222723 - DNA, 568 bp, Glycine max
cttatcaaataagctaatgatacattattattattattattattattatacaacaacaaaaatggatcgatatggcaacattatgttattttatgccttgacggtcctaaatgggatgtaaaaagaatttgaaaaaagggtggtaaatggtttgactgggtcctgcagtgcgtttttgatcttttatctctatgaactaatacaagcctggatctcttccaaagtttttcctttggtttttgggactaattttgctacaaatagaatagttaagagggaacatccagcatacaaaaacaatgtaccaggagaactccagctcataagaaagttgaaagtatatgaaactacccaagctcctagccaagccaccaaaaccaccaagcttccagcagtccccttcaaatgtatgggaaatatctcagacattatcacccatggaactgatccgagcccaattgaaaatgctgctatgtagattcagaacgccagcaaatgctaatataggtacccactcaggcaataaagcttggtccttgagaaagaaagcaaaggcagcaacaaagca

SEQ ID NO: 222724 - DNA, 416 bp, Glycine max
  unsure (1)..(416): unsure at all n locations
aggctaatcagctgattaccatanaccagctaataccttggatgcccacgctcctaagctccgaatcgcccttgagacttcattttgcgaggtgttgttttgtaattcttcttcaacgacctctttatgggacgggggatcccagctcagcgcaacggtgctggctatgccttaaaatgcctcacacaccaacaaaaaggcccttgcccgctgcagagcctgcatatgcgagagcgcaacgggtacctgaaaggtggcgccactgacgacatccaccatcctggccgtggagcagatcactgttaccaaggcttatggcgcccattgaaatactagaaacagaacaagctcttcatgaacgattacattgtctacatcggcaactggatatactgcgtacagaattccatcctaat

SEQ ID NO: 222725 - DNA, 435 bp, Glycine max
tgcgatcggctggtacccacccgactattcccggacgcccacctcctaagctgcggtcgccctttgagcattttttttgatagtgtttaggccaatgtagcatagaaacattactttccaccaaggggcctatagatcctggggactatggagaatctgcagagaaatgtgttgggtatcaacaacatcaccagtgttggagagatcgaagaccaaggcttaggcttgatatgcagtgcacttaacgccctaacttttgcggtcacctaaatctacatacacccgaccattactaacaaagctgctggcgggactggtactaagggattgaatacggttattatccgcaaggtcacacttcccaccttgtgagctgtcgaacaaacgcccgattgctaattagaatctgacacttactgactgatttccggctct

SEQ ID NO: 222726 - DNA, 419 bp, Glycine max
cccgaacggaaacttccgcaatcagcatacacgtttttacaaaaaaagcccaaattcattggccgggggggggccccaaaatttacccactaagaatctatttgctatcggggccctaacttagccaacgttccaaaatttcgaaatttcaaaaaccattaaacttgggaaaaagacgggttctccaatcattggttataaaaacgtaacaggcaattaagtcaaatttaatcaacttcttccatctggctaccctcagcatttgcatcagcgtcctaaagaggaggcatgttagcatttgcttcaccagcattttaataaatgctcaaaccaagcttaagcatcctgtgaatcctgttaccgaaagggttgggatcatcaaggctgaacccaaaagttttaaaagcagtcctaaaaag

SEQ ID NO: 222727 - DNA, 363 bp, Glycine max
gaagatcttgtgacgaattaattgagaaattatgaaagagtgtatacaaaagaaaccataatatgccgttaaatgtttgcacaaagtacgtttgcaaccttgattcactccagaaacttgcttcgttatagttgatcaatgcctgctataaataaaatagcaacttggtcccattatcatcagttcataatcaaagtttccgtaatgctctaagattgaactcatgcttgataagatttgatctcagtaacatggaacgaacatcacgatcaaattcccttccagtttccagaaccctttgaaaggtggcattcctttgatctgcatgccgcgcatacaaaattttgttgtgcgaatcaattc

SEQ ID NO: 222728 - DNA, 510 bp, Glycine max
cttgacctcaatttctatgatagatcatgcccaaatttgcaaaggattgttggatatggtgtttggttagccttaaaaaatgacaacagaatggccgcgtccctccttcggttgcactttcacgattgcatagtaaatggctgtgatgcttctgtacttcttgatgatacaccatattttacgggcgaaaagaatgctcttcctaatcgcaattcacttcgggggtttgaagtcattgatgacataaaagaacatcttgaaaggatatgtccatcaacagtttcctgcgctgatatattagccttagcagctagggaagctattgatcagattggagggccttcttggcaagttcaattaggccgaagagatgcaacaacaacaagtaaggaagcagctgagcaacaaattccctcaccaattgagcctctagaaaacattactgcaaagtttttctcaagggtcttgacatgaaagatgtcgtagccctttcaggagcacatacaattg

SEQ ID NO: 222729 - DNA, 404 bp, Glycine max
ggaaagacaaggagatatactcggtgaagttgcctggaaatcccaaattgggtgaagggaagcccgagaatcaaaatcatgcaattgtatttacgcgtggaaatgcagtccaaacaattgacatgaatcaggataactattttgaggaagctttgaagatgaggaaccttcttgaagaatttcattctgatcatgggcttcgtcctccttctatacttggtgttagagaacatgtcttcaccggcagtgtctcatctctagcgtcatttatgtccaatcaagaaactagttttgtgactttagggcagcgagttttagcaaatccattgaaggtccgcatgcactatgggcatcctgatgtttttgatagaatattccacgtaacccgtggtggtatcagcaag

SEQ ID NO: 222730 - DNA, 435 bp, Glycine max
cggctcgagctcgagccgcaaaccacaccgaaacctccaaaaccctagcacgccaccgtccatggcgacgacacgatccgcgccgctcctcaagcacctcctcacccgtctcaacccttctcgctccgtcacgtacatgccccgtcccggcgacggcacccctcgcggcgtgacgctgatcccgggcgacggaatcgggcctctagtaaccggcgcggtggagcaggtgatggaggcgatgcacgcgccgctgtacttcgagaagtacgaggtgcacggcgacatgaaggcggtgccggcggaggtgctggaatcgatcaggaagaacaaggtatgtctgaagggaggactggccactcccatgggcgggggagtgaactcgctgaacgtgcagctgaggaagggagctcgatctctacgccttgctcgtgaact

SEQ ID NO: 222731 - DNA, 594 bp, Glycine max
cagaatgtcaacgactcgcagctctacgatctgttcaaccaggtcggccaagtcgtttcggtgcgcgtctgcagggaccttactacgcgtcgttcactcggttacggctacgttaatttcagtaaccctcaggatgcggcgagggcattggatgtgctgaatttcactccacttaacaacagatctattaggatcatgtattctcatcgagatcctagtcttaggaagagtggtactgcgaatatttttatcaagaatttggataaggctattgaccacaaggccttacatgatactttttcttcttttggactcattctttcttgcaaaatagcaactgatgcttctggtctgtctaagggctatggttttgttcaatttgacaatgaagaggctgcacagaatgctattgacaagttaaatggcatgctgatcaatgataagcaggtctatgtaggccatttcctgcgaaagcaagatagagagaatgctctcagcaagacaaatttaataatgtctatgtgaaaaacttatcagagtcaaccacggatgaagagttgatgattaattttggagaatatggtaccattacta

SEQ ID NO: 222732 - DNA, 582 bp, Glycine max
aattatcttccgtttcaggattagggtttcaccgttacagtgaaacatgggagaaccaaaacgaatctatctgcgtatctttgcgctgctcctcttcatttccgcctcttcgtttcagcttctccgcgctttcgatgaccccgatcttttacgaagtcgttcgacgaggatttcgaagaccgttggattgtgtctcagaaagatgagtacaatggtgtctggaaacatgccaagagtgagggacatgatgattatgggcttcttgtcagtgagaaagtaaggaaatatgctatagtaaaagaacttgatgaggccgcgggtctcaaggatgaaacagttgttcttcagtttgaaactcggcttcagaatggccttgagtgtggtggtgcatatctaaaatatctccgaccacaggaggctggatggaaatccaaggaatttgataatgaatctccatattctatcatgtttggtcctgacaagtgtggtgccacaaacaaagtacacttcattttcaagcataaaaatcccaagagtggggagtatgttgacaccatcttagaatccccctttgtcccgtct

SEQ ID NO: 222733 - DNA, 576 bp, Glycine max
  unsure (1)..(576): unsure at all n locations
attccagagccaaggtaggttaaacactcttcttcatcgtcgtcgcaatgggacgtgtgatccgtgcgcagcgtaagggagcaggctcggtcttcaagtcccacacgcaccaccgcaagggcccttgccgcttccggagcctggatttcggagagcgcaacggctacctgaagggtgtcgtcactgacgtcatccacgatcctggccgtggcgcgcctctcgctaaggtcgccttccgccacccgttccgctacaagaagcagaacgagctcttcatcgccgccgagggtctctacaccggccagttcatctactgcggcaagaaggccacccttcgttgtcggcnaatgtgttgccttcttcgatccattcctgaaggagctgtcatctgcaacgtcgagcaccatgtcggcgaccgcggcgtcttcgctttggcgtctggagactacgccattgttatcagtcacaaccctgataatgacacctctaggattaagctcccatctggttcaaagaagatttgtccaagtgactgtanggccatgatttgtcaagttgcangtggagggagaactg

SEQ ID NO: 222734 - DNA, 580 bp, Glycine max
  unsure (1)..(580): unsure at all n locations
caatcttctgagagtgtttggttgaaagtagcaaagatgtttcctttcgggcaaaagggtcaaaagataaaggggactatggtggttatgcagaagaatgtgttggatatcaacagcatcaccagtgttgagggatcgttgaccaaggcttangcttcataggcagtgcagtcgatgcacttacttttgcagccaccaaaatctccatccagttgattagtgctaccaaggctgatggtgggaaaggaaaaattggaaagagtacaaatttaagaggaaagataacattaccaaccttgggagctggcgaacaagcatacgatgttaattttgaatgggacagtgacttcggaattcccggtgcattttatattaagaacttcatgcaaaatgagttctacctcaagtctctaattctcgaagacattccaaaccacggaaccattcccttcgtatgcaactcctgggtttacaattcaaaaactcaagactgatcgcattttctttgccaacaatacatatcttccaagcgagnacaccagctcactttngaagtacagagaagaagaaattgagaatg

SEQ ID NO: 222735 - DNA, 409 bp, Glycine max
gcccattctactcactcacacacacacacactctctttccatgggtccgttgcgcaaaccctctcttgcatttctgtcggatggtctatgtctgggtctctatgaggcagcagcagaacagactcaaactcacaagagtacttacattgtacacgcggcgaaatcggagatgcccgagagcttctagcaccacgctgcgtggtatgagtcgtcactgaagaccgtgtgtgactcggcagagatgatttacacctacgacaacgccattcacggctacgcgacgagattaaccgctgaggaaacgcgtctgctccagcgccaaacggcgattctggctggtttgccggagacgacgtacgagcttttcacgacgcgaacggctttgtttctcggacttgacaagagcgcc

SEQ ID NO: 222736 - DNA, 573 bp, Glycine max
tcccattctactcactcacacacacacacactctctttccatgggtccgtttcgtaaacccttccttgcatttctctcggttgttctatttctgggtctctatgaggcagcagcagaacagactcagactcacaagagtacttacattgtacacgtggcgaaatcggagatgcccgagagcttcgagcaccacgctgtgtggtatgagtcgtcactgaagaccgtgtctgactcggcggagatgatttacacctacgacaacgccatccacggctacgcgacgagattaaccgctgaggaagcgcgtttgctccagcgccaaacggggattctggctgttttgccggagacgaggtacgagcttttcacgacgcgaacgcctttgtttctcggacttgacaagagcgccgacttgttctccgagtcgagttcgggaagtgacgtcatcgtcggagtcctcgaccccggcgtctggccggagagcaagagcttcgacgacaccggactcagacccgttcccagcacgtggaaaggcgcgtgcgagacgggaacgaatttcacgcgtcgaactgc

SEQ ID NO: 222737 - DNA, 324 bp, Glycine max
gacacaaacacgccccataccgtacataccgaggtcaacacttcgcgaggcctttaaacccacttatctattgggctgcgcttaacgcatcaaattatcactagactatatatatggaacgctacttactttactactggaaactttgaccaacctatcaagtgaaacctacccctttttgttctcccaccaacttaagccgtttatgacttgatcatgtctcactttaagggcaagtaccatgatgagcttattgtcaatgctgcttacattgacacttctggagagggcattctatgctgatgatgagtcaacagggacaat

SEQ ID NO: 222738 - DNA, 520 bp, Glycine max
gagaaagttgggttgtagcgtaccacaccgaaccaaaaatggatgtcgccgtctccggaaactctctcgccggaacttccacaccctataaccgtttgcaagaactaaaggccttcgacgaatcccaagctggagttaaggcctggtcgactccggcatcaccaaactcccaaaaattttcgtccggccgccagaggacctcgccgccgccgacccagtatccggcaaccctgccggtgcccagttcacgatccccataattgacctcgacggccttaccggcgagcgctccggcgtggtggctggagtccggcgggcggcggagacggtggggttcttccaggtggtgaatcacggaattccggtgaaggtgctggaggagacgatggcggcggtgcatgagttccacgagctgccaaagagttgaaggctgagtactatagcagggagcagatgaggaagtgaagtatgggagcaactttgatttgtatcagcaaagtatgctaattggagggacact

SEQ ID NO: 222739 - DNA, 85 bp, Glycine max
aaaaaaaaaaaaaaaaaaaaaaaaaaaaaaaaaaaaaaaaaaaaaaaaaaaaaaaaaaaaaaaaaaaaaaaaaaaaaaaaaaaag

SEQ ID NO: 222740 - DNA, 461 bp, Glycine max
  unsure (1)..(461): unsure at all n locations
ctagaatggaatttcgatgctcagtcatctcttttaccattctcttctctcttgctgttgcaggagagagccatgtccatgcatcgctacctgaggaagattattgggaagctgtttggccaaacactcccattcccactgcactgcgagagcttctaaagcctctccctgcaggtgttgaaatcgatgaactccctaagcaaattgatgatacacagtacccaaaaacattcttctataaagaagaccttcatccaggcaaaacaatgaaagtacaattcaccaagcgtccctatgcacaaccttatggtgtatatacatggttaacggatattaaagacacctctaaagaaggatatagttntgaagagatatgcatcaagaaagaagcgtttgacggagaggagaagttttgtgcaaaatccttgggaacagaattggttttgccatttaaagctggg

SEQ ID NO: 222741 - DNA, 498 bp, Glycine max
  unsure (1)..(498): unsure at all n locations
cttggaactccgttcctttgcttgtggggttcttcacttacttggccgttgctggatccattctccctggaaaacttgttcctggcgttgcactactcgatggaactcgtctacactattgctgcaatggtctgctctcgcttcttctgttggttgcacttctcgggatcggtgccaagatgggttttgtgtctcccactgccatatcagacagaggacttgagctgctgtccacaacttttgccttcagttttcttgtaaccctgatattgcatttttccggttgcaagtcacaaagtaaaggttcatcactaaagcctcatctcagtggaaacctgatacacgatgggtggtttggtatacaactaaatccacagttcatgggtatcgacctcaaatttttctttgttagagctggaatgatgggatggctacttatcaatttatctattcttatgaagagcatntcagatggtactttgagccagtcaatgattc

SEQ ID NO: 222742 - DNA, 496 bp, Glycine max
ccgaaccaaccaaccccccctttttattttggctgttctgttgatcgcaaatcctcatctcatccctattcgtcgcaatctccactgcaccactttccagcatcttgaatttcaaaatgcctaaagttagaagattgaagtccctgtctactgattgtaatagaccgtatccttacccatccaactccaaaaacattgagctgcataaacctatgaatttgttggaatcggctgatgaaatgaaagaatgggaggaagctagatgtcctatttgcatggaaccccctcacaatggtgttctttgaaatgttcttcctatgagaagggttgtcttccttacatgtgcaataccagttaccgccactccaactgccttgaccagttttgtaagtcctttgcttctcatctctcatcagaagtactgcaagaaattcctgtcacaagcagagtctccatagtagagagattcaatcagagtcttggcaccctgctcaat

SEQ ID NO: 222743 - DNA, 541 bp, Glycine max
  unsure (1)..(541): unsure at all n locations
tgttcactcttcttctcttgcggctagggttttagcgcagcttcttctagatttaaggaagatgggtaaggaaaaggttcacatcagtattgtggtcattggccatgtcgactctgggaaatccactaccactggtcacctgatttacaagcttggaggcattgacaagcgtgttattgagaggtttgagaaggaagctgctgagatgaacaagaggtctttcaagtatgcctgggtgctggacaaacttaaggctgagcgtgaaagaggaatcaccattgatattgctttgtggaagtttgaaacaacaaagtattattgcacagttattgatgcgcctggacatagggatttcattaagaatatgattactgggacatcccaagctgactgtgctgttcttatcattgattcgaccactggtggttntgaagctggtatttccaaggatggacagactcgtgaacatgctctgctttcattcacgcttggtgtgaaacagatgatttgctgctgtaacaaaatggatgctactacaccc

SEQ ID NO: 222744 - DNA, 408 bp, Glycine max
gagaaaaatgaagtctttccatctcacagtgacagctttgtgctgtgtagtggttgtgcttggagtgcttccactctccctagatgcacaactagatccctccttttacagagacacttgtcccaaggttcactccattgttcgtgaagtcgtcaggaacgtttcaaagaaagatccccgtatgcttgctagtctcattagacttcactttcatgactgctttgttcaaggatgtgatgcatcagttttgttgaacaacactgccaccatagagagcgagcaacaagctctgccaaacaacaactcactaagaggtttggatgttgtgaacgacattaagacagcagtggaaaaggcttgtcccggccgtggttcttgtgctgatattcttacccttgcatccgaata

SEQ ID NO: 222745 - DNA, 567 bp, Glycine max
gctctgtcttgagttatattactctgagattgctaggtgaggggcctaatgatggacaaggggaaatggagaaggcacgtgactggattctagggcatggtggtgctacttatataacgtcatggggggaagatgtggctttcagtacttggagtgtatgaatggtctggaaataatcccctgccccctgagatatggctccttccatacatgcttccatttcatccaggaaggatgtggtgtcactgccggatggtctatttgccgatgtcctacttatatggcaagaggtttgttggtccaatctcaccaacagtattatctttgagaaaagagctttatacagtaccataccatgatatagattgggatcaggctcgcaatttgtgtgcaaaggaagatttgtactatcctcacccacttgtacaggatattctttgggcatctctcacaagttccttgagcctattctgatgcattggcctgggaaaagattgagggaaaaggctattatttctgcattggagcatatacatacgaagatgagaatactcgatatatttgcat

SEQ ID NO: 222746 - DNA, 482 bp, Glycine max
gcagctataatggagcattttattttcagccactcaattttgagttgaatgacatttcattttcaagtcataatcggagcatttttatggaacagcctctcaattttgagtgcagggatgatcatcaaagctatatgaaccagcacggagaccatacatataaccagcgttaaccaggaggccatgccacttttcacctcttgagcatattcagcacaagctagtccaaggaaggttaaagggaatgactacgcccaccatgtaacgcttaacctcttcatggatttcttgaacatggatggcctgcaagcctgagacataaacaggaataaagacagaaagaggagcatctttgatggggtgacaaaagcacctgtgatggatttccaggctacacttgctatgcttggtgcagcaaaaaacaacaagtaagttggccttagcactgtggggaactggctgccacttgtcagacgctgata

SEQ ID NO: 222747 - DNA, 494 bp, Glycine max
ggcattgaaacagcagcaatcattaatgcaataaaatcagtattattattctcaaccacagcaaacacactgcacggccagagaaagcaacaaccacattttgttttctaaaagcacgatacaatctgtctttaaccataatagaattcatatctcacataaacctttatttattcaaagcaacttagatgcgacttgggtcagcaaagaagctgttgatggagggcataatctcaggagttctggcgcgcacatacttcctgaggaaatgctcagcatacttctctccctgagcaaagttctgcaacactcctgcctttcttccctccttgctcaccctgactttagggatgatgcagatattacgaaccaagtggaattcacagatcccaacagcggcaccaagcgcagcgaacagtggatacaccttgggtctgagccagaggatagccatggatagttgcagcggtgaaaccagaaaggggggaaagcaa

SEQ ID NO: 222748 - DNA, 552 bp, Glycine max
gggatataaactctgttcttgaacagtatgcaaaatttgttaagcctgcatttgatgattttgttctaccatcaaaaaagtatgctgatgtgatcattcctcgtggaggtgataatcatgttgccattgatttgattgtgcaacatatccgtacaaagctcggccaacatgatctatgcaaaatatatccaaatgtctatgttattcagtctacattccagatcaggggaatgcatacgttgattcgtgaccgagacatatcaaagcatgattttgtattttattcagatcgacttatacgcctggttgttgagcatggtctaggtcatctgcctttcaccgaaaagcaagtggttactcccacaggatctgtttatactggagttgatttctgcaaaaaattgtgtggtgtttcaattgttcgaagtggtgagagcatggaaaatgcacttcgtgcatgttgcaaaggcattaaaattggtaaaattctgattcaccgggatggagacaatggaaaacagcttatatatgagaagctccccaggatatttc

SEQ ID NO: 222749 - DNA, 510 bp, Glycine max
gaatggaagaaggcatatctttaaattgaattgatggggtggaaaacccgaatttaaagatttccaatcatacacaatattgcaacaacaaaaagaattttaaaaaaaaaagactttctttttttactttttttacccaaaacctaagcaaaatataaaaacaaacgacacttttttttagactctttaaatccaaaagctgatcacaatcaaaatcaatggcgttatttatgaaagctccataagacttcaaacgaccaaaagccggtttctccattgatgttctcttcaaacatgaatttactcttcaatagcaaggggcacagactcagccaatttgcggtacttgagagcatagaacatctcgaggtaacgtttgctctcacggcgttcaagattggtcacgtgcttccagaagccatacacaccaatgagtgtcaagagcctgtccgagtaaatttgccatgtgtacttctcatgaatacgcttgagtccaccctgggagatttt

SEQ ID NO: 222750 - DNA, 581 bp, Glycine max
caaggtttctggtttagctagctcccgctgggtcctttcttctcaccactgcacccacccatccctctcgcgttgagtcacgagtcacgagtcacgagtcactcactaaaactactacttcctcagttcctcctgttaggtttctctttctcgcgcactcgtcactgtctactccttcatcttctcccgctccgaattttgaccgagttgttgactccacgatggcttccaattccgatttggtccgcgccgttgagtcgctcctcggcgtctcgctcgccgattccgtctgcgattctttgctcctcattgcgaccacctccgccgccgtcataatcggccttctcgtgtttctctggaagaaatcttcggatcggagcaaggaggtgaagccggtgatcgtgccgaagggcttgccgaaggatgaggacgacgagatcgatgttgccgacgggaagactaaggtcacgattttcttcggtactcaaaccggcactgctgaaggctatgctaatgcattggcagaggagatcaaggcaagatatgatacagcagctgtcaagttggtgacctggatgact

SEQ ID NO: 222751 - DNA, 374 bp, Glycine max
tgggaacccaaagagaagagaaaagaaattttatttttttttagacgggtctttgtgaacctatgatcttgtgaaaacccagacagcgatctttgatgcactcataggattgggcgattcagtcgcgtgttcagaggccgatgatttcgtgacaaatgaacggcggcgatgaggtagtggcagctacggcggctacaccgcaccctctggagtggaaattctcgcaggtcttcggagaacgcacggaaggggaataggctcaggaagcggacataccttctgttattgaatttgacaagtctggtgagcatcttgctactggagaacgaggtggtcgagtggttctctttgagagatcagatacacaagagcat

SEQ ID NO: 222752 - DNA, 458 bp, Glycine max
tttcagattcagagcatcgttgcgcatctccacgctctctttgcttctcttctcgcacggacatggatactgctgcaggtcaaagtctttacccattacaccgttgcaaaactcttcacctggtaagacatgcccaaggatttcacaatgtacaaggtgagaagaactttgaagcatacaaggcttatgatctttttgatgcaaacttgacccctcttggctggaaacaggttgataatctgagacaacatgttaaggccagtggtctttccaaaagaattgaactagctattgcttgccccttgttaaggactatgcaaacagcagttggagtctttggtgggcaaccatatactgatgggattaatgtacctcccctgatgaatgacaatgtgggagatagatggtcgccctgcaatttccagtctaaatgccccaccatttatagcagacagagc

SEQ ID NO: 222753 - DNA, 579 bp, Glycine max
  unsure (1)..(579): unsure at all n locations
ccgtcgttacgagttactggggaatcacaaggcccaaggttcgtagggaggacgggacagagtggccgtggaactgcttcatgccatgggatagttaccactctgatgtgtcaatagacgtgaccaagcatcatacaccaaagtcattaacggacaaggttgcttttagggctgtcaagtttctaagggttctctctgatatctacttcaaggaacggtatgggtgccatgctatgatgctggaaacaatagcagcagttccaggaatggtgggagggatgctgctgcacttaaagtctctgaggaagttccagcacagtggtggatggatcaaggcactgctcgaggaagcggagaatgagaggatgcacctgatgaccatggtggagcttgtgaagcccagctggcacgagaggctgttgattttcaccgcgcanggtgttttcttcaacgcctgcttcgtgttctacctcctctcgccaaaggcggcacatagatatgttggttacttggaggaagaagctgtgatttcatacactcagcatttgaatgccattgagagtggtaagttgaaaatgt

SEQ ID NO: 222754 - DNA, 544 bp, Glycine max
atttttccctcggcgttgccatgacggaaccaacagagccatccacgtcatcttcattggcgagggacccaaccaccgtggttcacccaaggcgcgagcccttcgagcacggcctcttgccaatcccgcgcctcatcttctccgacccggcgcaaaccctaattccgttgaagcagaagcttctcgagttatcctccaaccagcgagtcgacttggcggcaatctccgagtcactgcagatctccattgagcacgccaggctcgtcctcgataccctcgcctcgattctgcactccgactccgaacctctcgtcgtcgccaatctcgtcgaaatcgattccgtcggcgtcgacgtccatgatttggttttgttcctctacattcaatcctacaagaggctcctcccgcgcacgcataaggactccgccgccgtcaccgacgtctggccttccacctccgccttcgatggctacttgtccgctctctcgccgcttcagctcgtacgcagcaacagtcggcggattatgccgtcccaggctgatga

SEQ ID NO: 222755 - DNA, 553 bp, Glycine max
gtccaagacaactacaagcagtactggtccttcttccgccgccccaaggagatcgagaccgccgacaaagttcccgacttcgtcgacaccttctacaatctagtcaccgacatctacgagtggggctggggccagtccttccacttctccccctccatccccggtaagtcccaccgcgaggccacgcgcctccacgaggagatggccgtcgatctcatcgaggccaagcccggcaacaaaatcctggacgtgggctgcggcgtgggcgggcccatgcgggccatcgcggcccactcccgcgcgaacgtggtgggcatcaccatcaacgagtaccaggtcaatcgagcaaggatgcacaacaagaaggctgggttggactctctctgcgaggtcgtgtgtgggaatttccttaagatgccgtttgtcgacaacagcttcgacggagcgtactccatcgaggtcacgtgtcacgctcccaagctggaagaagtgtacgccgaaatctccgagttctgaaaccgggggcgctctacgttttctacgagtgggtgac

SEQ ID NO: 222756 - DNA, 476 bp, Glycine max
aacattgcaaactaaaattaaaattgaaaagatcaaaatccaaattacaccaagttcatagtaataataactaataacaacaagttaaacccaggataataatgagaaaaaagagttccggaaagaaacaaggtggcggtggtggtttttgttttccaatttccaaatgaaacgaaaccctaaccagagttttgttcgtccttgtcatggggctttctgcagaggatcatgtgcatcggagagaaaatcccagagtcaccccctctggtcaaatagtcagcggtcttgaagagcatctcatgaacatcgacggtccccttaggcgcgattcccaaagcggcgagaacagtgaccacaatatggttccgccagtacgcgatcctacccatcttcaatcggctccaccagggaagagccggcggcttggccagatcccgctccttcacaacagcaaaccctaccttacgcgccgtttc

SEQ ID NO: 222757 - DNA, 586 bp, Glycine max
ctcactcactcactcacctccatttccattgtcactgctccttattcggatctatctgacaccctttctctcttttcttcttttctttcgttttcccttcgcaagtgagagatggcgcaaattctgcttcatgggactcttcacgccaccgtcttcgaggttgataggctcaatgctggtggtggtggtggcaattttttcagcaagctcaagcaaaactttgaggagactgttggcatcggaaagggagttactaaactctatgcaaccattgatctggagaaagcaagagtaggaaggactagaatcatagaaaatgaacatactaatcccagatggtatgagtcttttcacatttattgtgctcatatggcttcaaatatcatattcactgtgaaagatgataatcctattggggcaactttaattggaagagcttatgtgcctgtttcggaggtcttggatggtgaggaaatagataggtgggttgaaatcttggacgaggaaaaaaacccaataccagagggttcaaagatccatgtgaagctgcaatatttgatgtcacaaaagaccgcaactgggctcg

SEQ ID NO: 222758 - DNA, 411 bp, Glycine max
ggcacaggacatcacaagacttttttaagattattactaagcagtaatgaaaacccaatttgggatggaagccaaaaccaggttggtaacaaagtccaaaatcaaattaagtcgggaaaatgggggggagggagtcagctttgccaccaaaaatgcgacccttgggggcggggaaaaattcaaatccgggcggttgggggacatttccttaactggcaaccccgatggggtaccggaaaaggtgaccgggaaggtcatgctaaagggactcgttagaatacagaccccaatatttgtcagcaacttggttcaccttgttaatgcatccataactttttggctggaggaaggggtcttgaaccatgccaaggtgcttataccacaatgacatggggaaaccgggaatttgac

SEQ ID NO: 222759 - DNA, 535 bp, Glycine max
aaataaaggatatgaaatatatcattagtgactttcaatcaatgaaaaagataatcacaaagcataatgtcatctctgaaaatttgagcgcaactaattttccttctaaagatggatgtggtgatcaagtaggtattcagaaaggctttccctatccacccaggatttacttgacataaaatcaacaaatcgattttatattgttgtatacctgacctctaatatacccaacaaaatcagatgaccttttaatttctcaatgtaaaaatatcatatccctcttaaacatacatactgttgcatggtcataataagccagcttcaaagagattcctccgtctcaaagtctcatcaacaagcttgaaagtcttcttcacaagcttctgatcaagggcagtcgcctgatagatcttgaacacgcgatctacacagtcaggagcagtgctctggaaatacaattcctcaaactttttcttcacaaactcgtacgcatgttcaatcttttgtttcccttgtgaaactggctggtaatctt

SEQ ID NO: 222760 - DNA, 439 bp, Glycine max
aactcagctgtgggtagcacaaaaaattctggttcttattacaagagcatgatctaccagcaaagttggaaatatgaataacaatagagcccacttattccaacacacatacaacaaccataccataaaggatcacacgtatgtagacagagaccacatggcatagcataactaatcaaaaaacatggcatagcataaataatcaaaccccaaaaaataaatgatacaagattcatccatgaacaagacaagattcttagctatttataaatgcacaaggcttcctgatctctccttctgtccctgccttcacattaattcttcccattttctcgatggaggttgcaaactcagcaaagaaattttcaactgacccttcaagcaattggatgattagtgcctttgtactgagttaggcaataatgcaccatctgactca

SEQ ID NO: 222761 - DNA, 572 bp, Glycine max
catatatatgtttttgcttattattcaacatcatcaacaaatcacacacacacacaaacacagagtgatatatatctccggagagaagaagaaacaaagagattcatttttagttactattatttttattataaattaaataataataataacaatgccttcttctcttcagttggataggttcaatcctatcaccgacgccgtcaccaccgccaccgtcgccatcgccaactgcgttaactgcccgaagcagcctcaagcgccgccgtccactgcggcgcgtcgcctaatggtgccctctctctcttctggcaggggaatcgcggcctccgacacggtggcgctccaccactcgaacgtggttgggctcaaccagtgctgctccgtggtgacgcagcacatcaacgcccccgtcgcagccgtgtgggcggtggtgcggcggttctacaacccacaggggtacaagaacttcgtgaagagctgtcacgtcatcaccggccacggtattcgcgtgggcgccgtccgcgaggtgccggtggtgtcagtgctccccgcgagatgagcacggagcg

SEQ ID NO: 222762 - DNA, 521 bp, Glycine max
agcaaagcgaagcaagcattcactgaatgcgctctatctctctctttcgatctgggtactaaccctaacccgcttcgaaccgtggcttcctcaggctcgcagaacctctctcgaagaaaaccttcttcttcttcgtcttcgtcttctcaacaaacacccgggtcgacccggatcgtttaccgagaatctcggatcccatcggaatccgatttcccgatctggcagcagaactggttcatcgcattgctcttcgtcatggctctcggattcttcgccctcgccattttcctcttcctcactctcgactctgacatcgctccttctttcaccgcctacgcctccgcctccgccgctttcttcgaaggcgtctaggtgcaggttacttacggcacgggtctgaagcttatgcacgagaagaccaaatttcggctgcattctcatgacgtgccctacggttctggcagtggacaacaatcgggtactgggttcccaaatgtcgacgattcccatagttactggat

SEQ ID NO: 222763 - DNA, 602 bp, Glycine max
ctcaagttcaccaaaagcaaccacaacaagcacttctcttatttcctatcacaccctattacagattcacaagcgcagacacttcaaatggctctggaagctcttcaatcacccaaaacagccactccatcgtttagtccctttgaagaaaccaacctcagttacttggagacaccgtggaccaaaggaaagcgttctaagcgtagccgcatggagcagcaactgcaacactcttcatgcaccgaggaagagtacctcgctctctgtctcatcatgctcgctcacggcggcgccggcggtgtccccgcctccaagcctgctgtctccgacaacaattccgcgccgctacccgccgccaaactgagctacaaatgttcggtctgcaacaaagccttctcctcttaccaagcactcggtggacacaaggccagccaccggaagctcggcggcgagcaccactcgacctcctacgccgtgacaacgagttcggcgtcgaacggcggtgctaggacccacgagtgctccatctgccaaaagacgttcccaacaggacaggcctttgtgaggacacatacgttgtcactacgaaggcggtaacagcg

SEQ ID NO: 222764 - DNA, 568 bp, Glycine max
ccgccaaggtgttggaacaacttagtggccaaaccccagtgttttccaaagcaaggtacactgttcgttcctttgggattagaagaaatgagaagattgcatgctatgtcactgtcagaggtgacaaggcaatgcaacttttggagagtggtttgaaggttaaggaatatgaacttctcagaaggaatttcagtgatactggttgcttcggctttggtattcaggagcatatcgatttgggaatcaagtatgatccttcaactggtatttatggaatggatttctttgttgttctggagcgtcctggctatcgtgttggacgtcgccgcaggtgcaagtcccgggttggaattcagcaccgtgtcacaaaggaggatgctatgaagtggttccaggtgaaatatgagggagtgatccttaacaagtcccaggcaattgtttagttagattgagttcgctgtaggattgtgttatcagtttcgtcaactatagctcaatctttctgtgatagtatgttaattatgaggcagggtttgaatcaatggttatcatttcagtttcggcatga

SEQ ID NO: 222765 - DNA, 443 bp, Glycine max
ctggtggagctcgagccgatcgagccgtgccaagaaaatctggagctatggccctgagaccctggtacccaacatggggcttgatatgggcaagggactgcatattttgaatgaaatgaacagatgattgtggctgaatgaatcccagtgtgcatcaaaagaaggtgctttggcttaagaacacatgagagccatctgctatgaaatatgtgatgtagcgctgtacgctgatgctatgcacagaggaggtggccaattcattcctactgccatgagagcctactatgctttccagattactgacaaacccaggcttattgagtctgtctacctggaccaaatatagggtactgaacaagctcttggaggaatctacagcctatgttaaccagaagcgagggcacatgttggaggaaatgcagaggtcacgatccccactctac

SEQ ID NO: 222766 - DNA, 538 bp, Glycine max
  unsure (1)..(538): unsure at all n locations
aaagtttcttcctttctctgctctttgtcttctctgacacatttggggccttgttgagtgtgtttttgcaagagggtatggcgaaggacgttgaggttgctgagcgtggctccttctctgggaaggactaccaggaccctccaccagcaccactcattgatgctgaggagctcacaaagtggtccttttacagggctcttattgctgagttcattgccactttgctcttcctctacattactgtgctcacagttatagggtacaagcaccagacggatcatgctgatgcgtgtggtggggttggcattcttggcattgcatgggcctttggtggcatgatcttcatccttgtctactgcactgctgggatttcaggaggtcacattaacccagcagtgacatttgngctgtttttggctcgcaaggtgtctttgatccgagccatcatgtacatggtggctcagtgcttgggtgctatctgtggagttggnttagttaaagctttccaaaagtcttacttcacaagtatggtggtggg

SEQ ID NO: 222767 - DNA, 347 bp, Glycine max
ccgccgtggccaccgccgcgatggcggtggccgcgtccgacgccgacgacatcctgatccgtcaggtggtgccagatgttggcgaagccgaagaggaggacaacctgctgaacgccgagcaccacttcgcgagcttcaaggccaagttcgccaagacctacgccaccaaggaggagcacgatcatcgcttcggcgtcttcaagtccaacctccgcagagccaggctgcacgccaagctcgacccctccgccgtccacggcgtcaccaaattctccgatctaactccggccgagttccgccgccagttcctcggcctcaagccgctccgctttccggcacacgcccag

SEQ ID NO: 222768 - DNA, 464 bp, Glycine max
atcttgcaccatttttaggaccacacatttccttggatttcccacttgtatatgtcaagcatacatacagaaattacatactacataaacaacatgggcttagcagtttcctgatcctatacggagataattttaccagtaccaaatgataaagttcacaacataaatatttatacaaactccccttagtccagtatcacatcacaaccacaatcaggcatatctttgtatttaatggctggatggatatatagcagctacagttgagaccatggaatctactccacacacatttcgacctctgcagatcttgtaatatccattctttccccagctttcgccccatgaattcttaatgatccagtaagggttgttcttaaaacgaatgggagcatatgcaccttcaccataaccaactagaagaaccccatgatccaaatgcttcccacagatgtatgggcatg

SEQ ID NO: 222769 - DNA, 585 bp, Glycine max
  unsure (1)..(585): unsure at all n locations
cctgaagaagcaagagagcttgacaaggaggttagacagattgtaaaggagaaagaagaatctgttcgcaatcaagactttgagaaggtaatatgctttaatctataagatttagttcataaaattttatggacaccaaaccaaaccatgagacaatgttatattcaagtttaaaaaagagtgtagtggtttgtttgttgttcaattaaaacaattatatctgcaaattattttggctattagcgggctgatgatgattcatgagtttatgagtttctgtgtaggccggagagctaagagantaaagaaatggatcttaaggcgcagatatctgcacttatagaaaaaggcaaggagatgagtaaggcanaaagtgaggcaggagatgaaggtcccatggtcactgaagttgacatacaacatattgtctccttctggactggtattcctgtggggaaagtctcgactgatgaatctgatcgcctcctcaaagtggaagagactttacacacgcgagtcataggtcaggatgaagcagtgaaagccataagcagggccatccgtcgagccagggttgactgaaaa

SEQ ID NO: 222770 - DNA, 495 bp, Glycine max
acatcccacccaaacccagctgggttcattatgttatggggggctgaaaccaccaccattcagttaaaagcttgactgatgtccattgacaactaaaaacaaactatgggtatgtttttttaaccaattgaaggacgaagaaaaaaaaagaaggtccgcctcaactaactaagacattttttagtgaatctggggcaccactactaccgttgagcacaatcactttaccctcagaatcagaatcaactttacctgagtcaccctccttaatgtttttagcaagcatttttttagccatgctatcctccaaaagttgcattatggctttttttagaggcctaaccccataactaggattatatccttagaaaaccaccctctccctaaatctttttggcactgaaagatcaatctttttagctttcagcctctggaacacctccttaaacattatgtctgctatctccttaacctccaattttgtgagttgcctga

SEQ ID NO: 222771 - DNA, 390 bp, Glycine max
gaacacaaattgaatttgctgcgtttattactaataattatcggaaacacaacacctgggtacaactcacaaatgccactatgaatcaaaaagcaagcatacacgaccatattaatctatgaacaaatgagttaaagagatcactaaaaaaggactgaactttacacagttactcggcattgacatttcagagaataactttactgttaggaatagtccgggacttggacacaatctatatcaggacgtgctagatggacattaaacacatagaatacacctgatctgaattataaacattggatcatcatgaggacactgtcatacttttatttaatgaactgagacaggcatacatacgtataatttggattgacatcaagctagctt

SEQ ID NO: 222772 - DNA, 519 bp, Glycine max
attaccaaaaatcagagagcacatatcaactaacaggtgataaacccagaaccgagacaaaaaagtaatcgctaaattcaaaagcaacttgatcgaatacatcagaatgagtaaaatagacgactctgcaaaaatataaaattaaataaaacaccatctttcaaaaacaaaatcttcagagcttaaaagaatgcaaactatggttgcaggcaacgaagtttgtcactacatggatcacctctaagctcttcctttttatacttaatgaatcaaaaagcagggaaattccattaactgaatcacataaataggtttggcctggatgccttgtatgttgtcttcagcttcctagttggaggcctaatcttcttgaacaccaatgggaacttgattttagaattgtgaaactgcttggtgctctcccttttgcacagcttatctgggatggtggcagtcttaattatctggatgcatggatgcctcaccctatgacgagatgccatttcagtgtacatatgc

SEQ ID NO: 222773 - DNA, 367 bp, Glycine max
ataatagattgttattcccaaatttttattcaattgaaagcggaactgagatagttgtagacaacattttcactcaagatttgcaacactctggtgtttgtaggaccaacacatcttggtgtcttgtactgactaacagcggatcctagacctaggtaatgatcaagaatcttctggaatgatcctctccgaacaagttgtagttcgagggcaccaatgcagtacactttgcgcgaactggcgtatcctgcatcaacgaaagacttgtccaaacaggtaccgcattcatggagtacttcttggctcgcttctgcgctgatttcccaaaagaagacatagtgccctggttctttggataaatcaacct

SEQ ID NO: 222774 - DNA, 465 bp, Glycine max
aacgcaggaacactattttcttttatttggtacattgaaacttgaaagcatgatctctaatctgttagccttgcaaattattctaacacctcatcgcttagcatactactgacttcactctctgactttattttctttattcgcttacatcgacattttactcaaatcacaaagcctagatattaattaagcttacaaattagtcggcactttgttattttttattaattaaacaaattgtcgactcattctcttccaataaactagatggacattgccaactttttctcaaaaacacgattaagaattgcagccaatcgaactcctgcttgagctaaccgcatattgactattggcaaacgtgacaggaagtaatcatcatttagtacggatccttccgtggcatctttatacgcccatttacaggcatctatggtactttcagatgcgtatgtagctgggcat

SEQ ID NO: 222775 - DNA, 432 bp, Glycine max
tttttttttttttttttttttttttttttttctttcttttttcttttttttggtttgtgttttctttttttttttttttcttccttcttttttttttttttttctttgaggcaaaaaaacccactttttacgggggggagggggggggggcctttttctacgggggggtctaacaaaccggggataacccccaaacaacacccccccccccgccggggggccccaaaaccccccccaaaaactccccctttggacctccatccccccagaacgggcaggttcccccccccccccatctggggccgctccaaccccaggaaggccccccctggggggggggctaaaaacccccccgggagactacccccacgcaaagccgggacccccccaaaaaaggcccccgcccttccggggcgaagaccccccccgccc

SEQ ID NO: 222776 - DNA, 443 bp, Glycine max
gtttcacaatcactttttgcgcttctctcactcactcactcttcttcttcctcttcgtgtggttttctttctcgaactcgaacgaagatgcgtgagattcttcacatccagggagggcaatgcgggaaccagatcggagccaagttctgggaggtggtgtgcgcggagcacgggatcgattcaacggggaggtaccaaggggacaacgagttgcaactcgagcgagtcaacgtctactacaatgaagcgagttgcggaaggttcgtgcctagggcggtgctcatggatctggagccagggaccatggacagcgtcagatctggtccctacggtcagattttccggccagataacttcgtctttggacagtccggcgccggaaacaactgggccaaaggtcactacaccgaaggcgctgagttgattgactccgttctcgacgt

SEQ ID NO: 222777 - DNA, 497 bp, Glycine max
ctttttcactcggggccattgacttgagcatattcagtgcgtcgtaaagcaaaaagatactaatggctaaagtcatgtttggtttggtctgcagcttcctcgtattatgctgtttcacaatcaacactagcgccttctcaccttctggatggaccaatgcccatgccactttttatggaggtagcgatgcctcggggacaatgggaggagcttgtgggtatgggaatctgtattcgacagggtacggaactgatacagcggcattaactactgccatatttaacgatggagcttcatgtggggagtgttacaaaatcatatgcgattatcaaacagatcccagatggtgcttgaaaggagcatcagtaaccataactgccacaaacttctgccctcccaattttgctcttcccaacaacaacggagtatggtgcaacccacctctcaaacatttcgacatggctcaacccgcatgggaaaagattggtatctatcga

SEQ ID NO: 222778 - DNA, 569 bp, Glycine max
  unsure (1)..(569): unsure at all n locations
gatgcatttatatttcttagaggtgagaatggggaacttcgtgttggtgtccgacgagcaatgagacagcagggtaatgttccatcctcagctatctccagccacagcatgcatctcggcgtccttgcaactgcttggcatgccatctcgaccgggaccatcttcactgtttattacaagcctaggaccagacctgctgaatttattgttccgtatgatcaatatatggagtctctcaaaaataattatagcatcgggatgcggttcaaaatgaggtttgaaggtgaagaggctccagagcagaggtttactggtaccattgttggaatagaagattctgatcccaaaaggtggagagattccaaatggagatgcctcaaggtgagatgggatgaaacattcaacacccctcggtcagagagagtttccccttggaaaatagagcctgctcttgctcctccggctctaaatcctttttcaatgcccaggcctaaaaggcctccgnctaatgcagtttcttcatccccagattcttctgttcttactcgagaagcatcatctaaagtgag

SEQ ID NO: 222779 - DNA, 547 bp, Glycine max
gttcttcaattcattctagttctggattccgactagccgcgttgactcggttccgattttcattctcgcggatctaatattaaggaatagcttaagggcacattacaatgaaggcattggttctggttggggggattggaacatggctgaggccactgacactcagtttccctaagcctcttgctgattttgctaacaagcctatgattttgcatcagatagaagcccttaaggccattggagtgactgaggtagtgctagccatcaattaccaaccagaggttatgttgaatttcttgaaggattttgaatcaaagctcggcatcaagatcacatgttgtcaggaaactgaaccactgggaacagcaggtcccctggctcttgctagggataagctgatagatgattctggcgaaccctattttgttctcaacagtgatgttatcagtgagtatccacttaaagaaatgattgaattccatataagccatggaggagaggctatcataatggaaacaaaggttgatgagccatcaaagtacggcgt

SEQ ID NO: 222780 - DNA, 253 bp, Glycine max
gatccctttatcttttttataggacagaatggtgaactctctgttggcgtccgaggagcattgcgacagcggggtaatgttgcatcctcacatctctccagccacagcgtgcgtactggcgtccctgcccctgcttggcatgccatctggaccggcaccatctacactgtctataacaagcctaggaccagccctgctgaatttattgaaccctacgatcaatgaacggcgtctactcgaaatagtaatagct

SEQ ID NO: 222781 - DNA, 586 bp, Glycine max
  unsure (1)..(586): unsure at all n locations
ccccttcaccccttccttttttgcgttcattctgttttcatagtgacgaacttctgaagaaatggcaaatcatcctttgacacactctcactctttccgcgagaggtttgatgaaactctcactggtcacaagaacgaaattttggcccttctgtcaaggcttgaagccaagggcaagggaatcctgcaacatcaccaagtggttgcagagtttgaagaaatccctgaggagagcagaaagaaactccaagatggtgtctttggagaagttttgagatccacacaggaagccatagtgctgccaccatttgtagctcttgctgttcgaccaaggcctggtgtatgggaatatctgcgtgtgaatgtgcacatgcttgttgttgatgagcttcgtcctgctgagtatctgcgtttcaaggaggagcttgttgagggaagttcaaacggcaactttgtgcttgagttggactntgaaccgtttaatgcatccttccctcgcccaactctgaacaagtccattggaaatggcgtcgagttcctcaaccgccacctttcggccaagctctttcatgacaaggagagcatg

SEQ ID NO: 222782 - DNA, 545 bp, Glycine max
  unsure (1)..(545): unsure at all n locations
aagcctcccagtggaaagtttcctatcatcaaaatctgtgttcttatattcattattatcttgtatgcagagagtttcaagttcctttcttccggttccattttcaatttcaaaccatgtcctacaaatagtaccaagcctaaatccaacgataacaagatacaagaggtggttcctaatgattcactatggtttcatgatggattcgtttatgaccctgaggagtgcgattttacaaatggaaaatgggtgtttaacagttcaataaagcctttgtattcagacacaacttgtccatacataagtagaccttattcttgtgtcaacaatgggagggtagattctgactaccgttattgggaatggcagccagaagattgcaccttgcccaagtttaatccaaagctagctcttaaaaagcttcaaggaaagaggctgctattcgtaggggattcactgcaaaaaagccaatgggaatctttngtgtgtatgggtgaatggatcataccttgaaagcagaaatctatganacgagggactcattc

SEQ ID NO: 222783 - DNA, 566 bp, Glycine max
gtgaactgcaaagggcttctccagcctagtttgttctcagatcttcttcttccatggaccagtacgagaaggtggagaagataggcgagggaacatacggcgtcgtttacaaggctcgcgaccgcgccaccaatgagacaatcgctctgaagaagattcgcctcgagcaggaggacgaaggcgttcccagcaccgccattcgcgagatttctcttctcaaagagatgcagcataggaacattgttaggttgcaggatgtagtgcacagtgagaagcgattgtatctggtttttgagtatctggacttggatctaaaaaaacacatggattcatctccagagtttgtgaaagatccgcggcaagtaaagatgttcctttatcaaattctctgtggcattgcttactgtcattcacatagagttcttcatcgagacttgaaaccacagaatttgttgatagatcgccgtactaattcactgaagcttgcagattttggattggctagggcatttggcattcctgtcaggacctttacacatgaggtggtgacattatggtacagagct

SEQ ID NO: 222784 - DNA, 593 bp, Glycine max
  unsure (1)..(593): unsure at all n locations
tgcgactaagagttgctgcttcttccgccactcagcacttcgctccctctgtgcttcaccaaccatggccgaaatcgaagctaccgttccagatccctctcaaatcgacgtcaaacttttcaaccgctggagcttcgacgacgttgaggttactgatatgtctctggctgattacattggagtgtccccgtcaaagcatgctacatatgttcctcacactgctggtaggtactcagtgaagaggttcaggaaggcgcagtgccccattgttgagagactcaccaactctctcatgatgcacggaaggaacaatggaaagaagctcatggctgtcaggattatcaagcatgcaatggaaattattcacttgctcactgacctgaacccaattcaggtcattgttgatgccgtcataatagtggtcctcgtgaagatgcaactagaattggttctgctgagtggtgaggagacangcccgtgatatctcaccccttagacgtgttaatcaggccatctatcttctaacaacaggtgctcgggaagctgctttcagaaacatcaaagacattgctgaatgcttggctgatgaacta

SEQ ID NO: 222785 - DNA, 517 bp, Glycine max
catatagttaattcaaacacaccaaaaccttccttcttagtagaaaaagtacgcttaaacactaggggtgggatttaaccatatcacattagaatacatacatctactacttttctacaaattcaactattaattttctcccactataaatcattcttgaataacttctaactccaaaggtcgtcttgtaactcttgtgtgtccactagtaatagttgaagtggttgagtggaatggattaggaggcacatttaactggctttcccctccagtctctagcatttgtatgacagattttatacatggacgattcaccggctgccattgaatgcaccaaagtccaacaattgctaatttctttgcaattttaatatcaccttcgtcctcaacatggatatgaacatctccatcaacaggttatggatccaatctggatacaaaacatggaaatcttgagcagaagacatgtctacattctttcttcctccaaccatttccaacaataacattccataac

SEQ ID NO: 222786 - DNA, 549 bp, Glycine max
cttctgggttttctccctttggtcggttgagctaacagtggcattatcatcatcacaattaggttcaaaaaccaccactctgtgtgttttttttccttgtgtttctctcccatgtgtctccttctttgctgagaattgttgtggcagacaagggagtagcttcttctttctaagttgacatatgcacatggcttctcttggggatataggacttgcagcagcaataaacatccttagtgcatttgccttcttactggcttttgccatacttcgaattcaacctataaacgatagggtgtattttccaaaatggtatttgaagggtttaaggagcagtccattgcaagcagggatatttgtgagcaagtttgtcaatttggacttcaagtcatatataagggttcttgagctggatgcctgcagcattgcaaatgccagaacctgaactaattgaccatgcaggcttggactctgctgtgtacttgaggatctacttacttgggctgaaaatatttgtcccaattgcagtcctagcattttctggtatgg

SEQ ID NO: 222787 - DNA, 546 bp, Glycine max
gacctgcatacttctgttatatacttcattgaaagattatctagattctgatttatatacagaaaaaaagagagtagagtttgggtatatcatgcagcagcgccaccaatagtgaacttcaaactatctattgctctagttttatgctcataagaagtggcattcaagatgataatgaaccgctatgtttgctaggcaatggtgtgtttttccgggactggcgctttgtttgtacaagtacaggttcttgctcctcccagttttcgctcattacatcactgtcactgtcatcatcacccttaaacaccggatggatatatgcattctgaaggaactctttcaaattgaagtttggctctcttgcgcgctccaatgtgtccttcatcattgcttcctgtaatggatgcttaacgaaagcaggttcatatcgtcccttgcaatacagatggaatgatattgtcagaattgggagagtaatgagcaatggagttgagttagcagcttcttttgtactcaataccccattaacagcagctgtgagatcac

SEQ ID NO: 222788 - DNA, 565 bp, Glycine max
gagggagtagcggcattaaaaatgcagatcttcgtgaaaactctgacagggaagactataaccctcgaggtcgagagcagcgacaccatcgacaatgtcaaggccaagattcaagacaaggaaggcattcctccggatcagcagcgtttgattttcgccggatagcagcttgaagatggaaggaccctggccgattacaacatccagaaggaatcaacccttcatctcgtcctcaggcttcgtggtggcatcattgagccttccctcatggctttggctcgcaaatacaaccaggacaagatgatttgccgcaagtgctatgcccgtctgcatcctagggctgtgaactgccgcaagaaaaagtgcggtcatagtaaccagttgaggcctaagaagaagatcaagtgaattctgtgtgatattgttggtctcatccttcgcgttgttggatttggaacagggactggtttgatatttatagttctggctttgattaatgttaattgttttgagacaatagttttgaagtagccaaatatattgttatgacgacattttgatctct

SEQ ID NO: 222789 - DNA, 446 bp, Glycine max
agtaaaattgtatactctctataatttgagattattacatatttctagcataaatcttgagagaacattttttttgcttcatcatataaaatatatatgttctgacagagcacgtacaagttcacaaaaaaaagggggaagttgataaaaaaatacaggaaaaaaaaatcagaattgagtcagagggaaggaaacatagagaaaattttagcgatcagatcataagaagccagcaggagtgcaaaagtcccttgccaagagtgttggaaccccttttagttaagcaggtaccttgtcccccttgagtggcttcaccacttaccatgtgaagtcagggtcatctctgccaaagtgtccatatgcagcaatcttcaagaacctgccctttccacccctcttgagatcaaggttgagggcgaacatgcgcggcctgaagtctaaactct

SEQ ID NO: 222790 - DNA, 473 bp, Glycine max
  unsure (1)..(473): unsure at all n locations
cagtgaattaacttgctactgttgtatttgaaaagagttaacttgtagttcaacggatgaaggattataattatgcataccaagggtacaagcgtagtttgatataatccagctaactcatactcagaatgaaccagttaaaaacttatcaaagtataagaaaagaactggaccattttaaaaaacaactctcctcaccttctgcaaataaatgatcactccaacaagagaataaaatgaaaggataacaaaagctagaatcaaagggttacaatctgcaatgcattgcttccagacaaatcgtgatgatagtagtctttcccttcaataaccctatctatcgaaacagtttagaagcactttctgtgcacaattgatggaccagattcgncatattctgcctttgcaatccacatctgctggaaggtgctaagagatgccaagatagaaccaccgatccagacactgtattt

SEQ ID NO: 222791 - DNA, 532 bp, Glycine max
atccacagcaaaagaagaagaaggaagaaaccagcgtcactcatctcatcgtggttctgcaaagtcttcttttcttttcggtgaattaataaagggtttttgcgtggtgattgtgttgtgttgtgctgtgctgtgtatctgaatccgcgcaattaggttttgtgattaattcattgattaatcatagagagaagggggaataatgggagatcaagtggagggaacggtgcagaacgttctggaacaggagactctgaagtgggtcttcgttggtggcaaaggcggcgtcggcaaaacgacatgcagttcaatcctatccattcttctcgccaccgttcgctcctccgtcctcatcatctgcaccgaccccgcccacaacctcagcgacgccttccagcagcgtttcaccaaaacccccaccctcgtcaatggcttctccaatctctacgccatggaggtggatcctacttgtgagcatgaagacatgggcggcgctgatgggatggacaccttgttctctgagctcgccggc

SEQ ID NO: 222792 - DNA, 465 bp, Glycine max
cacgaaccaaacagaatttataaaaagaccagaacaaacaacagtttttcaaaggccactattgaccatggaaacactttaacaagagtaaacctttcaggaacattaaaaaaaaaaacccaaagatcttcggaacttccacatgcttaaacttcaagacacctacagaacattttcagacttttaaaacccaccacgaagacgcaacacagggggaagagtagactctttctgaatgttgtagtcagaaagagtctttccatcctccaattggttcccagcaaatatcaacctctgctggtctggggggataccctacttgtcctggatttttgctttgacattatcgaatgtgtctgacctttcaacttccaaggtaatagtcttgcctgtcaaagtcttcacaaagatttggatacctccccttaaacgaaggacaaggcgaagggcggactccttttggat

SEQ ID NO: 222793 - DNA, 525 bp, Glycine max
  unsure (1)..(525): unsure at all n locations
attttcttttctttctctctcactctccaacttgcacccaacccaataataacaataacaaactcaacctcgccaggatccaacacaccgcactccttacacagaccaagattctcccccagtggtgcagttgaagggccgtgaggatgttagagaaagtggaggagtttaacatggataaagttatacaagagtttgaattattgacaagggatgcagaaagagttcagagggaaacactcaagaggattttggaggataacgcatcagcagagtacttgcagagtttgggtctcaatggaagaactgaccctgagagtttcaaggcctgtgttccaatggtcacccacaaagaattggaaccttatatctacagaattattgatggtgatgcttctcctattctcactggaaaacccatcacaaccatgntcttaagttctggcactacccaggggaagaccaagtatgtaccttggaatgatgaattgtatgaaaccacaatgcagatataccagacctctt

SEQ ID NO: 222794 - DNA, 541 bp, Glycine max
tttcatccttcgatcatacacttagttgcttccaattaagatggttctgctagagaagctctgggatgatgttgtggctggccctcaacctgagcgtggccttggcaagctcagaaaactcaccacctcaaactagtacgtaccccttcttatatatatatatatagattaattcctaattaactataatacacatatagctatttctaattaatgtttttagaattttgattaagaaattaaaaagataatttttttttttattggaatggacaaaatttggatgtttatgaattttttcttttaattttttatcaatatctaaggagactcattagtcattagatagatcctaacatatctctgtagctagaaagagagagagagagagagctagctaaaactaaatatttgtaattaattaatgtttgatccttcatgtagttgatgaaggagaaagtagcaagctgcagaagacgttgtcgatgccgtcgacaccaacaaccccgatgactccgacgactccaacgacaccgggatc

SEQ ID NO: 222795 - DNA, 573 bp, Glycine max
gataatatgggcttagtctgcagcataagtcgtcgttttcgtgaagctgatgctgaagaaaatgctcaggatgcagaaattgaaagaagaatcgagttagaaacaaaggctgaaaagcatattcagaaacttttactactaggtgctggagagtctgggaagtctacaatatttaagcagataaaacttttgtttcaaactggctttgatgaggctgagctaaaaagctacataccagtcgttcatgctaatgtgtatcagacaataaaagtatgcaatacttgaaagggtactgcatgatgggtcgaaagagttggcgcagaatgactttgattcttcaaagtatgtaatatctaatgaaaaccaggacattggtgaaaagctctcataaattggaggcaggctggattacccgcgtcttaccaaagagcttgcacaggaaatagagactctgtgggaggatgctgcaattcaagaaacatatgcccgtggtaatgaactccaagttccagattgtgcccattatttcatggaaaatctggagaggctgtctgatgcaaattatgttccaac

SEQ ID NO: 222796 - DNA, 426 bp, Glycine max
ttctggcctctgtgccttcttcacagttgcctcacgagcttgtttcgttagtttcataagatgccttggggaaaagcaatttcttcatcagctgctaagtcatccaagcctgaggagccagttgaatctgatgagaaggttgattttgaggaggcaaatgatccagaggaagcaatggaagaggaaattgaatatgaagaagtagaagaagaagaggaagtggaagagatagaagaggaagtggaagaggtggaagaagaggaggacggagatgtctgtagaagatgaaggggcagtggcggtggagactcgaagtcctaaccaagcttttggagcctttcttttgatagagtcctttgtcttttttcaattgttaatttcatgaaactatgtagatatgggactgaaatggtatttctgctgggt

SEQ ID NO: 222797 - DNA, 544 bp, Glycine max
  unsure (1)..(544): unsure at all n locations
gaacaagacaagtgaaggagcggtttatcgtactgggctgggcagcattcgtttctactcctcattgaaaagataacatggctttcacaggttctggttccgggcagccacaattcatttccagcactggcaaccgaagcttttccaatgcgccactcattgagaactccgatactaatcaaattgttgtgcctgataggagaagctggaaaaatttatttgcatacatggggcctgggtttcttgtttccattgcatatatagatccaggaaacttcgagacggatcttcagtctggggcacaatataaatatgagttactttggatcatattgttggcatcatgtgctgctcttgtaattcaatcaatggcagccaatcttggggtggtcactggaaaacacttagcagnagcactgtagatctgaatatctccgggtgcccaacttcatactttggattattgctgaaattgccatagtggcttgtgacattcttgaagtaattgggacagcctttgcattgaacatgctcttcacatacc

SEQ ID NO: 222798 - DNA, 526 bp, Glycine max
ctttcaagaagcatctgagtgtttactattttgtactatatttatatatagtcactcaagcttctaggatttctgcctgctgcatcaaaatgggaagcaacttgaggtttttgagtctttgcctcttggcattgattgcatcaactcatgctcaacttcagcttggtttttatgctaacagttgcccaaaagcagagcaaattgttttgaaatttgttcatgaccatatccacaatgctccatcactagcagctgcattaataagaatgcactttcatgactgttttgtaaggggatgtgatgcatcagtccttctgaactcaacaaccaatcaggctgagaagaatgctcctccaaatctcacagtaagaggctttgacttcattgacagaataaagagccttgttgaagctgaatgccctggtgtggtctcttgtgctgatatcctcactttggctgccagagacactattgtagccacaggtggacctttttggaaagctcaactggtcgaagggatggggtc

SEQ ID NO: 222799 - DNA, 495 bp, Glycine max
gcatatattgacgattgatctggttagttatagattgcattgataactaggaaatattttccacataacaaactttggagaacaagattggtagaattgtgaattgtgtgtggtatcatcatcttgctaagaatgatctctacattcgatatgacaatcattcatgcaaatcaacgttggagtaggtttgcattgattattgcaatctgcctggcctcaaatcacaatcatgctgatttttgctgaatctttagtatctcaatacaatgtagccagctgcttctcatattcttaatcaaggcagctgctacctaagaggtgtatccactttaagacacactaatcatcggtgccgaagtatcgatcaccaaattcccccaatccagggataacacgatactcttcatttatttcaatgtcaatctcagatgtgacaatcttcaatgatggaaaccttttgcacacgcaatggattccctcaggagcagaaatgag

SEQ ID NO: 222800 - DNA, 568 bp, Glycine max
atttgaaaagcaaagctaagaagaaatgagaaaataaaaaggatagcatatcatatgatatcagaagtgagtgtctcataatggaagcataacagcgaagtgatccaaagaagaagaaggatgcaggagaactactcataccaatcgtatccagattccggcgagtcctcaccacgatccagagagatagacttcgacaaccctcctccatgggacgaccaaaactacaaagccaagttcatgtgcagctacggcggcaagatcctccctcgctcccacgacaaccagctctcctacgtcgccggcgagaccaaaattctcgccgtcgaccgctccatcaagttctccgccatgctcgccaaactctccgccctctgcgacgccccagacaacaacaacctcacctttaagtaccagcttcccggcgaagacctcgacgccctcatctccgtcaccaacgacgacgacctcgatcacatgatgcacgaatacgatcgcctctatcgcgcttccgctagaccctcccgcatgcgactattcctctttccctccgatactcttccttccc

SEQ ID NO: 222801 - DNA, 554 bp, Glycine max
  unsure (1)..(554): unsure at all n locations
caacatatgaaggtgaagagggttgagttcagagttgaaacttgagagagtgtcgttgattccaatttacgacggaggagtgaggaatcacaatctccaccggcgaaacctgtaactgttggcgacgctcaacactcgcactacgccgatagtgatggagagtgcttttgcaagcgcctctgcgattactgaccagaggcagaagatagagcagtataagcaaatacttgctgctgtcatttcatctaatgacattgttcaggctaggaaattcatagatcacatgttatcagatgatgttccattagtagtgtctcggcagcttttgcagacttttgctcaagagttgggaagattggagcctgagatacagaaagagattgctcattacgcccttgcccaaattcagcgtcgtgttgtgtcattcgaagagcaggttttagttattagagagaaacttgctgagctttatgaatctgagaagcaatggtctaaagcagctcanatgctcagtggtattgacctggattcangaatgagggtgatagatgatg

SEQ ID NO: 222802 - DNA, 535 bp, Glycine max
aaaccaaatttggaatctaatatatgaggaaactaatgggatcgttggtatagtgaagttcacaaacaatcaacaaaagaaaaagaaaagatgatttactaagactgggtaagcaaagaaattgtcaaccatccacgttaaacaggaaccggaaaacccttcttagccatgctatccaaaacatcgttgagggcttgacataggcccacaatctgctggtcccatcgctgcaactcttcagtgtcatcatcaaaatgtatgacagcctcaacctgatcgatagagcccctcatcctatcctcataaatgattcttgatgctatcttctcagccttgtgaggtgggatccccaacagtgtgcctagctcattaaagctgatattagtatagagtttgctagcactcaaaagattatgctcaatcatagcacggtccagcacagtgaaattgtctggaagaagagcttgctgatgtggtttcaattcttctgcaaaagcatcaatttctggttttctgagaattctctccaatacac

SEQ ID NO: 222803 - DNA, 544 bp, Glycine max
aactaaaaatgcataatttcattcattaaattcttccatattaccaatatgacagcattttgaaatcaaatcggcattacaaaaacattaggtgaaagaaattaaaagttaacttctaggaaccacacctaatgctgaccacaaaccatgcggcactatattttgatgttgaaataatctgggtcaaagtggtgcaaccgtacataaccatcttcacctgcacttgaaaaactttttccatcagggttaaaagccaatgcattaattggtccaaaatgcccttttacacccccaatttcttcttgaagaatcttgtcatagaatttggcttcaaatttgccagcacgatgatcagtagtagtaacagctgatgcatgctgaccacctccaagtaccacatgatcaagtagaggtgacattgcaactgcattgaccggccgttctgtgacatatgtcttgataagaggcaatgttctagtatcccaaagcctatcagacttgttaagggagccagtaggaaatgcgaaccttccgcagacttagc

SEQ ID NO: 222804 - DNA, 367 bp, Glycine max
tggtgtatgttcctttacgagcccgacgcgaatgacgcgtgcgtcagcagcgaactaggctggaggcgccacattctgatttaattatgcttaggttttgtgaaaactctgacagggacgaatataacccttgatgacgacaccagccacaccattttcttagccacgaccctcatgtaacagaaagcacggattcttctggatcagcagagtttgattttcgccggatagcagcttgaagatggaaggaccctggcccattacaacatcctgaaggaatcaactctgcatctcgaacttacgcttaccggaggcataattgaaccttacctcatggatttggctcgcaccttccatcttgcactga

SEQ ID NO: 222805 - DNA, 434 bp, Glycine max
cagtacaatagtttattttcaagcaatgagattgtaaaaccagaaccacaaacgaaacaccgttgagattctcaacgagttcactcctgatcaagcagagatatcagagactaaaagttggcaaagttcttttctttcaaagtttccactgtctctctaagactcacttgcaaaggaataaattcaatccccaaggtctttgccttttctttggaaacctgaaatgttggtacataaggcttatcgtctgcagacttttctggaatttgatatgtagggtactgatcacgtaaaatcctgtcgagatgagagtattgtgccactctctcaactaaacaatatcttccactagctgaagcaatctcatatgcctgaatatgggcgtttgcaacatctttcacattgaaccatccatatggatcattgaaaaagtt

SEQ ID NO: 222806 - DNA, 579 bp, Glycine max
  unsure (1)..(579): unsure at all n locations
ggcggagatggttgccatgaggtttcaccagtaccaggtggtgggaagggctcttcctaccgaatccgatgagcatcctaagatctaccgcatgaaactctgggccaccaacgaggtccgtgccaaatccaagttctggtattttttgagaaaattgaagaaggttaagaaaagcaatggacaagtgctagccatcaatgagatttttgagaagaatcctaccaagattaagaattatggaatttggctgcgctatcagagccgcactggttatcacaatatgtacaaggaataccgagatacaactctgaatggtgcagttgagcatatgtacactgaaatggcatctcgtcatagggtgaggcatccatgcatccagataattaagactgccaccatcccagctaagctgtgcaaaagggagagcaccaagcagtttcacaattctaaagtcaagttcttattggtgttcaagaagattaggcctccaactaggaagctgaagacaacatacaaggcatccaggccaaacctatttatgtgattcagntaatggaatttccctgctttttgattcat

SEQ ID NO: 222807 - DNA, 553 bp, Glycine max
tatcactctccaccaccaccatctactactcctcctcctccctactactaccactctccaccaccaccattcccatcaccgccgcctccatattattacaaatcccctccagcctgcttttcattctccaacacctccttactactatcaaagtcctgctacaccatgtcccacttctcatcctccctattactacaaatcccctccaccaccaacgtcatatcctccacctacttaccactacgtgagccctgcaccaccttatccatctcctcccacaccataccattgcacatgaccacctcctccttccccagctcctgctcccaaggacatttacagatcacctccacctccggttgacatctatgcttccccacctccacctatatacaagtaagctcaatattgtgaaagcaccattcatgatgaatcatgttctagttttcatcgaggaataaaggcaagctctattttgagccaagtgaaacatctatcttcctgtctaagttctctgaataaaagtatgaatgtgtcatctctatgctacaat

SEQ ID NO: 222808 - DNA, 575 bp, Glycine max
gtcattactcaattcatcatcagcttgtggccatagtctcattatttatccttttgcttccaaatatccatgggtggggagacgatgggcatgtcattgtttgcaagattgcacaggctcgcctcagtgaagcagctgcagaggctgtgaagaaactgctgccaatatccgcaggaaatgatttgtccacaaagtgttcttgggcagatcatgttcatcatatctatccttgggcctctgctttgcactacgcaaataccccagaggccctctgcagttacaaaaacagcagggattgtgtagattacaaaaaaggaattaaggggcgatgtgttgtggctgcgattaacaattacacaacgcagctccttgaatatggcagtgacactaaatctagatataacctcacgcaatctctattcttcctttcacattttatgggggacatccatcagcctctacattgtggctttctctcagacaatggaggcaatgcaattactgttcgctggtacaaaaggaagcaaaatctccaccatatttgggatagtaccatacttctgacagaagtcgac

SEQ ID NO: 222809 - DNA, 567 bp, Glycine max
  unsure (1)..(567): unsure at all n locations
aaaaactcccgttttctctctctgtttttccatggccatctgatcaaacttttcttgattctctctctcagtttttgctattctgagtgatgggtatgccctgccgctgttcccacacctcccacatcactgaaatcatcatcaccagcttcttccgccacaagtcttaaattacaacaatttccctcaattattcatcaaccaaccaccttaatagccttttccaatggttccttaaagatccaacttggtcggagtaaacatggcggctagtggaagttccttttccaacatcactagcttccttcgcaaccaacaaccctcttcccaacctctcgattcttctctcttcctctctgctccttcaatttttgtttcaggttcgagatccatggtgagttttaacgaaaaggagggaagnggtgtaacggctccttcttccgcgcgtttgacatggacgacaatggggacgagtgcatggatgagtactttcataaacccgagaagaagcgtcgtctctccatgaaccaggttcagtttctggagaagagtttcgaggaggagaac

SEQ ID NO: 222810 - DNA, 583 bp, Glycine max
  unsure (1)..(583): unsure at all n locations
ctctctctcaactcccaattactttgttgcatttcacacaccaacttcccatagaagagagaagagagaagagactcttccttccatcctgcaactcaaatcatcatgcaagactccagctcaatgaagatctcccctctggatctcatgtccgccatcttcaagggcaagctcgacccctccaacgtctcctcctccaccaacgccgccgccgccgccgccttcctcctcgagaaccgcgacttcctcatgctcctcaccacctccgtcgccgtcctcatcggctgcgtcgtcgtcttcatctggcgcagatcctcctcccccaaggccaagcctctcgagcctcctaacgcgtcgtcgagaagcttcccgaagtcgaagtcgacgacggcaccaagaaggtcaccatcctcttcggcactcaaaccggcaccgccgaaggcttcgccaaggccacagctgaagaggccaaagcgcgatacgagaaggccacgtncagagtcgtcgatttggatgattatgctgccgatgacgatgaatacgnaggaaggttcaaaaaagagactcacgttcttttctttta

SEQ ID NO: 222811 - DNA, 524 bp, Glycine max
actacatcattggatcatttatatgaacattaacattaacatatatcatatatacatatcacatagattcaaccattgccgtccgaaaaaccctattgatctatacacatccatgcatatcaattccaaacacgggcttgaatctaagtccatgacacccgaatttgaaacaaaaaaaccggaagacacaacccattttaactttaaaaaaagaagaagaaagaaaaagaaatagagaagaaataatgatatcgttaaacacttaacagttaacagtgttgtgcagtgttttcacagtttttggttctgttctcagcaatctgagccagcgactgcaagttacaacgtacgatcgtgtcgacgaacacgcatgtttcctccttagtgttaccctgtggtgcgtcaacgacgtatgactcgatgacaagtgtcccgttcccgttggcgtggagcgtcgtcaccgaccggtagttcctgaagcggtggtcgccgccgacgacgcttgaactgatgacatggcgctc

SEQ ID NO: 222812 - DNA, 530 bp, Glycine max
gaaggaggagaaggatgtctcacaggaagttcgagcacccaaggcacggttcactgggatttcttcccaggaagcgtgctgctcgtcacaggggaaaagtgaaggcattccccaaggatgacccatccaaggcacccaagctcactgcattcttgggttacaaggccggtatgactcacattgttagagaggtcgagaagccaggatcaaagcttcacaagaaggaaacttgtgagcctgttacaattattgagacccctccaatggttattgttggcgttgtgggttatgtgaaaactccacgtggtctccgaacattgaacactgtctgggctcagcatttgagtgaggaatcgaaacgtatgttctacaagaactggtgcaagtccaagaagaaggccttcaccaagtactctaagcagtatgaaactgaggagggaaagaaaaacattgaggcgcagctggagaaactgaagaagtatgctactgtggttcgtggtttggctcacactcagatcaggaaaatgaaa

SEQ ID NO: 222813 - DNA, 495 bp, Glycine max
agataaactcataaacaaaatttgaaataaacgatcagtcttccctgaaacaaaagtttggccaacttaaggagaaaaaaaactcactacccgagaatccataatatcaaaacagaaacactacaaagtttataagtgatggcaaccaaatagaattccagcatttccatccaattaacataattatgctttgaggcgtccaaagaacttctgcttctcctgtgtggtctggaagcgaccatgcccaaactttgaagaggtatcgataaacttgagtttgatctcctcaagagcaacacgagaagtctgcttaaggagggattgacgcaatgtaatgaccctcttcttgggaccaacacagcatcccttgaccatgataaaatcatccttaacaacaccatagtgagggaaaccacccattggggtaatgtctttctcggccctatcaaactcagtaagagcagagtgagattcatctccagctttgccaagctt

SEQ ID NO: 222814 - DNA, 434 bp, Glycine max
gacccgaatgatgattcatacattcaattgaattgtggaccaggtgagagcgaaagcatgcacaaaatgataaggaaatgaacttaaatgataacgtctggatcatcagccactgcagccaatgatcatcggacaccgtgtcaacaggagagattacacccatgcaggccaaccatacacagaggaagattccggagagactcaataatacacgtttttcctctccattatcccatggttgcactattgttatcagtgctgggaagctgctcgtgggtggggtttatgataacaagctcttaggtaagcccaaaattctcatctactatgggaggggcggcccagtagatccattggttggcacaagtccagctcacgtcaggagggcctagtgtcacagcacggttcatggttgttccggagaaggccccacc

SEQ ID NO: 222815 - DNA, 486 bp, Glycine max
ggctagaatacaccggcacacgctgctggccctttaccttgtgcttcctgcgttcctgtgagagcccacgttctataacgcgcttctgcttatgaggctagatttctagacttcagcgttttccctgctggcatcatatttggggctggatcctcaaccttccagtttgttattaaacatgaggccggttctgatgaaaggccactagaggccactgacgttcctcaagttccacagggacggcgagatggtgccaatggggatgtaggagcagaccaatatcaccggtacagggaacatgttgagaccgtcaaggatcctacctgtggactcatccggatcgttaggtgctgggacgtctaaagagattcggggcgggttataacggggagtgcggatcaaaccgccaagctatggcacgtgcagactcggcagcagatgggcaccttcaatttcgatttcccggcgaggtccgtggatttagcg

SEQ ID NO: 222816 - DNA, 537 bp, Glycine max
gaatcatcacgcgaagattataattgttgaaactgaaactgaatcttaattctgagataacattcaaaatcaaaccgatacatgaaggatcagctataacatattaatttatagctgtgctggtgcaggacacttagtagtgtgccatgaaattattctaacagaaaacaacaacctaatgacttatacgtggaattagctacaactacaaacattgagcttaacctaaccgtttttaggtgctgcatagctttcaaacggtgggtctaacactagtttcttttcagaaagttcttgtaccattgagcagaaagcttagggtacctttttaagccatctttgtaatctacaaagtttaatccaaaccgaacagtgaaccctgcaaaccattcattacagtccaaaaatgaccatgcaaaaaatcccttaacgtttgcgccagccttaattgctgatcgaagataaaagaaatgacgataataataatcaattcgataaatatccatgagagcttttttcacggaaagggttggatca

SEQ ID NO: 222817 - DNA, 495 bp, Glycine max
  unsure (1)..(495): unsure at all n locations
gcgagataaacataagaaatcaacttttgacatggacaattctgaatacatgactgaggatcgcaaacaacaggtcctaaaccaccaaatagaagcataatgttgatcacttcacagtttgaataatggagaactatatcacacagcaggagcaaaaacaaaaaagaacgaacaataatggttcagggtaatgtaacgaagcatatacccttttaactcggaaacaattacattgataacaaaaaaaagccttcgattatcaatagtcctctccttcctcatcatcttccgctccttcagctccaacctcctcatagtccttctcaagagcagcaaggtcctcacgagcctcagaaaactccccttcttccataccctcaccaacataccagtgaacaaaagccctcttggcatacatcagatcaaacttgtggtcaatgcgagagaacacctcagcactgcggtgttgntgctgatcatgcatacagcacgctg

SEQ ID NO: 222818 - DNA, 536 bp, Glycine max
ctctccctcaaattcgcatctcattctgaatctcgcgccgtttcgctctcccactcgccagtgatttgattttgattttgattatatgcgagagtgttgcggaattttcgagaagtttgaatgttcgttcatgcatgagtggttctgaaagtttccttgggaattttcgattgcgatattgacactgtgatggcctcagccgtcgtgaatttcttgaacgcgacgttggattggatgacgttcgcgtcggatggtccttctgcgcgagctgtagttttcggagtccatatcggtggacatttgtttatcgaagtgtttttgctggtggtcatacttttcttgctttcacagaaaagctacaagcctgctaaaaggcctttaacaaataaggaaattgatgagttatgtgacgaatgggttccagaaccccttattccttctgttaataaagagttgcagtatgaaccaccagtgctggagagtgctgctgggccacataccataattaatggcaaagaagttgtcaattttgcttc

SEQ ID NO: 222819 - DNA, 396 bp, Glycine max
gagggagtagcggcattaaaaatgcagatcttcgtgaaaactctgacagggaagactataaccctcgaggtcgagagcagcgacaccatcgacaatgtcaaggccaagattcaagacaaggaaggcattcctccggatcagcagcgtttgattttcgccggaaagcagcttgaagatggaaggaccctggccgattacaacatccagaaggaatcaacccttcatctcgtcctcaggcttcgtggtggcatcattgagccttccctcatggctttggctcgcaaatacaaccaggacaagatgatttgccgcaagtgctatgcccgtctgcattctaaggctgtgaactgccgcaagaaaaagtgcgggcatagtaaccagttgagggctaagaag

SEQ ID NO: 222820 - DNA, 590 bp, Glycine max
ccttcactcacttttttccactatgaaactctgaaatgagatcaaaataacataacacaaaacgcaaaaccctaatctctgcaattcctgtgcgtggaaaggttcgagaatggtttcgctggaggaatctcgctcgaattcgagccgtttccccttggcgaggagttaccagtaccactcctcggtttcgtccaaaacgcagcgtcaaattggaaggtccatgcgcactatacgctccaatttcttccaagacgacaacagcagcagctgctccttcaccgagaaatccacgtgtctctcggaaaacctcaccgactccgtcgtcgacctccgtctcggcgagctggcgctgcggaacagcaaataggtgaaatactcgccgacggaggaggagctcctagatttgtcgcaggccttcagcgacttctccgcctgcagcagcgacatctccggcgagctgcagcgtctggccacgctgccgtcgccgaagaagagcgacttctacggcgagaacgaggcgccggagccggagaatgagccctgcattggttcctgcagagggagaatttctctacgagatcatcgagagc

SEQ ID NO: 222821 - DNA, 574 bp, Glycine max
gcacaaagcgggttactgtctgttcaagctaccatctctctctctctttcttagtgcctccttgccagaagttaaaatggcccaagaaactttcctattcacatctgaatcagtgaacgaggggcaccctgacaagctctgtgaccagatctccgatgctgtgctcgatgcatgcttggagcaggaccctgacagcaaggttgcctgtgaaacctgcaccaagaccaacatggtgatggttttcggagagatcacaaccaaggccaacgtggactatgagaagattgtgcgtgacacatgcaggaacattggttttgtctctgatgatgttggtcttgatgctgacaactgcaaggtcctcgtcaacattgagcaacagagtcctgatattgctcaaggtgtgcacggccacctcacaaagaggcctgaggagattggtgctggtgaccaaggtcatatgttcggctatgccactgacgagactcccgagctcatgcccttgagccatgtccttgccacgaagctcggtgccaagctcaccgaggggtcgaagaacgggacatgcccttggctg

SEQ ID NO: 222822 - DNA, 524 bp, Glycine max
ttcaagacaaggaagggatcccaccagatcagcaacggctcatttttgctggcaagcagcttgaggatggacgtacccttgctgattataacatccaaaaggagtccactctccacttggttcttcgtcttccgggtgggatgcaaatctttgttaagaccttgacgggaaagacaatcacccttgaggtcgagagctccgataccattgacaacgttaaggctaagattcaggacaaagagggtatccctccagatcaacagaggctgatctttgctggaaagcagcttgaggatggccgtacccttgctgattacaacatccagaaggagtccactcttcatttggtactccgtctacgtggtggaatgcaaatctttgttaagactctgaccggaaagacaatcacccttgaggtggagagctctgacaccattgacaatgttaaggccaagattcaggacatagagggtatcccaccagatcaacagaggctgatctttgctggaaagcagcttgaggat

SEQ ID NO: 222823 - DNA, 482 bp, Glycine max
  unsure (1)..(482): unsure at all n locations
gtcactagctctgtgcattcttctctcgctctctgccttccatcacactcggcatttcctttcccaagatagtagaagatggcagacactgaggatattcaacctcttgtttgtgacaatggaacaggaatggtaaggctggatttgctggagatgatgccccacgtgctgtgtttcccagcattgtaggtcgtcctcgtcacactggtgtgatggttggcatgggccaaaaagatgcatatgttggtgatgaggcacaatctaagaggggtattttgactctcaagtaccccattgaacatggaattgtgagcaattgggatgatatggaaaagatttggcatcataccttctataatgagcttcgtgttgccccagaagagcatccagttctcttaactgaggcccctcttaaccccaaggctaatcgtgagaagatgacccanatcatgtttgagaccttcacacccctgcttgtacgt

SEQ ID NO: 222824 - DNA, 509 bp, Glycine max
aataagaatatatcaactacgtttcaatcagagggcaccatgttaacaataatgaaaacaagcagaaaaataaaatccctaaacactacgaaatccagccacgaagacagacacagagtgcccgaaaacaatccaaaatcccgaaaaagatattcaggtcaagggatgaaaaaaacacaacattaacagagtatcacaacaaaacacaaacaagaacaccctgcaaatcactactattgttttaaacctcatcttcctgagggtcttcctcatcttcatactcatagccctcatcatcagcagttgcatcttggtattgctggtactcggacacaaggtcattcatgttgctctcagcttcagaaaactccatttcatccataccttctccagtgtaccaatgcaagaaggcctttctgcggaacatagctgtgaattgctcactcaccctcctgaacatttcttgaatagaggtagagttgccaatgaaagttgatgccattttcaac

SEQ ID NO: 222825 - DNA, 533 bp, Glycine max
  unsure (1)..(533): unsure at all n locations
gtgactgggtcttttctccaaacaccgcgccttcactgacgacggctctgtcgccgccggagcaccgcattcaccgtcatccatcgccttcgttcaaattcctctcatctctgccttcccttcactacccattgcacctgaaagcacgaggctcgcaacacattcgtatacctcctccgtttacttaacgaagggtttgaaccttcggaatcataagccctctgcgagtgaattccttttttccgagtgtcgcgttgaggttacgtttgttcggtggattttgcgaattctctgaactcatggccgcatggtcttctagaaagttactgagagacgttcttctcaaaagtgtagtctcgaatcagcttcctggcattagatgcttttcttctgcgccaaaaattgctgctaagatcggtcattattccaagaaaggaaggttgttgacgggagccaccataggtctacttatagctggtggagcttatgtgagtacttgggatgaagctacnttctgtggatggatattctcg

SEQ ID NO: 222826 - DNA, 598 bp, Glycine max
tgctatctccgatggctctctctgcgcatatttgccgtttccccgccacacgcgctgacacttctttgccggagagtctcaccagaatccggtgccggaaacctctctccgtccgatgctccggcgattccactttcggctctgtgggttcggagttcgatccgaaggtgtttcggaagaaccttactcggagtaagaattataaccgcaaaggatttgggtacaaggaagagaccctccaactcatgaatcgcgagtacaccagtgatatcattaagactttgaaggaaaatgggtatgagtatacatggggtactgtcacggtgaagcttgctgaagcctatggattctgttggggagttgagagggctgttcaaattgcttatgaggccagaaaacagtttcctactgagacaatttggcttaccaatgaaatcatccacaaccccactgtcaataagcggctagaggagatgaatgttcaaaatattcctctcgaagaaggtggaaaacaatttgatgttgtcaacaagggtgatgtagtcatattgccagcttttggagcgcagtggaagagatgttgactttgagcgagaaa

SEQ ID NO: 222827 - DNA, 574 bp, Glycine max
aggatgctgagtcgaatgcgaaactcacgcgaatgacgcgcgcgtcgaccagctaactaggctggggccgccctttcatagcatcgttgcgcatctccacgctctctttgcttctcttctcgcacggacatggatactgctgcaggtcaaagtctttacccattacaccgctgcaaaactcttcacctggtaagacatgcccaaggatttcacaatgtagaaggtgagaagaactttgaagcatacaagtcttatgatctttttgatgcaaacttgacccctctcggctggaaacaggttgataatctgagacaacatgttaaggccagtggtctttccaaaagaattgaactagttattgtttcccccttgttaaggactatgcaaacagcagttggagtctttggtgggcaaccatatactgatgggattaatgtacctcccctgatgaatgacaatgtgggagatagtggtcgccctgcacttttcagtctaaatgccccaccatttatagcagtagagctttgccgggaacatttgtatgcaatattgcaatgcaatggtgatgaagttt

SEQ ID NO: 222828 - DNA, 497 bp, Glycine max
  unsure (1)..(497): unsure at all n locations
cacacatgaaattgatgtccatttaattaatgcttaaaagtaatcgtagttggtatcataaatgtaattaggaaatcataaaaatgaagaaaattccactatcagtttgcctgcccattctctggatgcttctggtcagcaacgtcactaggaaggtcaaggccatctggaactttgccaggatagttggtagaggactcatctgaaccaatcatacctctgtcaatgataaccattgaacgtagctcacagttagcaaagtgtgtgcagatttcattcttcacgtttggatgacaatcatttccaaaagcacttagagaatgaaacagaaaaccgctgtgggtaacgacagctatctccttttctttacgtgtccacaaccattccaaaaatttcagtcccctggcagcaacttcttcattcttctctctaatggcaggtttccacanaatgtcctcatcattttcaatgaaaaatcaatagctggaaacatatgt

SEQ ID NO: 222829 - DNA, 490 bp, Glycine max
accaaataaacagtgaatgttaactcctgatgacctgcaatgcaagggtgggtatccaaactgtacaagaagcacagttgggaataaatagccgtttttttatttttgtgaacaaggagatgctagatactttcttagtcaacttgacaagagattataaaacaatcagcataaacactaagcacaataaacaatcagaatgttttcactgtctgaggaaatttacagcagcccaaatggggaagatcatgataatgccttcaacttgtctgaacattcgtcatgatctgctggtgctttgaagttcttcactgatttacccaagacatttaaaacagcaacacgctgtaattctttagcttcctctaatgaaagctgaattgatctcttctctaactcaacagcatgcttgctaagttcaactgaggacagggagcgaagcatttggatatattcttcttgatctgattgggccaattcctcaaaaaca

SEQ ID NO: 222830 - DNA, 451 bp, Glycine max
gaaaaataaggggaccttccaacaattcatgtatcaaggtcgaattataatttacataattattgctagcggaggataatagataaagactagtttaaaatgctagaagccaagaggctcttgacatgaaacggcgaacagagatgaaacttgaaggaacacacatgtgaagttgaagctcaagggtatgtttcagaggctgggacaggggcataggaaccaactgagacgtctccataaatcaagccagtcaaacctcctccaatcaatgggcgcaacccaggatatccagttagcagccaagactacactgaccacagctgggccgaatgagcgagctgggttcattgaaccgccgctgaatgggcctgctgctaacatgttgtgacccacaacgaacccaatagcaatgggtgcaaagatacccaatgaccccttctttgggtctact

SEQ ID NO: 222831 - DNA, 539 bp, Glycine max
ctcaatctcacgctggtgagatacagactttgccacatgtatcacctgcgagactcgagcatgtgccctattcttctcagcctccagcaacccaagtcgttttgtttcagcagcagctcgtttttggtgaattgcagcacgtacacactctttatatttactttctcgagccatccttctcatcaatgtctgagatgacctttctctatgagaagcccttctttgcctgagagccttgagaataagcatcctattagcctctgcctgctgaacccgtgattcaacttttgttccaagcctcacacgttcattctcatagcgcatttctactccacttttagctgcttgacgcaattcatccagtcttgctaaacgcatttgggccttagtcaagatgctcaacctcttctgttcagcagcctgcagttttgcttccagtctctgaccaagatcttcctcctgagatgaacaccttgaggggcttcttggctttgcacgtgccttgcttgagagtttctcatagtatttctgtctgcgaa

SEQ ID NO: 222832 - DNA, 548 bp, Glycine max
cggaagaatacaccgccacacgctgcaggccctttaccttgtgcttcctgcgttcctgtgagaacccacgttctctaacgcgcttctccttcaaagttcaaattcctatacatttgcgtaatcgcttctcaaatctcaacaaaagtattcccaaaaaaccctaattattattattaaacatgaggccgattctgatgaaaggccacgagaggccactgacgttcctcaagtacaacagggacggcgatctccttttctcctgcgccaaggaccacaaccccaccgtctggttcgccgacaacggcgaacgcctcggcacctaccgcggccacaacggcgccgtttggtgctgcgacgtctcaagagattcgggtcggctcataacgggaagtgcggatcagaccgccaagctatggaacgtgcagaccggtcagcagttgttcaccttcaatttcgattccccggcgaggtccgtggatttcgcggtctgcgataagcttgccgttataaccactgatccctttatggaattgccctctgcaatccat

SEQ ID NO: 222833 - DNA, 552 bp, Glycine max
  unsure (1)..(552): unsure at all n locations
gaagaaccctaagccctctcttgctcgggattttactctcacggtagcaccagacatagaactctagatctcttgttttcctatccaatagattagagattgaagatggtgtctgacgcgagcaagaagaaggctgcgcagaagaaggcggcggcagcggccaagagaggaggcaaagcagcagctgcttcgtcgaaaacgacgtcgtcggagaaggccgccgacaagcttgccaacggaattggggaaattcagatatccgatcgaacctgcaccggtgtcctctgctcgcatcctctttccagggatattaggatagaatctctgtcagttacttttcatggacatgatttgatagttgattccgaattggagctaaattatggaagacgttatggcttgcttggataaatggttgtgngaagtctaccctgcttacggctataggttgtcgagagctacctattccagaccacatggatatttatcaccttaccagggaaattgaagcctctgacatgtctgcattggaggctgtcataagctgtgatg

SEQ ID NO: 222834 - DNA, 489 bp, Glycine max
tttccacactctcatcagattcgggtcgggttagcgttatcggataacttcgcccataaattctctgtttacggggcgaaaatgacagtattcttagccacgaggctcgtgtttcggagatccccgccgcttctctggcggcgcagcttttctcgggcggcggtagaggccgaaaaggacactgttgccgtgccgtcgcttccgttgttcgattactctccgcctccgtatgcggggcccaccgctgacgagattctggcaaagcgcagggagtatctgagtccttccatcttgcacttctacaagaatcccgtgaacatagtggagggtaagaagcagtacctgtttgacgagaaggggagaaggtacgtggatgcgtttggagggattgctactgtgtgctgcgggcactgtcaccctgatgtggtcgaagccatagtcaaccaaaccaaaaagttgcagcactccacagttctctaccttaacaac

SEQ ID NO: 222835 - DNA, 561 bp, Glycine max
gagacgcttcgcaaatctcaatcgaatctcagaaaaatgagagaaatcatcagcattcacataggtcaggccgggatccaggtcggaaactcctgctgggaactctactgcctcgaacatggcatccagcccgacggcatgatgccttctgactccaccttcggtgtagcccacgacgccttcaacaccttcttcagcgaaaccggatctggcaagcacgtcccccgtgctgtcttcgtcgacctcgaacccaccgtcatcgacgaggtccgctgcggcacctaccgtcaactcttccaccccgaacaactcatctccggcaaggaagacgccgtcaacaacttcgcccgcggccactacaccgttggcaaagagatcgtagatctgtgcttgattcgcgtacgcaagctcgccgacaactgcaccggactacaaggcttcctcgtcttcaacgccgtcggcggtggcaccggttccggtctcggatctctcttactcagcgtctctccgtcgattaccgcaaaaaatccaaatagggttcaccatttacccttccccaca

SEQ ID NO: 222836 - DNA, 545 bp, Glycine max
  unsure (1)..(545): unsure at all n locations
tctctctctctctctgtttctgtttctgcaatggcgaagaagaaggagaagaaggtgaacgtctccggaaaacctaagcactctctcgacgtaaaccgcagcaatgacgcgaagaaggagtcgcgctccgtcgncaccgtgcgccgcctcaagatgtacaacaccaggcccgtgcgcgaccggaagggaaaagtcgtatcccacgagcttcagtccaaggagcttcccagcacaagaatccaacccgatcgtcgatggttcgggaacacgcgtgttgtgaatcagaaagagcttgagtttttccgagaagagctacagagccgcatgtctagtaattacaatgtaattctgaaggagaagaaacttccgctttcgctactcaacgatcaccagaagcaagctagagttcacctgcttgatagagagcctttccaggatgcgtttggaccgaagactaagaggaagcgccccagcctcttggcggctgactacgagtcattgctgaagaaagccgatgggtctcaggatgcttttgaagagaagta

SEQ ID NO: 222837 - DNA, 517 bp, Glycine max
agcagcagtgcagggaagttggtgtgtgtcaccggtgctgccggttatattgcttcatggattgtcaagttcctacttgaacgtggttacactgtcagggccactgttcgaaacccaaatgatcacacgaaggtagaacatttgctaaaacttgaaggtgcaaaggagagactgcacctttttaaggcagatcttttgggtgaaaattcttttgactccattgttgagggctgtgatggcgtctttcatactgcttctccttttattatcaacgtcaaagacccacaggctgacctacttgacccagcagtgaagggaactcttaacgttcttaaatcatgtgtaaaatcgccatctgtgaaacgagtcatcttaacatcttctgtggctgcagttgcatataataaaaggcctaaaagtcctgaagttgtagttgataaacctggtggtctgatccagattactgtagggaattaaagctgtggtatttactttcaagactttggctgaagatgct

SEQ ID NO: 222838 - DNA, 522 bp, Glycine max
accatgcacttttaatcaacttatgttaatgggaccaaaggtacatcaagccaacatcatcaagtatgacatgatcgaccagcccattttacacgataataatctattttaatgtggcaacctggctaacttgccctgttgaaagggaagaagagtgaaagaagagacaaatagctgaaatgtcatccacggcaatgccccgtctcttgcgtttccatgcatgcaccgcacactccaccaaacgtttagctgccttagctttatctgctgctgaagatacaatatccactgcttctttattagagattacatcccaaaccccatcagtggctagcacaacaaactggtctctactagttatatttctgtgtgttacctcaggcacagaaataagaccatgccctttgatgcagtagtcaccaaaggccctagacatggctagtcccggagactttttattcggtaaccacaccctatgcacccctggctcgttctttaagcagaacacacgcccctggcact

SEQ ID NO: 222839 - DNA, 568 bp, Glycine max
ctgtgtttgcggctgaggattccgaacgagcgaccttcttcgtttctcgcaaagtttaagtcctcatgggtaaggaaaagactcacatcaacattgtcgtcattggacatgtcgactctgggaagtcaactaccactggtcatttgatctacaagcttggaggtattgacaagcgtgtgattgagaggttcgagaaggaggctgctgagatgaacaagaggtcattcaagtatgcctgggtgcttgacaagctcaaggctgagcgcgaaagaggaattaccattgatattgctttgtggaagtttgaaaccaccaagtactactgcacagtcatcgatgcccccggacatcgtgactttatcaagaacatgattactggtacctcccaggctgattgtgctgtccttatcattgactccacactggtggttttgaggctggtatttctaaggatggacagactcgtgagcatgctcttcttgctttcaccttggtgtgaagcagatgatctgctgctgtaacaagatggatgccactaccccgaagtactctaaggctaggtatgatg

SEQ ID NO: 222840 - DNA, 495 bp, Glycine max
atccgtataataattcaattgaaaaatagactcattgcgtttcgtagtcctattagaggaatggtatatggcgttcacaaaacaacagacaccacagttttttagggggggaaaatgaaaatggggcatgcacttactacataacaaagtgtacctatgacaaaatattactaccgttatttaatcctaaatgctcctgtatatttatccttcaatagaaaaacctgcatttgttatcagaaccggtgccagccacccactcccactatccatggtttacccgtttagaataagtatcgatactaagtaactcatttgctttccgtaacgggaaggtagacaccttctgctgccaaccacacattgtcagcacgcttttcacgaacaccacaaaccttctgctgacccccagcaatacgactgtatttcttatcatgactatgtagatagcctccagtgttaatatgctgaaggcgaatcctttgatcctgcttt

SEQ ID NO: 222841 - DNA, 522 bp, Glycine max
cgtaataaaagtgccgtttaatcagggctaatgttaatccatatgcttcatgacgaaactgaaatgataaacattgattcaaaacctgcctcaaaattaacatactatcacagaaaagattgagctatagttgacgaaactgataacacaatcctacagcgaactcaatctaactaaacaattgcctgggacttgttaaggatcactccctcatatttcacctggaaccacttcatagcatcctcctttgtgacacggtgctgaattccaacccgggacttgcacctgcggcgacgtccaacacgatagccaggacgctccagaacaacaaagaaatccattccataaataccagttgaaggatcatacttgattcccaaatcgatatgctcctgaataccaaagccgaagcaaccagtatcactgaaattccttctgagaagttcatattccttaacctttaaaccactctccaaaagttgcattgccttgtcacctctgacaatgacatagcatgcaatc

SEQ ID NO: 222842 - DNA, 539 bp, Glycine max
agtaaaaaagcaggaatgtaaaattaaaatttaaaatatttcccatgatttgtttgagtacagagatgacagaagagaataacttaaaaaagaaaaatgacacactaaaggggaagaacaccacagaggaaagtgcaaacggctccccctgtcatgaaagagactttaatctacacttatccacaatcttgaagacataatcgagagggtcaaagaaacgttgcaaatacaaagccaaaagcatttcccattattaaacttgccatatcaacctccatctctccaattatcttctttccactagagccatcatcatgaagagaaagacatctcaattatgggggttactcctgaatgatccaagggccttggctgcacctgctctcaagatgaactggtggtagaaggctgcaatggctgccccaataaatggtcctacccaaaagatccaatggtcatcccatggcttatcttggttgtagataacagcagctccaagactcctagcagggttgataccagtgccagtgactgggatg

SEQ ID NO: 222843 - DNA, 348 bp, Glycine max
aaagggctcgctgaaaataaattttattgaaccagatgggaaaaatagctagaaagtctcgagacagcaaaggctagatatcgttttgttaaaaaaatttacaacaatgactcagtgataaccaataggagctggagcctcttttaattccttcccttgatgatgaatatcagaagcaaagtggttaacatccctgtgatgagcctcatcagcgcgaatcacagtgacaacatccttgagagttgcatccttgggaagcctccagtagtccatagcaatggcaggggcagggacattttcaactttaccactctcaatggcatttaaatgctgagtgtatgaaatcac

SEQ ID NO: 222844 - DNA, 490 bp, Glycine max
ccgagagtggtttcagtgagtgatcggtgttcacttgatccttcataagtcgtcatcatcatcatcatcatcaccgttgattgaagaagatgccgatcagaaacatcgccatcggaaggcctgaagaggctactcaccccgacacgttgaaggcggggttggctgagttcatctccaccttgatcttcgtgttcgccggttcaggttccggcatcgcctacaacaagctcaccgactacggcgccgccactcccggcggcctgatatgcgcttccatcgcccatgctatcgccctcttcgtcgccgactccgtcggcgccaacattttcggcggtcacgtcaaccccgccgtcaccttcggcgccttcgtgggcggcaacatcaccttactccgcggcatgagctacgtcatagcccagctcctcagctccatcgtgggctccctccttctcggcatggcactggcttccctgttcagcattctggcttt

SEQ ID NO: 222845 - DNA, 534 bp, Glycine max
  unsure (1)..(534): unsure at all n locations
ggctacttggtagttggagtggtagcttttgctctactttgctcattcagagtttgtttgacagattcagttccattattttcgcctgttcatgacgctgcttctttgactcgcaactctttccctgctggcttcatctttggggctggatcctcagcctaccagttcgaaggagcagcaaaggaaggtggaagaggaccaagcatatgggataccttcacacataaccatccagaaaagataagagatggagccaatggagatgtcgccgttgaccaatatcaccgctacaaggaagatgttaagatcatgaaggatatgaatttggattcatacagattctcaatctcttggcctagaatactacccaaaggaaagctcagtggtggtgtaaatcaagaaggaatcaattattacaacaacctcatcaatgagctattggctaatggtgtactgccatatgtgactctgtttcattgggatcttcctcaagctttggaagatgagtatgggggnttcttaagctcccatata

SEQ ID NO: 222846 - DNA, 538 bp, Glycine max
gtaattaataacaagctagctattagttcgattttgtagtaagtgaggtgccaatatggtgaagatagctcttggtactttggatgactcttttagcgctgcctctcttaaggcttatttcgcagagttccacgcaactctgattttcgtgttcgctggtgttggatcagccatcgcttacaacgagcttacaaaagatgcagccttggatccaacggggctggtggcagtagctgtggcacatgcatttgcactgtttgtaggtgtctccgtcgccgccaacatctcaggtggccatttgaacccagctgtcacttttggattggccattggaggcaacatcactctcatcactggtttcttatactggattgcccaattgatgggttctatagtcgcatgcctcctcctcaatttgatcaccgctaagagcattccaagccactcgccggctaatggtgtgaacgatttgcaagctgtagtgtttgagattgttatcacatttgggttggtttacactgtgtatgcaactgcagta

SEQ ID NO: 222847 - DNA, 491 bp, Glycine max
cggctctaggttccatcatcttcatctggtaccagatctgtgccattcatttcttctagccatggacgagaagctcatacagcggttagaatcggcggtgttgcgcttggagtcgctatcctctggactccaccccttcgcttcacaatccggcggcgcccacgctcccgatgcggagctcgatccctccgtcgacgccttcggcgatctgatcgaccagtacgtcggtagggtttcccgcgctgcagaggttatctgcggacaggtcttgggtgttaccaaactggtgcaggaagctttcaatgttcagaaagagcttttgattaagctcacacagactcagaagcctgacctagctgggttgtctgaatctctgaaaccattgaatgaagtgatcacagaagctacccacttgacagaaggaaggagagctgatttttttactcacttaaaggctgttgctgacagtctcttagctctagcatgggttg

SEQ ID NO: 222848 - DNA, 543 bp, Glycine max
gtctagatattatgatgattcaaaatcagaagaatttaattcttctaggcttaaggaaaaagaaaaataacaaatttatgaaaaaagaaatatttgttatcgaaccagttcgcctgtctagaaaaaacaataacaattttttatgtatcaaaccataggtctttcattaattcaaaagaataaacgcaaaatttatcacaaatacccagaaaaaattcatgttaataagaaaaatttttataaatatattacaagaacacgagatcaaaaaaataacagaaaaaaaagaaaaagataattctgatttacttgttcctgaaaacattttatccgctagacgtcgtagagaattgagaattctaatttgtttaaatccaaataatataaatagtatgcatagaaacacaatattttataatccaaataaagtccaaaatggttttccacttttgactaaaaaaagaaaatattttgagaaagataaaaaaaaactaatgaatttcaaaatttttctttggccaaatatcgattagaagattagct

SEQ ID NO: 222849 - DNA, 570 bp, Glycine max
gggttttgtagagggagagaattccaaaccaaaaatccgaaataaataatttttttttttaaaaaaaaagaaccgggtgtgggtgttgttggtgttggcggaggcagatcggagatctgtgatagatatagatggagggagttggggcccggcttgggcggtcctcgacccgctacggaccggccacggtgttcactggaccggtccggaagtggaagaagaaatggatccacgtgtccccttcttctgcttcctctaattccaacgccaataatcatcacaaccacgcttcccatgcctctcatcttctcctctacaagtggacccctctcacccacagtcagaacaccgccactactaacaacgctaacgccaaggactcgcctccggagcctcccgaggaaccgcctcgaaggaaattcaaatatgttccggttgctctactagaggagcagaaaaatgagggtgcagaaagtgagggtactgagaaggttgacgaggaatctaaaccaattgatgctgattaggtgcagcagaagcactcacaagaatgagactttggatgaaaaa

SEQ ID NO: 222850 - DNA, 530 bp, Glycine max
cattcacgtcttgcgttctgagacagcttaaattgggtgccacctcacactctcatcaccatattccaccacttattatgttcctgcactctcgaggaaatccgcccttattgaccacaattgctcgcccactgatgtcatgtaagggctatctgttcgaatgggggctgctcattgaaacgccccatgcagcatttttatctgaacatatgggcttacagcttctttcattaaaggatccaccagttccaccacacttcctttattatacttcctgacggcccatctgggtgtaacccgctgtgcaacagatttattcaactcaacaggacggggggctgttacaatttctaaaagcaaaattccaaatgaataaacgtcactcttgggagtgagatggtatggtttcatatactcggcgtccaaataaccaactgatccctttactttggttgaaatgtgtgcttgatcagggctcactggtcctagccttgcaaatccaaaatcagcaactttagctcgcatgcttt

SEQ ID NO: 222851 - DNA, 422 bp, Glycine max
aatcactcaagttgaatctgaaacattctgtaaggaccaaaaaataaaagtatgactcagtcccaacccccaagtcacaaaaaaagttgcaaaagacaacacgcatttttcgaagagtcaaaacccataaattctgcacaatattactataaacacgttggccatcaagatatggaatcagggcacaaatttaatgtctttgaagtattcatgctccacagggctcctggcggtaattcttttggtgggatccacgctatgcttattcgaaagaagattaataccaggtgcctcaagattgggaaccacatttggttagtccttggatggccatttgggaaatgttgatttgaaatcaggcagtgaaggtactccaggccatgagtattcatttgggggacccaagattttgaatattttaa

SEQ ID NO: 222852 - DNA, 514 bp, Glycine max
gtataataattgaaacaataatttataataaaataacagtataaaacagtgcatcacattaaactcaaattagaatgtatgggtatatataatatactttcacttatatttgttacaacattgtcaaaaatatttgattccaagtatctggaactccaggcaaacaccaatgaatgcaatctgcatttcttggattggccttttcctcctcagtcaatagctttcccccggtttcagtgtaaacagaggaatgtgcatcaatcctatactctgagatttgtgttatgttgataaatgtcactggaactttcattttcttcaccactttttccaccacgctcatcatgcccttattagagccacttccccaatgattctttttccctattggctttgtctcgttgaaacatttgataccatctttgttgccccagtctaagcttcttgtgtgtgttggggacatagttgtgaagaagacgctggttttgtttggataatagttgaatcaacccaa

SEQ ID NO: 222853 - DNA, 500 bp, Glycine max
aaactccaagtctttaaatataaattttcgtccaggaaacaaaatcgttcatgtaaatccttgtgcgaactaaaaaatagctaaagccatcaaaactagtacacaatatttgaaaatgaagttcaaaggtcgaaacaaaatctttctggtcaccaatactggatcctttgttggtttaacgattagccttggcaactctctcaatttcatcctttttcttgatagcataactggtggatgaacctttagctgcattaataagttcatcagccaagcattcagcaattgtcttgatgtttctgaaagcagcttcccgagcacctgttgttagaagatagatggcctgattaacacgtctaaggggtgagatatcaacgggctgtcttctcaccactccagcagaaccaattctagttgcatcttcacggggaccactattgatgacggcatcaacaatgacctgaattgggttcaggtcagtgagcaagtgaataatttcc

SEQ ID NO: 222854 - DNA, 509 bp, Glycine max
ctttcaagaagcatctgagtgtttattattcgtaatatatagtcactcaagcttctaggatttctgccagctacatgaaaatgggaagcaacttgaggtttttgagtctttgcctcttggcattgattgcatcaactcatgcccaacttcagcttggtttttatgcccagagctgcccaaaagctgagaaaatcattttgaaatttgttcatgagcatatccacaatgctccatcactagcagctgcattgataagaatgcatttccatgattgttttgtaaggggatgtgatggatcagtccttctgaactcaacaaccaatcaggctgagaagaatgctcctccaaatctcacagtaagaggctttgacttcattgacagaataaagagccttgttgaagctgaatgccctggtgtggtctcttgtgctgatatcctcactttggctgccagagacactattgtagccacagtaagtactcaattgctatcaggaaaatcttaagag

SEQ ID NO: 222855 - DNA, 606 bp, Glycine max
  unsure (1)..(606): unsure at all n locations
ggatggtaatccaagagtaactcctgaagtgacaagggatgtttgcttattggctagaatgatggctgctaatttgtattattcccagatagaagatcttatgtttgagctctctatgtggcgctgcaatgatgaactacgcgttcgtgcagaagaacttcacaggtcttccaagaaagatgaagttgcaaagcactatatagaattctggaaaaaggttcccccaaatgaaccatatcgtgtggtacttggtgaagtaagggataggctctatcaaactcgcgagcgttctcgccatttgctttctaatgggtactctgacattccagaggaagccactttcaccaatgttgaggagttcctagaatctcttgaactatgttatagatcactatgtgcttgtggtgatagagcaattgctgatggaagccttcttgatttcatgagacaagtctctacttttggattgtcactagtgaggcttgatatcaggcaagagtcagatcgtcacactgatgtgctggatgccattaccaaacacttggaaattggctcataccangatggtcttgagagaaaagacaggaatggtgttgtctgagtaag

SEQ ID NO: 222856 - DNA, 383 bp, Glycine max
agcagcactaaggggaatttgcgttttgaaacataacacatcaatggcctgcctgatttgtgtggtaactgactctttcaaggccgaatggtggggccttctaggaaccaaacaaaacaaatcaaaggggatgtgagaacaaaacttgagcactaacttttagggctgcaaccatattcatgctatcctgatagtaataaaaaaaaggaaaatacaaggaataaatgtcctaaacaaacttaaccagtgttctgcatgccagtagcaatacccttcatatagagaatgagggcgttttctaaaccaggagcattttcacttgttggggccaggtttataaggtcatcagctgatttggttgcctctgccaattcccttgatat

SEQ ID NO: 222857 - DNA, 534 bp, Glycine max
cacacttctctctctctctctcactgattccttctccacacacacctcatgatcaaaactctgtcgctttccttcaacctcattgtaagatttatgatttctttatgaatctggtgagacatagagaaaggttctccttttgtttccatttcaatgcaagcttgagacattcattcataggggactgagaagagatgggatgttcacattcaaggttggatgatgaagaggcagttcggccttgtaaagacagaaagaagttcatcagacaagctgttgaacaaagaactcaatttgccacgggacacatagcatacatagaatctcttaaaagggtttcagctgcacttcgcaattacattgaaggcgatgagcctcgcgagttctcattagacacagtcatcaccccacctttcacgcctgtgaagaggaaaactggctcaggattcattcccatatcagcaaaaccctttgctacaacaggagcaattgagtttgggatcggaccaaactctactttgaaagtgaattacc

SEQ ID NO: 222858 - DNA, 485 bp, Glycine max
caaaatttcagaagctagtgatcaatcatcaacacagagctgagtgtgttgctctgtgaatccaccttcttcttccattggaggaccatttcctcctggaatagaaatactaccacacttttcttttttcacttctctaagttgctaagttaattgctccttcattttttcactcttcgttctcgcgtacccgtgtcacggtaactcgtggtgaagtgttcgaaaatgactgtcacacctaagatctcagttaacgatgggaaacttgttgtccatggtaagaccattctgactggagtgccagacaacgttgtgctgactccaggttctggaaggggtcttgtgactggtgcttttgttggtgccacagcttcacacagcaaaagtctccatgtgtttccaatgggtgttttagaggggctccggttcatgtgttggttcccgttcaagttatggtggatgactcagagaatgggaacttgtgg

SEQ ID NO: 222859 - DNA, 576 bp, Glycine max
  unsure (1)..(576): unsure at all n locations
tgtaagtgctggtgtagctatttctgctgcccttctggctatgcgagctccaagaaggtttctgtttcgccatacattgggtcgattccaaagtgaggaggcgcgatatgctagaattgagaagaatgtaaaggacttgaacctttcagtggatttactgaagaaggagaatgcaaaattgcttcaaaggacaactcttgctgagaaggaaatgaaatatgggcatacggaactagtgagtgccggaacccaatttcaacagctggcaaaatcagcatacaaggttgaaacccgagctgctgatttgcttgacaagctgcggtatatacctagtcgtgaagctctggcacttcgagctgaggttgcttccatggcttcaaatttgaagcgtcagagatcttcgctgaacaaacggataatgaagatcaacgagttaggggttcctgtgtgattgaattaatggacaagttgtggaccttctcttgatgcactcccagttttactgaataaattctcctgttaaagtagatagttctacgtataatgcagacccatgtcccggngctattttttttg

SEQ ID NO: 222860 - DNA, 439 bp, Glycine max
gttaaaaatagtatattgcctgaaagttatatatatattgcatgaaagagactgatcatttgaaaacaaaaaaagatgccccgggacatgggtctgcattatacgtagaactatctactttaacaggagaatttattcagtaaaactgggggtgcatcaagagaaggtccacaacttgtccattaattcaatcacacaggaacccctaactcgttgatcttcattatccgtttgttcagcgaagatctctgacgcttcaaatttgaagccatggaagcaacctcagctcgaagtgccagagcttcacgactaggtatataccgcagcttgtcaagcaaatcagcagctcgggtttcaaccttgtatgctgattttgccagctgttgaaattgggttccggcactcactatttccgtatgcccatatttcattttcttct

SEQ ID NO: 222861 - DNA, 534 bp, Glycine max
  unsure (1)..(534): unsure at all n locations
ttctcacttcaactttgaacttcttttctctattattattatctttctctttttcttcatctcttatcttccttcacctttttattgaaagaaaaaaaaaatgagcaacataagcatggtagaggcaaagctgccaccaggattcaggtttcatccaagagatgaagagcttgtgtgtgattacttgatgaagaaggtgcaacacaatgattcccttctcttgatagatgttgaccttaacaagtgtgagccatgggatattcctgaaacagcatgtgttggagggaaggagtggtatttctacacacaaagagaccgtaagtatgcaacagggttacgcacaaatcgtgccactgcctcagggtattggaaggccacagggaaggacaggcctatcctccgcaagggcacccatgtagggatgaggaagactttggtgttctatcaaggaagggcacccaaagggagaanaactgagtgggtcatgcatgagtttcgtatcgaaggacctcatggacctcctaaaatttcttc

SEQ ID NO: 222862 - DNA, 542 bp, Glycine max
  unsure (1)..(542): unsure at all n locations
tgtttacttgtcaggcggagcgggaattgcagccctggattgccaaggatgatgattcaggtcagaagatgtggagaatcaatcagcggattgtaaaattgattgtggaacttatgaggaatcatgagactgcagaatcattggtaattgtggcaagttcatcagatttactactgcgagccacagatgggatgctggttgatggagaagcttgcactttaccacagctggagctattggaagcaacagctagagcagttcagccagtgctcgagtttggagaatctggattggctgtggcagatggcctttcaaaccttttaaagtgtcgcctctcagctacaattagatgtctttctcatccaagtgcacatgtccgagctctgagtatatcagntcttcgtgacattntgcatactggttcaatcagatgtagtcctaaactcggagattaaatggcaccccacacccttctatcaatacttcaatttgatgccgttgactggcaagctgacataaaaaaatgcttgacttgggaagct

SEQ ID NO: 222863 - DNA, 357 bp, Glycine max
tttcgagatctttgttatgcttttggagccactcatagcggtgttttctattttgagctacgccgatttctaccagttggctggcgttgttgccgttgaggtcaccggtggacctgaagaaaccaaacatactggaagagaggacataccctgcccaacaccaaagggtcgggtgcccgatgccactaagggttctgaccatttgagagatgcgtatggcaaaactatggggataaagaaccgagatatcgctgctctgtctggagggcacactattggagctgcgcacaaggagcgctctggattcgagggggcctggacctctaatacacggacttgcgacaacccatacttcac

SEQ ID NO: 222864 - DNA, 528 bp, Glycine max
tctgcatccatattctatataagtgagaagtgagaagtgagaagaatgagcaatacaagatcttaatttctttcacaaatcacaatggttacttgtcctggttccataataatccatttcttcctcttctcagcgcctctcctttcagtcttatggtcttgttcatcagtttctgcattgaaaccccgtgccttcatcctccccatcgagaaagacccaaccacccttcagtactcaacttccatcgacatgggtacccctccactcacactagatctagtcatcgacatcagagaacgcttcctatggttcgagtgcggcaacgactacaactcctcaacctactaccctgtccgatgtgggactaagaaatgcaagaaagccaagggcacgggcttgcattacatgcaccaaccaccctcttaaaacaggatgcaccacaacacgtgtggtgtagatccattcaaccccttcggcgaagtcttctgagtggagacgtgggtgaagacatcttgtcctcgctgcact

SEQ ID NO: 222865 - DNA, 574 bp, Glycine max
ctccgactataaaactgcaaatcccatcaaaatcccaatctttagggtttccatgtccaatccaagggattcgtttatgaagatttagcgaaaagggttgaaattgatcatggatttgggaagcgaatccgtggaagagaacgaagtgaatcatgatgggaatggaaacggtggttcttatgatgacgagaagattgggttgggtttggagggaaattcggatgtcaacggttcggatcaaaagggaacggttggcgaagttgaagtgggtagtgcggaaggtgtgaattccaaagggacaccaacaaaggggtttgggttgaagaaatggaagagaattcggaggaatgttgttaaggatccaaattcgagtgttgattcgggtaaagtcttgaagaggggcttgtctggcaatgccaatttgagtgaaagccagccttttctgcgcgatgttaaggagaagaatgaaggatcttcaacatgtttgggaatgtagtgttctctgatggcaatgtgatccatggtcaagttcggattctagatatgcacttggatctgggtttgtgttgggact

SEQ ID NO: 222866 - DNA, 541 bp, Glycine max
agaaagtttctttgcctgttgggtcctgcaatttggctctgcctctatgggaacaaggaatcgacaaggtgtacgacacgtggaacctggaacaaagcgttaaaagcgaagcgcgatcaaaaacgtgagggcctatgcaacagtgctccactcctcagaaggctacgtgtgcggcgcaataacgctagcacaaaccctgctccaaaccggaaccaagcgtgacctaatcctcctcctggacacctccatctccgtcgcgaaacgccgctccctcgaactctccggctggaagatccgactcataacccggatccgaaatccgcgggccgagaatggcacctacaacgagtacaactacagcaagttccgactctggcagctcacggattatgagagagtgatcttcattgatgctgacatcatcgtcctccgcaaccttgatattctcttccacttcccacagatgtccgctactggtaacgaccagtccatcttcaactccggcatcatggtactcgagccctccaactgcacattccac

SEQ ID NO: 222867 - DNA, 516 bp, Glycine max
ttgcgaatgaaggagtgagagcgagtgctgtatagaatcccatatttgattagggaaattaaaacagaaaacagaacccttcgaaaacccaaaaccctgtttggcgtcgcggccatggatttccaagtggtcgttctcggcggtggcctttccaagaagctcctccctctcgtttctcaggagcttccgaacgcgttgcttccggtggcgaatcgccccgttctctcctacgttctcgagtacttggagcttagcaacctcaaagatctcattgtggtggttgaaggcgaagaagcggttcttcatgttggggcttggatttcgggggcttatgctgatcgcctccacgttgaggttgctgcagttcctgaggatgtggggacagcgggtgcaattcgggccatttcgcatcacctaacagctaaagacattttggttgtcagtggtgatcttgttaccgatgttccacttggtgctgttgcagctactcatagacggcatgatgcagttgtcact

SEQ ID NO: 222868 - DNA, 599 bp, Glycine max
cgcagaaggaactgaagaagttgttttagatgcagttggggataactttgcatcttacaataggcttaagaaaacaaacaaggggcgtggtaatatacctgtcagttcaggagctcgggagatggcttcagtattggatactgctctactccaagctttgcttctaactggacagtcttcagtggctttagaattactgagaggtgttaactactgtgatttgaaaatatgtgaggaaatacttcggaaaggcaatcatcatgttgctttattagaacttttcaagcacaactcattgcaccgggatgctcttgaacttcttcacaaattggtggatgagtcaaaatctggccagtctgaaattacacaaagattcaaacctgaggatattgtggagtatctcaagccactatgtgggacagaccccatacttgttctagagttctcaatgcttgttcttgaaagctgtccatctcaaactatagacctctttttgtctggaaatattccagcagatatggtgagctcatatttgaagaagcattctccaaacatgcaagctaggtacttggagctttatgcttgcatgaatgagaatg

SEQ ID NO: 222869 - DNA, 547 bp, Glycine max
aaatttccatgtattccaacacaagacagacactgatttatgtagatagataaccataaccataccatagcttacaaattaagctccgctcactctctttctctctagaatccatggcagccattggtctgaatggcgtaaaggttgggacgacgtcgtctcaggcgtaccttgaaggcaaggcagtgaaggagacgagagcgttcatggctgaactgtgtcgccatttctacacccttggatgggtgacagggacaggtggcagcatctccatgaaggtccacgatgactccatccccaggcctcaacagctcatactcatggccccttctggtgttcagaaagaaagaatggagccagaggacatgtatgtgttatcacacagtgggtctgtcttgtctgctccatctcctaaaccttggccgcacaagcctcctaagtgtagtgattgtgatccacttttcaagaaggcatatgagatgcgtgatgctgcggctgttttccacagtcacgggatagagtcttgtctcgaacaatgatcaatcca

SEQ ID NO: 222870 - DNA, 574 bp, Glycine max
atctgaatctgcgtgtgtttgtgaattgttgttgagatctgaatcaaaatcagaaacgataatggctacaccggaccacctcttcaacctccgcaacaacttctacctcggcgcttaccaagccgccatcaacagcagcgacgttgccaacctctcccaagaagataccctcgagcgcgacaccctcgtccaccgctgctacatcgccctcggccagctccagttcgtcatctccgagatccacgacgatgctcccacaccactccaagccgtcaaactcctcgccctctatttctcctctcccgacaccaaggattccgccatcgcgagtctcaaggagtggctcgccgatcccgctattggaaacaacgccacgctgaggctcgtcgccggtctcgtcttcctccacgagaatgatttgaatgaagccctcaaacacaccaacgccggtggaaccatggaactggacgcgttgaatattcagatctttattaagatgcataagtcggattacgcagagaggcagctgcggatcatgcagcagattgatgaggatcacactctcactcaactc

SEQ ID NO: 222871 - DNA, 507 bp, Glycine max
acttaatacctattggtatttctcccttttctagtaaaagggacgatgtaaatgaacatgtttaaaaattaatgtcagatgtagcttttacaacatcaagactcaagtaaaccaaaaacataacaaatttgaatactatgacacattacccagttgattatgttctaagatacgcaaccaatacaatagccacgataaggtgtaaaaattgcacgggaagacctcacaccattcaactcttgaaagaaattcaatcatcgacactcatgaggaaaatgattgtagcgctctatcaaaactttcttcagctgatgatacccgtttgaccaatacatgctctgggtgagaaagtttcagctggctgaatgatttgttagatggtttgccgagatgaagacagcatacaactagattggctagagtttctggatccctggcatccttgttaagagcttcaaccaaaagggtctcagcttcgtcgaagttggccatgtgcatgcagcaaac

SEQ ID NO: 222872 - DNA, 522 bp, Glycine max
  unsure (1)..(522): unsure at all n locations
ggtcgattgacataacacccgaatccaagtgaaacgaaaaacactcatcatcatggattcagttgcattaaatggcaaaagcaatgataagcctcttcacgttgccatgctcccatggctggccatgggtcacatatacccttacttcgaagtcgccaagattcttgctcaaaagggtcactttgttaccttcataaacagccccaaaaacattgaccgcatgcccaaaaccccgaaacacttagaaccattcatcaaactcgtgaagctacccttgccaaaaatagagcatctcccagaaggcgcagagagcacaatggacattccgtccaagaaaaactgtttcctcaagaaagcttacgagggcctacaatacgcctgttccaagttgctgaaaacgacaaaccctgactgggttttgtatgacttcgcagctgcttgggtcataccaatagccaagagctacaacnatncttgtgctcactacaacnataccccagctttcaacaaagtctttttcga

SEQ ID NO: 222873 - DNA, 370 bp, Glycine max
  unsure (1)..(370): unsure at all n locations
cttttgacttcattcgtgggagttgttangacgggcagcaacaactcaaggggggagggtcattgttaatgacaactatcaccacaactcccaggtcattggctatcgcaactcttggaaaaccaataccactgggacaacaccatcacgaattcgattgccttgccaatccagacattaaaaggttcgacaacgaaactacttacatgaacaatacgtcttctaagactccctgggcgcttgacaaaaccaatgctttacctgaaacgacaactaccaatgctattgcaacgttgaaagctgaaacaacaaacaattattgcacagctattgaagcgcccggacatatggattttattaagaatatgat

SEQ ID NO: 222874 - DNA, 463 bp, Glycine max
ctcgagcttcctatattggtgatactggatgaagcatgcattgagttttcaccaatggaatcagggatgagtggggtgaagaaacatgataatttgatggttcttcggacatttagcgaaagagctggtttagctggacttcgagcgggatatggagcttttcctttgagtataattgagtatctttggagagcaaagcagccgggtaatgtatctgttgctggtggaatttctgcatgtgcagcattgcaaaatcctacctatctagagaatgtgaaaaatgctttgctgagagagagagggagactttctgaccttttgaaagaagttccattcctgcggccatttccaagccattgtaacttcagtctttgtgaggttgcatcaggacaggatgcaaagaagctaaaggaggacctaccacaaatgggtgtgatgattcgtcactatgacacgaaagagc

SEQ ID NO: 222875 - DNA, 476 bp, Glycine max
gttttggtgacattcttcttcttcttcatatcatcacaaccaagagagagagagagaggagagagaaagcgcattaaaagatcaatttgcccttcgatcttcttcttcgtcttcctctctctcgcaccatgaacgagaaggccaacgtctccaaagagctcaacgctaaacacaaaaagatactggaaggacttcttaaactaccagagaataaggagtgcgctgactgcaaagctaaaggtccaagatgggctagtgtcaatcttggcatctttatatgcatgcagtggttccggaatacatagaagtcttggggtacacatattaaaggttcgctctgcaactttggacacatggctcccaagcaggttgcattcattcaatcgatgggaaatgagaaggcaaatagttactgggaagcagaattaccccacattatgatagagtgggaatggaaaattctttcggcaaagttt

SEQ ID NO: 222876 - DNA, 511 bp, Glycine max
caaactttccctcaaattttcactcttttctgcaccgccagtgatgggagatgggtgcgcggttgagggcaccacggggaattccaattctaataacaataataacaataagaagaagaacaagaagaagaagaacaggggtgggagcaagaagaagatgacccacgaacaggtcttggccttcaagttagtgagtgagtgggttttcttggatcacccttctgcttcgtcttcatcttcttctgctgcttcctgtgttgtcgatgattttggtgttcagaagcctctagggagaggcggggaaaagctcctctttgaattgcattcgcactccaaattcagcgatggcttcttctccccttctaaagttgttgaaagagctcacatcaacggcgtgaaagttcttgctctgacagatcatgacactatgtcaggcattcctgaagctgtagaatcagctcgtaaatatggcatcaagataatcccaggtgttgaaattagtaccatattt

SEQ ID NO: 222877 - DNA, 546 bp, Glycine max
atctcatccacgatgtgttgcatttgtttttcacgatgctgaacccgaagccgcgcttcttctaatcacacgacgactcattccgtacacttgacactctcgtcaacaatggccgatgttgccggagccacagtgagtccctctatcggtgaaaccaacgatgcgcagaagaatgtgttcgatttgggagcgtttgttggagacctaactttggaagatgatccaagcagcgatgatatatcattggaaggactagaacaggaactagaagagtgtaagaacaatgatgtagttgcaaatatactgtctaaaggtaccaaacttagggattatacaaaaggagttgagaacgatttgcgcaaagttgaattggattcaattcaggattatattaaagaaagtgataatctagtttctcttcacgatcaaattcatgattgtgatagtatcttgtcacagatggaaactctttaagtggatttcaggctgaaattggttcattagttcagacataaagattctccaagagaagtctatggatatgag

SEQ ID NO: 222878 - DNA, 594 bp, Glycine max
  unsure (1)..(594): unsure at all n locations
tttgcactctttttttctacattaatgtatccatcactcaacctccttccaagtccttttaattctccgtctcagttccttcttattccaacctcactcggtttgagagcacggaatcaatgaagaaaataattagaatattttttcagcgttagtaaaaccgtcacattaaaataataaaaaaggagcgtaaattaggaagaaatattttgtgaggaagagaaaaatgcgagtgaaagagatgcacccgctgtgctgtatctccctcgagagtcccggaatcggcaaatattcgccggagcgggagccggcggcgcttttccgaaccaggagccttccggcggctggatctcacggcaatgccgctcagggatcggagaccaccgtcgccggcgttctctacaagtggaccaattacggcaaaggctggagatcccgctggttcctcttgcggagtggcgttctctcctacgccaagatccgctgtccggagaatctnaaccttctcactccatncgacgacgttcgcctcatcggagagatttncaccaaccgtctaacacgagtggacagcgctcgcaccgtcacgcgacg

SEQ ID NO: 222879 - DNA, 299 bp, Glycine max
gcttacttatattgaaacaatgggtcagggtggcccaccattcatcttaccaggccaattaaaaattctcatttatgattaaacctttcactcttggaatcacattgaaaataacaacacgcgaacacttctcaaaaatgaaatagctgctgctatcacaatgactgacatctttgttttcttggttgacactgtgcctcgtgaggacttttaataagcaaagcctgcattaattccaatatgaacaattcctattgcacgccctgctgatgcccttccatactggtacatgccgactt

SEQ ID NO: 222880 - DNA, 421 bp, Glycine max
ttctttttttttttttttatattattattgcttgacatagattgttacgattgaggtcagctgaagcaccaagcatttttgccagggcatgtaaaatagtgcataataagactgaacactccgctcttggaatcacactgaagagaacaaaacgcgaacacttccgaaaactgattttgctggtgctttcacaaggactgtcacttgtgactccttgggagacattgtgcctcgtgaggacttgaaagactgaaaacattgcactcaatccaagatgatccattcctgtagcacagccagccgatggccttcaatactggtacctgacgcatcaacatacgaccctagctggagcctctgtgcatgtaatgggtaaacccgtgatggacccaaacatgtttgctcagcaggctgacccttt

SEQ ID NO: 222881 - DNA, 558 bp, Glycine max
  unsure (1)..(558): unsure at all n locations
atataccttgtgtttgtatagcatatattcctagttgatattatctatagatggagccaatcgaacaaggaagccaacctgaaaaggaaaaatggaagggcaaggccacaacagaagtaaaaggagccaaagcagaacaagtttggcctcttttggaggatttctttggccttgacaagtggttccccactctctctacatgcattccagttgaaggtatctctggccaacctgggtgtgttcgntnntgcgctggtttcaagacccctgtggatgatggcaaacaaactgtgaattggactaagcagaaactgctatccattgacccaactcaacgggtttttagctattcgatcgtggatgggaatgtaggatttcactcctacgtttcaactttgaaagtgctgccaatggctgangggtgtgagattgagtggctatatgaagttgaaccttgtgaagggtggaaactggagcatcttgattccttcatagacacgggctngcaggtcatggctcaaaggatgcaagcagctttgaagacaatggaggaagcag

SEQ ID NO: 222882 - DNA, 566 bp, Glycine max
caagatttactaattttagaagaaataatgcaaccgctggtctctcatttactttacttggtgatgccttatcatctggattgaagattgaagacaaattggttgctagtaagcgattcaagctggttgtcagtggtggcgcaatgacagggcgtggcgacattgcttatggtggcagtttggaggcccaactgagagataaggattaccctcttggtcgtttcttaaccacacttggcctttctgttatggattggcatggagatcttgctgttgggtacaatgtgcaatctcagatcccagtaggacgttatacaaaccttgttgcccgggccaatttgaacaatcgaggggccggacaaataagtattcgattaaatagttcagaacagcttcaaattgctttgattggtctcatccctctcctaaagaagctagttggttatcatcaacaattgcagtttggacaatactgatgatgatagcgttagtttatttgagctggagcactttgatggtattagggaatgatttcaagatggcatctttcatgaaatgagtgatac

SEQ ID NO: 222883 - DNA, 533 bp, Glycine max
tatacttgtcaaccctttgagagttagaatggctgctgctattgaaatccccacaatagtgtttccaaactcctctgcccaacagaggatgccagtggttggaatgggatctgcccctgacttcacatgcaagaaagacacaaaggaggctatcattgaggccgtgaaacagggttacagacacttcgacactgctgctgcttatggctctgaacaggctctcggtgaagctctcaaggaagctatccatcttggcctcgtctcccgccaagacctctttgtcacttccaagctttgggtcaccgaaaatcatcctcatcttgtccttcctgctttgcgcaaatcacttaaaactcttcaactagagtacttggacctgtatctcatccactggcccctgagttctcagccagggaagttctcatttccaattgaagtagaagatctcttgccttttgacgtgaagggtgtgtgggaatccatggaagagtgccagaaacttggcctcaccaaagccattggagtcagcaact

SEQ ID NO: 222884 - DNA, 486 bp, Glycine max
ttcttttttttttttttttattcatattatgggccgcgcgtgcctagtttattgattgggaaatctaaaataagaagtggcatggcatgaattatttaaacgtcaaatgaaacaagaggtataaagatggattataaaaatagagtgggagctgcatagtagaaaatagtttatatttgatcatcccaaagatcagcgagttgtggtttggtgggtccgctgatcaaacggctttggctgatttgacttattctgggatgatcttgctcagacaatgcccagtcaaagatgtgcagattctgggtcatcctgtccttatcgtagctctttggcacaaatgtcacaccttgttcgcacaaccactctagactcacctgggctatggattttccatggacctcagcaatatcccttagcacatcattctccatcactttttttgggcccctgctcgcacctttccttagtggagagaacgcagccact

SEQ ID NO: 222885 - DNA, 585 bp, Glycine max
tcactctttcgcttctgaatcttcaacaatggtgctcgaggcgacgatgatctgtatcgacaattctgaatggatgcgtaacggtgattactctccttctcgatttcaagctcaagcagacgctgtgaatctcatttgcggtgctaaaacgcagtctaatccagaaaatacagtgggagttctcacaatggcagggaaaggcgttcgtgttttggtcacccctaccagtgatctgggcaagatcttagcctgcatgcatgggctagatataggtggtgagatgaacctagctgctggcattcaggttgcacaactggctcttaagcatcggcaaaataaaaaacaacagcagaggattattgtctttgctggaagccctgtcaagcatgaaaagaagatgttggagatgataggaagaaagttgaaaaagaatagtgttgcacttgatattgttaattttggtgaagaagatgaggggaagacagagaagctggaagcactcctcgcagctgttaacaataatgataccagccacattggtcatgttccatctggtcctaatgccctttctgatgtacttataag

SEQ ID NO: 222886 - DNA, 344 bp, Glycine max
gataatcaagaacattttaagttaaaaatcatccaatattcaatcgagagacatgcattggttccaattaaagtgcagagagacacattgaaacatgcgtaaatagttcccccgattagtaacagccgcgaagaatgctaccaagaaaataaaaccatacagggcaaaggggttctcaaagattacttcttctcctcctcgtttgatggcttggcgtcattcttctggtgaggctcaaactgattttgcatggaagccagcaaattcttgacagaaggggtcatttgggtcaaccccaggaagcgatgccaggatagaaaatacaaaggattgatcggccaaca

SEQ ID NO: 222887 - DNA, 439 bp, Glycine max
ctcaagcaatacgggtaattggcaaggggctctgtgcttcgtaaggccaaggatttggctgggggcaacaatggtgcaagagtgctagatgtccgctctgacatcactgtagtcacatttcgtgggccacgtgacactcaccttgatcgttttgtgggccaagcatacgctggcgatggagctgatgcgctcattgttggtgctgaccccaatccacaattcgagaaacactttgtatgatctggtatggactgcacaatcaattgttccagacagtgaaggtgctattgagggacacctttccgatgttggacttacatttcacctcgtcaaggatgttcccgggattgtctcaaagaacattgatgaggcactctttgcggctttcaacctattgaacatctctgattacgactacatgttttggattgcacaccct

SEQ ID NO: 222888 - DNA, 456 bp, Glycine max
gagagaagaagaagaagagcaatggcagcaacaacagatagcgagaagaagaagcaagaagaagaagaggtacaagaacaagtggtgaacccatgggaagtttccgccaatggcataatcgattacgacaaactcattgaccgtttcggttgccagaagctcgacgaagccctaattttgcgtttcgagcgcattacctttggcactccccacgtctttctacgacgcggcgttttcttcgcccaccgcgatttcgcggagattctggacgcgtatgagaggggagataagttctacttgtgcaccggacgcggaccttcctctgaagccttgcatttgggacacttgattcccttcatgttcactaagtatttgcaagatgtgtttaaggttcctttggttatacagctcactgatgatgagaagttcttctggaaaaatctttctatagacgag

SEQ ID NO: 222889 - DNA, 541 bp, Glycine max
  unsure (1)..(541): unsure at all n locations
cgatcactagctagaatggcaaacaacggtgatgttgttaagatcaatattgaggagatgctggagatgctggagggggcaaaggcacccctaattactgagtgttgcatttacaaagtgccgtttagtatccgaagacacaacgaaaaagcctacaccccagaggttgtttctattggcccttttcaccacggccatcctcgcctccaagacatggagaaacacaaactcttttactccaaggcttttctcaaacgaactcaaacaactttggacactttgatcggcaacattcaagagatggagcccgagtttcgtcgctcttattcacacactcttgagttcagcatggagcaactggtcaaaataatctttatggattgtgcttttatactagagctcttttgcagataccactatcgagaatggaaagaggacgacatgtgtcttccaaaaccttggttgacgagtaacatagtgtatgatttgttgttacttgagaaccaggttcctttntttgttcttgagagactctttaatc

SEQ ID NO: 222890 - DNA, 466 bp, Glycine max
gcaaattccaattcccaattcccaattcccaattcgaaacccttattcctttcaaagaaccaaattgagtgatcgtgatggcaccaaaggcagagaagaagccagcggagaagaagcccgcggaggagaagaagtccacggtgggagacaaggctccggcggagaagaagccaaaggccggaaagaagcttccgaaggagggaggcgccggcggagaagggaagaagaagaagagaaacaagaagagcgtggagacatacaagatctacatcttcaaggttctgaagcaggtccaccctgacattggtatctcaagcaaggccatgggaatcatgaacagcttcatcaacgacatcttcgagaagcttgcccaggaatcttctagacttgcccgttacaacaagaagcccaccatcacttcaagggaaattcagaccgcggtcaggcttgtgctgcccggtgaatt

SEQ ID NO: 222891 - DNA, 420 bp, Glycine max
ttttttttttttttttttttttttttttttttttttttttttttttttttttttcttgggttttttttttttggaaaggaaaaaaaatcccttttggtttaaccccctattcctttcaaagagggatccaaaaatcccctttttttaaataacaaatggcttccacccaaacaaaaaaagtaaccacccctttacctaaaaagattttctaaaaaaaaacccctcattcgaaccaagggggcctaatatctaaataaaaagccagtgtacttggggaccgccttgtacccctaaaaaacggggttcttggccaattcaccgggaaaaaaaatcctaacccgggggtaaatttcccttgaagagagggggggcctttttttgtaatcggccagattaaaaatatcctgggcaatcttcttc

SEQ ID NO: 222892 - DNA, 551 bp, Glycine max
caagatagtagtatggaattatctgtgttggtggaccgctcagttggaggttccagcttggaagatggccaagtagagctgatgctccacaggaggttgcttcatgatgatgcaagaggtgtaggtgaggtactcaatgaaacagtttgcgttgctgataagtgtgagggcctaacaattcaaggaaaactgtatcttagaattgaccataaaggtgaagctgctaagtggcgtcgcacagttggccaggaattatattcaccattgctgttggccttcacagaacaggatggggataattggttgcatttcagtccatccacattttctggcatagattcttcctacagtttacccgacaacactgctcttttaaccctccaggaatttaaaaatggaaaagtgctcctaagattggctcacctttatgagatcggagaggacaaaaattactcactaacggcaagtgtggaattgaaaaagttgtttcctaataagaagatcaataaagtgacagagatgagtttgtctgctaatcaagaaagagctca

SEQ ID NO: 222893 - DNA, 570 bp, Glycine max
ctggtgccttaacttgttcttcattgtgccctttctctgagattgcatataggtttttagtgctgaagcatcaaaatggggagatattcaataccctttatgggtgttctgctactgttctgtctggtttcatcttcagaggcagaatatttgaagtataaagaccctaaggcgccactgaatgtcagaatcagtgacttgttgaagcgaatgtctctcgaagaaaagataggccagatgacacagattgaaaggagtgttgctactcctgatgtgatgaacaagtacttcattgggagtgtgctcagtgggggaagggagtgttccggcaacaaaggcatctgctgcgacctggcagcaaatggtgaatcagatgcaaaaggcagcattgtctactcgccttgggattccaatgatttatgggatagatgcaggtcatggacacaacaatgtctacaatgctaccgtttttcctcacaatgttgggctaggagttaccaggatcctgtgctcataagaagattggagaagcaacttgccccgaagttagagctactggaattccgtatg

SEQ ID NO: 222894 - DNA, 493 bp, Glycine max
agcaaaaagcaacagggttaacaatagtaatcaaaatgaaaagtctgccctagttaaggataatgaattggtattttgaagggttctgatgctagttatacatataccaaagcctaaattaaacattcactcatcaatagaacattttaagggttccagtgggaaaaaaaaggaagggggttttggacatgttacatgagggttcactttcaatatttaagggaggttggaggttacccattttccaatgggaattgagggaccttatggttattaccaacatttattgggagctgggcaactgttttgaaccatgtttttggcaagttggcagggaacttattgtcccccgaaaaaacctcggggaaaacctgaactttggtggccggaagccctgccagttcaaatgcattgattttgggtagatatgggttaataacaactgggcgggcagtgacaagaacaactacgcattgaatagccccccacacat

SEQ ID NO: 222895 - DNA, 594 bp, Glycine max
gccggataccaatggtcaatctactatctcagaccaaaatcaaataggaaagaagaaatattctggccggctgctcatcagtgcatcagcaactgtgggagctctacttttggtggcacttatgtgcttctggggttgttttctttataaaaagtttggcaaaaacgacagaataagtctggcaatggatgttggtgcaggtgcatcaattgtgatgtttcatggagacttaccatattcttcaaaagacatcatcaagaaactagagactttgaatgaggaacacataatagggataggggggtttggaactgtttacaagctagcaatggatgatgggaatgtgtttgctttgaaaaggattgtaaagttgaatgaggggtttgatcgtttttttgagagggagcttgaaattcttggtagcatcaaacaccgttatctagtgaacttacgaggatattgcaattcacccacgtcaaaagtgttaatatatgattacctaccaggtggtagtcttgacgaagcacttcatgatagagctgagcaactagactgtgattcacgcttgaatataatcatgggagctgcaaaagg

SEQ ID NO: 222896 - DNA, 430 bp, Glycine max
  unsure (1)..(430): unsure at all n locations
gtgggcgtcaaaatgngatacgctacagcagatattaccgggtctgcacgcttacttgtgctcggacgtcctttcgagttttattttatacgaaggactctatgggacctatgtctcccgattcggtagcgggaagtacgaagaacactacgctaatttgcgctcgaacactgggatgaacacttgaaaagatggggatagacgtggcacaaaactacagcgcgtaggcgcgagccttagagaaattctattgggttctaagaacaccttggacacttataccgatcttagcgcttttattcaacaccgctctttacccttggtgttcacttacaggcaccaatggcaaggatggcatgtatgatggtaaccacaactactccgatcgttgcacttcgggtagacacggtgttgttagctgatcacattg

SEQ ID NO: 222897 - DNA, 566 bp, Glycine max
caaaatcttacatttatcaagacatttgcttctggaattcttgttccaaagggatacatatggcccgtagatgcaactctttatctacaatcacatacatctttggtctcagatgcacataaagcaggcctggaagtttttgcatcagattttgtgaatgatgttccatttagcttcaattacagttatgatcctcttgccgagtacctccaatttgtagacaatggtgacttctctgttgatggtgtgctgagtgattttcccataactccatttgaagctataggttgctttgctcacctagccaccaatgctacaaaaaaagataaaactttggttatctcaaaatatggagcaagtggagattatcctgcttgtaccgacttagcatataataaggccatatctgatggtggggatgttcttgactgtcctgttcaaatgtctaaggacggaacaccattttgcttaaactccattgatcttatagagagtacaacagtcgcccaatcaagcttcagcaaatttgccatgactatccctgagatcaaatctggcattggcat

SEQ ID NO: 222898 - DNA, 122 bp, Glycine max
aataaattatggtgtgttgtgtatgttgtgcaagacctggaacttcacctttctacgtacgtgtgctgttaggatgcagtgtgctttgatgatgctttgatgaatatgcagtgtgctttttt

SEQ ID NO: 222899 - DNA, 513 bp, Glycine max
gcaaaaccttggctcgcgttcacaatacagaccctgaaagccaacgtttttcagggaaggttgttagagcacgatggatcagtataattttaagaagatcactgtggtgccaaatgggaaggatgtcgtcgacatcatcctctctcgcacccagcgtcagacaccaaccgttgtgcacaaaggatatgctatttaacggcttagacaattatacatgcatcaaagtgaagtatactcagctgaattttcatgacaagctctacacaataatcgacgagttccccaggctcgacgatattcatcctttctatggcgatctcctccatgtgctctacaataaggaccactacaagcttgctgttgggcaaattaacactgtcaggaatctcattggtatgattgcctaagactatgtgaagttgttgaagtatggtgactcaatgtatcggtgctagtgtcttaaggaggttgctcttggccgcatgtgcactgtgatcacgagggttgctccga

SEQ ID NO: 222900 - DNA, 556 bp, Glycine max
  unsure (1)..(556): unsure at all n locations
ctcaacactccttataatcgattacaactaaagaaaaaaaaggggtttttcaatttgaatcctttccattcccacaccaaccaaccaagaaaccataaggcacattgttattatgaagaaattgaagaactactacatgcacctgcggnaccaccaccaccaccaccacgccgcggcggagcgcaagtgggtgttcccactcgccattggctccctcctctccctcttcctcctcttcctcgccaccctcacctccccggagggaacccccatcctccccttctaccgctccatcaccgccgcctcctactccgtcttcgtcgaatccagnttncgccgcctncccgtcgtctcctccctcccccctccgccgcgcctcgcctacctcgtctccggctcaaagggcgacggcgccgccgtcacccgcgttctcttggccctctaccaccccaacaaccgctacgtggtccacctggacctcgaatcctcgccggaggaacgctccgatctggtgaggttcgtggagggccacgcgctgttcaagcggttcgggaat

SEQ ID NO: 222901 - DNA, 504 bp, Glycine max
ctaagaactctaatggtggacaagatgaatatgctgatattcaagtcccttcagatttctttgctgctagttttctctatcagaaacaccacagcagaaaagaaaacccatcacacaaaacacacatacataattcacatggacaagttcaacatgccagagagttttaacgaccatctcctctggtttgattcatcactaaaatcagtatcagactcagcagagatgctctacacatataaaaaagtagctcatggcttctctacaaggctaactacgcaagaagcagagttgctctcaaagcaacctggtgttctctccgtcatcccggaagttagatatgatcttcacacaactcgaacaccagagtttctggggttggccaaatacagcactctttcactggcctctggcaaacaaagcgatgtgattgtcggagtgctagacactggtgtgtggcctgaactaaagagcttcgacgacaccggactggggccagtacct

SEQ ID NO: 222902 - DNA, 385 bp, Glycine max
gtttaggcggggcggcgagggtgctagacgtgaacctattccgggcggcgaccgcggaggatggcgacgacggcacgtcgttgtcgtcgtcgccaaacagcgcggtgtcaccgtttcagatggatttctgcaccaggaactgtaatgcagagttcggaggcagaaacaagagagagcagcaagaggctgagggtagagcgagtgatgacgatgaaaatggctccacgaggaagaaactcaggctctctaaggaacaatcagcttttcttgaagaaagtttcaaagaacacaccactctcaatcccaagcaaaaacttgctttggcaaaacagttaaatcttcgtcctcgtcaagtggaggtttggtttcagaacagaagggcaag

SEQ ID NO: 222903 - DNA, 562 bp, Glycine max
ggctgaaggaattgctgaagaaagggttaggtttaggcgacatggcgttcaacgccggcggcggagccatcacctggttccccggccacatggccgccgccacacgcgccatccgccaccgtctaaactcgccgacctcgtcatcgaagtccgcgacgctcgcattcccttctcctccgccaacgccgatctccagccccacctctccgccaaacgacgcgtcgtcgcactcaataaaaaagacctcgccaaccctaacatcatgcataaatggacgcattattttgagagttgtaatcagaattgcgttgcgataaacgcgcacagcatgagttccgtgaagaagcttctggaggtggtggagttcaagttgaaggaagtgatttgcagggaacccacgctgcttgtgatggtggtcggtgttcccaacgttggcaagtctgctttgattaactccattcatcaaattgcaaagtctcggtttcctggagaagatgaagcgtgctgctgtgggtccgctacctggtgttactcaagacattgctggattcaagatagcaca

SEQ ID NO: 222904 - DNA, 542 bp, Glycine max
gccttgccctttcttcgggcaaagttgtgtttccattttgtttccgagttgacttgctcaatatcccaggataagtgtgtgttcttatgaaggttgcagtgctatggagtctatagatttcatgctgcagcttcattagataccaattttggtgaatcatcttgatagcttgttcttggatttttgttttggggtgttgatgaagatgtttatgggtggccaaattttcggtgctggtgttattattgttagtttctttctgctgatcctctgtggcatggtttgtgggactgacagtgatatattctgcttgaaaagtgtaaagagaacacttgacgacccctacaattatttgcaatcctggaatttcaataacaatacagaagggtatatatgcaagtttactggggttgagtgttggcaccctgatgaaaacaaggtcttgaatctcaaactgtcaaacatgggactcaagggccccttccctcgcggcattcagaattgttcaagcatgacaggattagatttttcgcttaacagac

SEQ ID NO: 222905 - DNA, 467 bp, Glycine max
agagcaaaataaggattataacaaagtcacctatatataatggcattcatggttgatgatattaaattgatgtttcaatattgatagcacacaaatggatctaaaccataaaaccttatatagcactaacatttattttaggaccacaaggcaagagatacttacatattaaaattgattacataccctaattatatctcacataccttttcaatcatgtccctctcgagctacaataagttcttctaagttatcagcatcaccagtgtccataggcaacatgatctcatcctcagttgtgaaattataattaatcccaatggctcttagaagctggtatacttcaaacatggtaggcctctcctttggcattgctgtaacacagttacatgcaaccttcagaaattggaaaagctcctggtctacacccttcccaactagtgattcatcaatggcttatggagttt

SEQ ID NO: 222906 - DNA, 519 bp, Glycine max
gtcgcctagtttcgtcttcgacccgtctagcgacgaagaaatcgaacactctgaacacgaagaagaagaagaatccgaagaagaaccagagtcaggatcaggaacaggatcagaatcagagtcagaaggagaaggagaagaagaagaagggcacgaagaagcgcgggttccgaagaagaagaagaagaaaacgcagtctccatgggactttgctaaatacacggaatcagtggcggaggaacacgctcgcaggagcacaacctcggtcgacgagaaaatctccaaagcactcaaacaacgttccacgccgctcgttgctgagcttgaccacagctccgagtccgaacctgatgaacaagaagattatagaccagaggaagaagatgaagaagagggtaatgatggtgatagcaaatccttttttgctccttctgatggaacctctttccatgccgattccttcttgcagctcaatctgtctcgccctttgctccgggcttgtgaggccttggggtattc

SEQ ID NO: 222907 - DNA, 490 bp, Glycine max
cctttgttcactcttcttctcttgcggctagggttttagcgcagcttcttctagatttaaggaagatgggtaaggaaaaggttcacatcagtattgtggtcattggccatgtcgactctgggaaatccactaccactggtcacctgatttacaagcttggaggcattgacaagcgtgttattgagaggtttgagaaggaagctgctgagatgaacaagaggtctttcaagtatgcctgggtgctggacaaacttaaggctgagcgtgaaagaggaatcaccattgatattgctttgtggaagtttgaaacaacaaagtattattgcacagttattgatgcgcctggacatagggatttcattaagaatatgattactgggacatcccaagctgactgtgctgttcttatcattgattcgaccactggtggttttgaagctggtatttccaggatggacagactcgtgaacatgctctgctttcattcacc

SEQ ID NO: 222908 - DNA, 434 bp, Glycine max
gaacactaaatatagaaagttgacatttaataaacgaaagcaacacaacgcagcaaagtcctgaaactcgctgcgcttaacaaaaatgtaatcaggggttccgacaaacacaacacattaaaacacagataaataaaagcaattttgccaccgtcgatcaagaacccagttctgggaacaacagttgcgagatgatggtggagacttcaaactttgtccgaaaaacaagctacctagaaaagaagacacaagagttcagaaaagaaaccaacatttattgtaaccaacatcccctgatgaaccaggccgcacgattcacttcttgttgtgggcagccttggtgaccttggctccggtaggaaccttcttctcaacgatcttgatgactcccacagcaacagtttgacgcatgttccttacagcaaacctaccaa

SEQ ID NO: 222909 - DNA, 527 bp, Glycine max
  unsure (1)..(527): unsure at all n locations
aggtaagtaggtgtctctcactctcgcaccgaatccacattctaaagtaatacgccggagaatgacgtcacactcccactacccacccgacttagacgccgactccgtcacctcctccccacgctccgatcacttncacgacgcgccgccccgcattcgcttcatgtgcagcttcggcggcaagatcctcccccgcccccacgacaaccagctccgctacgtcggcggcgacacccgcatcgtcgccgtcaaccgctccattactttctccgccctcattctcaaactctccaaactctcaggcatgagcaacataacagccaagtaccagctcccgaacgaggatctggacgcgttgatctcggtcaccacggacgaggacgtggagaacatgatggacgagtacgaccgcgtcgcacacaatcagaacccgcgatcggcgcggctccggctcttcctcttttcccgaggagaagactcccgcgccagcagcatcagctcgctcctaaacggctcagccaagcgcg

SEQ ID NO: 222910 - DNA, 332 bp, Glycine max
cgccgcctctgcatctttaactattttgctcgacggcaccataacctgagtacggcgttcatcttggactcgctgccaataataactctccttctagatccaatcctcaagcacacgctgagaatctcatttgccggcgctaatacgcactctaatgcccaaaatacagccggagttataacaatggcccgggaaggcgttcgagactttgacacccctaccaaggaactgagcccgatcttagcctgcaagcccgggctaaatataaggggcgagaccaacctagcgtctggcattcaggctgctcaacaggctatcaagtctctgcgaaa

SEQ ID NO: 222911 - DNA, 876 bp, Glycine max
  unsure (1)..(876): unsure at all n locations
aagagagagagaaagaaaagagaaaaaggaatagtaanagaaaaggagagagagaaatatagaaaaaaaaaaaaaagagaaaaaaaaaagaaaaagaaagaaaaaacattaaatganngggagaagggatcgaatncaaggganaaatnnagggaagacgaggaaagaaagnggagagagagaaaaagaaaaaagaaaaaaaagagaaaaaaagaaaagaagaagagaaaaaaaaangaaaggagaaaagaggagagaganaggaagggagaaaaaaaaaaaaaggggaaaaaaaaaaaaaaaaaaaaaaaaggagaaaaaaaaagaaaagaagagaaaaaaaaaaaaaagaaaaggaaaaaaaaaaaaaaaaaaaaaaaaggaaaaaaggaagagaaagaagagaaaaaaaaagaacagggaagaaggaaagaaaaaaaaggagaagggaagaaggagaaaaaaagaagagagaagaggaaaggaaaggcaaaagaggcaagggaaaaagaaagaagacaaacccaggggaagaaagacgaaaaaaaaaaggagaagaggaaagggaanaagaaagaagaaaaaaagagagaggggaacgggagaaaaaaaaagacaggaaaaaagagagaaaaggggaggaaaaaaaagaaagagaaaaagacgagaaaaaaaaaaaaggagaaggagaaaaagaaaagaaaaggaagaacaaggggaaaagacgagagaaaaaaggcgagaaaaagnaaaaaaaaggggaaaagggaaagaataaagaaaaaaaaaaggaaaaaaacggagagagaaaaagaaagaaaaaaaagaaaaaaaaaaaggggaaaaaaaaaaaaggaaaaaaagagatgagaaggg

SEQ ID NO: 222912 - DNA, 545 bp, Glycine max
cacacacagcattggcaactgctatgaataagattggagggaaatcgaacacaggtgagggaggtgagcagccatctcgtatggagcctctttctgatggctcaaagaacccgaaaaggagtgctattaagcaggttgctagtgggagatttggagttacaagttactatcttacaaatgctgatgaattgcagataaagatggcccagggagcaaaacctggtgagggtggcgaacttcccggccacaaggttgtaggagacattgctgtcacaaggaattcaacccctggtgtaggacttatcagcccacctcctcatcatgatatttactccattgaagatcttgcccaactaattcatgatctaaagaatgccaaccctgctgctcgagttagtgtgaagttggtatctgaagctggagttggtgtagttgccagtggagttgttaaaggccatgctgatcatgtcttgatctctggccacgacggaggtacaggggcgtccagatggactggcataaagaatgcttgtctcccttgggaa

SEQ ID NO: 222913 - DNA, 530 bp, Glycine max
  unsure (1)..(530): unsure at all n locations
caacaaggttgctttgcaggtggcacggttcttcgtttggccaaggatttggctgagaacaacaagggtgcacgtgtgcttgttgtctgctctgagatcactgcagtcacattccgtgggccaagtgacactcaccttgatagtcttgtgggccaagcattgtttggagatggagctgctgcagtcattgttggttctgacccaattccacaagttgagaagcctttgtatgagcttgtttggactgcacaaacaattgctccagacagtgaaggtgctattgatggacaccttcgtgaagttggactcacatttcacctcctcaggatgttcccgggattgtctcaaagaacattgataaggcactttttgaggctttcaacccattgaacatctctgattacaactccatcttttggattgcacaccctggtgggcctgcgantttggaccaagttgagcaaaagttgggtctcaaacctgagaagatgaaggccactagagatgtgcttagtgaatatgggaacatg

SEQ ID NO: 222914 - DNA, 556 bp, Glycine max
  unsure (1)..(556): unsure at all n locations
gtgccatgatcacttggggtacctgctccggcagcaatgtaccgggtactgcacagctactagagcggcggaacgnccgttcagggtgtaaaagtgttgtcccaaagaaagaccatctttctcctttctgtcatcacctgtggaagagactgagatgggttcaaaaaccaacacttttacctttgaggaggtggctaagcacaaacacaagatggattgctggattatagtcaaagggaaggtgtatgatgacaccccatttttggatgatcatccgggaggtgatgaagatttagtgactgcgacagagaaggatgccaccactgattaagaagatattgggcgcagtgattcagctgcagagatgatggaaaaatactttgttggtgaggttgacaccaacactcttccagcaaaagttaccagcagcagcagtgttcgcccaccaacacaagcacctgcctataacaatcaatcttctggatttggcgtgacgatcttgcagtacatagtgccattgctgatacaggcctttgcatttgggctgcaaaactat

SEQ ID NO: 222915 - DNA, 515 bp, Glycine max
gttcaatgagatgaagggtgtctactctcaaccggataatatacttgggcgagctgctcaacaggctcttttcccagacaccacctatggtgttgacagtggaggtgatcctcgagttattcccaagttgacttttgaggaatttaaggaatttcaccgcaagtattaccatcctagcaattcccgcatatggttttatggagatgatgatccaaatgagcgcctccgcatcctaagtgaatatttagacttgtttgattctagtttggcctctcatgaatcaagggttgaaccacagacactattttcaaagccagtccggattgttgagacatatcctgctggtgaagggggtgatttgaagaagaagcacatggtctgtcttaactggttgctctctgataagcccttagacctggaaactgagctaacactaggatttttgaatcaccttctgttgggcacccctgcttcaccactgaggaaaatattgctagaaagtagactgggcgatg

SEQ ID NO: 222916 - DNA, 615 bp, Glycine max
  unsure (1)..(615): unsure at all n locations
gacaatccagatgcggtggtttctgtattgatggctgctggggaaacggcctgtgcatcagtccatggtgccaataggcttggtgcaaattcacttctcgatattgttgtttttggtagagcttgtgcaaatagagttgcagaaatccgtagaccaggagagaaacaaaagcctctagagaaggatgctggtcagagaacaattgcatggctggacaaattgagaaattcaaatggctcattgccaacttcacaaattcggttgaatatgcaacgagtaatgcaaaacaatgctgctgtgtttcgtacacaagaaacattagaagaaggttgtcaattaattgataaaacatgggagagcttccatgatgtccaggtgaaggaccgcagtttaatctggaactccgacttgattgagactattgaattggaaaatcttttgataaatgcatgcatcacaatgtactctgctgaagctaggaaagagagtagaggagctcatgcccgtgaagacttaaggttagagatgatgggaactggatgancacactgtgggattctgggagaacgaagaagtcngttggactacangccggtgcatttgaatgttttggat

SEQ ID NO: 222917 - DNA, 512 bp, Glycine max
aatagaactgtgttgctattattttctgctgcaaatacagagtgttatttgaggatgccaggaatatcaatcaacattgatgatgaatgcaacaattatcataaaaaatcaaaatcacacatctaggacattttattgcattttttccctgtcatttaacattgagactacaagtctaatccatccgttagcatgtattttaatacacccgagccttgggagggaatgattcaacctcatcatccaatacattcaaatgcaccggcctgtagtccaaccggaccttctcgttctcccagaatcccacagtgtgtttcatccagttcccatcatctctaaccttgaagtcttcacgggcatgagctcctctactctctttcctagcttcagcagagtacattgtgatgcatgcatttattaaaagattttcaaattcaatagtctcaatcaagtcggagttccagattaaactgcggtccttcacctggacatcatggaagctctcccatgtt

SEQ ID NO: 222918 - DNA, 430 bp, Glycine max
ctcgagccgaatcggctcgagtgcagttgtggcccctgttgggaatgtgccaataactactattgaaaaatcagttttgtctgtatctcctcttgctgatcaatccaaaaatgatcggaatgttgagaagaggattatgtcagatgagtctcttatgaaagttaaagaggctagggtacatgcagaggaagcttctgctctctctgctgctgcagtgaatcatagcctagagttatggaatcagttggataaacataaaaattctgggttgatgcctgatattgaggctaaactagcttctgagcagttgcagttgcagctgctgcaaccattgcaaaggcagcagctgcagctgccaatgttgcctcaaatgctgctcttcaagcaaaactaatggctgatgaagcattgctttcatctggttatgata

SEQ ID NO: 222919 - DNA, 498 bp, Glycine max
agagcatcgcgttatgttatcatttgatgaacaaacctctacaaacaaggtaacatggagaatatccatatacagcacagcctatggatcaaatcacattcaaatttaaataaatactaaaatcaaatatgaccgaccgtctactgaaacataggaagcaagaatttccattcctagggtggttctctattataaatatacacatctatgctaggtatgtcggtcatctaaataacaggccggtcttttaagtgtccgcatcataatcattgcaagctcccttccatttaactcttggtattacgactatgtgaaaccggaggaatctttgagatgatcaaagagctctgcaatccttctaatagtcttgatgttggctggatcctgcgattggatctccggggctcaaccatgtcggatgctgatttcatgggattgtcgattaaagccttttcatctaaacttacctgattaacacgtgcaggcgcaaggttcctt

SEQ ID NO: 222920 - DNA, 466 bp, Glycine max
gctaaatatggtgtgaagacattaatatattctagtacgtgtgcaacatatggggaacctgaaaagatgcctattatagaaacaacagaacagaaaccaattaatccatacggaaaagccaagaagatggcagaagatatcatccttgatttttccaaaaattctaagatggcagtaatgattctgagatacttcaatgtgattggatcagacccagagggcagattgggtgaggctccaagacctgaacttcgtgaacatggccgaatttctggtgcctgctttgatgcagctcgtggtattacaactggcttaaaggttagaggaactgactacaagacaccggatggaacatgcatacgagactacattgatgtaactgatttggttgatgctcacgtgaaggctcttgagaaggcacaacctgctaaagtagggatctacaatgttggaactgaaagggtag

SEQ ID NO: 222921 - DNA, 382 bp, Glycine max
gggcattatattatttattattattgactcattggatgttgaatacacatgtaagtttaacgaatcaactaccaaactccctaaggacgaccaaaaagaaaaagaaaaaaaaaatcctgagcaccatgtaaaaaagcagttgatggccaactgcttggctgaatggctagaaactcaaattgcagatgaaataccgtaaccgttacgatgagctttttgccatttccatgcaacctggaaactcttctcaagggcagtgtattgtgcgggccaattcaattccctgttgatcttagaagggtcactatacacctcggcataatcgccgggtccacgtggaaggtagtctactttgatgtccacccctgtggcctttttggaa

SEQ ID NO: 222922 - DNA, 504 bp, Glycine max
attttcgacagatttggccgccgccacacggctgctgaactgcttgcttcagggaaccaggacaaacttactgttttggtctatgccactgtccaaaagattgtgtttgatacaagaggaaagaaaccaaaagctgtgggggttattttccaagatgaacatgggaaacagcacgaggctattctgtcaaatgataggcatagtgaagtgattatgtctagtggggcaattgggactcctcaattgctaatgcttagtggaatagggccaaaagcagaactccagaagttgaacatcccagtggtccttgacaacccctttgttgggaaaggaatggtagacaatcccatgaacacaatgtttattccttctaatagaccagttcatcagtcactcatagaaactgttggtatcaccaagatgggtgtgtacattgaggctagcagtgggtttagtcagtccaatgatagcattcactgccaccatggtatcatgtcaactgag

SEQ ID NO: 222923 - DNA, 473 bp, Glycine max
cctggaaatacaaaaagttaaaacaagtcattacaataactttttcgtcccaaaatagccataactttgttgactaccaataaatcaccctttactagaaattacaacaaaatacattcattttcaatcctaccactagcacttttttttccttgatgtgcaacagtgcttctcttatcttccttttacaccttttttcaagaccttatataccaaggcattcctccttatataccagccaatttccccaacctatctctcaaaatcttcagccccatgtacctgcccatcatcatgacagttgcttgaggatttgttccaggtgattcatcaaatgttgagccatctaccacgcggagtctgtcaacaccaagaaccttgtaatcagggctgactacctttcccaaatggcaccctccatggtagtgccaaattgtgatcacggtgtctttgcagactgcgctatcgacgct

SEQ ID NO: 222924 - DNA, 546 bp, Glycine max
caaagaaattcaaaagcaaagcaagaatcatgaattccaatatttgcaattggaaacaaaatcatgttcttcccacagaggaagcaaagggggatgacacttacctctcagctttgacactatgctacagccgaattttccctgcaatcttgaacgctgctgttgagctgcatttgatggatatcatagccaatgcagagagttcatctttgtcagcctcggaaattgcttctttgctgctatcaaatccacaccctcaattggctaataggctagaacgcatattgcctgtgttggcaagatactctcttctcaattgctccattcgcaccaatgaagatggtgtgagagagagactctatgctctctcaccaatgggtcaatactttgcgtgtgacaacgatggaggctctttgggtcctctctcaagcttatttcatcgtggatattttcacgtcttgaaggatgtaaaggatgcaattatggaccctaacaacaacgaccatattcaaaatgtccatggaatgcctgcttatcaatatatga

SEQ ID NO: 222925 - DNA, 547 bp, Glycine max
ctctgcactctctccttctcatcctcttctcttcgcttctctgttcgtgccacttcttctcgagcaatggcatctcatattgttggttatccacgcatgggacccaagagagaacttaagtttgctttggaatctttttgggatggaaagagtagtgctgatgatctgcagaaggttgctgctgaccttaggtcagccatctggaagcagatggctgatgctggaataaagtatattcctagcaacactttctcatactatgatcaagtactggacacaacagccatgcttggggcagttccatctagatataattggaatggtggggagattggtgttgatgtttacttctcgatggcaagagggaattcatctgtaccagctatggaaatgaccaagtggtttgacacaaactatcattacattgttcctgaattgggtccagatgttaagttctcctatgcatcacacaaggttgtggatgaatacaaagaggctaaagttctgggaataatactgtacctgtgcttggggacctgtttcttac

SEQ ID NO: 222926 - DNA, 524 bp, Glycine max
gtcttcccctggcaaggatcaagaagattatgaaggctgacgaggatgttaggatgatatcagctgaagcaccagtcatttttgcaagggcatgtgaaatgttcatattagagttaaccctgcgctcttggaatcacactgaagagaacaaaaggcgaacacttcagaaaaatgatattgctgctgctatcacaaggactgacatctttgatttcttggttgacattgtgcctcgtgaggacttgaaagatgaagtgcttgcatcaatcccaagaggaacaatgcctgttgcagggcctgctgatgcccttccatactgctacatgccgcctcagcatccgtcccaagttggagctgctggtgtcataatgggtaagcctgtgatggacccaaacatgtatgctcagcagtctcacccttacatggcaccacaaatgtggccacagccaccagaccaacgacagtcatctccagaacattagctgatgtgtcgtggaaattaagataaccaggcactggaatca

SEQ ID NO: 222927 - DNA, 535 bp, Glycine max
atcatatacagcattcacgaattgtgagcagataaacatcaatagtgtatactctatagtctatagtttgtttccatggcaaaaacaactcacatagctattgtttcaagtcctggttacacccacctggtcccaataattgagttcagcaagcgacttatcaaacatcaccaaaattttcatgtcacttgcatagttccctcacttgggccacctccagaatcctccaaagcctaccttaaaactcttccttcaaacatagacaccatcttacttcctccaattagcaaagaacaattaccccaaggagtacaccctgcaatcctaattcaactcactattactctttctctgccatcaatacatgaagctcttaaatccttgtgctccaaagcacctttatccgcgttggtggtagatgtttttgcatttcaggctctggaatatgcaaaggagttcaatgccttgtcctacttttactttcctagttcagctatgatattgtcactgcttatgcacgcgccgaaacttaatg

SEQ ID NO: 222928 - DNA, 481 bp, Glycine max
gaggctttaatcaaccaacgaacaacgatgtcgtggtttgcaaggacaatcgcaaactcactcagactcgacgacgacgacgacgaccacaatggcagtgacctaaaatcccctccgaagaaacccgattccgtatccacccccagtcctaccgcgcgcggcgtcaaagaggatttctccgagctcaccaaatccttttcccgccagctctggggcgtcggctccttcctcgccccgccgcccgatcccctatctgaaaatcccgtcgccgatcccaatcccattcccaccgacgaagaagaagaagacgtaattgcaggtatccgaaacgatttcgcggagattagtggcaagttcaagaacgggatcttcaaaatctccggtaataagacggtatccgaattcaccaagatcgcttgcagtttccttcagcttggatccgaagaggaacacgatctcgacggtgtcctcggagttacag

SEQ ID NO: 222929 - DNA, 537 bp, Glycine max
aaaaaataaattaattactaaataaataatgtataagggaatgaactttatgcttattacataaattattctatgaaaaaaataattactaaatgttattgttaatatccctcccctacgcgggtacaaaaaattccaataaggtagtcagatttatatatacagaaaagaatcagctactctctatccatcatcaggcaccaccaaggttgttcaaaaatcacaaactgcaacgcaatcttgacctcaatgcgatctcaactgcaataatcttgaaaccttagttgtactaaggtaactttaaatatagtgctccaatttgattagcatgacacttgtatcatccaaagagcctcgtgaaacagacaaatctacaagctttttacaagcctgcagcaatggttgtgatttgttgttgcctacgagaaaagaacgagcaatatctactgcttcctgattaccaaccttatcccataatccatctgaagctaaaattaacaagtcatgttcaggttcaattcggagaaacttggtctc

SEQ ID NO: 222930 - DNA, 501 bp, Glycine max
  unsure (1)..(501): unsure at all n locations
gactcgatcttcgttagactgatgttacggaacgcgaacgcggaaagcactttgaaaaggaccgaagttcccttgtcgtgtgcgaaaacaatgctcgtcttgaaaggacggtccgtgcgcggaatgataggctctctcgccagcatcacgaaccgcgtgacgttgctcggatcgtcttggattccgtccgccatcacgttcaggccgtagagctccgccgctcgtgcgctcgcgatggcggcggtgtcgcggaggttattcgtggcgacgaactcggcggcgccggcggtgtcgtccacggcctcgcgcgccacgttcaggccgagtttggtgagagtgtgctcgcactgcgcgagtgcctgcggatgcgaaatcactcgcgtgaggaactcctttcggacgccggggagcgcgaggaggcagtggtggaccgggagctggacctcgccgacnatgtggaggcggtggccgaagaggaggtcgtagtttcggtggatcgag

SEQ ID NO: 222931 - DNA, 430 bp, Glycine max
  unsure (1)..(430): unsure at all n locations
ctttcttctcttttcttgcagaagaaccagttgactggttctcttagtgctctcgttggtttgcctttggatactttaaatgttgcaaacaataatttcagtggatggataccccatgagcttagttccatccataatttcatatacgatggaaattcttttgagaaccgtcctgctcctcttccgccgacagttacttcacctcctcccagtggatctcatagacgtcatcattctggatctggttcacataataaaacacaagcttctgataatgaaaaatctaatggccataagggtttgacagtgggggctgtcataggcattgttttaggttcagtactggtggctgctattgggttccttgctcttggtntctgtatccgaaaagcaaaggngaaagaaaaaggtgcaagaaattttagtgggg

SEQ ID NO: 222932 - DNA, 510 bp, Glycine max
gcatcaaggcaagaaataatattaataatagtggtagtaatagtaatggactttcaattaaattacattatattacagcatggcaaatcaattaaaatatacagcttattttccatagtgttaaatggtgtgtgaaaaattccaacgcgtaattagtatctagaatttgtttttgattgatgatacattttcacaaacttttctactccttacttccagggtttttgtagtagtaattttttagccgggaaactgcacaaaattgcaaaagatcactagaggcactatgacatttaaaatgacatgtccatggcatcatggtctggggtcttgtgaccaaaaccagattcctcacttggtcgtcttttaaccacacttgctctttgcactaaccgaaccaatgcttgcaccacctcagacatcggaggtcgaaattcgggttccggctgaacacagagggcaatgatatcagcaaagcgtgacagtgactttgcaggatacatgccgttc

SEQ ID NO: 222933 - DNA, 548 bp, Glycine max
  unsure (1)..(548): unsure at all n locations
cttcctacgtgtaccactccttgtttgcatactttgacagggacaacgtggctctcaagggatttgccaagttcttcaaggaatctagtgaggaagaaagagagcacgctgaaaagctcatgaaatatcagaacactcgcgggggaagagttgtacttcaccccatcaagaatgtcccctcagaatttgagcatgtggaaaagggggatgcattgtatgcaatggaattagctttgtctttggagaagttagtgaatgagaaacttctgaatgtgcacagtgtggcagatcgcaacaatgaccctcaaatggccgacttcattgaaagcgagtttttgtctgaacaggttgaatcaattaagaaaatttcagagtatgtggctcagttgagaagggttggaaagggtcacggtgtttggcactttgatcaaagacttcttgattaggaagatgctgcttaatcttgaatagccttattattagtcttcatttacatttggtcttttctgaanatctgggttggtttctaaattagtagtatttaaatg

SEQ ID NO: 222934 - DNA, 489 bp, Glycine max
ttttttttttttttttttttttttttttttttttttttttttttttttttttttttttgtgttgggttaaatttattttttttttttttttttgggaaaaaaataaaacccccaaacaaaaagtttttgcaaaaaagggcccgccccttttacatggcccacaaaaaaaaacattccccccggttcccaaatccctccccctagaaaaaacctttaaacccccccaaaaaaaaaaacccccccaatttttaaaaaaaccccattggaaaaaaaaaccaaaaaaaggggttttaaaaaaaaaaccccttttccctaaaaaaaaaatttttgaaaaaagggccaaaacccgggaccctttccaacccttttaaaagggcccccataccttgaaaattttttaattaaaaaaaccctttaaaaaaaaaaccccttttaaaaaaaaccccccccttgaggggatttttggggaaccccccccccttgccacat

SEQ ID NO: 222935 - DNA, 500 bp, Glycine max
gggtaaaagtgttgtcccaaagaaagaccatctttctcctttctgtcatcaccgttggaagagactgagatgggttcaaaaaccaagacttttacctttgaggaggtggctaagcacaatcacaggaaggattgctggattatagtcaaagggaaggtgtatgatgtcaccccatttttggatgatcatccaggaggtgatgaagttttagtgactgcaacagagaaggatgccaccactgattttgaagatattgggcacagtgattcagcaacagagatgatggaaaaatactttgttggtgaggttgacaccaacactcttccagcacaagttaccagcagcagcagtgtacgcccaccaacacaagcacctgcctataacaatcaatcttctggatttgttgtgaagatcttgcagtacatagtgccattgctgatattggcctttgcatttggcctgcagtactatggcaaaaaaaagcaagtcagaaaattgaa

SEQ ID NO: 222936 - DNA, 575 bp, Glycine max
atctgaatacaaagtacatggttaattggaggactggcatcacttggaatgtattacagttttatacaaagtagaataagagaaacagatactacaactgaatcaggttcttgaaacaataagtaacaagaaggaaccacccaataagaatggaagtgaagaagaaccaaaactttaggaaggtgaagcccccgaataagactccaagaaaaaatataaccacaaatggtaagatagaccgaagcatagatgttttgctgacccaacgtccattgaataaaacgaaaattgccagattcaccacattccatccgccagacagaaaacccaacctgttcaaattattggcaacatacgagtggcagttgcaggtaaagagattgtaagataaatgttggaattcttgagtgctttttcttagtgcatcatcccaagtcctcaaatctcctttagtttcatcctgaatgtagtgttcctcaccattgtacacagactggactaaagggacgcaacacttttctttgggaatatgaaatagcggggggagctccaaatgcaaattgccacacacacaa

SEQ ID NO: 222937 - DNA, 506 bp, Glycine max
gaaaaatccacttcaatattccaaccgaaaaatgtctgcatggggtaccccaagaccttattcatctgggttacagtgagatcagatgtcccattaaaacataatttaagctcataattttattctaggaatgcaggcatcaattacatttagccaaatatgcattccatccttgaagacgatattcacgagctatctcagcagggtttgctgctttgatgatgccacgtcccacgatgatgatgtcactgcccctatcatggatcacagaatatggagtgttatattgctgccctaaagcatcgccaccagttaccatttgaactccaggggttgcctgaatgaaagaaggatttattggtgcccctggccatgatgcaggattgactgagatgaagccaattacaaagtcagaatgatcctcagcaatttttactgcagaagttgtataatctcccttggcaaggttaccagctgagctcatttcagcaagcagtaatagaccc

SEQ ID NO: 222938 - DNA, 365 bp, Glycine max
aaaaaaatgggactcaatcctccttaataaccctggggggggaaataaaaaaaaacccggggtttattttccctcctaaacaaaaatacttttttgttcaagagctccccaaaaagaaaaaccccaatttaactcccaaaaagcaaattccttttaaatactttgacaaactagcccccccacacacaaatcctgaaaaatttatattttggttggatacatgaatactttaacccttgcccccattgacctaggggggaaattggacttgaacttttcttgaactataccactgttaccatgaggcccggggacctttccccaaatgccgcgatagggggttccggtcttttttaccctccctt

SEQ ID NO: 222939 - DNA, 515 bp, Glycine max
  unsure (1)..(515): unsure at all n locations
gcaaattgcacgaccatggctttctctatctcactctttttattagtcctgcttttttctttccaatcttcttcatcttccctattgtcattgaacaaggggtcctccctctcagtggagaaacacgcagaagacgttattgtctccccaaatcaaatgttctgtgctggcttctttcaagttggtgaaaatgccttcccctttgccatatggttcaacgaccctcacactcacaacaacaaccacaccgtggtttggatggcaaaccgtgaacaacccgttaatggaaggctgtcaaagctttccctcttaaacagtggtaacatggtcttggttgatgcaggtcaaatcaccaaatggtcatcaaacacagcatcacatgctccagtaaagttgcatctccaagatgatggcaatcttgtgttaccttgatctccaaggaaccattttgtggcaaagtttttgataccccaactgatactctncttcccggtcaattacttaccagacacaca

SEQ ID NO: 222940 - DNA, 449 bp, Glycine max
  unsure (1)..(449): unsure at all n locations
cacgtaatcaaaaccatgcagatacgaacctgccactccatcaccacccaaacccttccacaacttccgtgttcttctagaaaagcccaccaccgccaccttcttccgccgttaaacgctgcggtttccgcggcgccgttcaaagcccggaaggcccactcaatgcctccagaaaagaaagaaattttcaagtccttggagggatgggcctcggagtgggtcctaccgctgctgaagcccgtggagcaatgctggcagccacaaaacttcctccctgacccctcccttccgcatgaagagttcagccatcaggtgaaggagcttcgcgaacgcactanagagttacctgatgagtacttngtggtgctggtgggtgatatggtcaccgaggacgcgcttnccacttaccagaccatgatcaacaaccttgatggagtganagatgacag

SEQ ID NO: 222941 - DNA, 479 bp, Glycine max
gtcaaaaccaaaacatgctattagtatatcatatcattacgcgaatacagagattttattacaaaatatgatattttaaataaagagaaacactaacaagctaagctaatatgcaagccaaacgttacaacaaaaaagtcctactggttttgtatccaccagaacaacaaccatggatccaacaatgtccattacacgcaatccatgttaaattgttcattattcgtactcaaaatgccacctacaaacaaaaactcaaaatagtcacaaagccaaaaacctgttgactcacgttgacctctatctcttatctcttaagtcttaactgaaatttcacaaaagcaattctttattgaaaatccaactgaacttaacgccatgatgcttcttcatcttacgcgctcgctcatcagcgcgctcttgcaacctcctaatcctcggcgccaacccacacacgaaatcctgcgcccgctttccct

SEQ ID NO: 222942 - DNA, 354 bp, Glycine max
cattcatccatatcccactccattacagcacagcacttctggattggacaaaactacccctatgagtatcagtgtccgatcatggcacgcattcatattatttctcaatccttcatcctttccatttcgcaccaacctccatggcttctctggcgttgctccgcagaaccacgctctcccactcgcacgtgcgtacacgagccttctctgaggggaagagcagcaacagacaccgcatcgagaagattctagtagccaaccgcggtgaaatcgcttgcaggatcacgaggaccgcgcgggaggctcgcattcaaaccgtcgcccgttacagcgacgccgacaggactcgttcac

SEQ ID NO: 222943 - DNA, 548 bp, Glycine max
gatcatctccatgatatccaggcacaagaggcacacctgcaggggccatgtattctcttggatgcactcttgtcacccatatctcgaatagcagacgcaggaggccctataaacgtgagaccactgtcctcacaaagcttggcgaagtcagcactctccgacaagaatccatatccagggtgaatagcctgcgcgccggagcgaatggcggcgtcgacgatggaggctccgttcaagtaactgagccgcgccggtggcggtccgattcggatggccttgtcggcggacgcaacgtggagcgagtccttgtcggcgtcgctgtaaacggcgacggtttgaatgccgagcctccgggcggtcctcgtgatcctgcaagcgatttcaccgcggttggctactagaatcttctcgatgcggtgtctggtgctgctcttccactcagagaaggctcgtgtactcacgtgcgagtgggagagcgtggttctgcggagcaacgccaagaaagccatggaggttggtgcgaaatggaaaggatgacagattgagaa

SEQ ID NO: 222944 - DNA, 512 bp, Glycine max
gtctgcattgatgatgattgtgttcctgcaaaagataattcagggattttggtggatgctgtggctcagcatattgtgaacctgcagactcctgccacccccttcttctttaatacactgtatgatccattctgtaagggtgcagattttgttcgtgggtacccattcagcctgcgaagtggggttgattgtgctctgtcatgtgggttatggctcaatctggctgaccttgatgctccaacacaagctctcaagccagggcagaggaatttgcgatatgtagatgcagttctgactgttccttcgagagccatggtgcccgtgagtggaatcaacattgcctttaaccgtgaagctgttggtccagcattggtcccggctttgaggctggcaggggaagggaaattgaggtgggaaactatggaagatatatggtgtggaatgtgtgtgaaagttatatgtgatcacctacgccttggtgtgaaaagtgggttaccttatgtttggagaac

SEQ ID NO: 222945 - DNA, 550 bp, Glycine max
cacaaaaccaataagtattatcatcattttattcagcctttaggctgggtcaggtaaaatgtaagcttagttcactacaaactggaaaaaaaaggcagctataaattagttaaataacataaagaaatatagaagccaataaggcaataaccttcactcctacaagagtcctcaagttcaggagctttaaccagatctaactgacttccagagcttgacccactcttccatggcttgagcagcctctgaaaacataggatcaaccttccccaggtgctccttcactgttttggccacctcgaccacgcaagcctctgctgtagttgctgattgtggcaaccttaatgactgaaagaaaggaacaacatcctccatcaatttcaccccttcccactctttcttcaagctctgtattgcatcacccctttctgttctccaaacataaggtaacccacttttacaccaaggcctaggtgatcacatataactgtcacacacattccacaccatatatcttccatagtttcccaccttaatttccctttccctg

SEQ ID NO: 222946 - DNA, 536 bp, Glycine max
atactctcattccaaatctttgaatttatgagttgccaggagacatgaattgtaaagcaacaagaacaaggacaagagaggaaggtgtaagaagtaagaacaatgagagagacattacaaccacatcccacattagtattaattatttcttaggagcaagcctagacttaattttctcaacctccttggtacccacctggaacgccttggttaacacattgtctggaaccggtggcgtcgctgcaaacaacgttagagcaatggactgtgtgccaggcaattgactgttgaatgctgcaatcactgaagcttgttcctttccattgttcttttggaagtgaaccaacccttttgggaacacaaatatttcacccttgcttatgctctttgatatgagcacgttggctgtggttataacccacatctagtgttcttcaagcacaacactacctcggtggcacgtgggtgcgtgtgaggtgggttgatgccacctggggcatagtcaatgcgtgataaagacacgccagggtgttgag

SEQ ID NO: 222947 - DNA, 526 bp, Glycine max
gtgcaacaatgatcatttccattattctagtgtttttattaagacaatgatgaagacaatctttgagttcacggtatgctagtgtttttaaatacatggacattgcagtattttgcttgtagatgaatgttgcaccatttgattagtcggtctccaaactgcagcctttgttcctgtttgcctgtccactcacttcagtcccctttgttcttgattatgtttttcaatttctcatttgcagccactagttcagcagttatgcctggttcattggctgaatgccctgcatcaggaaccaccctaaaatctgcctctggccaagctttatgaagatcccaggctgacatcataggacagcaaacatcatatcttccctgaacgattgtggtgtttatatgccttattttatcaattctgtccaacaggaatgaatcagaggggaagaatcccttgtttacaaaatagtggtttttaatccttgcaaatgccagcgaaaagtaatcgtcatccccttttttatattctc

SEQ ID NO: 222948 - DNA, 536 bp, Glycine max
  unsure (1)..(536): unsure at all n locations
aaaattgaattgatgggtaaaactaccccaattcgaagcttggccaatcaagatccaaatcatgcaacaacaaaaaaaaaagcaactttttttttccttctctttctctcctcttatcgaaagcttaatcacaaaactaaaatcacggacattatttataaaactcaagtgcgacaaactccaaatgagaaagaaaaaagccggttcctccatttctttatccaactctttatcctcagtttactcagcagcaaggggcacagactcagccaatttgcggtacttgagagcatagaacatctcgagatagcggcggctctcacggcggtcaaggttagacacatgcttccagaagccatagacaccggtgagagtgagaagcctctgagagtaaatttgccatgtgtacttctcttcaatacgctggagaccagcctttgagatcttgtcccagtgagttgggtcaagcttgcacttctcaaagaagtcaacanggagatcagcagcacggtcaccatggtaagggtcaatgtgga

SEQ ID NO: 222949 - DNA, 553 bp, Glycine max
aattaagacatgtcagattgaaattattcctaatatctctacaaaattattcaattatttttccctctctagcaggcacacactgaaggcctcagaaaccaaaacataacacgaagaagacaagatcatttggggtcaagctgaatctacatattggggaacactgcaggttgtagcagaaatcacacattaataacaaggcttccattttgggtgtgatttactcggtggctggggcattaaatgtgattcagagtttcaatatccatgccatatgccatgagggtattctccatactcaagccacgttcatgttatgacaatatcttcaatgcagccacgcgtagattcttggcaagttccttagtggtcaaattgtaactttctcccatctgagcaacaatggtaatgtcaaggatagaattaccaaagggtaggacactgctattagcaacaaataagtgattactttgaatctcagccagtaacttgaccaaaagtcccctttgcttctggcagtggatcttgagcagcatctccttccctgatactc

SEQ ID NO: 222950 - DNA, 488 bp, Glycine max
caaatatttatgctgatggaagtatttgtttggatatattacaaaatcagtggagtcctatttatgatgtggctgctatactcacatctatccagtcattgctttgtgatcccaacccaaattctcctgcaaactctgaagcagctcgaatgtttagtgagaacaagcgtgagtacaatcgaagagtgagggaaattgtggagcagagttggacagcagattaagttcatccttatatgcatgggaagctttgaaggcatgaatttggttgcagtgatggcaactataagaatgattgtgcaaactcatcacatttatattctctgctgatatgaatgatagcatcatcttatctttaatttattatagcttctgcattgcatatgtcagctaatgtaaaatagaattatgcgtgtcaatttactttcgattgttgtcagacattcaacatgaaaattatagtttgctgaactggttatgatttcatc

SEQ ID NO: 222951 - DNA, 513 bp, Glycine max
  unsure (1)..(513): unsure at all n locations
atcgctgttaggcttttggagccactcaaagcggagtttcctattttgagctacgccgatttctaccagttggctggcgttgttgccgttgaggtcaccggtggacctgaagttcccttccatcctggaagagaggacaaacctgagccaccaccagagggtcgcttgcccgatgccactaagggttctgaccatttgagagatgtgtttggcaaagctatggggcttagtgaccgagatatcgttgctctgtctgggggtcacactattggagctgcgcacaaggagcgttctggattcgagggtccctggacctctaatcctcttattttcgacaactcatacttcaaggagttgttgagtggtgagaaagaaggcctccttcagctaccttctgacaaggcacttttgtctgaccctgtgttccgccctcttgttgagaaatatgcatcggacgaagatgccttcttcgctgattacgctgaggctcaccaaagctntctgagcttgggt

SEQ ID NO: 222952 - DNA, 417 bp, Glycine max
ggcccaacaaacatttgcccactaataataaacaaattactattttttacggtaaatggccccatactacaaagggtaataatttcccaatccctgaacaatgttttttaacaaaaggatcgcccccaaataaaaacaacccaactccaattattatcaccccgtccagcaaaatacattcaaaagctttttaaaaatttgaggaacccacaggggccctttaaaaaccctgcccattaaatttatgaaaaaaattttatgggcaccgggcctttccaacaatcccaaaaacgttgtttaggttttagcaaacccaactctaaaaagcttttggtgagcctcaccgtaatcagcgaaaaaggcatttttctcccatgcatatttttaaacaagagggcggaacacagggtcaaacaa

SEQ ID NO: 222953 - DNA, 483 bp, Glycine max
gaagatgggatggagtcgtggtcgctcaatcaaggattcacattctgaggcactgtatgatgctagaagacaggcccgtagagctttcttagcattttcttctgatgatccaaaattgaagattactgggtctgagcccattgagggtgatgttgaaatttttcctgaggagcctgtgaatggcgatgctcagttttctaagagcacaccggtttacgtactcaacccaaagcaagacctgcatggattaggttttgatccttataagcatgctcctgagtttagagagaaaaaaagatcacgcttagccagcaaggggggaggacctggctatagcaaaaacttctccaccagagacagtctttttggtttgaaatcaggaaaggctgcccctggttttggtattggagctcttgaggagcttgatgtggaagatgaggatgtctatgccactcgttatgaattttgagatgcttatgttca

SEQ ID NO: 222954 - DNA, 500 bp, Glycine max
  unsure (1)..(500): unsure at all n locations
aagctgagaagtatcgagcaaaagtacaccatattagggtaatgaatgtaaaggtacaaagctccagtcagattttgaactaggcagatgactaatatgaaaccaatattcccaatatatatagcactcatttagtagacagtaatacaaccaggagaagtggtgtcccatggtgaggatttcagacaacagaaagctaaaagcacaaagaaagtaattctaagaaaccctccattggcaactaaaactagaatcggtattcaatcagtccccacttgcacaacccttgcacccacagtgaacacactctatgaccttctcctccctaagttgcttgggaactctgcaaacacaagtggtggcaaaattgtgatcacgtggctgcatgcacctcaggcagcaaagacgttcataaccaggcttcttccattttgcaattagattgcggtcagcatatccttgatctaaacagaattcatacangtctttagaaatttcct

SEQ ID NO: 222955 - DNA, 592 bp, Glycine max
gagcaaggaaaaagaactacattgctggtttgcacactacagggtcgaaggtgtctcaactaattagagtgttgccaaggcattttgacaacaaaatttgaaagtactaatacagagctaaaatctactctgacatagtttataattacaggcaaagaataaggtgccaccacctattgcatcaacttgtcacacgagtaacaaacaagcatgagcatacttaaaaatggatggcacttcctattccgcgattttaaagattgatcactcaacctcaaccctctgaatgagcaattgtctttggttgtgttacactttgccaaggtaaataggtgatggcttgccaaataaggtatactacgaaggcaacatatgcagcagttattacacccactacagtgccaatcattggtccattcacttcagaggaaaagaattccgtcaaaagatagccattaatcactatcaccagagcagccacgagccatgaagtagtcttgaggacagcaccaattctgaaagtgcccattatctgctcctttgacaccagacaaagcaagggaataagtgcaaaggggatctggactgactg

SEQ ID NO: 222956 - DNA, 493 bp, Glycine max
caattgtgcaagtaaaaagtgacagtatgtatatacaatatacaacaatttttttatcctctttttcccaataacatgatgctaacaaagcaaataaatttgaattgtggcggtttcatatctcagctactccaatcattaaaaaaatgggaaatcaaggggtaaaaaatgataccgtgggacattcctatgacactatcaaccactattaagggctaggaggaacaaccgaactagtttcaagcaatttcccagcatcttcatccattgggatctttctccaaccatttctcatggacaaaattcttgctctctcaagcccattacctctgaatccagtcattctcgatgacatcattggcatcacaagaactgatgatgcattgatggtatcctccccaaaaccaagagacaatgcacaagtagtctttgcctttaccaacaaatctgtaatctttattagtattgctttaactaatgatctcgtatcttt

SEQ ID NO: 222957 - DNA, 427 bp, Glycine max
cttcaatttctttaccttatatatatctatccaattaaccactcttatatttagaatccaaaaatctctcgtcgtccaagaaagaagcaccacaaattaattctcgtttcccattcccatccccatgccaactattttgcataggatgttccttctttacaacctcgtacactcattcctcctctgtctggtccccaagaaggtgcgtcccttcctccccccttcttggttccaaaccaaaaccatcactgcaccttcttcttcttcttcttcttgttcttccagcgcccgcatcatcaagagaacaacaatggaccccaacgagctgaagcgcgtgttccagatgtttgaccgcaacggcgacggaagaataacgaagaaggagctgaacgactcgctcgagaatcttggcatcttcattcctgac

SEQ ID NO: 222958 - DNA, 374 bp, Glycine max
ctcgagcttcctatattggtgatactggatgaagcatacattgagttttcagcaattgaatcagggatgagttgggtgaagaaacatgataatttgattgttcttcggacatttagcaaaagagctggtttagctggacttcgagtgggatatggagcttttcctttgagtataattgagtatctttggagagcaaagcagccgtataatgtatctgttgctgctgaaatttctgcatgtgcagcattgcaaaatcctacctatctagagaatgtaaaaaatgctttgttgaaagaaagagggagactttatgaccttttgaaagaagttccattcctccggccatttccaagccattctaacttcattctttg

SEQ ID NO: 222959 - DNA, 490 bp, Glycine max
gcaaaacacaatatttatcatgggggattggggtcaataatatataaagctacatccacatcccttgccaaaatcaacatattttcttctaattttgacggctctatataaagattagctaagaggagtttagcatgacgtgttacaatatttattacatcaaattttcctcctacgagagtctcttgaggcacttcataagtgtatctgtttgttcaggcttcccaacagtcacacgaacgtaccctttcagctcttttttgtcatagtgacgaatcatcacacccatttgtgctaggtcctcctttagcttctttgcatcctttcctgatgtaacctcacaaagaatgaagttagaatggcttggaaatggccggaggaatggaacttctttcaaaaggtcataaagtctccctctttctttcaacaaagcattttttacattctctagataggtaggattttgcaatgctgcacatgcagaaatttc

SEQ ID NO: 222960 - DNA, 501 bp, Glycine max
aacgtcagagtaagatagtaattagaaataggactgaattgatattgcaatcttgaacctcaaggtatacatcaacatatttaaattaataataatgagtaaaaaaaaaaacttcgtaccccattgcccagaggctctttgctatgcgaaggtatgggggagggataatgtacgcagtcttacccttgcatatgcaaagaggctgtttccgaattcgaacccatgaccaacaagtcaccaaggcacaactttaccgctgcaccagggctcgccctcatttaaattaataataatgagtcagcaaaccaaaattactcgaagcacgaaattgacaagggtatagaattcatgtcttaaagaagatttcttaatttaacattataactctacaggtaagaagccatgttgagctcaatttcttctttggccttgatgtcaaatggttcctcaccaaaatataaatctagaattgacttacataggagtttactctggatgctt

SEQ ID NO: 222961 - DNA, 421 bp, Glycine max
aaaattgaatttttgggtaaaactaccccaattcgaagcttttccaatcaatatccaaatcatgcaacaacaaaaaaaaaagcaactttttttttccttctctttctctcctcttatcgaaagcttaatcacaaaactaaaatcacggacattatttataaaactcaagtgcgacaaactccaaatgagaaagaaaaaagccggttcctccatttctttatccaactctttatcctcagtttactcagcagcaaggggcacagactcagccaatttgcggtacttgagagcatataacatcttgagatagcggcggctctcacggcggtcaaggttagacacatgcttccagaaaccatagacacccgtgagagtgagaagcctctgagagtaaatttgccatgtgtacttttttttaata

SEQ ID NO: 222962 - DNA, 531 bp, Glycine max
aaaattgaattgatgggtaaaactaccccaattcgaagcttttccagtcaagatccaaatcatgcaacaacaaaaaaaaaagcagctttttttttccttctctttctctcctcttatcgaaagcttaatcacaaaactataatcacggacattatttataaaactcaagtgcgacaaactccaaatgagaaagaaaaaagccggttcctccatttctttatccaactctttatcctgagtttactcagcagcaaggggcacagactcagccaatttgcggggcttgagagcatagaacatctcgagatagcggcggctctcacggcggtcaaggttagacacatgcttccagaagccatagacaccggtgagagtgagaagcctctgagagtaaatttgccatgtgtacttctctttaatacgctggagaccagcctttgagatcttgtcccagtgagttgggtcaagcttgcacttctcaaagaagtcaacaaggagatcagccacacggtcaccatggttagggtcaat

SEQ ID NO: 222963 - DNA, 505 bp, Glycine max
ctctctgtttctgtttacattcaagagagagaagaagaagaagagcaatggcagcaacaacagagagcgagaagaagaagcaagaagaagaagaggtacaagaacaagtggtgaacccatgggaagtttccgccaaaggcaaaatcgattacgacaaactcattgaccgtttcggttgccagaagctcgacgaagccctaatttcgcgtctcgagcgcatcacctctcgcactccccacgtctttctacgacgcggcgttttcttcgcccaccgcgatttcgcggagattctggacgcgtatgagaggggagataagttctacttgtacaccggacgcggaccttcctctgaagccttgcatttgggacacttgattcccttcatgttcactaagtatttgcaagatgtgtttaaggttcctttggttatacagctcactgatgatgagaagttcttctggaaaaatctttctatagacgagtgccgaagacttgcagggagaat

SEQ ID NO: 222964 - DNA, 491 bp, Glycine max
ctttgcatagatctgttgcagagcctagaatcattgtgcaaacaacaagtgaagtgaatctcttagatgatggatatcgatggcgcaaatatgggcagaaagttgtcaaaggcaacccatatccaaggtgatattggtttcccccctacactttgattgcttatatttaatgaataattatggatgagcattatcattgtctgctaagtgacaagtttaagtgaaaaaaaggctcaccgtaaataaagtatgaatggacaagttcaacaacgtaagtttaacatgagtttaaaatgagtgaaaaaggctcaccattacaaattgctcccatagtttaaaatgcagtataaaaaggttaatctataatataagttttgtcccgcacatacttatgtatatgaatatttccccacagcataaaatttctggatccgccactacatctaatggtttaaggcatttgagttagatatgatgtgaagttaatttat

SEQ ID NO: 222965 - DNA, 474 bp, Glycine max
atcattaaattggcccattaatttagcacacttttttttgtacattcaaaaattaaatttaaaattttcatcttttaaggactaatttgtcaacccatcacactttcaaagacgaatttggctatttacccctaaagttatgaactaaaaaagctatgtgatctgctcttccttcaatcttaaacttgccacaggtcgctgctcattgccagtaacacccctgctgctggaactatgtttcacgtcgggtatggcaaacttttgtgcttttaactgggatgcactattgttggcaagtgtgtggctattagtcttaactgcaggcacatcatgattgggttttccttcgtatgttgttatgacagctttaggatccattgaagccctttcaacatgcttccgaactttgaaccttgggtcgggcatttgtaataactcctacatttaaaaaaaacatgaatacttttttttcaa

SEQ ID NO: 222966 - DNA, 498 bp, Glycine max
  unsure (1)..(498): unsure at all n locations
aagcaattaacatattctcctctcattctcactcaaaacacaaaatcctaactaaggtgaaaatgaaggcatcacgcattgctttgttcactttggtggtgcttctttttgtggctgaagttcaagtgtcaaaggcagtgacctgcagcccagtgcagctgagtgcatgtgtgagtgcaataacctcttcaacccctccatcaaacctatgctgctccaagatcaaggaacagaaaccatgcctttgccaatatctcaagaaccccaatctcaagaagtttgttgactctcctaatgcaaggagagttgctaacacttgtggaactcccttcccaaggtgctaaaggtgttactaaatttgaagtggttttaatttctctgcctgattatgcatcttgatatctatccatgtgttctggccagagaccagagagtgaaagaaattatatatatatgnngnatcatatatatatatatatatatatatatacatatatg

SEQ ID NO: 222967 - DNA, 565 bp, Glycine max
  unsure (1)..(565): unsure at all n locations
attagatacagatacttctctgaattataaatacagcctttggcgacagctaattaattaacgttacgtaagatgagatagagcacaccatggaactgaaatggaatgacatgaaaccaaagcatcacatatccattaggactagtattctcactaacattaaaacatatatagagacgttaaaccacaccatatatgtatatatatatatatatatatatatatgataacacatatatatataatttctttcactctctggtctctggccagaacacatggatagatatcaagatgcataatcaggcagagaaattaaaaccacttcaaatttagtaacaccttagcaccttgggaagggagttccacaagtgttagcaactctccttgcattaggagagtcaacaaacttcttgagattggggttcttgagatattggcaaaggcatggtttctgttccttgatcttggagcagcatangtttgatggaggggttgaagaggttattgcactcacacatgcactcagctgcactgggctgcaggtcacttgctttgacacttg

SEQ ID NO: 222968 - DNA, 403 bp, Glycine max
ctctttttcttctggacaattattgcttccgtcctcctgattcaatttggaattctgcctttgactgcagatttcggtgggttttaggttagcaacatgtcaatgagtgagcggaagactattgacctagaacagggatgggatttcatgcagaagggcatcaccaagctcaagaacattctagaaggcttgcccgagcctcaattcagctccgaggactacatgatgctttacacgaccatctacaacatgtgcactcaaaagccttctcatgactattcccaacaactttatgacaagtataaggagtgttttgaagagtacatcgtatcgacggtattgccttctttgagagagaagcacgatgaatttatgttgagagaactcgtgaagagatgggcga

SEQ ID NO: 222969 - DNA, 517 bp, Glycine max
  unsure (1)..(517): unsure at all n locations
ggtgaaagtatcagtgagctggattatggaattgattacaagggcccgacatgatcacacatctacatggaggcaaaatatacaagcactcacagctccttcaagaaaatttttaggaaaaactcatttcttttgcacaagttcaagcatgatccttttgttttgattttgcagtaaccacttcatttgcacaattacttagatcatgtcaagccaagtacttgaacatattagcattatctttgtctctttccaagtagtcacgagaaatcaaatcttcaatccgctttttaatagccttgacgtcaggcttaaacatgcgacctaactgctcaacacactccatgactaattgttggtagcccaaaactttacgactcttcataatacgcacaattgaggcatcaatagcatatcttctgtccttgtcaacatcctcaataacacttttcttctcatccacaggaggaagaggaatcttgattctcctcatttngtcagnaaatttggaattaaa

SEQ ID NO: 222970 - DNA, 516 bp, Glycine max
aaccaaaacggagatgattaaaaagaacagcgaagggtagtaaagtatttaggatgtcagaacggaagttaccccttcgacaataataaaaacgcaagtgatacactgttcactttctcacaatcatttcatcaaacactacttatctttaagccacacactacagttatggaacatcaacagtattatcatcattttcatcaattctgaatctagcttccacacaaagtcattactgctgggcgcactgtaccctctgtgcaccaccaggcatgtcatcatcctcatcatatgcctcctgagcttgttgctgcttcctcctagtctcctcctccatgttgacatcatggagtgtagtttcctcacattcatccagctccatgtctgtcaattgtgaagagggtttggtggcagaacaacctccaaggccttaacttgatcagggtttagagaatctggaaactccacagtgaagtgaatgtaaaggttccccttcatgaatggcctctgatacat

SEQ ID NO: 222971 - DNA, 532 bp, Glycine max
ggggaggtaccatgattaaagtgaagactttaactgggaaagaaattgaaattgacattgatccggtcgattgtatcagttggttcaatgaacgtgtagaagaaaaagagggaattccacctgtgcagcagagactcatatatgccggtaagcagcttgctgatgacaaaacagctaaagagtacaacattgagggtggttctgtacttcacttggtgcttgcattgaggggtggtacttattagtgtagatgcatatcagaacccaaagacatgaaaggaagctctatacctgtcccgtctctgaagacatcattgttcttatgtgcttggttgtaattgaggctgctattggtggtcagtaactcagtatctttaagttgtatgctatttgaaaccctaagttggcctttataaagaatatctgaaaaccaatgatttaaaaccatagtttacgtacatattttgctttcttctgcttttcagggagcaccaatgttaaccttcaaacgcttctgtcagtgtcagagaag

SEQ ID NO: 222972 - DNA, 488 bp, Glycine max
acagaagataaacttttttgacaggggcagaagcgtttgaaggttaacattggtgctcccttgaaaagcagaagaaagcaaaatatgtacctaaactatggttttaaatcattggttttcagatattctttataaaggccaacttagggtttcaaatagcatacaacttaaagatactgagttactgaccaccaatagcagcctcaattacaaccaagcacataagaacaatgatgtcttcagagacgggacaggtatagagcttcctttcatgtctttgggttctgatatgcatctacactaataagtaccacccctcaatgcaagcaccaagtgaagtacagaaccaccctcaatgttgtactctttagctgttttgtcatcagcaagctgcttaccggcatatatgaatttctgctgcacaggtggaattccctctttttctttacacgttcattgaaccaactgaaacaattgaccggatcaat

SEQ ID NO: 222973 - DNA, 542 bp, Glycine max
  unsure (1)..(542): unsure at all n locations
ccaaaccaaagcaagaatagtgttctaagagtgagcaacaacttcaaacaccattgtgagaaatggcttccaagggtgcacttctcttgtgtctcaacattctcttcttcactgtggtaagctccacatatgtcccatgcaacccaccccctaaaactcctaaacacacacctgtcccaaagccaccttccccaaagcaaccaagttgccccaaagacaccattaagtttggtgtgtgtgctgatgtgttaggtttgattaacgtgcaacttgggaagccaccaaagaccccatgctgcaacctcattcagggtcttgctgatcttgaagctgcggtgtgcctttgcaccgctctcaaagctaatgtgttgggcatcaaccttaatgtcccagtcaagttgagcttgcttctcaactactgtggaaagggtgttcccaagggattcgtctgcgcttaaatcaacacttcatataacttngttcctaaagntaattagtatgcttaaggttctatattttgctatattggntatttattcata

SEQ ID NO: 222974 - DNA, 396 bp, Glycine max
agcttaaatataaaacggttatgaattagtaaaaatttcacttaaattacaaaggactagggaggctgacagggaaaaccaaggagccttccatgctttaaccatcaccacaataataatgaccaatctttttccaacgaaatgttcgtttcctaaaagtgcctaaaaatacctgttactttttggtgaacgaacatttgaaacttgctcaacagaaaaacaagcccagattaaatggcacgtgccaaacataataccaaaattcacagaattttattaataaataacccatatagccaaatatagaaccttaagcatactaatttactttaggaaacaagttatttgaagtgttgatttaagcgcagacgaattccttgggaacacccttttcac

SEQ ID NO: 222975 - DNA, 381 bp, Glycine max
ggataaaaagaacgatggggtacggaagaattatcgaaatgaacaaaggtgataaacaaaggtgaacaaaagtgaaagaatttacacaaacaagtggggagtcagtttagcataaatgtttcaagccattaacaaaggtaaattccctacaagggcatcatctcaaatgattctcactttcatagagctaaagggcaactgcagcaatttagtcataggataaattctgaagattactgaggattgggaggacggttattggcagcaaaaacccttgagccccattcaagcaattttttactggtggcatccttatgaacaaatacctcaatgaagcataagggagtctttcttgggtcctgtggctgtgggaatttgctt

SEQ ID NO: 222976 - DNA, 358 bp, Glycine max
gtggacttaaaaaagcacactgcatttttatcaaagcatcattaaagcacactggattctaacagcacacgttcctaaaaaggggaagttccaggtcttgcccaacatacacaacacaccataatttattttatatacaatcttatggggcccaaaatgcaaatgcctggactaattaaacaacaaccttagtctgataggcagtgtccatagataaattgggtacccataaaatggcctttcttccaaggaaatggcaaacaggggtagttccaggatcaactcccatgagttcatgaagcatgtgatgattcattccacaagtatctgtatggcaaacagcaagtgcctgagtttt

SEQ ID NO: 222977 - DNA, 450 bp, Glycine max
ggctaacatttgattgaaattgaaccgtaaacaacctgataaggaccttagaaatattacattcacaccacaaacaaatagtaattgaactttaatattagaagaactttcaagcagcgccaagctaagcgaagttgcgaacgacaataagggacaagggacaaatttttgagcaataaacaagatgctctgattttattgatcagcttaggtagagcagtttattgatgataacgcattttttggacttcagacaaacgcattcaaatatttgtcgacagtagtgtatttcacctcaggataaagggtagaagcttccaccccgaaagaagggtcaatctcatagtttgtacaatcaccctttacatgcattgagtggcctaatgccaacatcaaattagcagggaaaggagactcctggatgtacttaaaaaggtgatcttctggaat

SEQ ID NO: 222978 - DNA, 588 bp, Glycine max
  unsure (1)..(588): unsure at all n locations
attatcattcattctcatctttctctcttctctctccacccaaaccctaactcccgaccctggtcccctctcgtatccgtcatgaaaggaggaaagtccaagaccgaatctaagagagccgatcccaaacttgctgtgaataagaagggagccgccaccaaggctaggaaacccgccggcaaggggaaggcagcgaaagaccctaacaagccaaagaggcctccaagtgctttcttcgttttcatggaggagttcaggaaggtattcaacaaagaacatcctgaaaacaaagcagtgtctgctgtgggcaaagctgctggagcaaaatggaagaccatgtctgatgctgaaaaagcaccttatgtggcaaagtctgagaaaaggaaagtggagtacgagaagaacatgagagcctataacaagaaacagggcggaggtcctactggtggggatgaagaagaatctgagaagtctgtatctgacgtgaatgatgaagatgatgatgangaaagcagtggcgaggaagaagatgacnattagagaatggactgataattgcattatgagggtctgatgatttgatcatct

SEQ ID NO: 222979 - DNA, 549 bp, Glycine max
  unsure (1)..(549): unsure at all n locations
acagcagaaagcgaatgataagccaattatattgatacagggttgaccagatttcaacaagaaaactctaaatcaaactaaaagctctacaagagataaacaccccttaactaaacagttggatttagaagtacaaataaagaactcccttctttaaactattcacgttttggaaagacaaccaatttacggagggagcagggaaatattttttggaagcaagaaatatgtttatcaggaaatgaccagaccacctacaacagatgatcaaaatcatcagaacctacataaatgcaattatcagtccattctctaatcgtcatcctcttcctcgccactgccttcctcatcatcatcttcatcattcacctcagatacagacttctcagattcttcttcatccncaccagtaggaccttccgcctgtttcttgttataggctctcatgttcttctcgtactccactttccttttctcagactntgccacataaggtggcttttcagcatcagacatggtcttccattttgctccagcagctttgcccac

SEQ ID NO: 222980 - DNA, 343 bp, Glycine max
cccaaatgtgtcgggagatccatacaagacattgtttgtggctaaactcagttacgagaccactgagagcagaatcaaaagggagtttgagtcatatggtccaatcaaacgggttcgattagttgctgacaaagatacaaatgatcccaggggttatgctatcattgagtatctgcatacaagagacatgaaagctgcttatcaacaagctgatggtaggaaaattgatggtagaagggtgctcgtggatgttgagcgtgggaggacttgttcaaattggagacctaaccgcctaagtggtgggcttggtactactagagaagggggtgaagaagttaatcag

SEQ ID NO: 222981 - DNA, 504 bp, Glycine max
tctcaatcaatccaatggactctcccaacgctttgtctaccgctccggcagcgggtagtaggaagaacgcgacgctaatttgcgtcccaataatgggagaatcagttgaaaagatggagattgacgtggacaaagcgaaagccggaggcgcggaccttgttgaaattcgattggattctttgaaaacctttgacccctatcgagatctcaacgctttcattcaacaccgttctttacccttgttgttcacttacaggcccaaatgggagggtggtatgtatgatggtgatgaaaataaacggctggatgcacttcggttagccatggagttgggagctgattacattgacattgaacttcaggtagcacatgagttctatgactctatacgtgggaagacattcaataaaaccaaggtcatttgttcatctcacaactatcagcttactccttcaattgaggatctttggtaccttgtagcaagaatacaagcaacgggagcag

SEQ ID NO: 222982 - DNA, 454 bp, Glycine max
aaattaaaaaaaatttaaattctctgataaattaggctccggagttaaaattctctatccaaatacactctaattgagatacaaaatcatttgttgatttcaattaacaagactttgaaaaattggaagtagaacggggaggatacctcctcattcacatcctaaacactttaaagtacctcgccattagattctttgattgtgttgcaaagataaccgatcactcttcaatagttttccataatttttctgaagagctcctttggtgctggtaatccggtgaaattctcatattgtccatatgcttgccccataaacatctccaatcctgttacaatagtggctcctgattcttctgcttctttcaagagtctagtaatcttgggcgtgtagacagcatcaaaaactagggagtaatatttctaagcgtgcttagaaacaggcgtctcatcaa

SEQ ID NO: 222983 - DNA, 439 bp, Glycine max
gactcgatcttcgtcaaactgatgttgctaaacgcgaacgcggaaagcactttgaaaagcgccgaagttcctttgtcgtgtgcgaaaacaatgctcgtcttgaaaggacggtccgtgcgcgggatgataggctctctcgcgagcatcacaaaccgcgtgacgttgctcggatcgtcttggattccgtccgccatcacgttcaggccgtagagctccgccgcgcgtgcgctcgcgatggcggcggtgtcgcggagattgttgctggcgacgaactcggcagcgccggcggtgtcgtccacggcctcgcgcgccacgttcaggccgagtttggtgagagtgtgctcgcactgcgcgagtgcctgcggatgcgaaatcacgcgcgtgaggaactcctttcggacgccggggagagcgaagaggcagtgatggacccggagct

SEQ ID NO: 222984 - DNA, 519 bp, Glycine max
gttaaggcttgtcattcattaatcaagccaggggacaattggaacaataacagccatttaatggcaagagatgaaatgaaaaggaagaaataaaaggcccattgaagcaacaactttctttctttctttcattgagactattcattagttatttggattgtatcaggtgtgggaagatcctttatttgcatttgtttgtacatccagtggcgattctccagcgtgacttggccgccaagagagcgaataacagacccaccactgcatgctcccactttgcagcactcttcaagagacagacctttgatcactccatacaaaaatccacttgcaaaaagatcccctgcccctgttgcatcaattgccttggcttcgcctatggccgggacccgtgcaatctcgtttccatgtttagcaatgcatccattaggacccagggttactacggcccattggcagtatttggcaagaaattctacagcagttgctggatcagcattttgttctccccttaaaagc

SEQ ID NO: 222985 - DNA, 577 bp, Glycine max
atctgaatacaaagtacatggttaattggggcactggcatcacttggaatgtattacagttttatacaaagtagaataagagaaacagatactacaactgaatcaggttcttgaaacaataagtaacaagaaggaaccacccaataagaatggaagtgaagaagaaccaaaactttaggaaggtgaagcccccgaataagactccaagaaaaaatataaccacaaatggtaagatagaccgaagcatagatgttttgctgacccaacgtccattgaataaaacgaaaattgccagattcaccacattccatccgccagacagaaaacccaacctgttcaaattattggcaacatacgagtggcagttgcaggtaaagagattgtaagataaatgttggaattcttgagtgcttttccttagtgcatcatcccaaggcctcaaatctcctttagtttcatcctgaatgtagtgttcctcaccattgtacacagactggactaaagggacgcaacacttttctttgggaatttgaatatagcgggtggcagctccaaatgcaaaattgtccacacacac

SEQ ID NO: 222986 - DNA, 499 bp, Glycine max
gaacatggaaacatctgtgattgtacatatatagttttaatgaacgtgataaattattatataaataaggtttgaaataattgttagacatgattttgtttgatgggattgttattgggataatgattacaaatattcatactattgacaaatagtatgatatataatttctatacaattaatatgattaatgatttaaggagaatgaattgattttgcttggaaatatgttaggagaaattaatttgttatatatcaggttgaagattctttatataagataagttttatttaaaatgttagcgaagtataattcatgtatttatcaacaataattgtttttaaaatttttacaaaattctttaaaatcttaaaaattcataatatttgttcaaatattataaattcattaaaatataaactacaaaatcctaatcataaaaatcttaaaaagttattatattgttataaaatcttttaaaattttcaagattttttt

SEQ ID NO: 222987 - DNA, 574 bp, Glycine max
ctcgagccgaatcggctcgagcttttaaacccttgtttcactttccgtttcatctttcttttttgttgctcagcaatccctcccattttttttccttcaatctgcttcaatggaaggtttggcttccctcaaggctccctttccggccaccccatttctctcttccagacccagaacctctattcttccatcccaagccagttttcgtaaaagaagctcctttttatccttttctgttcatgcccaggtggagtctgatgatggttcagctgtagtagccacatctggtgaatctgtgacagaggttctgaaaattaaggagtgggaggtgggaatgttccaaaatgaggttgcagctagccagggtataagaataaggagaaggcctccatctggaccccctttgcattatgtaagaccatttcaattcatgttgcagaatgagggcaatacgccccggaacattttggaagagattgtgtggaataaggacacagaagtctcacagcttaaagaaagaaaaccccttggcgtgctggaagcagctcttgaaaatgcacctcctgctagggat

SEQ ID NO: 222988 - DNA, 372 bp, Glycine max
  unsure (1)..(372): unsure at all n locations
gcaaaatcctgtatgagtgagacataaccattctttggattgaagtaccctgcagggacaccaatggcattggtgatagtgaacaaggttttgagtaggataaagaagccagtgcatttcctagatgtgactacactctcacagtacaggaaagatgcacatccagaaggctacagtggggttatgccaactgattgcagccattggtgtcttccaggactgccagatacatggaatgtgcttctgcatgcggctctatttgactgaaggaaaggaagcagctagctnnntgacctcgcaaactttgtttattagaggaaaaccaattgttttctaatgtaggaaatatttaatttggcatttggtttcttg

SEQ ID NO: 222989 - DNA, 487 bp, Glycine max
ctcgagccgaatcggctcgagctggagccaccggttttcttgccaaagttttgttggagaagatattgagggtccaaccaaatgttaagaagctttaccttcttttaagagctgaagatgccaaatctgctactcatcgcttgcacaatgagatcatagggaaggatttgtttagggtactaaaggagaaattgggtgcaaattttaattcctttgtctcgaaaaagttgactctggtacctggggacatttctcgtgaggacttgggattggaggattccattctaagggaagagatttatgatcaaacagatgtcattattaacttagctgcaacaactaactttgatgaaaggtatgatatatcgttgggcctaaatacctttggtgttaagtatgtcatcaacttcgccaaaaaatgtaccaaactcaaggttcttgtgcatggatcaacagcctatgtatgtggtgagggaggccaagaagg

SEQ ID NO: 222990 - DNA, 524 bp, Glycine max
ctgggattcccaaaggcaaaaaaaaaaaaaaaaatacaagatgaagagcaggttcctttttgttttcctattattgggaattcttaactgcgaggcacaatatttcaatgccaacccatacgactatttacaactagccttaaggcggcctaattcctattgcttgacacatgaaggtggttgcagggaaatagtgccacaatattttactattagctaccttcatcccatgagaagaggaggccctgatctgcaaaattgcccctcaccatttaatatgccaaatagcactatggagataaacaagaatgacctactcatatactggcctgatctgagaactgataattttattgagagcaagtcattatggagggaccaatggagaaagtttggttcatgctatagtatgacgccagatgactatattgtttatgcactcaacagttgaaagagaaatgaccttcagaaaatcttgacaaatgcaagtattgttgcaagtggaaattcttttcaacacgtag

SEQ ID NO: 222991 - DNA, 388 bp, Glycine max
cagaacacaaaaccatggtgtcaccaatttcacacttagtaactttaatcgtcttattatcagtttcattggcagcttcagcttcacttgaagaaaactttgtccaatgtctcagcttctattcagacagagctgctccattttatgcatcaatttacactccacaaaatgcatcattcaacaagatccttgaatcctctgcacagaacctaaggtattcggtgccttcagcgccaaaacctgagcttatattcacacccttcactgattcccatgtccaaggggcagtgactcgctcaaagacgcttgggtttcatctgagaattcggaggggcggccatgactatgaaagactctcatatgcttctgaagccgagccccctttcat

SEQ ID NO: 222992 - DNA, 552 bp, Glycine max
  unsure (1)..(552): unsure at all n locations
atataaaagttgcttcactagttacacagttcttgctagcagggcagcacttgtcacctgtaatcttgtcacacacacacatccacaaagatagcaatgattaagcacttccaacagtgttttacaacattgaaatgaccaaaaaaaacataacaaaatccaaacgtatcctttattcatctaaattagctaatcaaccccataacaaaaccaccccaatggctccagcaacacagtgcctcattcccatgtcttgcacttcttgtcttttagcctcatacttgaaactgggagtggtggaatgctctgctcatgcctgaacacattatcaggatccaccttgggctttattttcaccaacctgttgaaattatccttgaaatacatattgccccaagcagttgcctgtatgtaacttgtgctgttcttcttgttcattcccaaatcaagaactctatagttgacatatgcctcccttgggaacttggacacatanagtgnnctgtaggtgtaaagcttcctaatccaaacttcatgctttgatgcattctt

SEQ ID NO: 222993 - DNA, 553 bp, Glycine max
gcaaaactcttcttaataagtaattcaatctgtacaggatgggcgggtgacctacatacaatttaccatctcaacttcaccaccaacccacagtaaacacagggctggatacttctggaagacgtgggaagcaacaatacaactctatataaactaaatttaccaaattgcattcggagtttacgttactaaatagaaaggaaccacccctccaagaccacacaccagacagtaaaatctgtctgttgcaaccactcatcttaggtgagagtcatatgtgtcaaagagaaagtctggaatgaccaaaggcaacttatctatgtacatgaaaagccttctaagattctcccttgtcactgttgccatgtctactacattcctattggcagtgaacacccagagatcaccccaggttactcttttaagattgtcgcggcaaaaagggcatgaatgggaacttgccctccattcgtgataacatttcaggcacatggacatggttgcagtcgggcaacacaatcttactattcatctccatgcattattcacattc

SEQ ID NO: 222994 - DNA, 589 bp, Glycine max
tctgcaccatcgatccatctcatcgttctcttagctaccatggcgactgagaaccgctttcaatagcattttgaggacgctcgagaagcccggcggcgctggcgagtttggaaagtactttagcttgcccgctctcaacgatcctagaatcgatagacttccttactctgtgaggatacttttggaatctgcaatccgtaactgtgatgagtttcaagttaagagtaacgacattgaaaaaattattgattgggagaatacctctcccaagctggtggagattccattcaagccagctagagtgcttctgcaggactttactggggtgcctgctgtggttgatcttgcttgcatgcgagatgcaatgaacaaacttggtggtgattctaataaaattaaccccttggtaccagttgatcttgtcattgatcactctgttcaagttgatgtggcaagatcagaaaatgctgtccaggcaaatatggaacttgaatcccaaagaaacaaggaaagatttggtttcctcaaatggggtctaatgcattcaataatatgcttgtcgctcctcctggatcaaggatagttcatc

SEQ ID NO: 222995 - DNA, 569 bp, Glycine max
ggcgttctatatattattgaattgacaatgaggcctgctcttgctttgcttcctgttctatttgctttcttgttagctgccactacagaatcaagaaaagatacaggggaatattggaaaatgatcatgaaagatcaggaaatgccagaaggacttcaaggtcttgtttcatttcaatctgaaaataaccctaagactcaagagcagcttggtaaaggttccaaaaaccattgtgaagagtctctagttacaaatacacaagttaatagtgacttcgaacccataccaagtgttaccaaatatgatgattcggaattcaagtcaagcattatcaagaacgatgattttgaatcgagaccaagtgttaccaagcatgatgattttgaactcaagtcaagcgttaccaagaacaatgattttgaaccgagaccaagtgttacaaagtatgataacttttggacccaaaccaagtgttaccaaatatgatgattttgaactcaggtcaagcgttaccgagaatgatgattttgaacccagaccaaatattataaagttgatgactttgaact

SEQ ID NO: 222996 - DNA, 422 bp, Glycine max
atggggtccacaagcccttctctggccaaagaaccaaagacgctatagggacatggattaagaagaagataggacctggtgtgcccaacattactactgtggaagaagctgaacgtgtattgaccgcgggaagcagagctgttttgggcttgcttaactctgcggttggtgcagagagtgacgaactggctgcagcatttaagcttgaggatgattgtaatttttatcaaactgaggtagcatgatgtggagaagcttttccatattgatgcaggtgggaaacgccctgctttgatctcgctcaagagagatgaggagaaattgaatcattttgatggccaatctgtaaaagctgaaatggttgtttttgctacctccaacgagctccctttggctacaactttttctagagaaagtgcccc

SEQ ID NO: 222997 - DNA, 390 bp, Glycine max
ataacaacacaatatagacttgaaattcaaaagcgggaggtgcatcataggactagtcctatgcagcttattgctcttacagagacacattgttatataaacaaagcataacaatgaaaaagaaatagccttgccaccgtcgatcaagaacccagttctgggaacaaaagttgcgagacgacggagcaaacctgacacaaaatctgataaacaagttccctacacgaaaaaatgaagtactaccaacaagaaaccatttattgtagtcataataatacaggctccttgataaaccatccagcacaattgatttggccttcttctgtgcagccttggtctccttaactccaattgggggctttttctcgacccttttgatgactcccacag

SEQ ID NO: 222998 - DNA, 565 bp, Glycine max
tttttattctacctaacaccacatggatacgttgccggaggattgtgtttccaaaggtctgtgttacacatctccaccagacgcatgtagattctctatggtctcttcaaccctacgctctttcgctgactctgaccttctctggcgaactttctttccttctgattactctgacattgtctcaagggctctcaaccccctctcccttaattcctcttcttcatacaaacaccttttctatgctctttgtcatccactcctcctagatggaggcaacatgagcttcaaattagacaagtcttcgggtaagaaatcttatatcctatctgcaaggcagctttctataacgtggagcaatgaccctttgtattggagctggagaccagttcctgaatcaaggctcaaagaggtggccgagctgagaacggtgagctggttagaaatccaaggcaaaattgggacgaggattctaacgcctaacacgtgatatgtggtttatgtgattatgaagacattccaccgagaataccggcttgattctgtggcgtgtgaggtattaattgcg

SEQ ID NO: 222999 - DNA, 373 bp, Glycine max
gtcctttgtgaaagatgctgcggtgtacatagcggttcggttcttgattgggttggcgatggcgacgtttgtgtcgtgccaatactggatgagcacgatgttcaacagtttgattatagggcttgctaatgggactgctgccgagtgagggaacatgggtggtggagccactcacctcataatgtctttggtgtttgagcttctccaaggagctggggctcctcccttcactgatgggaagattgcctaatttgtaccgggtttgttgcgacccatgacacggatgctggtgctcacttttggacaaaacttttctaaaaggaaacagggggtctcttaaagaaataatgttgtttttttaaagaaatttttt

SEQ ID NO: 223000 - DNA, 469 bp, Glycine max
gagttgcaacttgcaaagagtacaatatcaatttcattggggattccatttcaagtacagaatatacaaaccagaacattctgattatgatacttatgacttgccacaagtagacaaccatatagtaagccagaaagtcaaataaaaggtcctaattactggataattaaacacaaccagcaatggtaaaattgattttaaatcaaattaactaaactgatactattgatactcagcatcaagatctgcattgacatactgattatgatacttatgacttaccacaagtagacaactcttacaccacacgcgaaccagaaccagaacattctatgtctacatgttacaagatttcttattagaaaaatcttcactcatgggtcttcattcccaatactgctcagtaattatgtttcatgatcttctttgattgaagtgctatggctagacatgagtgggagttgcattt

SEQ ID NO: 223001 - DNA, 354 bp, Glycine max
gtttcgctatctctcccatcctttcgcattctcaatacccttttgatttgtgaaaggaaagcaaacatggttgatcaggtccaacaccctacaatcatggacaagggtgctggtcagctccatctccgttctggtctttcatctggtattagaagttatgatggagcctaccgccacccagctatgtaccaaagaccctcttttgggaattactcgaatgctgcattgcagtttcctgtgatgcccacatgcaaagctaccatggatttgtctgctactgcaacatgtgtctcacccgtctttgttgctgctccagcagagaaaggccattttcttttagactttctcatggga

SEQ ID NO: 223002 - DNA, 441 bp, Glycine max
ttttcttttttttttttttttttttaaaattttaaaatcataaaattggaattccaggggaggggttttccctgccactcaaataaatcatattctcaaatgtaaaatttccatcatgatgaaatttaaaaacggtttttgggacaatatcccatctagtagatttattaaacacaatttgcggcagcaattactctaagactcttggaactcaatggattttttcatcgccatttaaaaacaaataataatactgactgagcattagaacttaagcaccaccagagccgtacttcttgccgaacacaagaacctgcaacttgtcataaccagcaagcacaccatcaccggcaacggcacggaggatgttggctccggtacccttgaacaaggacttggcacccttattcttgaggatctgagtgaatgcattcaaggagc

SEQ ID NO: 223003 - DNA, 504 bp, Glycine max
  unsure (1)..(504): unsure at all n locations
gtgagagcagaagaaggatcgtatcaacaatgggtccagcggcaaagacggcgacgatgcgttcgatctctcaagaagcgctcgaagaactggtgaatgagaacatcgacgacgcttgggtggaccccaccgaggccctccaagacgcaatccaaaccctcactctccaaggcgtcgatatctcaggcatcgtcacgtgcgtccccggagataccaaccccgtcatcgagtgcttggaccgcttaagacaccttgataccgaaccggaccaaaacctaatcgcgcaagcgtttaacacccttcacgagttgtgcgcaaatccaaattctgattcaaattcatatgtggctattgcaaccaaaatcggagccgttgagcttgatagttcgctctgttccaaaaattctcttgccgccggatctcacgtggctccccttggcttcgcattaaacgcgntggcgatgttgcttcacgatgttcaaagacgggggcttttcatcgctg

SEQ ID NO: 223004 - DNA, 428 bp, Glycine max
aagtaaatagttcagttttctattattttatttcttaggggggcaagagttgcaatttaacaagattctacgccacagagacgcacgtgaacaatagaatagatgtagaagcagttgaaatgaggtgaaagttgaagggacaaagaacaaggcaaatactgctattcaccaatattcctaattttgtacaaatggtattttcttttaaaatcaaatacatagaaaaagaatggaagttttaacaacgacttaacgataaggagcaaatcatgacgaacaatcttcatatgaaagcaatatgtgaaaagctagttttacatgccactgagacacatgtaaacgtctgagaccacaaatacttcgagtgtttctaagtcgagcagcaaccagccttctggttcactggctgtcctcgaatttgaactgtt

SEQ ID NO: 223005 - DNA, 568 bp, Glycine max
gagctccttacgtaaattctccacgaagcaaccctgagcagtgaccataaccacactctctcaagtctctagagagaagctaccaaactccacaacacatacccaattagctaacccctctcacacttacagaccatgccaaacgcaaacatgcttctccttttcctcttccttctggcgctcttctcagccatgacaacaccgtcaacctccgcgatcgacaccttcatctttgccggctgctcccagcccaagatcacgccgggttccgcctacgaaaataccgtcaactcgctcctcacctctctcgtcaactccgccgccttcgccaactacaacaacttcaccgtccccgccttctccgacgccgtctacggccttttccactgccgcggtgacctcaccaacgaccagtgctctcgctgcgtgtcgcagtgcggttacccagcttggcaccctctgcttcgacttctgtggcggcgcagtgcaagtcgacggctgtttcgtcaagtatgacaatgccaccttcatcggagtcgaggacaagacattggtcaccaagaaatgt

SEQ ID NO: 223006 - DNA, 301 bp, Glycine max
  unsure (1)..(301): unsure at all n locations
ctcaagccgttctgatgaagataacgggaagatggatattgatgatgattgttgtgatgaaagtgaatagccacaaaagaaaaagactgtgaaaaatccaaaagaaagcagtgatagttccgaagaagacagtgaggatgaaagtgaggaggaaccctccaaaactcctcagaaaagagacagggatgtggagatggttgttgctgcctagtctggtaagaaagcgcctaataccccnattacacccaaagaagaaactgggccttccaaaaaactttttgttgggaactttccattttaa

SEQ ID NO: 223007 - DNA, 417 bp, Glycine max
  unsure (1)..(417): unsure at all n locations
gaagagagccacaaatattatattataataattcatgggggggaacaatgtatcatcaaccatataacagaatttctacgaattcatactaacaattacggattaccaaaacaaaactggggagccaacactacaggaaagtttagaaaataaatattaaatttttaagtttctgcaagacttgccaccctactcgtcatcagcaaattcggnctttttccctgtgccttccgcagcaaggttgggtctatttccacgaccccttccagcgccacctgttacaacaaatcgaccaccaccaccacttccatcaaatggagcaccaccagcactttcaccaaatcgaccgccaccaccttttacaccaaattgaccaccatcaccaccaccagttttaccaccaaattgaccgccacc

SEQ ID NO: 223008 - DNA, 320 bp, Glycine max
gcaaaaccctgtttgagtgaaacattaccattctttggattgaagtaccctgcagggacacgcgatggttttggatgatagtgaacaaggttttgtgtaggataaagaagccagggcattctctagatgtgactacactctcacagcacaggaaagatgcacatccagaaggctacagtggggttatgccaactgattgcagccattggtgtcttccaggactgccatatacatggaatgtgcttgtgcatgcggctctagatgactgaaggaaaggaagcagctatgtagtgacttgcaaactgtgtatattagaggaa

SEQ ID NO: 223009 - DNA, 474 bp, Glycine max
gaacactaaaaatagaaagttgacatttaataaaccaaggcggcacaacgcagcaaagtcctgaaactcgctgcgcttaacaaaaatgtaatcaggggttccgacaaacacaacacattaaaacacagataaataacagcaattttgccaccgtcgatcaagaacccagttctgggaacaacagttgcgagatgatggtggagactttaaactttgtccgaaaaacaagctacctataaaagaagacaccagagtacagaaaagaaaccaacatttattgtaaccaacatcccctgatgaaccaggccgcacgattcacttcttcttctgggcagcctaggtgaccttggctccggtaggatccttattctcaacgtttttgatgactaccacagcaacagattgacgcatgttccttacagcaaacctaccaagtggaggattcttcgagaaagtttcaacaaccatgggttt

SEQ ID NO: 223010 - DNA, 373 bp, Glycine max
ctctaattacactttctatctcattttcgttcggctcaaacactctcatggcatcggacaagaagattaggatcggcatcaacggatttggaaggattggccgtttggtggccagggtttgctcttcagaggaatgacgttgaacttgttgctgtcaacgatcctttcatcaccactgattacatgacatacatgttcaagttcgacaccgctcatgggcagtggcagcattttgatgtgaagctgaaggactctaagacccttctcttcggtgagaagcccgtcaccgtttttggattcaggaaccctgaggaaattccatggcgtgaggttggtgctgattatgatgtggagtcaaccggcgtattttctg

SEQ ID NO: 223011 - DNA, 557 bp, Glycine max
  unsure (1)..(557): unsure at all n locations
gattgacaggcgatctggtaaggaacttgagaaggagcccaaattcctgaagaatggtgatgctggtttggtcaagatgattcccaccaagcccatggtggttgaaaccttctccgagtatcctncacttggtcgttttgctgtgagagacatgcgtcaaactgtggctgtgggagtcatcaagagcgtcgagaagaaggaccctactggagctaaggtgaccaaggctgcacagaagaaggccaaatgaattgtgctggatggtttatcaaggaaactgtattattatgactacaataaatggtttcttgttcgtagtacttcattttttcgtgtagggaacttgtttatcagattttgtgtcaggtttgctccgtcgtctcgcaacttttgttcccagaactgggttcttgatcgacggtggcaaggctatttctttttcattgatatgctttgtttctattacaatgtgtctctgtaagaacaataatgtgcataggactagtcctatgctgcaggtttggcttttgaatttcaagtctatatttgggtgtaat

SEQ ID NO: 223012 - DNA, 428 bp, Glycine max
atacaaagtagattgctagctatcaaaggaaaagctaactagcatctgtgctttgggtggaggcagagaaaattcaaggaggtggatcatggccatgatgtggataagaatcatacttctagtagcggtttgcatgctttctctttcagtggaagccatggttcgccactacaagttcaacgtggtggtaaagaatgtcacaagattgtgttcaacaaagcccatcgtaaccgtaaatgggaagtttcctggccccacaatatatgctagggaagatgacactgttttggtgaaggtggttaaccatgtttaatacaatgttagcatccactggcatggggcgagacaattgcatactgtttgtgccgattgggctgcatacattactcaatggccaattcaaccgggccaggcctttgtggacaact

SEQ ID NO: 223013 - DNA, 411 bp, Glycine max
aaagcaaggcattttgaaaatcctgtaaattttgattgggactgtatatataattacatgaagtcaaaactatctttcaaggagagatgagaagtacaaataatgcaaaaaaaatgaaaaaatgacagggaaaaaacagagaaagtgaagacatgctaattggtcttattttccctattagcagcttatcctttttatttgctccaagaaaatcttgctattagccttgatggtacacactccctttggaaattatatcttctttacgtgtatccccttcttactccttaagcgaagattgtatattagtcctcttctcaacacttgggaagatcacttggaggtggtagtagagactcatttggtcctttaccattgacgaccccaaatgccatctttaatccccaagtt

SEQ ID NO: 223014 - DNA, 400 bp, Glycine max
cagaacacaaaaccatggtgtcaccaatttcacacttagtaactttaatcgtcttattatcagtttgattgccagcttcagcttcacttgaagaaaactttgtccaatgtctcagattctattcagacaaagcagctccattttatgcatcaatttacactccacaaaatgcatcattcaacaagatccttgaatcctctgcacagaacctaaggtatttggcgccttcagcgccaaaacctgagcttatattcacacccttgactgattcccatgtccaagtggcagtgacttgctcaaagaagcttggtattcatctgagacttcggagaggcggccatgactatgcaggactctcatatgtatctgaagttgagtgccctttcataattgttgattt

SEQ ID NO: 223015 - DNA, 477 bp, Glycine max
atataaaagtagcttcactagttacacagttcttgctagcagggcaacacttgtcacctgtaatcttgtcacacacacacatccacaaagatagcaatgattaagcacttccaacagtgttttacaacattgaaatgaccaaaaaaaacatagcaaaatccaaacgtatcctttattcatctaaattagctaatcaaccccataacaaaaccaccccaatggctccagcaacacagtgcctcattcccatgtcttgcacttcttgtcttttagcctcatacttgaaactgggagtggtggaatgctctgctcatgcctgaacacattatcaggatccaccttggtctttattttcaccaacctggtgaaattatccttgaaatacatattgccccaagcagttgcctgtatgggacttgggctgttctttttgttcattcccaaatcaagatctctatagttggcatatgcctccct

SEQ ID NO: 223016 - DNA, 585 bp, Glycine max
  unsure (1)..(585): unsure at all n locations
cgtgagtcccagaaccctcccatggccgccgcggatcctccgcggcgcaagcctgtctcttacgccaaggcatccgtagttctctccgcttttctcgttgtctccgtcatcgctcccttggtcctttcttcgaacaagtttcgcgcgttccaacgccgggtttcgtacgagacgatcaccgtcgtcaacgtgttccctcacgacccagaagccttcacccagggccttgtttacaatggaaatgacaccttatttgagtcaactggtctttatgggaagtcctctgtccggaaagttgctnttcatactgggaagcttgaggatgtgcagaagatggatagttcattatttggggaaggtttaactctcctcaataataggctgctccaagtaacttggttgcaaaacgctggtttcatatacaacccgaaaaatttaagaaagattgcgacatttaatcatgatatgaacgatggttggggtctcgcaactgatggaacattgttgcttggaagtgatggcagttcacattgtatcaaattgatcctcaaccgttaaagttgatcaaaacaagttgcttcttta

SEQ ID NO: 223017 - DNA, 460 bp, Glycine max
  unsure (1)..(460): unsure at all n locations
cagggaagaagcatcggaaatgggtggttacttcatcttgaatggtcttgagagagttatccgactgttaattttgccaaaacggaatcatccaatgagtatggtgcggaattcatttaatgaccgacgggaaggatatacagataaagcaattgtaataaggtgtgtaagagctgaccaatcctcattatcagtaagattgtattaccttcgtaatgggagcgcaagacttggtttctggttaagaggaagggagtacttgcttcctgtgggcattattttgaaggccctcattgacacaactgaccgtgaaatttatgtaaatttgacaagctgctataatgagaagtatgaaaaggggaaaaggngcttgtgggacccaacttgttggtgaaagggcaaaaataatcttagatgaacttcgagatctgtctcttttactcgtcttaatgtctagaat

SEQ ID NO: 223018 - DNA, 413 bp, Glycine max
tctctctctctttctctctccctccaggctcaaccatggcttcttccacttgctggatctctctctcccaagccctcctccgccccaccaccacctctctcccctcctcctcctcctccctccgcctcacccccactctccgccctaccccacccgccctcttcctccgccgccgcctgaccacctccatccgcgccgccgcctccgtcagaaccgtcgagaaggcaaccgcggacgccgcgctggtcgaaaaatccgtcaacacgatccgcttcctcgccatcgacgcctgcgagaaggcgaatacgggtcacccggggctccccataggatgcgctccgatcggccacgtgctatatgatgaaaccatgttgtatgaccctaacaaccctttctggctcaaccgcaaacgc

SEQ ID NO: 223019 - DNA, 483 bp, Glycine max
ggcattctgtgttctcttttattctaaactcgaaacactcttagacaaagaggcggaggaaaatgccgattgctctaattgccattgggaatacttcagaggtcaaccaatctgatgcacttaaggctgcactagctgagttcatgacaatgctcatctttgattctgccggggaaggctctgggatggcttataataagctgccaaacaatggttcagcaacaccagcatggttagtggcaggatcactgtcacatgccttagcgctttttgttgcggtctctgtcggagccaacatttctggcagtcatgtaaaccctgctgtcactgtgcgcgcctttgatggtggccacattaccctctttagaagcatcttgtactggattgctcacgtactcagctctatcgttgcttgctggctccttaaatttgacactggtggactggaaacatctgcattttgactatctcctgaggtggaag

SEQ ID NO: 223020 - DNA, 480 bp, Glycine max
gtattgaaattaccgtaatattattatattctagtaccggaaggaacaatacttttaaatgtgtaccatgatcgctcctggtccaggatatccaatcttcaatatttgattaacatgattgtattatattttagaattttggttagtttcgctaagttgctgtcgcaaaacccttctcataaccttgttggatgccgtccttggaagagatggcagtgtgactacttgagaaaccctgaacagtggatttagtttcttttggagagctgaattaaaagatatcctcaattggtgtaaatcttgctttgtgctatttgaatccttgaatacaacagctatagtcaacaactcaggcccaccaccagaaggtggtacccctattgcagctgtttccagaatgctgctatctactccattgcatgtgcgttcaatctcaactgaactcaccttgattccccaaggttcatcgtattattcgac

SEQ ID NO: 223021 - DNA, 358 bp, Glycine max
aggggggggagaccttaattaataaaaattataactcatcagtagcaaaaacagttcaaaacaaaaattccatgccactttgcgaaggactacccagattatttgccctaaacgatgtcctggggcccaaaacattaccttaaagggtccccgccacccattaaagcttcttaagccctataaaaatttggaaaacactaaaattaagcagcaccctttcccttttttttaggggggttttttatgtaaaactccaacttcttaccttccaaaatgtatccataaactctgccccattgaccagggcttgaggaaatgcccgccagcaaacccccaccaccaaactgcttcctaatgg

SEQ ID NO: 223022 - DNA, 490 bp, Glycine max
agcaaaacacaataattaagcattgtggggaggggaaaactcataaaataaaactattaacaaagattaatgaagttactataatcaggggggagggcgctaactcaaaaaaaggcactgtaaaaaaaggatgacctcaagaagatctactagatctagaatcctgataaattcttacagatagagacacaccacaaagcagtcactgagaccaagtttagggtgtataacccggtcgctcagggtgcaggtaaataaaacaaactcatcaggaaatgcatgttactcagaatctgaggagtctgctctggagctctgtccaacacttcttgtggatttggcactggaccttgcatgattgaacgatgattcgccctcataaaagaacacttgagctttaaccaatctttctttcagctcctctgggctaaactcatcagtcccaccaagtttatcaaaccccacccataatcatcgactttggcatttt

SEQ ID NO: 223023 - DNA, 580 bp, Glycine max
  unsure (1)..(580): unsure at all n locations
aattttcctcgaacaactatactctctctatcgcactcactccctccgtcgcccgaacgcatctccgatcaaccaaccgccgcatttccagtgattagccactttgatcctcctgcagcgccgtcggttcctcagatccgtggctgtaatgcgaaagtcgttggaggcgaagcagcagcatccgcggattaggaagatccttcttcccaattcgttatcctagttagggttagggtttcaataatcattcccaagaaatgttcaagcgaatcatgaagggagggcagaagaagccctccaagacggacccgagcgatccgtcgcccttggctccggcggcggcgggtgcggcagccgctccggcgctggtggttcctccgccgncgggcaccatagagcctctgcctctcttacgcgacgtggcggtctcggagcggcagaacctcttcatccggaagctccagatatgctgccacgtgttggacttctccgacacgctgagatccgttcgggagaaggaaatcaagagacagactctaatggagctcgtggatttcatcccatccgggtcggggaagat

SEQ ID NO: 223024 - DNA, 405 bp, Glycine max
tgtggacaggtttcatttcaacgccaaggtgagtaaacaggatttggaggatacttatgatgtaccatttaaagcgtgcgtgttggaagggcatgtggcgagtgtgatgcgctcctacaatcaggtgaatggcaagcccacgtgtgctgacccacatttacttagcaacactattcgtggccaatggcgcctcaatgggtatattgtctcacactgtgattcacttggagttttctttgacaaccaacacttctcaaaaccacctgaagaggccactgctgaggccatgcatgtgggtctagacttggattgtggcccattttaggctatgcacactgattctgccattaagaaagggcttatttacgaaaatgagctcaaccttgccttggccaaccttatttc

SEQ ID NO: 223025 - DNA, 469 bp, Glycine max
ctcagagccagcgagtgatgatcgcttcgccgcagtaatcgccggaaacgaattcgccgtttccctgccgagatctctcaatctccgacgactcagatacctctattaattttcctccggttaggttgttagggtataaatagtacgtagtttttccttatttatggcttcggagaatgtgaagaccggggattccgccgtcaccaccatcgtcaatctcgccgaggaggccaagctcgccagagaaggcgtcgtcaaagctcccagctacgccctcgccagcatctgcaagtcgctcgtcgccggtggcgtcgccggaggagtgtcacgtactgcagttgctcctctggaacgattgaaaattttgctgcaggtccagaatcctcataacattaaatacaatggaacagtacaaggcctaaaatatatatggagggactgaggattccgtggacttttcaagggaatg

SEQ ID NO: 223026 - DNA, 482 bp, Glycine max
atcaatttctatatagctaaagaatgtgatactattaagcataattaatataatggggtacatgtgcattaagatttcgttttgtgtgatgtgtgtgttggggttggtgatcgtgggtgatgttgcctacgctcaagattcagcaggaagactacgtgaatgcacacaatgcagcacgagcagaggtgggttctcaatcaccaagacaaacagtgattgttccaagtttggcttgggatgatacggttgctgcttatgcagagagctatgctaatcaacgcaaaggtgactgccaactgatccactctggtggtgaatacggagagaatattgcaatgagcactggtgaactaagtggcacagatgcactgaaaatgtgggttgatgagaaatccaactatgactatgattctaactcttgtgtggaggagagtgcctgcactacacacaagtcgtttgggcttacttcgttgcgttttgga

SEQ ID NO: 223027 - DNA, 469 bp, Glycine max
  unsure (1)..(469): unsure at all n locations
cggctcgagcgtgaagaagaacaacaacggcaagaactacaagttcgcttacatgtgggtcggaaactccgaaacccaatgcccggggcaatgcgcttggccattccaccaacccatttatgggccccagagcccacccttggttgctcccaacaacgatgtgggacttgacggaatggtcataaacctcgctagcctccttgccggaaccgccaccaacccattcggaaacggttacttccagggtcccgcggaggctccgctcgaagctgcgtcggcttgccctggggtttatgggaaaggggcttaccctggttatgctgggaacttgctggttgactctgccactggtgctagctacaatgtggagggggataagaggggaaagnaccttgatcctgctctgnatgatccttctacatcgttttgctcaacgcccgtctgagaaagaggattattatggtgatgc

SEQ ID NO: 223028 - DNA, 441 bp, Glycine max
ctgctcgtgcctctagggttatcatatctccatttccatttcctctctctgagttgccaagaatcttaagctatgggaaagtcttacccaaccgtgagcgctgattaccagaaggccgttgagaaggcgaagaagaagctcagaggcttcatcgctgagaagagatgcgctcctctaatgctccgtttggcatggcactctgctggaacttacgacgtgagctcgaagaccggtggtcccttcggaaccataaagcacccctccgaactcgctcacggcgctaacaacggtcttgacatcgctgttaggcttttggagccactcaaagcggaggttcctattttgagctacgccgatttctaccagttggctggcgttgttcgcgttgaggtcacccgtggacctgaagttccctttcatcctgggagagaggacaaacct

SEQ ID NO: 223029 - DNA, 417 bp, Glycine max
tttcttttttttttttaatagacaaattactagttattacggtaaatggtcacatacgacagagggtaataatatcgcaatcgctgaacaatgttatttaacaaaaggatcgaccacaaataaaaacaacccaactgcaatcatcattaccacgtgcagcaaaatacattcaaaagctatctaaaaatttgaggaacccacaggggcgcattagaaaccatgaccatagaatttatgagagaaatattatgggcaccgtgcctctccaacaatccccaaaacgttgcttaggcttcagcaaacccaagctcataaagcttttggtgagcctcagcgtaatcagcgaagaatgcatcttcatccgatgcatatttctcaacaagagggcggaacacagggtcagacaaaagtgccttg

SEQ ID NO: 223030 - DNA, 409 bp, Glycine max
aaataataataatcatcatcatattcatataaataaagggacggtctttcaaagttagtccaaaaacccctatcttaaacttttttatcgaaaaaaaataaaactccattacttaattttcaaaatacaaacaaataattctcgagactgctaaattttcttagccgaacagaagggctttttttaaaaaatctacctttaatgtcctatagaggtaacacttcttccttccttattctgatgttctcttttctcactgcacaatggtccacgccacgatattctcgaagaaccagtggtacacctcaatccgacctggacccgaccctaacgagatgaatgctacatgggtcgggcttcaattggaggcgtccatgtgacagatggcaacgccacggtttatcctgac

SEQ ID NO: 223031 - DNA, 522 bp, Glycine max
cacataagcgaagtaacttgaaactcaaaaaacaccacaactcagactacctgactaaagcaaaagggaataaacaaacaaaaacaaaaatcagcaaatgactatcattggtttaacagctcttggaagaatctccaagtgttggggtcgatccattcccttctaccagcccttctgcattcattcttccctctgctgcatttgcagtagcagcttcattcatcaaggttgcatcaagagactttggaaatgtaactgtcccaaatgtgaaatcactgggcttgctgacctgttttggtaactgctgttccttggactttttctcctgagtcgccttttcacgagcctcatagaacccaaaatcatccaagatgcatgtttggcttgaatgctccttgaaaattttggcaatttgaacacccttctcaaacttaacctcctgagtatccctgctatttgttacaggtttgttttcattgttttcaagcgttatgtgcctcaacacgctatttggaatatcct

SEQ ID NO: 223032 - DNA, 507 bp, Glycine max
gggacaaaattctgataaaatttccattgcatcaacacggtaacagtgcatagccaaacaataaattgtgagtatagggagaaaaaaaaaaacgaacagtttaggtattgatgagatggcattacacattgaatggagtagtagtagtagtagtcatgaaacacgcaaattattcatccacacccagcaagacatccactgaagggagtgattaacttaacaacactcttaagcttgaggcttctctgacttgagtggcttcacaacttcccaggtgaagtctgcatcatccctttcaaagtgtccataagcagctgtcttgaggaacctatgaccacccctcttaaggtccaagttaatggtgatcattccaggtctgaagtcgaaattcttcttcacaatttgcagaatctccttgtcaggaatcttcccagttccataagtgtgcacaaacactgacaagggctcagggacaccaatggcatatgaaacttgcgcaatgcacct

SEQ ID NO: 223033 - DNA, 439 bp, Glycine max
cgagacataaccatagacaatattaagttaatcgcaagagggcaattcgtaaacagtcattaaaaagtatcatcaagtacctaagcactttctcattgaatctgaagctgaaactaagcacttgcttcgcatgtctgcatatttctttacaacaagctcctataacaattaaaacagatgcctagattgtactggtttggaaagcatatgatttgccggatgttgcaaagagaaccataaggaagagttaaatgagacacgggcagatttttactttcatgaaagcttcaacttcagctttatggcttgtgaactttgaacccaaaaactcttggaacatagccttgtgctggtttctgtggcttcagttgtccataagtcatcaagaagaggtgtggaaatgtagttccaaagtaagccccatcaatgttgccttgat

SEQ ID NO: 223034 - DNA, 471 bp, Glycine max
  unsure (1)..(471): unsure at all n locations
gaaatgaagatggttttttcatataaaaagcacacaacactggcaagtgggatacttctacgtcttaaatggataaatacattcgtggtttcaaaaagtaaccagagctacaattataacagcttatttacaacacgcttaacaaatttacaaagaaaatcctccagaaagcgtaattagactgcttcggcaaagccaacttggagatttccatagtcaaagacggtgtgatatgccctcatgaaaacatcgccaagaatccacaatggaccctttggaggaggaacatcaaaagcaataaacccactaaggcagacttctgtaatgccttctccagttcttagaatatactgctctggtgtgaggacanaaggtttatttccaattgtgaacgtaatgtttggcatcttggaaagactattacagcttatcactgactctccagatggacttggcaggctctcacacagt

SEQ ID NO: 223035 - DNA, 493 bp, Glycine max
attgagcaacattaatcaagattgaaaatatattgaggggtgttcggcagacaaaaaaatatatagagctttagtgaccttggtatcattaacattcccaaaataagatgcaagtaaatcctatcaaccacgttatttggtacctaaagagcatagcatctcctccagctactggcatagatggaatagaagagtaaaccattcagattttgacaaaaggaccttcatcctaatttatagacggattaacttcggtcttcattatatttgctgttcttgttcttggacaagcaccaaagcgggttctgcatgaattatctaaactccttaaactgtataatgttgttggattgtatcaatgtcaagtcccttcagcttcaccactgactcaacatgtcctttcagagtatgaagctccctgagccttgcaacctcggcacgtctcttagcttgctcagcaatctctgacagctccctgtaactggtcttgtca

SEQ ID NO: 223036 - DNA, 434 bp, Glycine max
  unsure (1)..(434): unsure at all n locations
aagggtggcaaagttatctgtttatcagcgatctatttacggaaaatgggatccattcatcaattggtaaaaacagtcagtattatattgctataaattgcaacccttgctcgaatattttcttatacatacttctatttgtgtcgatattagacacttttgattatctagagaatgatagattccctcttgttcattttgaaatggaagtgcactcagaatgatgggaaaaatctgttgaggttcaaaggaagtgaatagaagtcttcagctctagtatcctggttgaaggtcctgaatttttcccaccagtgtcttccactgtctcggcgagttgagccctctccacnactnatagtttaatccaagaaggaagctactatgattgccactgttgctggggatgagaaaatcacttgcactatatttgtgaa

SEQ ID NO: 223037 - DNA, 513 bp, Glycine max
gcaatataatgtcaacttttagaattgataaaacagcacaaagggagacagtgaaatgatcattcaattatttgaacacaaacaagtgtttatttcaggagaagcctactaagttcaggttctaaatcataatatgcagatcaagatgtctacctgattgctatgccactccaacaaacatcactcaagtgaaaactcaaacaacatggtatgttgatacttctcgcccggacgaaccacaacagaaggaaaatttggctggtttatggcattagggaatccctgtgtctcgagacataacccagcatgctttccatatatagcacctccttttccttgaacaccattcacatagtttgcagtgtaaaattgcacaccaggggcatttgtccacaagttaagtactcttgaacttgatggatccctcacttttgcagcatgtctcaaaccctctttctcttccccacaatcaagcacataattgtgatcatatcccagtccaacctgactaat

SEQ ID NO: 223038 - DNA, 422 bp, Glycine max
caacgaattaaataaatgtttcaatatataattaattgccaaggtgtaaaaaacttacgacatacaaaactgcacattattctcattctcatggtaactaaaaaattatagggcaaaaaagagagatttaaaagaataaggatttttttttcccctagacatattaatcccatggactcaatgaacactcctctggggtagttggataacgcgcagaatcctggcagcagtcatagataacaaggttcctctgaacccaagcataatcctttttctgatcatcagaaaggcgccaagcatcatactgatcccaccaatctttggttgtggttgagacacaggcagggtatgggtcttcccactggcaaccatccacactgaagtccttgtaggatgacacaaatggggctaatttccagtta

SEQ ID NO: 223039 - DNA, 398 bp, Glycine max
gggatattagggggctattattaatgggacacaattgagttcaacacaaaccgaacttattttcaagggacattattacagacccattaaacatcaaagttcttcaaatgttttgggaacacatccaacattacacaacgagcttaaaaccccccacggagacggaggacaaggggaagggttgattccttctggatgttggaatcagggagggtcctttcatcctcgagctgcttgccagcaaaaatcaacctttgctggtccggggggaagcctttcttgtcctgaatcttggccttcacattgtcaatggtgtcagagctctccacctcgagggtaatagtcttacccgtaagagtctttacgaaaatttgcataccaccacgaaaacccaacac

SEQ ID NO: 223040 - DNA, 579 bp, Glycine max
  unsure (1)..(579): unsure at all n locations
accgctgtacactagctcacctcncgaaanacgnagcngagacattacctccacgcgtcctggggctagccacccggctcgcggcttttttctctttaatttggtttatgctttgtttgttaatttatttttgcaaatgtagcacattgttaaggctaattctggcttatatagatggtactccaggaagttccatgcatggtgtaactggaagggaacaaaccttctagccttagtggcttcccctaaggtacctacagacactacaacaaatctcgctttgccagcagattctgagcacaaggcaaaaattttcaagcttttttccttagccaaccctcacatgagaaccttccacgtgtcttggatatccttctttacttgctatgtctcgaccttcgcggcggcgccacttgtccccatcattcgcgacaaccttaacctcaccaaaggcgacattgggaacgcccgcgttgcctctgacttcgggagcatcttctccacactcacaatgggcgcggcttgtgacctatttggaccgcgatacggctgtgccttactcatcatgctctctgcacc

SEQ ID NO: 223041 - DNA, 466 bp, Glycine max
gatcacaggatgatgctctctttaagtagggaagcagatcttagtcagtacacataggtaggttgaaattctagctctagcaatctagctagagaaggtagtacttgcacaacacacagcacatgataatttattttatacacaatctcattctcatggtgctcaagatgcatggactaattaagcaacaatgttggtctgataggcagtgtccacagataaattgggtacccataaaatggccttgcttccaaggaaatggcaaacagggttagttccaggatcaactcccataagttgatgaagcatttgatgattcattccagaagtatttgagtggcaaatagcaagtgcctgagttttggttccatcaccagccaccaatggaaccatgaaagctgttgtttcacggacttcatggcagtaaaatactgcagttctgaaatttagcctatgacacatcact

SEQ ID NO: 223042 - DNA, 423 bp, Glycine max
agaacaaaagattttgttgggtgcatgggcagttgttcagaaaatcaacaatataagtgcactttattctaagtacacctccttattttaaaaagccaaaataagaaataaaatgatgaatcactgtcattgattcgacaattatttatcggcaccaggacaataatacataaacattgaatcttggtcatgtatacaatgaaacccgaatatgaaaattttaaaaaaaaaatagaaaataataaatttagctcctgcacctggtgatggcactgcagccacggctgtaagggttggcctgggcgccaggctggcaattgtagtaggaggctccccggcgagagcaggggacagagtttctctgcagcgcaccgtagctgatgtacttggtcgtggctaaaatgcgccggctgatctcgctgt

SEQ ID NO: 223043 - DNA, 449 bp, Glycine max
ttattttttttttttttttttttttttttttattttttttttttaacaaaataaaagggattaaggttttactgccccaataaaaaatacttgaatggccttggacctaaaaaagaataaaaaaaaacttaacaggcctaaataatgtttacaagctccctttgcaacattggcccttcctaatgattagattatcaattaaattttaatcaacaggatagataccaatttagcaccaaattgcccaaacaaattacttacatgttgaaggtcgtggttttggcggcatataataagaattaccccaatcaattggggtttgcataagtggattccatcggacaaaaattatacgggcacctctacccattttttcacgatatctatacggcggtggtgacacccttccatttggtgtgattgaatcaggtggcattatgcctgccatg

SEQ ID NO: 223044 - DNA, 473 bp, Glycine max
  unsure (1)..(473): unsure at all n locations
catatattattatacttcacaatcagcattacttgtgtttgagactgaaaataaccatattacattattattattattattgtaacaatcggaaaacgagggaaaggaatagaaaacaatgaacaacccttggcagttggttgcaccaaccaaagtagccacaaatcgaaatcctagaaaaatcaaaaggtaaaaaataaaaaggaccaaaccctacttagaaaagcataactgttccttggtccttgttccttgttccttgttccatccaaagggagacaacatgcaagttttgctcatggcttccacagaatgggtgngtctgcaatcatggaagtaaccacatatgggtccatgttagaagctggccttctgtcctcaaaagatcccttccctgctttctctgtgtccctcccaaccctaactgaagctccacggtttgcaactccccataagaaggtgttgatgtcagc

SEQ ID NO: 223045 - DNA, 509 bp, Glycine max
aactacaacaccatataaccggctcttatttcattaaaattcagtcaccatatccatatgccacagtacacagaggcaacaccatcacataccataaagtgaatccatcaccaaatcataacaatttcatatataatctcaaacaaaaacaaaaacaaaaaaaaaaggcatcagcaacacaaaccaaaaccaaaaccctaactttttttttctcttccttcaaatcttatcaatatcctcatcctcgaactcgatataatcatttccggccccatcctcctcctcatcaaggccagcgccgatgccctcgttgagcctggtgctgtcaggaagctcgccgtaggccttgaggagcctggcctcgtcgggcatgtacttgaggatgacgtcggccttgtcgtcctggtagtcgcggaggccgacgaggatgatgtcgccggcggcgatccagaccttcttgtgcatcttgccgcggatgtggcagaggcgcttggtgccgtcgatgcaca

SEQ ID NO: 223046 - DNA, 398 bp, Glycine max
accctctcatttatttatgctcttggggcctcgctggctcgctcactgactcactgactcactgactcactgggtcattgattcactccactccaacaagttcaaccaaaccattttttattatttaccacccatccaggagccaattaatctacagtttacagtgcaagtcgttcggggagggaagcttccaggcggaggtagcgatgagtggccgagtgtgccagccaagcatgaggcagccgttattctcctcaaccctatagccgtcaccgcctgcgaatagagcaagtagcatactcgcttgcttgaacgcgttggacccgagatgaaccgggtcgaacccggccgagtccaatctccccctccactgactcaaagtctcgtgacgctctacc

SEQ ID NO: 223047 - DNA, 516 bp, Glycine max
atacaaaaataataagaataataattatgctgtgttcacaaggaaaattgcatctttaattgagccaagagaaaagaataataatatacatgcctagctattttgatcaagcaattaaatattgaagacagcctagcagttgcgcaatcagagatgaaatgaaatatggagcagcagaaagagagaatgagggttactgcagcttttcccccttacccaccaaagtaacacaaattagaaggatataaagatatgtagattgattggacagacacaagcaaaactctccccaggggccagaataagtctaaacatagcaaggagactgatgcaactccaaccgttaaccatttcaaaatcttaggtgctttctgctggaacctggttcacaacaccaatgttgttcataggtttgggcctccactcagtcctgcccctcacaatctcagcaccattttcgagtcgaagcaaatgcttgcactcaacatgttcactgtgagctagattgcccatgtc

SEQ ID NO: 223048 - DNA, 509 bp, Glycine max
  unsure (1)..(509): unsure at all n locations
caaaagtctataaacaacattcttttcttttatggaacatgtgacatccttttggtcacctgagatggttaactcataaatgtcctaaaactgtataccatagaatggcaactcttttcatctacaacaaaagggaattttaaaaaaaattcagcgctcaatgttagtttttggtcctcttcgaagaaaacaattggcgaagaaagccaaactttcctctgtttcgggcagaaaactcagtaatggtgccattacttgttgtagccacctcaggttcattgtcaggtggtactggcaaaggaggagacggtggtgagagtgtgaagagaaacgcgttgagcatgcggatgatctgactaaagcttggtctcaagttaggatcttcaacccagcaagattgtntgacaaaagcaagttcaggggatatatcatctggaatgccgggcctcttttgcttaaatgcagcagcataagcagcctgtaaattggacatcccttcaaagggcatg

SEQ ID NO: 223049 - DNA, 509 bp, Glycine max
gaagtcctaagtccatagaaatttttatacatgcggaaactcaaaggtaaacgaatcaaaggtacagaagcaacttaaacattttggtatccttttgggtatggcactaccacatccataagaaccaacattgacagtggcacgtatattagtttaattatgcaataactgagacataatcagtggcaagtattcccctgttgcagtttgaaacaaccccaccccgccaatctccatagagagttgcttatcttgcaccatttttaggaccacacatttccttggatttcccacttgtatatgtcaagcatacatacagaaattacatactacataaacaacatggtcttagcagtttcctgatcctatacggagataattttaccagtaccaaatgataaagttcacaacataaatatttatacaaactccccttagtccagtatcacatcacaaccacaatcaggcatatctttgtatttaatggctggatggatatatagcagcta

SEQ ID NO: 223050 - DNA, 370 bp, Glycine max
tgtccttcctttattttttttctaaatattattcatttttttttattataataatcacacggcactggggaaatgtatactccgacctcttaaatggataaatacactccaggttccaaaaaccaaccacagctacccttataacatcttatttacaacacccccaacaaatatacataaaaaatcctccacaaagcccaccaaaacagcttccacaaaaccaacttagatatttccctcgcacaaacactgtgtgatatgccctaatcaacacattgccaacactccacaatggaccctttggaggaggaacatcaatcgcaatacacccacaaaggcaaactactgtaatgccttctcccattcttag

SEQ ID NO: 223051 - DNA, 502 bp, Glycine max
acttagatgggactaaaactaactaatacttgccgataaaggcaaaaggggcaaaaacaaaaacaaaacaaaaagatgggactattttcatgcgcaggatagcaagttccagtgttcatcaagccggtggcttaggttattagtttttatggatggagacattggctatgtatgtacatatggatcaataagatgaggtgaggagcatctgtatctgtattttgtacaaaatgaaaagtaaaagaaaaggaacaatgcaatcaatgaggtaaaaatgaattggacagtgctgcagatactttacaaacagggcaccagttcttaagccgcatccactcctgtatgcaaaccacatgaaatctatgttcacattgcagatccccaacttcatctccaacaacatattcctcctggcaaatgcagcatttgatatcatccttatcctcattacaactctcatctgcatcatctaaaggtgcagactgagatttacttcttttca

SEQ ID NO: 223052 - DNA, 347 bp, Glycine max
  unsure (1)..(347): unsure at all n locations
gggcgccgggaaatccaagtttacggccccataatttcaaagncaaacctcttttatagtgtcccctaaaataaatccattggcccccgttttaccacgacaagaatgaaaaaaccctgctgtcacccaatttaatcgcctaaacaaaaatgcccttttccccagctggcgaaataaaaaaaaggtccgccacacactcccttaccaacagtttcccaacctgaagggccaaagggcccccccctgtagaggtccattaagcccatccggtttgggggatacccccaatggaaccgttacatttgccaaaaccgaaacgcccaggcttttacatttcttcccttttt

SEQ ID NO: 223053 - DNA, 470 bp, Glycine max
agaagaaaagctataccaaccagaggctgggcattatattatggattattattgactcattgtatgttgaatacacatgtaagtataacgaatcaactaccaaactccctaaggacgaccaaaaagaaaaagaaaaaaaaaatcctgagcaccatgtaaaagagcagttgatggccaactgcttggctgaatggctagaaactcagattgcagatgaaataccgtaaccgttacgatgagctttttgccatttccatgcaacctgcaaactcttctcaaggtcagtgtattgtgcggtccaattcagttccctgttgatcttagaagggtcactatacacctcggcataatcgccgggtcgacgtggaaggtagtctactttgatgtccacccctgtggcctttttgcaagcattcacaaactccttcactgatctaccctttccagtccaacattgtagatccctactt

SEQ ID NO: 223054 - DNA, 489 bp, Glycine max
aaaatattaacagtattagtcatccacatttaaaaaaacacaggggcatccgattgttctaggttcataataataataataataaccaaaagaagatgaaaacggagagtaacaaagcatggtgagacacagctaccgaagctactaaaaacaagggacagatcaaacaagtaggataactagggagcagagaagtagtatcaattaaagcaaacaagaaaaatagacactcaactaacaaaacctaataaccccaaattaagatggacctaatgggaatagaattctcatcaaaacttatctgccctgtccctcttctctttatatgcttttcaaatttaggatatggttggaatggtcctcacttggccatcatgactttgacaaactcctcatagttgatctgtccatcaccggcaacatcggcctcacggatcatatcatccaccttctcgtgcgtcagcttctccccaagatttgtcatgacat

SEQ ID NO: 223055 - DNA, 458 bp, Glycine max
  unsure (1)..(458): unsure at all n locations
tacaatttatttacttatatactattattttgctaataactcagtagtaattctatttatttctatcagtttattggggaaattatttacattcatctcttactttttattttttatcttggggacgcaaccccttccaccaccaaaaatttattacctgggggggaaaaaaaaagttcaaaaaaaaatattttccctcccccaaagcccaaaaacccccccaaacaccgaaaaaaatataataaaaattacccccaaaaaaccccaaaaaaaacacctccaaaaaaggggttttcttgaaaaaaaaaaaaaataaaaangggcggtttttaaaaaaacaaaattcccaaaaaagacacaaaaatttttttaacaaaaaactaaaaaaaaacccggggcggaaaaagttccataagaaaaaaaaacccccccccttttttttctcccccacccctccc

SEQ ID NO: 223056 - DNA, 423 bp, Glycine max
aatcagtaggctgtaacagaaatggattacatgtcctttttctacaatgatagtccacataaactcaatacagaagatgttactgactggacaatttggctagggtgagcgccaatacctttacaccatttgacatatcttcaatggtggcaaactcttcaggcttatggctgtaccctttgtaacatggaatgaaaatcatgcccattggagacaacctggccataaacaatgaatcatgataggctctactaatcatcaacttgcttgtcaagtttagttcttttgttgcagtctctactgccttgatgactgcttcatcagaaatggctggtggatcctgattgatgacacggaaatcagagagcttgacacctcgtgttttggtattttaattgctgattgatgaattttctcaaccac

SEQ ID NO: 223057 - DNA, 483 bp, Glycine max
  unsure (1)..(483): unsure at all n locations
aaggaagaaggaatttgcttctcttttttttgttttatggggagtactagatgcagacccttttactacacaagtcttccactttaaaatagacattaaagaagccaagactaatattttacagtgttccctctttccgggaaaatttacatcaattatagataactcgtggaggtggttggttccccttcaacttcatgatgatccataatcttcagtccggttgtaaccaactatggaggatggaatacaatacattacttgtcgntgactcctattttcttttcactgtcatctttggtaataacaatcccaaccaatttacaaggctcggcattctcaagcttttgaaccacagctctcatggttggtctcaaagccggaagagtccccgtgcacagcactgcttggtctcaacaccttgcaagcttcctttgtatacatctccggaattctcgaatccaccgcactcctaagtccctc

SEQ ID NO: 223058 - DNA, 523 bp, Glycine max
aagtaacggattgtctctcaaatttgtttcattgcattgtatgctagttaatacggcaggagttcacataagacttgtttgttagaaatatgcctgacatagtattcctattctacagctgcaaactgtaaattatacaatttagcacatgcaaaatgaaagtatgtgtactccatcttgtcgactgtgatcgaaaggtatgcaatgttggtgtcttggatattagaaacttctttgattgcgtctagtagaaaaaccagtgtcgtcttcatctttgatgaagggtttaaatctagcgaggccaccacttccactgtatgcttggcttctgtttgcagcttgatgatcggatggatctggattgccacaaatctcaagtttgattataaatgtagctgtgcttcctttgtcaggaccctcactctcaatccatatgtggcctcccatgaggtttacaaatcttttacaaatggcaagcccaagacctgcaccactgctaggtcgagctggtccactccgagac

SEQ ID NO: 223059 - DNA, 566 bp, Glycine max
  unsure (1)..(566): unsure at all n locations
agcnaatggattggatgcaccatcgcaggaacacgaaccggaatgaatgaccggctcaactagctgacgtgccgccctttttttttttttttgctcttgaaaccatctttaaattgcacataccattctgatacaggatagatgcattacaaagctaacaacaccaaccaactttcaccaaaccagcacttaaaaacttaaacactgtggccaacatatatattttcgccaatcacatgaaagagtccttcaaattgcagagatgtccaataactccaagtcacccaccacatataacaatataataagaacaccaaataaaatgtgaaggaaactcggatcatttcatgatgaaattatgcataacttcatctcaggccatgaaacttcgacttcaaatcttagatcttatcaagcttctcagccttgacaactgggtttgctttagctatggcatcccgagcagcagtgcggtaatcaaatgggcaattatgcttgtctgagtagcgatgtacagcacanaaaaggtcaccacatcgacaattaaaccctgtcaaaccaactcg

SEQ ID NO: 223060 - DNA, 502 bp, Glycine max
aaggataactgggcatggtccaagggattatcattattattattattattattgatggtggctgtatacttgttatagctggcgatttcctcaccgcccaagctttaattgggatccttaacttaaaactatgctcaaacttaagcattcagggcttactttacatgggtacaataataggctataacaatgatcatcttacattggacttgaatgccaatctcaaaattgagctcttgcctttactcctctgcaggaggggccacccatcgaccatgctcttttattaaaacgatcaaggcattggttgcatgctccattgcaatttcacgcttcaccacagtcttcccaacatagaggtcaatcttcccgggagtgcctcccacatacccaaagtctggatcagccatctcccctgggccatttacaaggcatcccatgaatgcaatcgaaacaccagggaggggtgatgtcttctcccgaatttgtgcacttacttttt

SEQ ID NO: 223061 - DNA, 519 bp, Glycine max
cttctccccttcttaaaaccttttttcttcttcttgtacagtgggtgttacattacacctaatttcaacatctaataatattaagtaatatacaattcaccttttgcactttgcagcaacttgccatgccactacaccgccgttcttgtaccttctttctttcatcagtcacaaaaactcccgaaaaaaaaaaagaaaaaaaaaacctaacgtaacgttacaaagcaccaataatcttaggtttcttgctacactctaacgagaacagttccatttctcttctcttgccattgcagcacccacttgcattattgttattgccaacaatagtatctgaaccgggtagtttcaaaatgttaaccccaaagagccgaaccatctggatcggttcgacaaccggtccgaccggtccgaacaacgcgacctcgttgttaacaacattcctcgtcttccaatcgatgtaaagctgcttgtccggtccagtggaccggtgaaaacaaaccgtgtcaccagctttca

SEQ ID NO: 223062 - DNA, 521 bp, Glycine max
  unsure (1)..(521): unsure at all n locations
attgaaagtactaaattcattaaaacatgattgcaaattgggcacattgatagcttttcaaggtccgctaatggacccgggatgcacacatacacaaagttcaggaacataaaaaaagaaaagaccagattatagactttcacatacttcagttcacaccaaacaagggacctgcagaccattctcaaactcaaaacccaccacgaagacgcaagacaaggtgaagagtagactctttctgaatgttgtagtcagcaagagtccttccatcctccagttgcttcccagcaaagatcaacctctgttggtctggggggataccttccttgtcctgtatttttgccttgacattatcaattgtgtctgaactttcaacctccaaggtgatagttttccctgtcaaagtcttcacaaagatctgcatacctcccctcagacgaaggacaaggtgaagggtagactccttttgaatgttgtagtctgtcagcgtacgtccatcttcaagctgctnttccgcaaaa

SEQ ID NO: 223063 - DNA, 485 bp, Glycine max
aggaaaaagaagacaggataaacagataactgagattcaggtgccctgttaggggtacaaatacaacataaactgtaaccaaaaaggagaaggaaaaaaaaatgaaaaagaaaaaagatcacgaacagcaatatgagaattgatgcctgatcggacttcaaatatatgaacttattcaagttttatctcttttcctgcaactttttcacgttgttttccctagacgggggattaaaaaaccccacaccagttagagtgtggctgttaaaattcttctcaatgataaaaaataataataataattcatagcagtaacagaaaaggagaaatcacttaatgaaaatcaggcttctctgggtatgtgcagccaggcctttggatgataacattggctgcataacacccagctctcacacattcttcaatgggcttctgctttaccaattgcgaaagaaattcttccacaaaagcatctcctgctccat

SEQ ID NO: 223064 - DNA, 489 bp, Glycine max
cataaagatcataatgaattaacaatgtatgtcccgttcaggggttggagaaatgacccacatgaaccaaggatcatgatcttcaaacagaaaatagaattgtctcaattaagtaacactaaccacaaatcatcgtcagatctacgttaatctaggttttccctactccagccccatacatgaatggttttaaaatgccaagaaacatccaccgcaaatgttaaattaaatacaacagcaataataatataactcatttttgcctacgacgtatgtcatttttcagtttttgaagcacacgccacaacatgagatttgaatttctccagctcggccaaaacctcatcttctggtctgtagatcaaatcactcatgcgccatatctgcaacgttcccccttcttcagtactttcacagtcatcagacacactaacaatcgcccatggatcatatgcattccaatggaagtcaacaactgtatccctatga

SEQ ID NO: 223065 - DNA, 442 bp, Glycine max
aggggcaaggggcatgataataataataagtctaacattaaaggtgcatgaaaagagaaatacatgatgcataagggggttcatgttactgggatgctccggtacaaagaaggctattctccaagcagtgaagggagtagccccagcttttttgataagctcatacaccaaaggcattatgagctgggtgggtccaccacccatgttcccccaccccgcagcagttccattcgcaagccctataatcttactggtgaacattgtgctcatccaatactggcatgacacgaacgttgccaaggagaaccctatcaagaaccgaaccattatgtaccccgcagcattttttacaaaggacatgcaaaacacggttggggcccagagcattattaggaaggcccacccctaacggggacctaataggtcacaaaccgcacccatt

SEQ ID NO: 223066 - DNA, 488 bp, Glycine max
atctcagaattctctaaaagagatctttttctgctctttgaagaaagaagggtcttggcttgattttggagatgtctctgctctcagatctcatcaaccttaacctctccgataccaccgagaaggtgatcgcagagtacatatggatcggtggatcaggaatggacctgaggagcaaagcaaggactctcccaggaccagttagcgacccttcagagcttcccaagtggaactatgatggttccagcacaggtcaagctcctggtgaagacagtgaagtgattttatacccacaagccattttcagggatccattcagaaggggtaacaatatcttggttatctgtgatgcctacactcctgctggagaacctattcccactaacaagaggcacgctgctgccaaggttatcagccatcctgaatgttgtgctgaagtgccatggtacggtattgaacaagaatacaccttgttgcagaaagatatc

SEQ ID NO: 223067 - DNA, 543 bp, Glycine max
cctactccaatgaacatgacaatttcatatattattattatacgtcacaaggagcatttctttgttcaagactgataataaccattaaattattgtcattgtaacaatcggaaaacgagggaaaggaatagaagaaaacaatgaacaacccttgccagttagttgcaccaaccaacaaggcaccaaccatagtaccaatcaaaaggtaaaaagagagagagaccaaatcctactaagaaaagcataactgttcctttccatccaaagggagaaaacatgcaggttttgctcatggcttccacagaatggttgtgtctgcaatcatggaagtaaccacgtatgggtccatgttggaagctggccttctgtcctcaaaatatcccttccctgctttctctgagtctctcccaaccctaacagaagctccacggtttgcaactccccataagaaggtgttgatgtcagcggtttcgtggcgtcctgtcaaacgacgttcgttgccttctccataagcaagcatgcgctccttgtgcttttttccca

SEQ ID NO: 223068 - DNA, 532 bp, Glycine max
aaaccattacattctacaaaaaaccaccttaagacttcacaaccacaacaattccgggaacaaagaacatggtagtatcaaaatgtctaagtctaacactccatgttcctactcaccccagtactccttttctcaccccaccctccaaaaaaactccaaccttgtcttactcttccacccatttttccttccaaacaaaactgaacaaagcctttcccacctcatacaaccattccttaaccaaacactttccaatgaaatgttccaattcttccagctacacatcaccaccagattttgagcttgagtctgatgatccaacactcaccaatgaagacctcaagccaacaacaccaagtcaaaggacattttcaggcttcgaaatagcaagtttatgggttggattagttgttggcgtcccttcttattaccttgctggaagcctcgttgaccttggcatggcatggtggcagggcataacaactgtggtggcagcaaacatgatcctcttggttcctttggttctcactgg

SEQ ID NO: 223069 - DNA, 450 bp, Glycine max
ctgcgagacttggaaatggcgagttattcattgttttaatggatacagtaggggtccaaatgcaattacagtggggctacctccggcgtgggtggatttatcagaagaaatatcagtaaatgtgcaacgtgcacgcacaaaaatggcagagttggctaaggctcattcaaaggctttgatgccatcatttggagatggtaaggaagaccaacgagctattgaaactctaacacatgagataactgacttaataaagaagtccgagaagagactgcggagactttctgctactgggccttctgaggattccaatgtcaggaaaaatgtgcagcgctctcttgctactgaccttcagaacctctctgttgagctccgcaagaaacaatcaacttatttaaagcgccttaaacagcaaaaagagggtcaagatggagttgatctagagatgtt

SEQ ID NO: 223070 - DNA, 459 bp, Glycine max
aagagaatccgaggcgaagagaagagaaaaattaagatggaggggaaggagcaggatgtgtcgctgggagcgaacaagttcccggagagacagccgattgggacggcggcgcagagccaagacgacggctaggactaccaggagccggcgccggcgccactggttgacccgacggagtttacgtcatggtccttttacagagcagggatagcagagtttgtggccacttttctgtttctatacatcactgtcttaaccgtcatgggagtcgccggggctaagtctaagtgcagtaccgttgggattcaaggaatcgcttgggccttcggtggcatgatcttcgccctcgtttactgcaccgctggcatctcagggggacacataaacccggcggtgacatttgggctgtttttggcgaggaagttgtcgttgcccaaggcgattttctacattgtaatg

SEQ ID NO: 223071 - DNA, 478 bp, Glycine max
atgactcgggggttatttttgattttgcaaattacacaatcacggccgtacatcacacgtgagctgggcctcttccaacttaaaagcagaggataacattggcccatgacgcaacacatgcaccacctaataatcataattttacatctttacatacaaaatacaaagactttaaattaaaattaaaaaaaaaaaagataaacagatcatcttgatgaaatgaaaccgaaacccagaaacattgttttgattttttttgttgttcccaacttgattaagcatgaacggtttgattgaatcacttggacttgaagggaatggccctgattacgacctggtggtagagtgctgcaagtgcagcaccaatgaaaggtcccacccagaagatccagtgatcatcccaaccaaggtccttgttgaagatgatagcagcaccaagactacgagcagggttgataccagtgccggttatagggat

SEQ ID NO: 223072 - DNA, 465 bp, Glycine max
gttttgcaattgtaatggcttctacttctaatgccatcttccaatgcacctgttcttcttgttcttcgtttgagtatgacgtgtttgtgagcttccgcggtgaagacacacgcaacagcttcactgcttttctttttgaagctctgaaaaaacaaggcatcgaggccttcaaagatgataaagatatcaggaaaggcgaatccatagcaccagagctaatacgagccattgaagggtctcatgttttccttgttgtcttttccaaggactatgcttcctcaacttggtgcctgcgtgaactagcacatatctggaattgcattcaaacatctcccagacttcttctgcctattttttatgatgttgatccatcacaagtgcgaaaacagagtggcgactatgagaaagcctttgcccaacaccaacaaagttccaggttccaagacaaggaaattaaaacatggg

SEQ ID NO: 223073 - DNA, 403 bp, Glycine max
agaatggctcccaagggtttaacctttctggctgtgttaatatgcgtttcagcactgtcactgagtccttctgttgcgggggaagggcaaaataatggccttgttatgaacttctacaaggaatcatgccctcaggctgaagacatcatcacagaacaagtcaagcttctctacaagcgccacaagaacactgctttctcctggctcaggaacatcttccatgactgtgctgttcagagttgtgatgcttcactgttgctggactccacaagaaggagcttgtctgagaaggaaacagatagaagctttgggttgagaaatttcaggtacattgagaccatcaaagaagctttggaaagagaatgccctggagttgtttcatgtgctgatatcctcgttctct

SEQ ID NO: 223074 - DNA, 518 bp, Glycine max
gtataatgcccatgggccatgatttatttatttagaaagaacaacctaggtttatgagtatgaatatcataagcattgtcactgccatcataacagcactcacacgcatacataacataattaacaccatgaacatgcccttctacccaactctaagctacttgcatagtactacatatataatatccttattgaaattaaaaaaaaaaacaacagtaacatcggaagattaaaaaacatagcctcttaatcctcccatccccatgaacctgcagaggtctcggttcattgaaccagcccatttaaaggaaaagaccttaattattttttgcataatatattacagattttcttcctcgatcatagacaaggggaggaaaattcaagggtcctgatcatggtgcttgttggcaacattgcactgctttctgacctcaccctttgtgccagtgagagggttgttctctgagagcaaggtaatggctctagagaactccttgaagaaataggcttggctc

SEQ ID NO: 223075 - DNA, 510 bp, Glycine max
ctaaaatgaattttttttataaaaacaaaaatatataggaatattatggggcaggcatgatatttacaagctaggtaatagtaatttcatcagtagagtttgtacataactctttggaagatgcttttctgagtaaaatttctctttccacatagaatgctggttttcgaggcaagggaactactacactttcatttgttaacattgaaattatttgagacattgggggtcgatcatttgcatatttttctacgcatatgagaccaatgtgaatgcatcttgtcacttcattgagatcaaacaaatcattaagcgatggatccattaattgtagaggcacaccttgaatccataactcccatgcatgtcctatcaaattcatcgggcggtcgtcattgaagctagtatttcttctcccactaataatttcaaggaccaacactccaaagctataaacatcagactttacagaaacaattcctttcatagcatactcaggagacatataac

SEQ ID NO: 223076 - DNA, 291 bp, Glycine max
gaaaaagaggcgcaagatgagtggtagggtttctgggaaggtgaagtggttcaatgatcagaaggggtttggattcataagccctgacgatggcagcgacgatctcttcgttcaccaatctcagatcaaatctgacggtttccgaagcctcgccgaaggagagtccgttgagttcgccattgaatctgaatctgacggacgcgctaaggctgttgatgtcactggccccgacggcgccagcgttcagggaaccagacgaggcggtgatggtggccgaagctatggcggggg

SEQ ID NO: 223077 - DNA, 569 bp, Glycine max
ctaccgtaaccaaatgaagggtgtggtgtccttctttgaagcagtggcgggtaatggggcaaccggtgtttactcggctctggctttgaaagccatgtcaagacattttaggtgtttgaaggatggaattatggatgaaattgaagccacaagaaaaggcatgggagagaaagaccacgtagtggcagtacccggcacaacaaggggcgaaacaccaaggcttagaatcgttgaccaatcgctgagacaacaaagggcctttcagcaaattagcatcatggaaacccatccttggagaccccaacgtggccttcccgaacgttccgtttctgttcttcgagcttggctttttgagcactttctccatccgtacccaagcgatgttgataaacatatcctagcccgccaagccggtctcttcagacgtcaggtttcgaattggtttattaacgcgagggtgaggctatggaagccgatggtggaggaaatgtatctggaagatgagaaagagcacgaacacgacgtagcatcatcgatattaatgttcccaagaggatgagaagccaacg

SEQ ID NO: 223078 - DNA, 524 bp, Glycine max
tttcactttaccaactcctaacaatttctctctgtttccttcttcaccgcatcaatggagttggacggcgttctcctcggcatgtgcaaccctctcctcgacatctctgccgtcgtcgacgacgctttcttgcaaaaatacggtatcaagttgaacgatgcgattctcgctgaggataagcacaaacctatgtatgaagaattggctaacaatcctaatgtggagtacattgctggaggtgctactcagaattcaatcagggttgctcagtggatgcttcaagcaccaggtgccacaagttacataggttgcataggaaaggacaaatttggagaggagatgaagaagaaatgtacacttgatggtgtaaaggttaactattatgaaatcgacaatacacctactggaacttgtgctgtttgtgtggttggcggtgaaaggtcccttgttgccaacttatcagctgcaaattgctataagtctgagcatttgacgagaccggaaaattgggcattagttgaaaa

SEQ ID NO: 223079 - DNA, 519 bp, Glycine max
ggataacaaacagcataattaagatacatgtgccttgataggggtacaaatgcagcataaactgtaataaaaagaagaaaaggtggaaaaaatgaaaatgaaaaaagatcacaaacagcaatatgagaattgatgcttgatcggacttcaaatatatgaacttattcaagttttatctcttgctgcaactttttcacgctgttttccctagccggggggttaaaaaaccccacaccagttagagtgtggctattaaaatccttctcaatgataaaaagaaaaaaattcatagcagtaacagaaaaagaggaatcactcaatgaaaatcaggcgtcggtgggtatgtgcagccaggcctttggatgataacattggctgcataacacccagctctaatgcattcttcaatgggcttatgcttaaccaattgtgaaagatatcctccaacaaaagcatctcctgctccatttgtgtcaactaatttctctctaagtaacggcatcacggggtaaattttta

SEQ ID NO: 223080 - DNA, 523 bp, Glycine max
gtgagttgccagaatttctgggaggtacctgtacctgtgcagatcagggtggttggctcagatctgataaaggaccctggaaaaaccctgaaattttgaagatgattctcagtggtgaagcacggcgagcaaggccagtagtaaaagttctaaacagtgaagggaaggttattgcctatgccagaccacaatatccaatggtaaaaggcagtgacacatccacagctgaatcagggtcagaagctgaagatatagcttctccaaaagtgacgaagagctactcacacctgaggttgacacctgttcgggaggaagctaaggtagttggaaagttgagctctgctggtggtggtaacttagctgggtatgatgaatatgtaccaatggtggacaaagctgttgatgctgcctggaagaaccaagcatcactccagaggtctcaaacttcaaaaggaaaacctccccttcctgacactcctaacccccctgaagggattcgagctcggattgtggagctctaact

SEQ ID NO: 223081 - DNA, 568 bp, Glycine max
gttcccctcgctagcccccaaaatagattaatattcgatgcgggttatgagatcggaagaacaaccgcttttccaaccaacaaagacaagcacaccaaatacaacaacaaaggtaatgctagcaaaaacaaggcttgtgtttaatccggcaaagagaccaccattagctatacacaagtttgaaacatttgtcgagtttactcattaaactgtatcagtattcagagtttaacatcatgagcaaggtcagcactagaaactccatgatttgaaaacaccctctcccagagtctctttttgtcagcaaccaaaactcaccagcaaaacttcttccgtaacctagcttcttcttgactatcaatgtaagcaagcagctcttcttgcctcattagtgcttcataaagagcctttttagttgcaattaactctgcttccaaagcatccacccgacatacagcagcatttaacaatttttctttctcataaggcatctcagatggcttagattggagtgtgtcaaccttcacttcaagctcacctaaccttttcatcattgaggaaaggagat

SEQ ID NO: 223082 - DNA, 448 bp, Glycine max
ctttcttcctaacacggaacactctggtttcgaacccttgttgtggttaggtcttcatatgtcgaatttgggaattcatgggtcagggaactccgggcggcatgaaccggcagggcgaccggaagccggacggcggcgacaagaaggagaagaagttcgagccggcggcgccgccagcacgcgtggggcggaaacagcggaagcagaagggcccggaggcggcggcgcgactgccgacggtgactccggtgacgaagtgcaagctgcggctgctgaagctggagcggatcaaggattacctgctgatggaggaagagttcgtggcgaatcaggagcgactcaagccgcaagaggagaaggccgaggaagacagatccaaggttgacgatctccgaggctctcccatgagcgtcggaaacctcgaagagctcatcgacgagaatcacgc

SEQ ID NO: 223083 - DNA, 471 bp, Glycine max
gaattgaaagaaaactatgtggaattaaaatcgttgttgagattcaaagcctccaaaataaaactgacatttgttcgcataatacaaatgaattgacatttgttcgcataactagaacattgaaaaaaagacaagaggagcggggataatagaggatagtttttcacatatacagcccttcaggcaccccttttttttttttaaacatcactttatccttggccttcttaaagtcagcatgagtcaccttcattcggcgttctcgtagagcaagtaaaccagcttcagtacatattgcctttatatcagctccagagaattcatctttagtcataacaaattcttccaagttgacatcatcagctaatgtcatcctcgacgtgtgtatctgaaagatgcgtctccttgttttgatatcaggaagaggaaattctttcttcctgtcaattcgaccaggccgtagcaaagctg

SEQ ID NO: 223084 - DNA, 448 bp, Glycine max
gttcatcgtcccactttcttctccttttagggtttcctttttgtttctcctttccagatgtgcatcttccattttttaggattaagcggtgagattcgtgaatctgagaaatgtcggattcttctcgggaggagaatgtttacatggcgaaattggcggagcaggccgagcgttacgaggagatggttgagttcatggagaaggtagcaaagactgtggaggttgaggagttgacggtggaggagagaaatcttctctctgtggcttacaagaacgtgattggtgcgaggagggcttcgtggaggatcatatcctccattgagcagaaggaggagagcaggggcaatgaggaccatgtggccattataaaggagtacaggggcaaaattgaggctgaactcagcaagatctgtgacgggattttgaacctccttgagttcaacctcat

SEQ ID NO: 223085 - DNA, 508 bp, Glycine max
  unsure (1)..(508): unsure at all n locations
agcaacaataaaaaatttataaatcactaaaccaccaagccacattgttctcgtcaataaaacacatacacgactgaaacattgtaaatctcaagcgcaacccgcaattgaaatcacgaaactcattaatacacagttccactatggcaagccacattggatgtgtatattatcggtaatacatatcccatcaactactgccatcgcctattcacctggttgttgcttagatgtttccttgatctcatctccagcatcgtccgtgatgtctgatgtccacaaagtcagattgtcacggagaagttgcatgatcaatgtactatccttgtatgactcttcacccaatgtgtcaagctcggaaattgcctcatcaaatgcctgtttggcaagattacaagcccgatctggcgagttaaggatttcataatagaagacagaaaagttgagagcaagtcccagcctaatggggtgagtggnggccaagtcagcaagagcaatatcctgagca

SEQ ID NO: 223086 - DNA, 459 bp, Glycine max
caaaaaagctggatggggtgtcatggccagtcacagaagtggagagactgaggataccttgattgctgacctttctgttggtttggctacgggtcaaattaagactggagctccatgcaggtctgagcgtcttgctaaatataaccagctcttgagaattgaggaggagcttggtgctgaagcagtgtacgccggagctaacttccgtacccccgttgaaccctactaaagttttcaagtggaaaaaacctggagatccacacgagtttgagcattgagatttggatgcgcggtttttggtgtgatatataagttgatagttggaacattagtcttggtatgataaagaccttgccaataatttgagttctgattcacagagctaggacagttatgtcttaagactttgaaaggtgtttaatgatatttagctttaatacttgaagcctacttacagtt

SEQ ID NO: 223087 - DNA, 546 bp, Glycine max
gtctgaaaatcgtagcattggggatatcacggatcaaggaatgaaaataacttagcaacgagtaagaaatatttggggatagcccataaaattggaaataaactgtaagtaggcttcaagtattaaagctaaatatcattaaacacctttcaaagtcttaagacataactgtcctagctctgtgaatcagaactcaaattattggcaaggtctttatcataccaagactaatgttccaactatcaacttatatatcacaccaaaaaccgcgcatccaaatctcaatgctcaaactcgtgtggatctccaggttttttccacttgaaaactttagtagggttcaacgggggtacggaagttagctccggcgtacactgcttcagcaccaagctcctcctcaattctcaagagctggttatatttagcaagacgctcagacctgcatggagctccagtcttaatttgacccgtagccaaaccaacagaaaggtcagcaatgaaggtatcctcagtctctccacttctgtgactggccatgacacccca

SEQ ID NO: 223088 - DNA, 446 bp, Glycine max
cttcaatggctgattcaggctcagcctcttcttccagaatgtggtgctccatccccgaacgggttcagctgcatgcggccatgttggccctgcagtttggctatgctggctttcatgtggtctcaagagctgcccttaacatgggcattagcaaacttgttttcccagtctaccgcaacattattgcttttctcctcctccttccttttgcctacttcttggaaaagaaggagagacctgccattactttaaacttcctcttacagttctttcttctggcacttgtcgggattacagcgaaccaaggtttttacttgcttggcttggacaacacatccccaacctttgcatcagcgattcagaactctgtcccagccattacatttctcatggcagtcatactcaagatagagcaagtgaggctgaacagaaaggatgggatagcg

SEQ ID NO: 223089 - DNA, 455 bp, Glycine max
ctcccgaccctgttcccctctcgtatccgtcatgaaaggaggaaagtccaagaccgaatgtaagagagccgatcccaaacttgctgtgaataagaagggagccgccaccaaggctaggaaacccgccggcaaggggaaggcagcgaaagaccctaacaagccaaagaggcctccaagtgctttcttcgttttcatggaggagttcaggaaggtattcaacaaagaacatcctgaaaacaaagcagtgtctgctgtgggcaaagctgctggagcaaaatggaagaccatgtctgatgctgaaaaagcaccttatgtggcaaagtctgagaaaaggaaagtggagtacgagaagaacatgagagcctataacaagaaacaggcggaaggtcctactggtggggatgaaaaagaatctgagaagtctgtatcttgagtgaatgatgaagatgatgatg

SEQ ID NO: 223090 - DNA, 615 bp, Glycine max
  unsure (1)..(615): unsure at all n locations
nnggcactacacgtccggaatactccngatctatatgctcgctagcggcggtcggcctttttttttttttttacagcagaaagcgaatgataagccaattatattgatacaaacttaaccggagttcaacgggaaaactctaaatcaaactaaaagctctacaagagataaacaccccttaactaaacagttggatttagaagtacaaataaagaactcccttctttaaactattcacgttttggaaagacaaccaatttacggagggagcagggaaatattttttggaagcaagaaatatgtttatcaggaaatgaccagaccacctacaacagatgatcaaaatcatcagaacctacataaatgcaattatcagaccattctctaatcgncatcctcttcctcgccactgccttcctcatcatcatcttcatcattcacctcagatacagacttctcagattcttcttcatcctcaccagtaggaccttccgcctgtgtcttggtataggctctcatgttcttctcgtactccactttccttttctcagactttgccacataaggtgctttttcagcatcagacatggtcttccattttgctcagcagctttg

SEQ ID NO: 223091 - DNA, 578 bp, Glycine max
gaaagacacagccattgtttgtttactttccattgattgagcgaaagctttgttttgtgtgtgcgatcattttccattgggtggaagaaagtctcaacctttagtcgaaagagcaaggatctgagtgagtgagcgatcatgtgtggtggtgcgattatctccgacttcattccagcgggtcccgccggcggggcgcagcgcgtgaccgccgacatcctgtggccgaatttgaggaagcggttctcgaagtcgctgctggacgatgatttcgaggcagggttcagagaattcgaggatgactcggaaatcgaggatgtcgatgatgaggacgatgaagaggaggaggagttgaagaagaagaagccctttgggttctctcgctccaacaacaaggctgcttttaagcctctctttcgtggagcaacaactgtgaaatctgtggaatcaaaggggcaagctgagaagtgtgccaagagaaagaggaagaaccagtatcgcggaatccgccagcgtccatggagaaagtgggctgctgagattctcgacccaagaaagggggttcgtgtttggcttggact

SEQ ID NO: 223092 - DNA, 533 bp, Glycine max
ggctgattctcctctccggcatggccgggatcgccatcccgctcatcggaaaacaccgccgcttcctccgcaccgacggcaacctcttcgtcgctgccaaggccttcgccgccggcgtcattctcgccaccggattcgtgcacatgctctccgacgccaccaaggcacttcgccacccgtgcctgccagcgttcccgtggtccaagtttcccttcaccggtttcttcgccatgttggccgcgctcctcacgctcctcctagatttcgtgggaacgcaatactacgagcgcaagcaggggatgaaccgcgccccctccgaagaaccagtacgggtcggctcatcccaacccggtgggaatgggaaggtgtttggggaagaagaaagcggcggaatgcacatcgtggggatgcatgcacatgctgcacatcatagacataaccatcctcatggcaatgatgcatgtcatggcattggcaacatcaaggaacaggttcacgcccactcccactcccactcccactcccacggacac

SEQ ID NO: 223093 - DNA, 551 bp, Glycine max
aaaaaaaaaaacggatatgaaatcaaatattgaacaaagcagggattacagctatataggggagggacatcatgcccaaattgcgagcgaagacatcaatccagccccaaggaaaagcatgcagtaagacagtatctgcagcctaaagttacaactcatcctcttgctaagaaaatccgcagcgatcaaatctaccaaagccatataaaccaaaatccccgacgacaaggaatccaagataccttcggcgatgagtgcaccggggctgtaagggttataccccgaagagatagccattccaatcccaacacccaagggtgtagtcagtgcaaaaaaacaagccattatagttgctgacgaggctttaaactgcgcttgggaaatgcaaccttcaagcgcaaacccttcaaaaaactgatgaaaagataacgccgcaattaatggccttatggtacacggactttgcgaaactcctaaggacaacccaattataacagaatgtgatacaatcccaagctccaacacctgagaaacgacgacgtgtcgaacgt

SEQ ID NO: 223094 - DNA, 454 bp, Glycine max
cttcttctcttgcggctagggttttagcgcagcttcttctagatttaaggaagatgggtgaggaaaaggttcacatcagtattgtggttattggccatgttgactctgggaagtccactaccactggccacctgatctacaagcttggaggcattgacaagcgtgttattgagagatttgagaaggaagctgctgagatgaacaagaggtctttcaagtatgcctgggtgcttgataagcttaaggctgagcgtgaaagaggaatcacaattgatattgccttgtggaagtttgaaaccaccaagtactattgcacagtcattgatgcccctggacacagggatttcatcaagaacatgatcactgggacatcccaagctgactgtgctgttcttatcattgattccactactggtggttttgaagctggaatttcaaaggatggacagactcg

SEQ ID NO: 223095 - DNA, 522 bp, Glycine max
gaacacaaatataaagttgacatttaaaaagcaaaccaacaacgcggcggcaaagccctaaaactcgctgcgcttaacaaaaatgtaatcaggggttctcacaaacacaacacattaaaacagaatgataaaaggagtcttgccaccgtcgatcaagaacccaattctgggaacaaaagttgcgagatgatggtggagacttcaaactatgtccgaaaaacaagctacctagaaacgaagacacaagggcaagaaaccaacatttattgtaaccataagaaacgacatcccctgatgaaccaaaccgcacgattcacttcttcttctgggcagccttggtgaccttggctccagtaggatccttcttctccacgttcttgatgactcccacagcaacagtttgacgcatatccctgacagcaaagcgaccaagtggggggtactcagagaaagtttcaaccaccatgggtttggtcggaatcatcttaacaaaaccagcatcaccattcttcaaaaacttgg

SEQ ID NO: 223096 - DNA, 457 bp, Glycine max
gaggctgtaatcaatcaaccaaagcaacgatgtcgtggtttacaaggacaatcgcaaactcactcaaactgggcgacgaggacaatggcggtgacctaaaatcccctccgaagaaacccgattcggaacccgttcaacccgattccgcatacacccccaatcccaccacgcgcggagttaaagaggatttttccgagctcaccaaatccttttcccgccagctctggggagtcggctacttactcgccccgacgcccgatccccaatgcgaaaagcccgtcgccgattccaatcccaatcccactgacgacgacgaacaggaagatatcatcggaggaatccgcaacgatttcgcggagattagtggcaagttcaagagcgggatctccttaatttctggtcctaagacagtgtccgaattgactaagatagctaggagtttgcttcatcttggatc

SEQ ID NO: 223097 - DNA, 459 bp, Glycine max
cgcaattctgaatttgcgggttttggatttggacttggtcgtcaacacagtctaattaatatctttgtgctccttcgcttatgaatcttcttcttcttcttcttcttgttcctgcaacgcactgaattcgatcaatcaatccatcttcaattgctttgtttcgatcggaggaaaatggccgatcagttatcgaagggagaggaattcgagaaaaaggctgagaagaagctcagcggttggggcttgtttggctccaagtatgaagatgccgccgatctcttcgataaagccgccaattgcttcaagctcgccaaatcatgggacaaggctggagcgacatacctgaagttggcaagttgtcatttgaagttggaaagcaagcatgaagctgcacaggcccatgtcgatgctgcacattgctacaaaaagactaatataaacgagtctgtatcttgctta

SEQ ID NO: 223098 - DNA, 547 bp, Glycine max
gaattcagtcagaccaattcaattaaaaccaaagggggtacactctgtaagtggatgtgtaagacgaacaactggacagacacacatagtagtacaatgtaaattatcaaacaataggtccaaccaccaggaatattaaaggtacaattcaagtaataacctcatactcctcaagttctttggctttcagcttttccttcacccttaagagaagtgtggtcttccaagaatccagaggggtcatactatcaaattccttgacaacatcagtaaactttgcaacattttcttcatcaattgcagcagcaatgtccgccaacaatctatattcacgtgttcctgaaaatgttggatccagttcctgatatcgttctaatgcattggttatagcaacaaccttctcttacagagttggcagatgccagcattaaaaaggtgtcctttaactccatacttcagcaaattattgttgagggattggcgagctatcttttcataaatgtcaatcgacttctgatattgttctaactgagcagcaaactgggca

SEQ ID NO: 223099 - DNA, 454 bp, Glycine max
gcgcactgctcgctcgtgttctgtttctccgttctctgtttttttttttttcagatctggaaaaatgcagagcgcggctttcactttctctccctctctccctctccgcaacccttcccctaactcttggaggagaccctctctttctctccgtctccacgccaaacacagcaacaacaacaacaacagtaacagcaccgaaggcgttaactccaatggcgtctcttccacttccttcactcgccgatcttggactcttcttccttcttcttctttcaaattcaggcctcttccttcttcacctcctcgcgccgccgaaaacgccgttcccgaaagcgcagcagcacccgtcgaaaacccgctcttcaaaactctcgaactcggcgccttgtttggcttatggtacctcttcaacatctacttcaacatctacaacaaacaggtgttgaaggcg

SEQ ID NO: 223100 - DNA, 556 bp, Glycine max
aagcaaaattcagaagaggataattttttcatggagcagaaccattaggcacttactcaaacataaataatgaaatccacaaggtaacttaaggagaagaaataaaaaggaaatgtgaggactgaggatcaataaagataatcctcattccctatctcacctacaaagaaattcagaattgcagattgcaactatttggcttcctcaatggaactaacaaaattttaccattgaaaattaagctgtttttggctttgccttaatacgcttcacccttgaatagaggaaaactccagcaagagctatagcagtcccaaaagcattcacaggtgagacaggtgtttggaagaagatgacagagctcacaatgaccacaacccgcttcacacaattacccacagagtgggtaacaggtgataccctttgcaatatcatatacgaaacttgttgatacgcatggaaacagagagcagcaagaagagatctgatgtaaagttgtctaacatttaccccagcagattgcaagtaagcaggggtaaatttgacaccctccatg

SEQ ID NO: 223101 - DNA, 439 bp, Glycine max
gaaagaaatggcaggaggatcatacgaggaagccattgcagcgttgaccaagcttatcagggagaaagccgacctgagtggcgtcgccgccgcaaagatcaagcagttgacggcggagctagaaaccgccaccgcaaacgggtcgacgccgtttaacccagacgagaggatccgaaccgggttcgcccacttcaagaacgagaaattccagaagaacccggaattatatggcgaacttgccaaaggccagagtccaaagtttatggtgtttgcttgctcagactctcgagtttgcccatcccacattctggatttcaatccgggtgaagcctttgtggtccgaaatatcgtcaacatggttccaccatatgacaagaccaagtattcaggaacaggggcgggcattgaatatgctgtcggacatttaaaggtggagaat

SEQ ID NO: 223102 - DNA, 449 bp, Glycine max
caaaattagggttttctcaaccctagggtttaccttctcttcccctgttcgaaattaggcggatcaaaacagaaacacgactacaaaaagaagaaaagaagaaaaagaatcaatcattcattgatcgctgaaacgatacgatgacagggaaggcgaagccgaagaagcacacggcgaaggagatcgcggcgaaggtggacgcggcgaccacgaaccgcggcggcgggaaggcgggtatgaaggaccgaaccgggttggagaagggcgggcacgcgaaatacgagtgccctcactgcaaggtgacggcgccggacgtgaaatcgatgcagatccaccacgacgcgcgtcaccccaagatccccttcgaggaggacaaagttgtcaatcttcacgccaccaccagcgttcccgagtcctccaagcctcgccccggtgttcgcggaagcctc

SEQ ID NO: 223103 - DNA, 411 bp, Glycine max
  unsure (1)..(411): unsure at all n locations
cttagctgccaccctacgcttacctcctattgtcgccctatcgcagctcaaatgtccaatcccgggatccatatcgcttcaccgcaactttctcttcatccatcgcaagatctagttgaatctcaaccgcgctcctccgattcgaacctccactcactcaaatcctcttcagatctggggggtttgattgcgattctcactctgctgctcggatttgttcgtctgagatgtcgattttaccgaaaggcgattcggttcaaatcagggaagtttggaacgataaccttcaggaggagttcgcgttgatccgcganatcgtggaccagtataactacgtggcgaaggataccgagttccccggcgtggttcttcgtccggtggggaatttcaagaacatcaacgactaccact

SEQ ID NO: 223104 - DNA, 521 bp, Glycine max
  unsure (1)..(521): unsure at all n locations
gcaagcaaaaagaaagaatcccaggcgaggagaaagatggaggggaaggagcaggatgtgtcggtgggagcgaacaagttccccgagagacagccaattgggacggcggcgcagagccaagacgacggtaaggactaccaggagccggcgccggcgccgctggttgacccgacggagtttacgtcatggtcgttttacagagcagggatagcagagtttgtggccacttttctgtttctctacatcactgtcttaaccgttatgggagtcgccggggctaagtctaagtgtagtaccgttgggattcaaggaatcgcttgggccttcggtggcatgatcttcgccctcgtttactgcaccgctggcatctcagggggacacataaacccggcggtgacatttgggctgtttttggcgaggaagttgtcgttgcccagggcgatattctacatcgtgatgcaatgcttgggtgctatttgtggcgctggcgtggtgaagggntttgaggggaaaacaaaata

SEQ ID NO: 223105 - DNA, 293 bp, Glycine max
cggccagagaaaataaagagatgcatatatatgactctggggttatttgggattttgcagaattaaattacacaatcacagccgtacatcacacatgagttgggcctcttgcaacttaaaagcagaggataacattggcccatgacgcgacacatgcactacctaataatcataattttacatctttacatacaaaatacaaagactttaaattttaaaaagaagaaaagagataaaccgatcatcttaatgaaatgaaaccaaaacccacaaacattggcttgatttttgtt

SEQ ID NO: 223106 - DNA, 422 bp, Glycine max
  unsure (1)..(422): unsure at all n locations
cacagtttcggaggagaagaaaatagtcgttcgagatggcccgtacgaagcaaactgctcgtaagtccacaggaggaaaggctcctaggaagcagcttgcaaccaaggctgcacgtaagtctgcaccaactactggtggtgtgaagaagccacatcgttaccggcctggtaccgttgctcttcgngagattaggaaataccagaagagtaccgagcttttgatcaggaagctccccttccagaggctggttcgtgaaattgctcaggacttcaagactgatctgcgtttccagagccacgccgtgcttgcattgcaagaagctgctgaggcataccttgttgggctctttgaggacactaacctgtgtgccattcacgctaagcgggtaaccattatgcccaaggatatccagctggcaaga

SEQ ID NO: 223107 - DNA, 449 bp, Glycine max
agaaggcaactgaatgttgtccagtacaatggcaaagtgactacatcccgttggtaaaaactaaaaacagaaacattttgacacacatgtccaaaaatcaattacaagccaattttctaaaaggaagaaaacacagtcacggacacttggcagtatttgcctgtatcacaattaatgggtaataccggaaaacacctacacttcctaacaaccctatccattgaaaaaaaaaaaaaaggaatctgaacaacaaaaacaccacccgcagcaacccattttcattttcattttcacaaccaccacctcaagcacgttcaccgcgaatcctttttgccagctggatatccttgggcataatggttacccgcttagcgtgaatggcacacaggttagtgttcttaaagagcccaacaaggtatgcctcagcagcttcttgtaatgcaagcacg

SEQ ID NO: 223108 - DNA, 435 bp, Glycine max
caaacacatacacacacacacacacttggatcaactttcctcgtcccttgctttccactccaacacggtaccaaccaacctaccaaatggcagccaaaccagctgaagaagctcctcaaggagaaaccctcaagtaccagacgtgggctttgaaagtattgatccactgcgatggctgcaaaaggagagttaagaaaattcttcagggaattgatggggtttatacaacagaggttaattctctgctgcacaaggttacggtcaccggtaacgtggacgctgagactctcatcaagaggctttcaagatcagggaggggagtggagctttggccagaaaaaccacctgagaagaaagataataagaagtctgggaaatccaataagggtggtgctggtgatgctaataaggagaaggacgaccaaaagaatagtg

SEQ ID NO: 223109 - DNA, 455 bp, Glycine max
ggtgattctgttgtggagtccagccatggaaagaaaaaaggaatggttcttccttttgagccacattctatcacctttgatgaagtcatatactctgttgacatgccacaggaaatgaaggaacagggtgtacaagaggacagattggtgcttttgaagggtgttagtggtgcattcaggcctggtgttctcacagctttgatgggtgtaagtggagctggtaagactactttgatggatgttctggctggtaggaaaaccggaggatatattgatggaagcatcaaaatttctgggtaccctaagaagcaagaaacatttgctcgtatctctggctactgtgagcaaaatgatatccactcacctcatgttacagtttacgaatccttgctctactctgcatggcttcgtttaccttcaggtgttgattccaaaaccagaaagatgttcattga

SEQ ID NO: 223110 - DNA, 591 bp, Glycine max
aatcttatcaactcgtaatagaatacgtttttgatttattgatgggaggtacatcattatgcttatgtggtaagtatcaaaaatctttcttttgaaattcatcatacatttataaaggacagccttcaaacgggctggttttgcacaaatgattaaatgatagatacaaatattataagcttaaagggaaaacagaaacaagaagaaaaaaagaaaaagggagaaaatataaagaatctttgacgttggagaaagagttcaatctatccatctatctcttttggaagttaaaggtcttgattgcagcaccaaagattaatgcaaaggcaacggcgatgccagcaaccacaacagcacaaattccaacgaagtcatgtttgaaaccaaaatagtcttctatgaattctttcaccatcttgttatcttcacccggcattctttcagttatatctccaaactgagatgcaatcaatccatacaaggtccaagccacaggacatgcccaatagtaccatctccaccacacgggcattttaggtcttacgacgataaatccttgaaagagattccaaattgcataaaatgcagcag

SEQ ID NO: 223111 - DNA, 453 bp, Glycine max
gcatatgaaaagatttctcaaaatcctcactccccaattattcctttcttcaattagtgagttttattgcactaattgacctttaatttatccacacaacactgtttatattttcttttgtcttgctccaaaatttcaagaaaacagtagcataaagttgaaaaattaaggtacacaagaagatgggagaaagcagtggctcacaatgttccaagacaagtccttctaacattgatgaagatgacgagggtgaaagtgaggccaatgaagatcaaagtaagcaaaacaacaacggaggaagctcaagtaacagcacagtggaagagaatgagaagaagataaggccttatgttagatccaagatgccaaggcttcggtggacacctgatcttcatcttcgctttattcatgcggctcaacgacttggaggacaagagagagcaacaccaaaat

SEQ ID NO: 223112 - DNA, 465 bp, Glycine max
gtgatttaggacgtggaagggttactcattgaaaaggggtcctaattatgcacccaaaagaaagaaggttgtcactgatctgactcgtgataattttcagagtggtgagtggaaggaactagagttcaaggagtacaattatagtgctaaaggtgctcctcttgagggtggcaatcttcatccgttgctgaaggtacgtgctcagctgaaacagattttcctctgcatggggtttgaggagatgccaacaaataatttcgttgagagcaggttattattgtttggatcatgttcctttttgtcatcaagttctccattcacatgtgggtgttcttcccaataacgattaacttccaatccattaaatgtgttgcaaaattttaaataaatatccacatatcatcttttaattgaagatgttgatggcaatgatgtaagtaacttgatcttatttttgtcttgtcg

SEQ ID NO: 223113 - DNA, 582 bp, Glycine max
  unsure (1)..(582): unsure at all n locations
aattgaaatttggtaacttcccattaatatttttttcagaacatatccaaaataacaagggcgtagcttttttctcccgtatcaaaattcttcatatagaaactgaacttacaatctacaggtagtgtttgatcttagagacaaaaataaattataatttataaatgagaagaaatacaagaaacaaacatgaatcattttagtcaattccaagacgacatactggatttttctttataagcccaagatccacctgcggaaaacaagaaaaatatcaaaggtatgttttaaaaacagagaaaaaaacacatcaataaaggaccaaaataaccagatggtggtattcagttcaaaatcgagatgagtccgtcttcatagttatcccctaaaaataccttgtgtccaaagagatctctgatgttatctatcccgtatagtatcatcgttggcctttcaagggaaagaccccaagcaataacttggacatcttcaggaagtcccatcggctgcaacatttcaggtctgaacatgccagagtttcctatctctacccattntntaaagccttcatgataactaaaa

SEQ ID NO: 223114 - DNA, 417 bp, Glycine max
acttaattggaagactaaatatagcatcgatgatatgtgccgcgatcaatggaattgggctagcaaaaacccttatggctatggtgcatctgcagattcctccaattgatgtcgatgattgtcggatatagtatatatgttctcttttggggtctttttgaaccctgtcgcccaataggtccctaaagtttttctttagctattctaaggtggaagttaaatcatttcctagtttattatgaattataataaagtggtaaataagtagtggtttagtttacttagcgattctttaggttccaactcacagaatattgaatgggtattctctcatgttcttcatgaacatgactgcatcctgttttgtaaatctaaaccacacattatagagtatgactaaccggtataatcctacct

SEQ ID NO: 223115 - DNA, 446 bp, Glycine max
atccatcccaaaaagtttgctttggttaatgcccctaacaaatttccatttgtattttgcctgtttgtgactagagagttgggttcccatgccggttgatttggacaacgcttccacagcttcaggggaagccgccagcgtctcttccttcggccaccaaacaaaacccgccgtcccaaagaaaaaacgaaacctcccgggcatgccagatcccgaggcagaggtgattgctctatcgccgacggcgctcttggcaacaaaccgtttcgtgtgcgagatatgcaacaagggattccagagggaccagaatctgcagcttcaccggcggggccacaacctgccgtgggagctgcggcagaggtcaagcaaggaggtgcgaaagagagtgtacgtgtgccccgagcccacgtgcgtgcaccacgaccctgccagagctttaggggact

SEQ ID NO: 223116 - DNA, 330 bp, Glycine max
cttcttgctctttcttcaacctctcccttaaatgtggggcaatgtggttctcatccacattgcatattactttgaccttgtcagcttcacgtatatacaccagcatataagcatttgaatatttggtgaatttaaaaggagtgttgttaaatccaggatttgtctgtggtaactcttcctcaccaccatattgctcctctaatgcccgtttagtgtcttctttagtcaccctctcatcatcaaatttataccactgctcagatagagtcggcctgataaaagcataataatgtccaccatgcacaccaccactgtgaaccaaaacgctat

SEQ ID NO: 223117 - DNA, 513 bp, Glycine max
  unsure (1)..(513): unsure at all n locations
tcgaggatctcagtaattctcttaaaacgagatccttctttctgctcttatgaagaaaagacaggggtctttgcgtgtgattttggaagatagtctctgcctcttcagaatctcatacannaccttaacccctctcgcgatacccccaccgagaaggggtgatcgcagaagtaccattatgtgatcggtgtgatcccaggaatggacccctgtaggagcaaagcaagggactcttcccagtgacccagttacgcgacccctttcagagctttcccaaagtggatacttatgatggtctccagcaccaggtcatagctccttggtgaagaccacgtgaagtgattttatatcccacanagccattttcaggggatccatttcagaaggggtaacaatatctntggttatctgtgatgcctacactcctgctggagaacctattcccactaacaagaggcacgctgctgccaaagttttcagccatcctgatgttgttgctgaagtgccctggta

SEQ ID NO: 223118 - DNA, 465 bp, Glycine max
  unsure (1)..(465): unsure at all n locations
cctactccaatgaacatgacaatttcatatattattattatacttcacagtcancattggtttgttcaagactgataataaccattaaattattgtcattgtaacaatcggaaaacgagggaaaggaatagaagaaaacaatgaacaacccttgccagttagttgcaccaaccaacaaggcaccaaccatagtaccaatcaaaaggtaaaaagagagagagaccaaatcctactaagaaaagcataactgttcctttccatccaaagggagaaaacatgcaggttttgctcatggcttccacagaatggttgtgtctgcaatcatggaagtaaccacgtatgggtccatgttggaagctggccttctgtcctcaaaatatcccttccctgctttctctgagtctctcccaaccctaacagaagctccacggttcgcaactccccataagaaggtgttgatgtcag

SEQ ID NO: 223119 - DNA, 528 bp, Glycine max
gtgtgaacaacgataacggcatgtttgagcgtacttgaaaaatttgagcggccatggacgaaaccgccgtaacgacgaagcctgattggctcaacaaccgcgcgaaggtcgccggagagagaaccgaagaatttttctgtggcggcgacgacgaagaggaatgcgacgacgaggcttgggacatgttgactcggagcttctggcaggcgcagactgtgctggacgagaaccgtgcgctgatcgacgaagtgaacagcaaccacgagtcgaagattcctgacaacatggcgaagaacgttggcctcattactcagatccacggtaacatctccaaggttcgctctatttactccgatttatctgtaaatttccccaacattattcgccagcgcggcgtcgccgccgtcaaccaccgcaatcgcgacggcgacgtcgaagaggatgaagatgaggcggagaactcggaggagaatttcgcggagcacgtgctggagaaatcggagatggttgaattgatggctgtgggaa

SEQ ID NO: 223120 - DNA, 404 bp, Glycine max
  unsure (1)..(404): unsure at all n locations
ggaagaacctcttatcgaaggcgcgaaacttgatcagtgttggacgcgcttcatccggcggcttcgccgacgccatgggtgacgttcagatccacaagaccaaactctgcatcataggaagcggncccggcgcccataccgccgtcgtctacgccgcccgtgcagagctgaagcctatcctcttcgagggctggatggccaacgacatcgcccccggcgggcagctcaccaccaccactgacgtcgagaacttgcccggcttccccgacggcatcctcggcggcgagctcatggaccgctgccggagccagtcccttcgcttcggcaccgagatccacaccgagaccgtctccaaggtcgatttctccgcccgtccttttagggttttcaccgattcccgcacc

SEQ ID NO: 223121 - DNA, 536 bp, Glycine max
gttatcaggtcaaattgagttgatggacttttaaaattttccagtctaaaagctgaacatagtttgagttaccccttcctgaagagcaaaccgtttttttttcccttaaaaaaaaaggactggataggatagcacatagcagtctatgaacggtagcaatacctgtctatgaatgcatgagttgcaccgggcaagcaaatatctctgcatcgtcacaataatgcacgtaacataagcccaataatcataatacatgtacttgtgcacgtgagcatcactgcttaaaaaataatgcaagtctcgctctgcaataaaaatatgaatgtcgcaacccacaaatgaagattctggtaggatgcatccattcttctataggaattaaacattgcttctgattaagcatcttctgatctttggacacacccaagctagtcaatcactcttatcttgttgtaaaccaacattttgtaggtaatgttctgcatccaaagctgccatgcattcagtgccagcagcagtaatagcttgcctatact

SEQ ID NO: 223122 - DNA, 449 bp, Glycine max
attcctttggtttgcagtaatgggtgctctggatcacatatcggaactctttgactggggcagtggcagttccaagcacaagaagcgcaagcaattgcagacggtggaggtgaaagtgaagatggactgcgaaggatgcgataggaaagtgaggaaggcggtggaggggatgaaaggcgtgaaccacgtggatgtggagcgtaaggccaacaaagtcactgtggtcggctacgtcgaggcctctaaggtggtcgtccgcatcgctcaccgcaccgggaagaaagcagagctctggccctacgtcccctacgacgtcgttgctcacccctacgcacccggagtctacgacaagaaagcccccttcggttatgttcgcaacaccgatgatccttactattcccatattgcacgtgccagctacactgaggtccgctacaccactggtttca

SEQ ID NO: 223123 - DNA, 484 bp, Glycine max
  unsure (1)..(484): unsure at all n locations
gtaggtaaaggcgaaggagtatcattcaacagagaaaaaatacggcatgaggggaaaaacaagatagaatgaaagcgaagataacaaataaagagaatagtttcacataacgacacaggcggaggggttttcgtcgctgaaagcagtggtgtagcggacctcagtggagctggcacgtgcgagatgggaatagtgaggatcatcggtgttgcggacataaccggagggggctttcttgtcgtagactccgggtgcgtaggggtgagcaacgacgtcgtaggggacgtagggccagagctctgctttcttgccggtgcggtgagcgatgcgggcgaccaccttagaggcctcgacgtagccgaccacagagactttgttggccttacgctccacatccacctggttcacgcctttcatnccctccaccgccttcctcactttcctctcgcatccttcgcagaccatcttcacttttaccttcacc

SEQ ID NO: 223124 - DNA, 524 bp, Glycine max
cagaatcaatcatttaatttctttgattcattttcaggcagagactaacatcaacataagatttatatagttgtataatgtatgctcaaattgaatttgacttcattgtcatgaatgttatgtttcaagcttcctggtatagcaacagtcagcaccagaattcttgttctttgacaacataactgcttccttcttcaacattgcattgtttaaaatcaagggtccatttctcaaaagagcaattagagaaattataatatcctccatgtagagaaagcaactcttttctcactctatcttgtatccaaggatagctgagcaagttcaataatgattggttaatagattccttctcacagaatttgcattgctgatcaaagctaagatgagctgtggcagcttttgtcctttgtttggcaagttttccattggcaacccacttgtgtatgaagtttcttgattctgcatcttcttgcatattcatcaaagcttcaattccagcgcagctactatgaccaatgact

SEQ ID NO: 223125 - DNA, 440 bp, Glycine max
gtgaaagaaagaaaaaaaaacactgcacaaaacaatggctttgaatttgattcatcgagcagccactgaaccaccatcttcctcctcctctttcgtcacccctcgccctttgcggaccacacagagcatccctgtgaggaactcgcggcgctccatcgccgtgcgcgccgccgccacggaggctcctgtggctactattacggcggcaagggagtgcagggtgaagtcggtgaaggcccggcagatcgtggacagccgcgggaacccgacggtggaggtggatctggtgacggacgggcttttccgagcggcggtgccgagcggcgcgtcgacggggatttacgaggcgttggagctgagggacggggacaagagcgcttaccgcgggaagggtggtcttaacgccgttaggaacatcaacgaggtcttggctcccatac

SEQ ID NO: 223126 - DNA, 449 bp, Glycine max
gcagcaacatagaatcacatcgcaacgaatcagaggcccctttcaacgaaggacatgggggaaccgtcgtccaccgtcgtcaccattgttaccgttgatcctccggttccagcgaccaaaagctgggccgacgaagcggacgaagaaaccaacgccttcaccggcgaggcataaacctcctccgttaacctggaggcgttaaccatcgacgacaaagaaatgaactcttcaaaactcttggacgaccccgacgattctaatattcaagcggttacttctggcgatacgccgtacacgtatgcagcgaggttcgaggacctaagcctctcgccagagcttttgaaggggctctatgtggagatgaagtttgagaagccgagcaagatccaggctatcagtttgccgatgatccttagcccgcccaatcgggacctgattgcgcaagcaca

SEQ ID NO: 223127 - DNA, 449 bp, Glycine max
gagacagggagacaagacagagtagtacagattactaccaatggctaccaaggtttacattgtttattattctacgtatggacatgttgagaagctagctagagagatagaaaaaggggctgcttctgtggagggagtagaagcaaaactgtggcaggtacctgaaacattgcctgaagaagtccttgctaagttgggagcacctccaaagagtgatgttccaattattactcccaatgagcttcctgaggctgatggctttttgtttggttttcccacaagatttggatctatggccgctcaatttaaagcattttttgatgcaactggaggcctttggcgtacacaggcactagcaggaaaggccgcagggttcttctatagcactagttctcaaggaggaggccaagaaactaccccgttgacatctattactcagcttgttcacc

SEQ ID NO: 223128 - DNA, 489 bp, Glycine max
  unsure (1)..(489): unsure at all n locations
ntgaggtgaatatgtaagctatcgagcgacagctagtaggcggcggccgccctttttttttttttttttttttttttttttccaggattaattaccaaattcttgttattgacaatgaaaactgggttacaggatacgacgatgacaagtggtgacaacacttgtatcaaagatatatgaagtattactttatgctctcacactctgatgttatttacggttctaacatctcattttatttgacacaaaatatggggcgggagatatatgggggataaaaaaaatatgagatcccttgagcttctttgcaatgcccgtaaagaactttccctgatggaaagcatgagccaattccaattcactaagcttccttgagccatctccagcataaaaacctgcaccatatggggagccaccttatgcctttttcaactaaaacatgccaccgtcaaatgtgttttcaatggggacaaaaatcaatccatggag

SEQ ID NO: 223129 - DNA, 450 bp, Glycine max
  unsure (1)..(450): unsure at all n locations
ttttcttctctctcaacaacttcaccttcttcctcctcgatcatgtctcacttcaagggcaagtaccatgatgagcttatcgccaatgctgcgtacattggcactcctggaaagggtattcttgctgctgatgagtcaacagggacaattggcaagcgtttggccagcatcagtgtagagaacattgaatccaacaggcgagctcttagggagctgcttttcactgctcctggtgttcttcaatatctcagtggtgtcatcctctttgaggaaaccctctaccagagcacagctgcaggcaagccctttgtgaatgtcttgaaggaagctggtgtgcttcctggcatcaaggttgacaagggcacagtcgagcttgctggaactaatggagaaaccaccactcanggtctagatggccttggtcagcgttgtgccaagtactacgaagct

SEQ ID NO: 223130 - DNA, 532 bp, Glycine max
  unsure (1)..(532): unsure at all n locations
nnaattggaatgcatcagtacccttcgagntcgacagctagtaggcggcggccgccctttttttttttttttcaagaaaacaaagttacattcccttccctgttgcacaggtttgaccaagggcactgagggactaaaatggacataaaaggaacactaggaaaacaaaaagcaaaattccaaacgattattttgggaagagtcnnnccacagtaatacttatcaacaagaaattcggttgttgtacccataataccgattcctactcgcactagtctcttcaaacaacaccaacttcgattgatcagaagctgtagttcgaaacatggaggctctctgaggcaccatcagcaggctgtgagttacccttgtaggttcccagagttgcctctgagatagccttggctcttaccaaaagggctttctgagccttcttcacattcttttcttttccgccccatgccttaagggtgctctgttgaagtgcccttacaaaggagaaagagagtgaccatggcttcttcccattgac

SEQ ID NO: 223131 - DNA, 440 bp, Glycine max
cgcatagttaaggaagctctggatgttgtccacattagcaaaggagaccaggagaatgtatttgcaatgcttgctgcagtattatggttaggaaacatatcatttactgtggtagataatgaaaatcatgttcaagctttgaggatgaggggctgttgactgttgccaagttaattggctgtgaaattgaagacctgaagttgactttatcaactcgcaaaatgaaagttggtaatgatattattgtccagaagttgactctatctcaggctattgatgcgagagatgctttggcgaagtcaatatatgcttgtctgtttgattggttggttgaacaaataaacaaatccctcgcggttggcaaaagacgaactggcagatcaatcagcattctagatatttatggctttgagtcattcaataggaacagttttgagcag

SEQ ID NO: 223132 - DNA, 460 bp, Glycine max
  unsure (1)..(460): unsure at all n locations
tgcagctcgtgctgggaggggangncctatttatgttagtgacacgccaggcaatccggttttggtcttcttaagaancnnnttactacggatgggtcggttctccgtgctcagttacctggnnggccnactcgtgtgtgtgggtttgcggatgcaaccagggggcggggtnnnttgctcaaaatatggaacctgaacaaatgctctggagttgttggtgtatttaactgccaaggtgctggatggtgcccgattgagaagacaacccgcgtcagtnnncatctcctggtacactcaccgnctctgtctgcgcctctgatgttgacctcttcccccaagtggcaggtgctgaatggcttggagatacaattgtttatgcttacagatcaggtggggtgattcggctaccaaaaggggtttcaattccagtgacactaaaagttctggagtttgagctttt

SEQ ID NO: 223133 - DNA, 514 bp, Glycine max
ttttgttttttttttattccaaaagacagatgtgaactttttattcagagaaacgggcattgttggatcctcgggtagataacaatattctctctttatccatctaattgatgacatactacaagtctaaaccaaattacatgctacaacaaaaggacttccccaccccatgactactacaacatgccttgtctagctattaggatcaacaaccctttttctccactacatgatactaatactaggtgtgttacaacaaacctcccccctctctctctgcctgactccaacaattccctcaatgcttaattacaacaaaacccttcttctgatacaacaatgcatcaaacaccaagttttaaaaaggacttaaacttggatctctattgaccatctgtacatcttctctggagaaactggaatggagaaggttgtcaaccccggctctgagtcatagttgaagtcggatttagcgccacctaccacacactttaatgggtctttggaggagtaa

SEQ ID NO: 223134 - DNA, 481 bp, Glycine max
  unsure (1)..(481): unsure at all n locations
gcaaattggacacattgttaaggctaattatggctgatattgagggttctccaggaagctccatgcatggagtaactggaagggaacaaaccttcatagcctcagtggcttcccctatggtccctacagacaccacagcaaatttcgctttgccagtagattctgagcacaaggcaaaaattttcaagcttttttccttagccaaccctcacatgagaaccttccacgtgtcttggatatccttcttcacttgctttgtctcgaccttcgcggcggcgccacttgtccccatcattcgcgacaaccttaacctcaccaaaggcgacatcgggaacgccggcgttgcctctgtctccggcagcatcttctccaggctcacaatgggcgcggnttgtgacctacttggaccgcgttacggctgtgccttnctcatcatgctctctgcaccaaccgtgttctgcatgtctttngtgaatgatgc

SEQ ID NO: 223135 - DNA, 463 bp, Glycine max
gttccaacctcatcccgtcaaggagcaacttcccggtgttgattactgtgttaccagctctgcttcatggcctgaagggattattcttggctttcagcattacctcgttgtgcttgggtccattctcattctttccaccatccttgtccctctcatcggtggtggcaatgtggaaaaggctgaaacaattcagactctactttttgttgcggccattaacacactgctgcaaacatggtttggcacacgtcttccggtggttgtgggggcatcctatgcttttctcattcctgctttctgcgttgctttttcctctagaatgagtatatttctagatccacatcagagatttaaacaatccatgagagccatacaaagggcccttattgttgcattcttttttttcaatcattgttggctttttttgcttttgggaggatttttgccaggttctcagcccact

SEQ ID NO: 223136 - DNA, 574 bp, Glycine max
attgctataaattgcaacccttgctcgaatattttggtatacatacttctatttgggtagatattagacacttttgattatctagagaatgatagattccctcttgttcattttgaaatggaagtgcactcagaatgatgggaaaaatctgttgaggttcaaaggaagtgaatagaagtcttcagttctagtatcctggttgaaggtcctgaatttttcccaccagtgtctcccactgtctcggcgagttgagccctctccacgactcatagttaaatccaagaagtaagcaactatgattgccactgttgctggggatgagaaaatcacttgcactatattgttgaacgcggtggtgccagtatgaacagggccatgtccggatagcaatacatattcgttgaaatattgtggaacagataaacccatgaagagagaaaagccaacgatgaacattgacctataactgtttagattgcagaattgaaggaaaccaaggccagctgatgctacgtaggcatagagaacgcaataaatagctgctataattggcaaaggtattgaagcaagaact

SEQ ID NO: 223137 - DNA, 568 bp, Glycine max
cacataaatcacctctacaagtagcatgataagtcacaaatgagggacaaactttagttaatatacaagcaagcaacaaacaagaatctagtcaagcttgcacaataagtgaatgagatggaaacagacagaagatgcaaatatagtctcaatgtttgtcagcacaaaatgatcaagcaagccatcacctcaagttcagtgttggcttcttcttcttttgttgttttgtcaaaagtagggagaatcgaccaaatccaaatttctttctctttgcagaaaacggtttctgaccattttccttctcagcttgcctgtcaaaggatgaatccccgttttgtttgcctagcatctgaccaagagacaccttccgtttcgccgagcttctttctctaatcattccactggcttcatactcttccggcatcatcaacttcctgctcaatatttgtcctatggacagtgtcggctttagaaccggcttgacctcatcatttaccagattcaacccattgacatcgattaaccgagattccttccattggtgagaggggaagcatttttaaacttg

SEQ ID NO: 223138 - DNA, 505 bp, Glycine max
ggcataaattcctttaaaaattttattgtaatagggagcccagaagcaacaaatacaccccttatgcttagcacaattaacatcatcctaaattctgaagacactcctaaaaacctatgggatccattcaacaattacaatcctaatatacacacaacaatctcaaaaatcagaaccaagaggtccaattttaattctttagggctagctccatgatccaattagtaccaattattttttcatctgctattccttggctcatccaccacgatatttgaagctgtctttctctagttgattgattaattgttgtaacatcttcagatactggttcgtcatatgatcaagtatcatccctctagaaagtctgagctttccatacagatctctaggcgtttcatataggtagacatgtttctcatcagaaccattgtggtttgaattaggaatattttcagacaaatgtgcagtagggactatatgcatgatccttcctggaggataa

SEQ ID NO: 223139 - DNA, 417 bp, Glycine max
tgcttatttcattactcatccccagttcccgattttgcttaaccttcaattgcaatcgaggtgaacgtcagaggtccttgcaatggcagggaattcttctgatgtactgtcgccgaagcaacctcccttgccatctcccttgcgtttctccaaattctttcagtctaacatgagaattttgattacgggaggagctggattcattggttctcacctagtcgatagattgatggaaaatgaaaaaaatgaggtcattgttgctgataactacttcactggatcaaaggacaacctcaaaaaatggattggtcatccaagattcgagcttattcggcatgatgtcactgaacctttgacgattgaggttgatcagatctaccatcttgcgtgccctgcatctcctattttctacaaata

SEQ ID NO: 223140 - DNA, 477 bp, Glycine max
accggcaaaatttgcaaaggcatgattgcgtgaatgggtggtgaaacaagagtacgatcttgattgaggaagccaaaatacaggtacccctacttcctaagtatcataattatgaaaaggaaaaataggaaaacttaatagaataatccatcccacttattatctgaatattttgactagatataaaaggagcgaaaataagttaattttttttgtcaaatccaagcctcaaacgaaaatcctcttccataagaggaagcccatctcgcagcttaacctttggttcccagccaagcaattccattgcttttgttatgattggttctctctgtcgcggatcatcaggagtgttcttcactacctttatctccacatctggattaataagctcccttcactgtctcagcaagttctagcattgaaaatcacctggatttccaaggatgattggtccaatgtcggatccttccatgagac

SEQ ID NO: 223141 - DNA, 439 bp, Glycine max
gattgctagaatggaatttcgatgctcagtcatctcttttaccattctctgctctcttgctcttgcaggagagagccatgtccatgcatcgctacctgaggaagattattgggaagctgtttggccaaacactcccattcccactgcactgcgagagcttctaaagcctctccctgcaggtgttgaaatcgatgaactccctaagcaaattgatgatacacagtacccaaaaacattcttctataaagaagaccttcatccaggcaaaacaatgaaagtacaattcaccaagcgtccctatgcacaaccttatggtgtatatacatggttaacggatattaaagacacctctaaagaaggatatagttttgaagagatatgcatcaagaaagaagcgtttgagggagaagagaagttttgtgcaaaatccttgggaaca

SEQ ID NO: 223142 - DNA, 293 bp, Glycine max
gtggacttggagaaagcactgcggcattttcatcaaatcttattccattcacatttatttttaccatgccacgtacttaaaaaggtgaaggttcaggttttgaccatctaacccaaaaccccctaatgttttttctatcccactttttggggccccaaaggcctatccgtggtctaattaaacaacaacgttggctggttaggcacacgtccatagataaattggggccccataaaatggtcttgattcccaggaatttgacaacggggtaagctccattgtcacctcccatg

SEQ ID NO: 223143 - DNA, 333 bp, Glycine max
atactaacacaattttctttattaatgacaaatacagagacattcggccactccaaatacatgacttaagcatacacaactgattaaggaatctggttccttcaatttcacatttatttaaaaccaggaacatgtcttaagcaaccatagggcccttagatagagatactgttgggaattcctctgaaagtcaatccctcctcactaaaaggatagagcagagtgtaaggcattttatctggcccatagcggtttctcaatgactcatctttgttcttctatataagcttcttttcaatctcttcaagcttctttccaaacctcttaaatgcc

SEQ ID NO: 223144 - DNA, 453 bp, Glycine max
aacttcttcgttccttcgattcattccatttcttccaaaatggccaaagacccagttcgcgttctcgtcactggagccgcagggcaaattggatatgctcttgtccctatgattgctaggggagtgatgctgggtcctgaccagcccgtgatcctccacatgcttgacattcctccagcagcagagtcgttgaatggggttaaaatggaattggtggatgctgcattccctcttcttaaaggtgttgttgctacaaccgatgtggttgaggcatgcactggggtcaatattgcagtgatggttggtggattccctaaaaaagaaggtctggagaggaaggatgtgatgactaagaacgtcttcatttacaagtcccaggcttctgcccttgaaaagcatgctgctgccaactgcaaggttcttgttgttgctaacccagcaaacaccaatgca

SEQ ID NO: 223145 - DNA, 292 bp, Glycine max
  unsure (1)..(292): unsure at all n locations
nagcatcgcatctgaaaactatcgacctcagctcctagccggcggccgcccttttttttttggtttacttaacaacagcacatagcggttttcaagatgatcaagctaccctttggggctctctggcttaggctcacctgccagaagttaaaatggcccctgaaactttcctattcacatctgaataagtggacgaggggcaccctgaccagctatgggaccagacctacaaagctggctctacgcatgctaggagcaggaccctgccaaaaaggttgtctgggcaacctgc

SEQ ID NO: 223146 - DNA, 477 bp, Glycine max
  unsure (1)..(477): unsure at all n locations
nagaactgcattcgaaaactatcggtcatcagctcgtagtcggcggtcgccctttttttttttttttgaaaagaaaagtcgcatagcatggttacattaatacatatgtaatacgggggaacaacggaatcactacattatgatgccattacggtcgatcacactttcaaccatagagaagtacactgcacgctgatatatgacgtcacaatgcctgatggaaatgcctacttatttacggacacactaacaaataaagacttaagtaacctatttgtcgaaccatacatggtggccctcagggaagatgtgacgcactggagcagctccaggcttgtgtttaagcatttgccaaaacacatggtttggatcccattctgatgtgtctatgaggcatacagctgcagctttaactttgggtgcatctttttcctccaaaggcataaaatgcgcagtcgtatttgatatgttatgaca

SEQ ID NO: 223147 - DNA, 573 bp, Glycine max
gcaaaatccagctcaagaattttcctcttcaatccgccgtcgttcccttcattcctgcggattccctcttccctgactccctggtccatcctatcgctgctactttccacctcagcaagtccgatctcgacaagctcgccggcaaatccatcttctccgccaagctctgcctcaaaatctctatctacaccggccgtcgcggctccacctgcggcgtcagctccgggagactcctcggcagagtttccgttcccttggatctcaccggaacggtagccaaaaccacagtgttccacaatggatggattaggataggaaaagacgccaaaggctctttcgctcagtttcatttgaatgttaaagcccgaacccgatcctagattcgtcttccagttcgacggcgaacctgaatgcagtcctcaggttttccagatccaaggcatcatttcacaacctgtcttcacctgcaagttcagtttcagaaacaaacgcgaccgaaatcaccgttccaggttagctctcttacctctcacaccatattttacctagaataaattctatttgattcactag

SEQ ID NO: 223148 - DNA, 341 bp, Glycine max
  unsure (1)..(341): unsure at all n locations
ctaccagtcgaatgagggtgtcacacgcgcctanccaggtcttgagttgtgcgagatttgacaaaccaatcaaatcgaaacaagggtgatgttcgaaatgctgcctttaactcatcccaggtcccatagccaagtttgtgcaccatgcatatcatgaatctgtcacattcttcggtgtacaacttccctttgttttgcccatactgtatcttcaactctagccacggattcttgtagcggtccaacttctttccaatagccttcatgatctcatctttccgagaaattcttgcctcccccctttcaatggttttaataattctgtcataatcatttaattc

SEQ ID NO: 223149 - DNA, 513 bp, Glycine max
  unsure (1)..(513): unsure at all n locations
cacctttgttcactcttcttctcttgcggctagggttttagcgcagcttcttctagatttaaggaagatgggtaaggaaaaggttcacatcagtattgtggtcattggccatgtcgactctgggaaatccactaccactggtcacctgatttacaagcttggaggcattgacaagcgtgttattgagaggtttgagaaggaagctgctgagatgaacaagaggtctttcaagtatgcctgggtgctggacaaacttaaggctgagcgtgaaagaggaatcaccattgatattgctttgtggaagtttgaaacaacaaagtattattgcacagttattgatgcgcctggacatagggatntcattaagaatatgattactgggacatcccaagctgactgtgctgttcttatcattgattcgaccactggtggttttgaagctggtatttccaaggatggacagactcgngaacatgctctgctttcattcacccttggtgtgaaacagatgat

SEQ ID NO: 223150 - DNA, 573 bp, Glycine max
gaacactaaaaatagaaagttgacatttaataaaccaaagcaacacagggcagcaaagtcctgaaactcgctgcgcttaacaaaaatgtaatcaggggttccgacaaacacaacacattaaaacacagataaataaaagcaattttgccaccgtcgatcaagaacccagttctgggaacaacagttgcgagatgatggtggagacttcaaactttgtccgaaaaacaagctacctagaaaagaagacacaagagtacagaaaagaaaccaacatttattgtaaccaacatcccctgatgaaccagcccgcacgattcacttcttcttctgggcagccttggtgaccttggctccggtaggatccttcttctcaacgttcttgatgactcccacagcaacagtttgacgcatgtccctaacagcaaacctaccaagtggaggatactcggagaaagtttcaacaaccatgggtttggttggaatcatcttaacaaaaccagcatcaccgttcttcaaaaacttgggctccttctcaagctctttccggatcgcctgtaaatttggtcatgagtt

SEQ ID NO: 223151 - DNA, 469 bp, Glycine max
gaagaaagcagcgattttgaagtctctccaaaccattatggttgtcttcctgctgatagtactctttagcagcaacaccaaagcagaaaaagaaacaatccacgaccatgcaaacaaaaagacctacataatccacatggacgagaccaccatgcccttaaccttcaccgaccacctcagctggttcgacgcctccctcaaatcagcgtccccctccgcggagattctctacacttacaaacacgtggcccatggcttctccgccagactcactcccaaggacgtagacacacttgcaaaacaacccggcatcctctccgtcatccccgaactcaaatacaaactccacaccacaagaactcccaacttccttggacttgacaaagccaccaccttgttacccgcctcggagcaacagagccaggtggtcattggactcctcgacaccggcgtctggcccgagctcaaa

SEQ ID NO: 223152 - DNA, 562 bp, Glycine max
gggaagatatggataattcagattcaaagccattatgatacatacatacggatgcgaccattatctttttctatgtacaattattgttattattccatatataaagttttctcctgaacttcagcctacggaataaaaacagcaaagtgaataagtgagatacataataaaaacaagccgtatcgggccgggcccaaaagcaaaccacgaagagcctacaacacttgagtgggcccttttatttgggtcatacattttccacagcccatcatgtccagctgaacgcaattggactaccaaccttatgcttcccatccgtccattccaaacgtgcgaagctggtcgtcccagacggcatcgaagtgtatgtaaacgacaccgtatagtccttcttttcgtacaattccgtgaaactcaacgtattcggttccaccacagtcttcacattcgaatcccccaacgacatcaccgaagctttgtacgttcccggagcttccacgttagtcaaaaccctagagtacttcacggtcttcagagtattggaacccttccccaatccccg

SEQ ID NO: 223153 - DNA, 439 bp, Glycine max
cggctcgagctggtttcctcgttcgaaattcccatctttttggatgcacattaattcgggatccctggaagaagcgcgtttgatctaaaaccataaacctctgtctcgttagatctccttcttccgttctctaaacctctcctccgatccgatctgatccaaaatggcgacgatgacgagcttgattggtctcatcaataagatccaacgagcctgcaccgttttgggagatcacggtggcgagggcttgtcgctctgggaggctcttccctctgtcgccgtcgtcggtggacagagttcaaggaaatcgtcggcgctagaaagtgttgtcgggagagattttctgcctcgtggatctggtattggtacacggaagccactagtgctgcaacttcacatgacggaagaaaggacacatgagtatgctgagtttcttaca

SEQ ID NO: 223154 - DNA, 500 bp, Glycine max
ggaattgaatgctactaaattttcattacatgttttggggaaagtatggaagtctacatcatcaaagtttgacaaagatagttcaaactttaaagcatactaaattgactgttcaaaagaaaagagcaatggcaagaaaaaaggaaaatgttcaaaagaaaaagggctatagcaaaagaaaaaagatacactgggcagagattgttccgtactttacagtttaaccatgaggataacaatgacttgatgaagctttcaacattcctacagatatctaaaatggagattaaatcctatttttcttcccacacatatctcttgtaactattcacaagccagttttgtatcaaagctagtcaagcatatggcaaaggcctgaaatgcagagagggggtatcgatagtccattgtaaacatatccttgccaaccttgccaaactgaagaatgatcttgtcagggtcagaagaagattgtgttggctgagatggtgtaggtcctg

SEQ ID NO: 223155 - DNA, 453 bp, Glycine max
acgccaattcactggattgagaacaaaagggaaacggggtatgccagcatacaggtgataattatatatcagctccacaaattgataacaaacagtagtaacattaatgggacaatagagttcaacacaaaccaaacttattttcaaaggtcattacagacccattacacatcacatttcttcttaaaatgtttgggaaaatccaacatcgaacatcacacagaaatcagctccagcttaaaaccccccacgaagacgcaacaccaagtgcagagttgactccttctggatgttgtagtcagcgagggtccttccatcctctagctgtttgccagcaaaaataagcctctgttggtccggtgggattccttccttgtcctggatcttcgccttcacattgtcaatggtgtcggagctctccaccttgagggtaaaagacttacccgtaagggt

SEQ ID NO: 223156 - DNA, 490 bp, Glycine max
ggctaatatcttttatatatgtgtatagggaaataacaacaacaaagattgaacatatgtccttagataattggtaaataatgttcgagcatgatactattttttcaagcaacaagcaaggataatagaagaacaatttgagcaacactcgataagtgtgtttacttataaaattccataacccaaaagccagagacactgcaaacgattttgatgccactgaatccagaacttaatgccaattccatgaattcatgttgggttctttcttttcctcctgagttttgagtcatcattaagaggtcagcttggaaaccactcttagcagtaactgtgctctcgggcaaaatgggaagaattaagtccacaacaatcacttttccatcactaggaatagctttatgacaattctttaacaacttcaagcattgttcatcactccaatcgtgaagtattcacttcataaaaatggcgtctccgttgggaacac

SEQ ID NO: 223157 - DNA, 436 bp, Glycine max
ctgagtgcttattatttgtaatatatatagtcactcaagcttctaggatttgtgccagctacatgaaaatgggaagcaacttcaggtttttgagtctttgcctcttggcattgattgcatcatctcatgctcaacttcagcttggtttttatgccaagagttgcccaaaagctgagcaaatcattttgaaatttgttcatgaacatatccacaatgctccatcactagcagctgcattgataagaatgcacttccatgactgttttgtaaggggatgtgatggatcggtgcttctgaactcaacaaccaatcaggctgaaaagaatgctcctccaaatctcacagttagaggctttgacttcattgacagaataaagagccttgttgaggctgaatgccctggtgtggtctcttgtgctgatatcctcaccttggc

SEQ ID NO: 223158 - DNA, 477 bp, Glycine max
aacaatgaaaaagtacatcaatacaaaaaaaatggggataagggactaaacatacatcaactctgttgtgggtagcacaagaaattctgcttcttattgcaagagcatgatctaccaacgaagctgaaaataagaattacaatggatcccacttattccaacacacatactacaaccataccatatgggatcactcatatgcagccagacaccacatggcatagcataactattcaaaaaacatggcatcgcataaataaccaaacccaaaaaataaatgatacaagattcatccatgaacaagacaagattcttagctattaacaaatgcacaatgctttctgatctctccctctgtccctgtcttcaccttaattcttcccatttttctctatggaggttgcaaacctagcaaagaatttttcacctgacccttcaagcaattcaatgatttgagcctttgtaactggattagtc

SEQ ID NO: 223159 - DNA, 443 bp, Glycine max
ctccattccgtgttttcagctccggtaacctctccttctccgccgccgttgctatctgcgccgtgaccttccatccctcaacgccccacagatcttcaatttgattgcttgggtcaacaatttctgtcattctcaatcatggcaactagacttcagtttgaaaataattgtgaagttggagtcttctctaaactcaccaatgcttactgtttggttgcgattggaggttctgaaagcttctacagtgtatttgaagctgagttagcagatgttatccctgtggtcaagacatccattggtggtactcgtatcattggtcgtctttgtgctggaaacaagaatgggcttctcttgccccataccaccacagaccaagagcttcaacaattgaaaaacagtctacctgatcaagttgttgttcagcgaatagatgaaagattatc

SEQ ID NO: 223160 - DNA, 393 bp, Glycine max
ggggggggcacacaaaggggcacatggggttatttgatatcacaattaacgaaaaaagagtccaacaccatgggaatatatatgcccacattacaaaagacaaactatcacccaaacttaaattagaaaatcttaacaatcagcagggcaatatattgcacaaaacaaaacacttttactaccacagttcaaacataggtatcaatgagggaattcctcatctcatccacaattgcactaggctgggcttctcttaacttgaaaacactttcaatcacaaatagctccgttgcgggggggtcggaaccacaaaatgcgggccaatcattaactggcattccagccgctattactttactaccccgggttacgggcccaggcaccaaaggaacc

SEQ ID NO: 223161 - DNA, 458 bp, Glycine max
caaacactcacactctctctttctttcttcctgctgctacaatatggagcctgtctcttgcaccaaacacaacaacaatctctccaagccttcctccctccacacggaggctccgccgccggaggccagtcccctccggaagatcatggtggtggcctccatcgccgccggggtgcaattcgggtgggccctacagctctctctacttaccccttacgtccaactgctggggattccccacacttgggccgccttcatctggctctgcggcccaatctccggcatgctcgtccagcccatcgtgggataccacagcgaccgctgcacctcccgattcggccgccgccgtccctttatcggcgacggatccctcgccgtcgacatcgccgtctttcttatcggctacgccgccgacctcggccacatgttcggcgactccctaaccaaaaaaacccgcc

SEQ ID NO: 223162 - DNA, 616 bp, Glycine max
gtcaccgcacccaccacgaacgctggcaagttaccacctccaaatagagcatcccatggtccacgggtcacagagaccaccatctgtggtatgacaattgcaagattgagcactcccagagacaaaccttggcctgcccctgaggtgctggagaatattgatgctagagcaaagggtatgctgtaagtaatcgcgagtgggattccgaggagagagaagagagccaacgcgccggctttgacggcggcgggaggaggcaggggttcctggtgggcgttggggagtagggtgtattgtcgagaatgttgggccatcttagtaaccaaaaccgtcatggccaaacaaaccgcgagcaggaagttaacaatcccccacagcctcttgacgcccccaaccccacgcgccagcacttccactctcaacgacgtcgcacccagcacaacagagttcaacattagtcccaacgcacccgcacggacacccgtattcgacgcctttccttcccctactgacccttcgtacacctcacgccccattcagtcggtgtcgaatagcaaaaaaagggacccaggcgatccagttcagacacgttaccaacagaaagatccacatggga

SEQ ID NO: 223163 - DNA, 428 bp, Glycine max
gattcgcatattccatagcatgccttacaagctcacgcatcatttcattgacttacggggctataaaaaagatcactttataagtttatatcaacatcattcattaattccttttgcttgtgtgaagcgccaaattaagagagaaacagagagatagaaggaaaagcatcaaagatgaaacccaacttttcatttttgtttaagcttttgatactgcaatatctagcagatctatccatttctcaggaatttgatttcttctactttgttcagcagtggccaggagcatactgtgacacaaagcatagctgctgttatcccaagactgggaaaccttcagcagatttcatcattcatggactttggcctaactacaatgatggatcatggccctcaaactgtgaccctgacagtgtctttgataaatc

SEQ ID NO: 223164 - DNA, 493 bp, Glycine max
  unsure (1)..(493): unsure at all n locations
cttaattctctctactactgctagctgtgacttgttttgagttcaatcaggtcgcaggggtatctgaaatcaggaaagatggttagcgtagctgagatcaggcaggcacaaagggcagaaggcccagcaaccatccttgccattggaactgcaaacccaccaaaccgtgttgatcagagcacctatcctgattactacttcagaatcaccaacagtgaccacatgaccgagctcaaagagaaatttcagcgcatgtgtgacaagtctatgatcaagacgagatatatgtacctaaacgaagagatcttgaaagagaatccaaacatgtgtgcttacatggcaccttctttggatgcttggcaagacatggtggtggtagaggtaccaaagctagggaaagagggtgcacgaaaggccataaaggagtggggcccgccaaagtcaaagattacccacttgatcttctgcaccactagcggnggggacatgcctg

SEQ ID NO: 223165 - DNA, 525 bp, Glycine max
aaaacaaatgcctgttattgataattaggctaaaaggccaccggacacgtattattattttaatataaacgtacacaaacaaactctaaacgagttttttttttttggtggttgttgttgttacaaaccccaagcaagtttgaaaagtggtacacaataatgaaataatatatgaggcatctcagatggccacactatgcaaaacaacagtttcaatggtaagttcaggtccaaaaccgaacaacacaccccattcaagtccttcacctgtggttttatgtccattttcagcagatttcctcctcatctcatccaagatgaaaagaacacaagcacttgacatgttcccatattcactaagcacatctctagtggccttcatcttctcaggtttgagacccaacttttgctcaacttggtccaaaatcgcaggcccaccagggtgtgcaatccaaaagatggagttgtaatcagagatgttcaatgggttgaaagcctcaaaaagtgccttatcaatgttttttg

SEQ ID NO: 223166 - DNA, 462 bp, Glycine max
aaacatgggaactgctatagacatgtacaacagcagcaacatcgtagcggatttcctaggtccgtatagtgaagagctgatgaaagcacttaagccttttatgaaaagtgattatttctctgcctcttcttcttcttcactcgaatcacagccttgttctttttcatctaattctctccccacttcgtatccctcttccaaccaaatcaagctcaaccaactcaccccagaccaaattgttcagattcaggcccaaatccacattcagcagcagcagcagcacgtggcccaaacccaaacccacctgggcccaaaacgcgtccccatgaagcacgctggcacggccgcgaaacccacgaagctctaccgcggtgtgcggcaacggcattggggcaagtgggtcgctgaaatcagacttccaaagaaccgcacgcgcctctggctaggaacattcgacaccgc

SEQ ID NO: 223167 - DNA, 464 bp, Glycine max
  unsure (1)..(464): unsure at all n locations
agcaaatccacattcctctccatgtccggagagccaccacggccgttggagatccacctgagggtcaactccaagagaggcggcaccaccatggtgcaccccgtggccacggcggttccggttcagtaccccagagaggaggagggagtgaagcattacagaaaatggtttgcttggctgatacctctctttgtggttgccaacgtcgctatgtttgcgatcactatgtatgtcaataactgcccgcgtaactctgtctcctgcattgcctccttcttgggtcgcttctccttccagcccttcaaagaaaaccccctcttgggcccttcttcgttgacgctgcaaaagatgggggctcttgatgtgagcagagtggttcacaaacaccaagggtggcgcctcgntacctgtatgtggctacatgcttgggtttttcatctgttggcaaatatgttgggtattct

SEQ ID NO: 223168 - DNA, 404 bp, Glycine max
cagagaaagggttgacggacagagaacccaccttttgttgtattgcagatccatccggtgtgccaccaggtgaatggaaggaagtggcggtggcggtgcttcaccgtctgcaccggtgaagcagtatttgcacgatttctcgaagctgtttcagtactatctggataaatccactccacattccacgtacagatggattgggactttcgtgatagcatccatctacgttttgcgcgttgtttatgtgcagggtttttacattgtctcttatggactcggaatctaccttctgaatctcttgattggttttctctcccctttggttgatcctgagctcgatccctccgactcccctttgcttccaaccaaaggctccgatgagttcaaaccctttattcgccgcc

SEQ ID NO: 223169 - DNA, 468 bp, Glycine max
tgttgctctggcaattctcataggctctcggcctatgagtatacccagaactgccgcccttgatgtttaggggagaaaggcaagggccactgactacagtaagggatgaaaaggaagaaggaggatgctgatcgatacatgtgatcgggtgattagcttatttacatcaggagtgtgagtgccgcataatacactgtgatagaaatcccgagaacattgttctggatggccactaccctggcaaggtttaaggcttctgtctgggaccgctcatggttagagactggcggacactctaaataaccatgccgtgaacgcaaggtgacggtgcccgcacagagatttatcgcagatgcagcacaacgcccggcagctgtgatccgcttgggagggacaaagtggaccttattgacgccaccaccaatgttgccgagcccttcaatgctggaccaggagttcgcggaagcc

SEQ ID NO: 223170 - DNA, 450 bp, Glycine max
gttcaccataatcaaactcgaattaaaccaccttcagcaacaatggttaacatccaaaccaatacatcttacatcttccctcaaacacaatccactgttcttcctgatccctccaaattcttctcctcaaaccttctctcaagtccactccccacaaactctttcttccaaaactttgtcctaaaaaatggtgaccaacaagaatacattcatccttacctcatcaaatcctccaactcttccctctctctctcatacccttctcgccaagccagttcagctgtcatattccaagtcttcaatcctgatcttaccatttcagccccacaaggtcccaaacaaggtccccctggtaaacaccttatctcctcctacagtgatctcagtgtcacgttggatttcccttcttccaatctgagcttcttccttgttaggggaagcccctatttg

SEQ ID NO: 223171 - DNA, 489 bp, Glycine max
agatcatgatattgttgtaactttattatagttttcttcttctataacagatcgaaatcattgacttattggcatagtaataatttttttattatgatgtaagacatatttgatgattttattggcatagtaatagtagcaataataataacaaccaaatcagcagtgttgtcatgttcaataaccaaatccattctattcatcacttctgctatgaatccaccacaagagattggtcaaagagtttccaccatcaaaacctttcaggtttcttatcttctgcagtgcactttcattgtcataaaccccttcaagggcatacacaaaccccttccatccttcaccaacaccaccctccctatccaaagcaggcaaagtccactccacaagctcctttacaaagtcaacattggagaaaatggcttcagaaataggagccaatggttagagctgaatgccaagcctacactctttccactcagcaggagc

SEQ ID NO: 223172 - DNA, 442 bp, Glycine max
ctttcctcacttcaaacttgacaaaaatggcaacagaattggcatcatcttccaattgggttccaagcgcagccacatgtttggcatcctttgccgccctccttctactcttcctccgaggtctacgacgacgtcgatacaacctccccccaggcccaaagccctgccccatcataggcaacctaaacttaattgggtcccttccacattggtcgatccacactcttagcaaaaaatactggcccatcatgcacgtatggatcgggtcgagctccgcggcggtgggctcgctcgttgaaattgccaaggccgttctcaaaacccacgacgccacccttgtcggcgggccgaagttcgcggtgtgcaaatacacaacctacaactactcggacatcacttggtaccacaacggaccatactggcgccaggcccgtttaatgtg

SEQ ID NO: 223173 - DNA, 544 bp, Glycine max
gtgctctctttgcccaatgcttagggttgaacaaagagtctgaggcttatgcagaggagcttttggatactcttgctaggcagagaggtattcaggggggttccattaacaagatccagatgaaggaattctgggatcatatttctgaccagagctttgatactaggctcaaaacattctttgacatggttgataaagatgcagatggcagaatcaccgaggaagaaattaaagagattatctgccttagcgccactgccaacaaactgtcaaacatccagaagcaagcagaggaatatgcggctttgattatggaagaattggaccctgatgacacaggatacatcatgatagacaacctggagacgctcttgttgcatggaccagaggaaactacaagaggagaaagtaagtacctgagccaaatgctaagtcaaaaacttaagcctacatttgcggacagtgcagttatgaggtggtgtagagatgccaagtacttcttgctggacaactggcaaagatcttgggtacttgcactttggat

SEQ ID NO: 223174 - DNA, 555 bp, Glycine max
aatcaatcttctgagagtgtttggttgaaagtagcaaagatgtttcctttccggcggaagggtcggaagataaaggggactatggtggttatgcagaagaatgtgttggatatcaacagcatcaccagtgttggagggatcgatgaccaaggcttatgcttcataggcagtgcagtcgatgcacttacttttgcagccaccaaaatctccatccagttgattagtgctaccaaggctgatggtgggaaaggaaaaattggaaagagtacaaatttaagaggaaagataacattaccaaccttgggagctggcgaacaagcatacgatgttaattttgaatgggacagtgacttcggaattcccggtgcattttatattaagaacttcatgcaaaatgagttctacctcaagtctctaattctcgaaaacattccaaaccacggaaccattcacttcgtatgcaactcctgtgtttacaattcaaaaaactacaagactgatcgcattttcttttgccacaatacatatcttccaagcgagacaccagcttcactt

SEQ ID NO: 223175 - DNA, 429 bp, Glycine max
atactaacacaactctctttattaatgacaaatacaaagtacattcaggcactccaaatacatgacttaagcatacacaactgattaaggaatctggttccttcaatttcacatttatttaaaaccaggaacagtacttaagcaaccatagggtccttagatagagatactgttgggaattcctctgaaagtcaatccctcctcactagaaggatagagcagagtgtaaggcattttagctggcccatagcggtttctcaatgtctcatctttgttcttctctataagcttcttttcaatctcttcaagcttctttccaaacctcttaaatgcctctaatggaccggcatcagaagtccagtagtcaccaccatctctttgcccaaggtagaactcatcagatgcgtgccttgacaagatttctataac

SEQ ID NO: 223176 - DNA, 369 bp, Glycine max
caatttcacccttcacacgtggtggtggtgttgttcttcttctcttcccctttggttttcttggtctgagcttgtttaagctctttctatttgattccattaacatatattatcacaatgtgtggtattcttgctgttcttggttgttctgatgactctcgagccaaaagggtccgcgtgcttgagctctctcgcagattgaagcaccgtggccctgactggagtgggctccatcaacatggtgactgctttttagcacatcaacggttagccatagttgatcctgcttctggggatcaacctctctttaacgaggacaaatccgtcattgtcacggcgaatggagagatttacaaccctgaagagctc

SEQ ID NO: 223177 - DNA, 368 bp, Glycine max
gcatacttaacaacagcacatagcgggttactgtctgttcaagctaccatctgggtctctctggggttagcgccttcttgccagaagttaaaatggcccacgaaactttcctattcacatctgaatcagtgaacgaggggcaccctgacaagctctgtgaccagatctccgatgctgtgctcgatgcatgcttggagcaggaccctgacagcaaggttgcctgtgaaacctgcaccaaaaccaacatggtgatggttttcggagagatcacaaccaatgccaacgtggactatgagaagattgtgcgtgacacatgcaagaacattggttgtgtctctgatgatgttggacttgatgctgacaactgc

SEQ ID NO: 223178 - DNA, 505 bp, Glycine max
tgaacgaggggcaccctgacaagctctgtgaccagatctccgatgctgtgctcgaggcatgcttggagcaggaccctgacagcaaggttgcctgtgaaacctgcaccaagaccaacatggtgatggttttcggagagatcacaaccaaggccaacgtggactatgagaagattgtgcgtgacacatgcaggaacattggttttgtctctgatgatgttggtcttgatgctgacaactgcaaggtcctcgtcaacattgagcaacagagtcctgatattgctcaaggtgtgcacggccacctcacaaagaggcctgaggagattggtgctggtgaccaaggtcatatgttcggctatgccactgacgagactcccgagctcatgcccttgagccatgtccttgccacgaagctcggtgccaagctcaccgaggttcagaagaacgggacatgcccttggctgagacctgatggcaagacccaagtcactgttgagtactacaatga

SEQ ID NO: 223179 - DNA, 463 bp, Glycine max
accaatcatctttagttcttcagtaatttattgtgggattctattctaagattttgagaatgtctagctgtgggtgtggaagcagctgcaactgtggcagcaactgcggttgcaacaagtactcttttgacttgagttacgttgagaagacaaccacagagactctagttttgggtgttgggcctgtgaaggcccaattggagggtgctgaaatgggtgttgcatctgagaacggtggctgcaactgtggatcaagctgcacctgtgacccatgcttctgcacgtaaggacaagatgtataaccttgaagcagagatagctgcaataatatgtatcaacaaataataagaagtataagttgcgtttggagctttaaaataaagagttcgctatgtgttttgttggtcttttataaatatgtaatgcgaatcatcaatctctgcttataactgatacttttggt

SEQ ID NO: 223180 - DNA, 512 bp, Glycine max
acagcacaaagcgggttactgtctgttcaagctaccatctctctctctctttcttagtgcctccttgggagaagttaaaatggcccaagaaactttcctattcacatctgaatcagtgaacgaggggcaccctgacaagctctgtgaccagatctccgatgctgtgctcgatgcatgcttggagcaggaccctgacagcaaggttgcctgtgaaacctgcaccaagaccaacatggtgatggttttcggagagatcacaaccaaggccaacgcggactatgagaagattgtgcgtgacacatgcaggaacattggttttgtctctgatgatgttggtcttgatgctgacaactgcaaggtcctcgtcaacattgagcaacagagtcctgatattgctcaaggtgtgcacggccaccttacaaagaggcctgaggagattggtgctggtgaccaaagtcatatgttcggctatgccactgacgagactcccgagcttatgcccttgaaccatg

SEQ ID NO: 223181 - DNA, 427 bp, Glycine max
agaacagcgagaatggaatcgactttatccggttcggggagctcggcatgtcctccgggatcgtgtcgaacgactccgtgcgctgggttaccttccacagcggactacgatttcggctacctactgaagctgttgacatgccggagcttgccggacacgcaggccgggatcttcgatctgatcaagatgtattttccgatggtatatgatatcaagcacctgatgaaggtctgcaacagtctccatggagggttgaacaagctcacggcgttgttggacgtggagagggttggcgtctgccatcaggctgggtctgataggttactcacttgttggacatttagaacgctgcgggatacgtttttcaagggcttcacggagaaatatgctgacggcttgtatggtttaaggggtgagagtggacaga

SEQ ID NO: 223182 - DNA, 514 bp, Glycine max
accaaaaccaatcggatcgtttcctctgcggagtcagaaatccatggatccctacaggaatcggccattaagcgccttcaattctcccttctggactactaataccggcgctcccatctggaacaacaactcatcgctgactgttggatctagaggtccaattctgctggaagattaccatctggaggagaagcttgcaaactttgacagggaacggatccccgaacgtgttgtccatgctcgtggagctcgcgcatagggtttctttgaagtcacgcatgacatttctcacctgacatgagcctatttcctccgagcccgtggaggtcagacccctctcatcgcccgtttctccactgttatccacgaacgtggcagccctgaaaccctcacggatcccacaggtttcgctgtgaaattctacactagagagggtgacttcgaccttgtgggaaacaactttgctgtattcttcgtacgcgatggcctcaagcttcctgacatggtccatgct

SEQ ID NO: 223183 - DNA, 328 bp, Glycine max
ctcaaatacttctggaatgaatcattacatgcttcatgaactcatgggagttgatgctggaactaaccctgtttgccatttccttggaagcaaggccattttatgggtacccaatttatctatggacactgcctatcagactaacgttgttgtttaattagtccatgcatctgcatcttgggcaccataagattgtatataaaataaattatggtgtgttgcgtatgttgtgcaagacctggaacttcacctttctacgtacgtgtgctgttaggatgcagtgtgctttgatgatgctttgatgaatatgcattgtgcttttttaagt

SEQ ID NO: 223184 - DNA, 529 bp, Glycine max
  unsure (1)..(529): unsure at all n locations
ctccctctcccacgcgccaccgccagaaagaggattttccatttctgccctccgattgcatgccgctcatccatggatcagtcttctggcctgaatctggaagatctgaaatgggaccattccttcgtcagagaattgcccggcgatccccgccgcgactcctttccccgtgaggttctgcatgcttgttacacccaagtctctccttctgttcaagtacacaatccccaacttgtagccttctcccaaccagttgccgacctacttgatctcgaccataaagagttgccttatgctcagtgctatggcgggcatcaatttggtatgtgggctgggcagctgggtgatggcagggcaatgactctaggggagatactgaattctaactctgaaaggtgggaacttcaacttaaaggagctggcaagactccttacggtcgctttgccgatggccttgccgtcctccgcagnagcgtcagggagttcctttgcagtgaggcaatgcaccaccttggtataccaactactc

SEQ ID NO: 223185 - DNA, 421 bp, Glycine max
aggaaaaatgccgctcaagttggcgggaggagccactgtcggttcccttctcctatgggttgctattgctctctttcacatcgctggggccgaagatccctacaggttcttcaactggaatggtacttatggtgacatttaccctcttggtgttcgccaaacgggaatattgatcaacgggcaattcccaggtccagatattcattctgttaccaacgacaacctcatcatcaatgtcttcaacagcttggatgagccctttcttctctcttggaatgggatccagcagagaaggaactcattcgaagatggtgtttttggaacaacgtgccccatcccaccagggaagaattttacttacatgcttcaagtcaaagatcaaagtgggagtttttactatttcccatcccttgcattccac

SEQ ID NO: 223186 - DNA, 518 bp, Glycine max
  unsure (1)..(518): unsure at all n locations
cttctgcaccatcgatccatctcattgttctcttagctaccatggcgactgagaacggtttcaatagcattttgaggacgctcgagaagcccggcggcgctggcgagtttggaaagtactttagcttgcccgctctcaacgatcctagaatcgatagacttccttactctgtgaggatacttttggaatctgcaatccgtaactgtgatgagtttcaagttaagagtaacgacattgaaaaaattattgattgggagaatacctctcccaagctggtggagattccattcaagccagctagagtgcttctgcaggactttactggggtgcctgctgtggttgatcttgcttgcatgcgagatgcaatgaacaaacttggtggcgattctaataaaattaaccccttggtaccagttgatcttgtcattgatcactctgttcaagttgatgtggcaagatcagaaaatgctgtccaggcanatatggaacttgtattccaaagaaacaacgaaagattt

SEQ ID NO: 223187 - DNA, 277 bp, Glycine max
cttttccctttttcttaggcacacctcacacccactcaaataataggaactgagatgaatcctgatcagtttcagaagaacagcatgttcgtagaaacccctgaagatggtggcttatactttgacgatgatggacgagtcatacgaactggcacatggataactgcgagtgcccatatcataaccgcagtgataggttctggagtgttgtcacttgcatgggcaattgcacaaatgggttggggggcaagccctgcgggtctctttgccttttatt

SEQ ID NO: 223188 - DNA, 521 bp, Glycine max
cacacgttgaattgaaatttggaaatcgtgacaccaaccctacaccaccatggcctgcgtagacaaactttgggcttttgccctcgctcttctcctccttgcctcccctctcctccaagttgctaggtgtcagtcagactccgaagatgtagtggaggctgctgaagaatcaagtgatatcggcattgttggtgatgatgtccaagactttggcgatgggaccttcccttctgctccaggaattgaaacaataagtgtttctccaaaaaatagtgcgagattgataacagctggagaagagacagagctgcttgtgggtgttaaaaatgatggggattcaagcttgaatgttattgcgatcaaggctagtgttcaccttccttttgatcaccgtatgctggttcaaaatcttactgcacagggttttaacaatggttctgttccagcctcagcacaagctacttttccatatttatttgcaggcagtaagttcttgcaggcaggaacttttgaccttgggg

SEQ ID NO: 223189 - DNA, 472 bp, Glycine max
gggttcacgtttcacaatcactttttgcgcttctctcactcactcactcttcttcgggctcttcgtgtggttttctttctcgaactcgaacgaagatgcgtgagattcttcacatccagggagggcaatgcgggaaccagatcggagccaagttctgggaggtggtgtgcgcggagcacgggatcgattcaacggggaggtaccaaggggacaacgagttgcaactcgagcgagtcaacgtctactacaatgaagcgagttgcggaaggttcgtgcctagggcggtgctcatggatctggagccagggaccatggacagcgtcagatctggtccctacggtcagattttccggccagataacttcgtctttggacagtccggcgccggaaacaactgggccaaaggtcactacaccgaaggcgctgagttgattgactccggtctcgacgttgtcaggaaggaggcagaaaa

SEQ ID NO: 223190 - DNA, 459 bp, Glycine max
gatacattccctctgtctctctctctttcactcactcaaactcactatataagaggcccttcggggcccattcttcttcttctgctacaccattcattcgagcattcggttttgaatcttttgagcgaaaatgcagtcgagtcctttgcttctggaggaacccataaggatggcctccatcctcgagccatccaagcctagtttctttccagcgatgacaaagattgttggcacacttggcccaaagtcacgatcggttgacgtgatttcccaatgtcttgaggcaggaatgtctgtggcaaggtttgatttttcatggggggatcctgaataccaccaagagacgttggaaaatttaagggctgctatcaaaagtaccaagaaactttgtgcggttatgctagataccgtgggtccagaactacaagttggcaacaaaactgagcacccaaattccct

SEQ ID NO: 223191 - DNA, 561 bp, Glycine max
gataaaaggattcaatggtgttatattataaacaacagttggcatgctggcaatgaatgatatccattccccaaaagcatttcttccaatgtgatacacattattttgaagtgtttttattattaaagcatacaacagaaaatactaatacaaagaagacatattataacgcaaacttgaaaatgaatcaagttctattcgtcaagctcaataatcttcacaactgaggagtcaccaactttctggcatacaacaactcgatcatgtgcctttatgataccaaaagccttgccatggtctaaagcaaccttcaaaattgattcatttgttgcacttttagactcagctggatgtcgtggatctgcaagcatagggaaaagacctctcacaataagtgattgccttgccttcaaagctccagtgaaagtccatcgaagttgatttgtctttagttgaggaatgacaacggatatcacaggcatggttggacggtacttagcatcaaccttgcagccctgccagatgaagtaaagcacataataacagaagccttaaccttga

SEQ ID NO: 223192 - DNA, 565 bp, Glycine max
  unsure (1)..(565): unsure at all n locations
acaccttttccttttcccttccgttggtgccattcgtgcagcaccggatcctcgtgatttctcgggcgataactctcccttttccggcgaattcaccgcttcctcgatatgaatcccgagtatgactatctgttcaagctccttctgattggagactctggtgttggtaaatcatgccttcttctaagatttgctgatgattcatacattgagagctacataagcaccatcggagttgattttaaaattcgcactgttgagcaggatgggaagacaattaaactacagatttgggatactgctggacaagaacgatttaggacaataactagtagctactatcgtggagcacatggaatcattattgtttatgacgtgacagatgaagatagcttcaataatgtgaagcaatggctcagtgaaattgaccgctatgccagtgataatgttaacaaactnttggttggaaacaagagtgatctgacagcaaagaagagtgtctcatatgacacagcttaggaattcgcagatcaaattggcataccttttcatgaaaccaagtgca

SEQ ID NO: 223193 - DNA, 296 bp, Glycine max
gagagtgttaggctgaaagtaacaaagatttttccttttgggcaaaacggtcagaagatcatggggactatggtggttatgcagaataatgtgttggatatcaacagcatcaccagtgttggagggatcgcttgccaaggcttaggcttcatatgcagtgcaggcgatgcacttacttttgcagtcaccaaaatctccattcagttgattagtgctaccaaggctgatggtgggaaaggaaaaattggaaagagtacaaatttaagaggaaagataacattcccaccctttggagc

SEQ ID NO: 223194 - DNA, 564 bp, Glycine max
caccaaccttgactggtacaagggaccaactctccttgaggctcttgaccaaatcagggagcccaagaggccctcagacaagccactcaggcttccattgcaggatgtctacaaaattggtggtattggtaccgtgccagtgggacgtgttgagactggtgtcgtgaagcccggtatggtggtgacttttggtcccactgggctgacaactgaggttaagtctgttgagatgcaccatgaggctctcacagaggctcttccaggtgacaatgttggctttaatgtgaagaatgttgcagtcaaggatctcaagcgtggttttgttgcatccaactccaaggatgaccctgccaaggaagctgccaacttcacatctcaagtcattatcatgaaccaccctggccagattggaaatggatacgcaccggtgcttgattgccacacttctcacattgctgtcaagttttctgaaatctgaccaagattgacaggcgatctgggtaggagcttggaaaggagcccaaattttgaagaatggtgatgcaagtatggttaagatgattc

SEQ ID NO: 223195 - DNA, 494 bp, Glycine max
gcgaagagaatggctcccaagggtttaatctttttggctgtgttatgcttctcagcactgtcactgagtcgttgtcttgcggaggataatggacttgttatgaacttctacaaggaatcatgccctcaggctgaagacatcatcaaagaacaagtcaagcttctctacaagcgccacaagaacactgctttctcctggctcagaaacatcttccatgactgtgctgttcagagttgtgatgcttcactgttgctggactccacaagaaggagcttgtctgagaaggaaacagatagaagctttgggttgagaaatttcaggtacattgagaccatcaaagaagctttggaaagggaatgcccaggagttgtttcctgtgctgatatcctcgttctctctgccagagatggcattgtttcgctaggaggtccccatatccctcttaaaacaggaagaagggatggtagaaggagcacagccgatgtggtagagca

SEQ ID NO: 223196 - DNA, 595 bp, Glycine max
ctttgattccaaagcaagttggaaacatgtacactgcgtctctttatgcagcattggcctccctcattcacaacaaacatagcacattggcaggtaagagggtgatattattctcatacggaagtggcttaactgccacaatgttttctttgcaattacgagacagtcaacatccgtttagcttgtcaaacatggctagagtgatgaatgtcgatggaaaattgaagtcaagacatgagtttcccccggaggagtttgttgaaaacttgaagttaatggagcatagatatggtgcgaaggaatttgtgacaagcaaggacagtagccttttatctccgggcacattctatctcactgaagttgactccatgtatcggagattctattcaaagaaaactaaagaaagcagtttgactcacgctgagaacggtgtgattgctaatggcgttgctaatggccactgatgttgagcatgtacaatcagcagtcaacttcgcctagaatgaggaaagggattgttatttgcgaagttctgttggtaaatggttctggggtggcaagtgtatcgatcaaacatttttttgaattttttaag

SEQ ID NO: 223197 - DNA, 316 bp, Glycine max
tgattatgaggatgttgaccttgataagactgctgaatggaccaggtgtggctgctgctttacaaatggtcagatatgcagcgcaacatctcgccttattgtgcatgaaagtatagcatcagaattcgtgaattgactcgagcggtgggccaaaaacatataaatttcacacccctttgatgaagggtgtaggctaggtcctattgttagtgaaggacagtataaaaaagtgtggaatcggatctcaactgctaagagtgagggggcaacatttatgatcggaggggctcgcccagagcattggaaaaaggggtac

SEQ ID NO: 223198 - DNA, 583 bp, Glycine max
gagagacataaaaaataaacatatattgagaatggagggttgtgtgaagaagttgcgtatgccttgttgggtttgtggtgcttgtgagtactattggtggggtggagagtgctggtgaatgtgggaaatctacaacccctgataatgaggcttataagcttgcaccatgtgcctcagcagcacaagatgagaatgctagtgtttctcatagttgctgtgctcaggtgaagaaaattgggcagaaccctagttgcctctgtgcagttcttctctctaacacagccaaaatggctggcgtcaaccctcaagttgctgtcaccatccccaagcgttgtaacctggctaatcgccctgttggttacaagtgtggaccttacactctgacttgaaagagttatggttgttggtgaaaacaaagatgacagggcgttaatgcactatggatgttagctactacaaactgtgactacatgttggttgaattgtcttgtacttcctagtgaataagatctagcagctcactagtgttctctttaataaacaagtactgtcggtgttaaaataaaaaaaaaaaagggcggcc

SEQ ID NO: 223199 - DNA, 284 bp, Glycine max
cgaagatctactttatcttggaattcgcgaagggcggcgagctcttcgcgagaagggcgaagagccgattcagcgaacatctcgcgagacggtattttcagcagctcatctccgccgtcgggtactgccacgcgcgcggtgttttccaccgcgacctgaagccggagaatctcctgctggacgagcagggcaaccttaaagtctccgactttggactcagcgcggtgaaggaccagataggggtggacgggttgcttcacacgctgtgtgggacccctgcttac

SEQ ID NO: 223200 - DNA, 526 bp, Glycine max
acattattcactcacttcccccctcttcattttgtagtcctcctttacctgcgggaaacaggggatggctcagcttaacctcatacttatctggttatttgtattgagtctgtgcctttattcatgtcctacttcggcccagttaagtagacaccactatgcaaaaacatgccccaatgttgaaaacattgtcagagaagcagtcaaaaagaagtttcatcaaacatttgatacgggtcctgctaccattcgtctcttcttccatgattgcttcgtgcagggctgtgatgcctcggttttggttgcatccacaaaaaacaacatagcagagaaggatcacccagataatgtttcactagctggagatggatttgacacagtgattaaagcaaaagaagcagttgatgcagtttcattgtgcaggaacaaagtttcatgtgctgatattttacccttggcgacccgtgatgttattgaactggccggtgggccttttacgaggttgaattgggaagatttgatgggc

SEQ ID NO: 223201 - DNA, 550 bp, Glycine max
gagaaattaaatactttcagtacttattattgggaacacagggtaactaatataaataacgaatccccctgacttgataataatctgttggcccttcttaaattaaatgactgaacaatcggagcgaatgtttccattctgtgcattcttgattccaactcggcccaatttggtcatagcagcggcgaagttggcatggaagattttgctgctactagcaaatgcatttacagtggccttggatcttgagtccgtgaagagaacttggtctgaagagaagaggcccttcccttgctgaagattcttgaaataaacattgtcgaatgaccgcggagtgcttgggtccatatcgattgcaatccttggatccacattccttgggcacattgactttagctgggttgcgtatttttcgttcagtgtagggtccactcgacttttgctcttgaaattgtatactctgttcgagaatttgttgcaatgggagaatccaacagtgtgagcacctgatagagctatcattttcgttgggtgaaaccgttggccgcaa

SEQ ID NO: 223202 - DNA, 310 bp, Glycine max
tcttcctccaaaacaagtaaacaaacaacactctcacattcaccacaacacagagcacaaacacgaacaaagacaacaaccttgtttgtctgcaatcaaaacctttcaagctggcgttcgagaaccaagacacccctgtccgagaaatcaagcccaagaaccggagaatcatgggtgctggaggccctgatgacgaggacaataggtggccaccatggctgaaacctcttctcaaagagagcttctttgttcaatgcaagcttcacgctgatacgcacaagagcgagtgcaacatggattgcttagattg

SEQ ID NO: 223203 - DNA, 298 bp, Glycine max
cggctcgaggggcagagcctgcccgcgctgaagtttgctaggatcatgagcagggtcgggaggagttaccgaagctaggaagagatgatgtaaaggtactagatattctcgcaaaatcttaggttcatccgctcccacaacaaagaaccggttgccctacactctctctggcaatcattttgctgattggacttgggaggagttcaaatgacacacactaggcgctacctacaattgctctgccactcttaacggaaaccacaagctcactgatgctgttctttctcccaccaaagac

SEQ ID NO: 223204 - DNA, 499 bp, Glycine max
gtaccttgaatcattatcattcgggtaatggacacatcactagtgtttactgtgaggaggagtgaggcagagctgatagctccggcgaagcccacccctcgtgaagtgaagctactctcacacatagatgaccaagatgggttacgtttccaaattccggtgatacagttctatcgccacgacccatcaatggcagggaaagaccctgtcgatgtgataagaaaggctgtggccaaaacgcttgtgttttactatccttttgcaggtaggcttagggaaggacttggtcggaaactgatggtggattgtactggggaaggtgttttgttcattgaggctgatgcagatgtcactcttaagcaatttggtgatgctcttcaacctcctttcccgtgctgggaggaactcctttatgatgtacctggttctcaaggagtgcttaacactccccttctgcttattcaagtaacgcggctcaagtgcggggggttcatattag

SEQ ID NO: 223205 - DNA, 469 bp, Glycine max
gggagattctttgtttgctaccttctctcggaaaaatggttacgttcaggtttcacgcgagtaccaggaggttgggagggctcttcccacggaagcagatcagcaccccaagatctaccgaatgaagctctgggccaccaacgaggttcgcgccaagtccaagttctggtattttctgaggaaactgaaaaaggtgaagaagagcaatggccaagtgcttgccatcaacgagatttttgagaagaacccaaccaaaattaagaactatggtatatggttgcggtatcagagtaggactggttaccacaacatgtacaaggagtaccgtgacaccactctaaacggggcagttgaggcaatgtacaatgaaatggcttctcgtcacagggtcaggagcccttgcattcaaattttcaagactgcgaccatcccagctaaactttgcaagagggagagcacccagccaatt

SEQ ID NO: 223206 - DNA, 612 bp, Glycine max
cttcgtagccgcaattgctcttccttcgcgaagaagaggtaacagcatctgacaccagcgccagttaccgttttccacgcgctttcttccttctcgaaacgccgtcgtttggctaccacacatatatttagcatcactgcttcgaaccttctttttctcaccgacgcagtttccggttttaaggaagcatgggaaaggttcaggtgagtgacaaggaagaattctctcaaatggagaacaacgatttcagtgattcgcagttagttcatcacttcagaggtgtgcttgttgcagtgacaacgggtgatcgagagaattacgatgagctcgttggttatttgcacccgaagaagcatcttaatcctgatgaggttgctatacttgtgacaactttgaaggcgctttctggagcagtgtcctatatagattctgttcatcatgaatccctgctctttgctgtttcgagaatgagcctctggaattgtggaattgatattatggatgcactgctggaactcatcatatctttggctgtttccaatggaaaattattcgatggtgtttggagatgcttgggaaaaattttgtgccgccttttacctctagattttt

SEQ ID NO: 223207 - DNA, 357 bp, Glycine max
  unsure (1)..(357): unsure at all n locations
tttcgagttccatcttctttcaagccagcccccactttcataaaaacacaaaaagggccccagagcagaagtttagaggaacatggcatgtccagcaatggcaaatgggaacgactcattgaacttgaagccaagtgagaccaagggaaagaccatcacttgcaaagccgcggtggcatatggtcctggagagccctttgtggtggaaaatattcttgttcatcctcctcagaaaatggaggttcgaatcaagatcctctacacttcaatttgtcacaccgatcttagcgcgtggcgaggcgtgagcgaggctcancgtgcttatcctcggattttgcgccatgaagcatctgggat

SEQ ID NO: 223208 - DNA, 433 bp, Glycine max
caaatgctgctgtgcagtggggatcaaagctacactcattctgtggaggccttgagggctcaccacatttgaaggctgcaaaagaaaatgctgactatctacgcactgtccaccatgagtttaccttcactgttcacagatggaatagatgccattgaagaagttatctaccatgttgaaacatatgatgtgactacaattagagctagcacacccatgtttgtcatgtctcggaagattaaatcacttggcgtcaaatgggttatcttcggaaaaggatccgatgacatctttcaaagatatctgtacttacacaaggcacccaacaaggaggtaggttcacagataaaaatgcccgaagatcaaagcactccacctatatgactgcttgcgagccaataaatcaacatttgcttggggtctagaagcccaa

SEQ ID NO: 223209 - DNA, 530 bp, Glycine max
aaatagtgctaagaactctaatggtggacaagatgaatatgctgggattcaagtcgcgttcagatttctttgctgctagttttctctatcagaaacaccacagcagaaaagaaaacccatcacacaaaacacacatacataattcacatggacaagttcaacatgccagagagttttaacgaccatctcctctgggttgattcatcactaaaatcagtatcagactcagcagagatgctctacacatataaaaaagtagctcatggcttctctacaaggctaactacgcaagaagcagagttgctctcaaagcaacctggtgttctctccgtcatcccggaagttagatatgatcttcacacaactcgaacaccagagtttctggggttggccaaatacagcactctttcactggcctctggcaaacatagcgatgtgattgtcggagtgctagacactggtgtgtggcctgaactaaagagcttcgacgacaccggactggggccagtccctattacctggaaggtgag

SEQ ID NO: 223210 - DNA, 383 bp, Glycine max
  unsure (1)..(383): unsure at all n locations
ctggtcttgggatttacgcagcaccacccaccctggaccaggncgtgaacagacagagagagatggaaaaacacacacacacacacacacacacgttaaactaacattgtttattagtaagaagacatggctcaacccagttccaacggggatctgaataataaccagcagggtcaggttcagcaacagctgcagcagtcgggcgggggagcatccgcatcagtatcagcagcaatggatggccatgcagtacccggccacagccatggccatgatgcagcagcagatgatgatgtacccgcagcattacatgccgtacgctcacccccattacccgtcgccggcgccgtctccttagtcgtttcaccattaccaccacaaac

SEQ ID NO: 223211 - DNA, 529 bp, Glycine max
ccaggatttggtgaaacgatgaacagtgataggaaaattggggttgccttgggcgttttccagaggaagcaaaatcgctctgaaatgggctattgacaatcttatcagcaacggtgacactctctacatcgtccacaccaagccttccggaggaagtgaatcaggaaatcttctctggtccaccactggttcacctctgattccattgtcggagtttcgtgaaaaggaggtgatgcgtcactatgaggtggatactgatgctgaggtgttggacttgcttgacaccgcttctaggcagaaacaggtgaatgtggtggcaaagctatactggggggatgcaagagagaaaattgtggaagccgatggtgatttgaagcttgactctttggtcatgggtagcagaggcttgggtgccatacaaagggtattactgaggagtgtgactaattatgtcaccgcaaatgcgagttggcctataacgattgtgaaagactctgccccttctactatctgataagctactgaattt

SEQ ID NO: 223212 - DNA, 346 bp, Glycine max
ctttgcctgacaccttcaatttaaccttttctactcataatcttaacaacttgcgtggaagaaggtaaagattgagaaaaagtgtgtgtttgagagagagcaatggctggctcgtgggcacgccgctctctgattgttctggcatatcatttccttcggatgttatttgcaatttccattgctaacgaggaagccacaaaattggggacggtcatcgggattgatcttggaacgacctattcatgtgttggcgtttacaagaactgccatgttgaaatcatagccaatgatcaaggtgaccgtagtcaccccatctggggttgctttcaccgaccgtgagagacta

SEQ ID NO: 223213 - DNA, 526 bp, Glycine max
ctcgagccgctcattaattgcaagattggcacttcgttgcttggtgatgtcccttggtgttctcttgactcttgggcttgcaagagaaagccatgccagagacgaagatttttggcatgctgtttggccaaacactcccattccaagttcattgcgagatcttctaaagcctggccctgcaagtgttgaaatcgatgatcaccctatgcaaattgaagaaacacagtacccgaaaaccttcttctataaagaagaccttcatccaggcaaaacaatgaaagtacaattcagcaagcctccctttcaacaaccatggggtgttggtacatggtttaaggaaattaaagacactactaaagaaggatatagttttgaagagctatgcatcaagaaagaagccattgagggagaagagaagttttgtgcaaaatccttgggaacagtaattgggtttgccatttctaagctgggaaagaacattcaagtactttcaagttcctttgtcaataagcaagacccatacact

SEQ ID NO: 223214 - DNA, 485 bp, Glycine max
gtggtttcagtgagtgatcggtgttcacttgatccttcataagtcgtcatcatcaggatcatcatcaccgttgattgaagaagatgccgatcagaaacatcgccatcggaaggcctgaagaggctactcaccccgacacgttgaaggcggggttggctgagttcatctccaccttgatcttcgtgttcgccggttcaggttccggcatcgcctacaacaagctcaccgacaacggcgccgccactcccgccggcctcatctccgcttccatcgcccatgctttcgccctcttcgtcgccgtctccgtcggcgccaacatcttcggcggccacgtcaaccccgccgtcaccttcggcgccttcgtgggcggcaacatcaccttactccgcggcatcgtctacgtcatcgcccagctcctcggctccatcgtggccttccttctcctcgccttcgtcactgcctcccctgttccagcattcgggctt

SEQ ID NO: 223215 - DNA, 510 bp, Glycine max
gcgacgccgtttgggtcctcttccacctcgccttcttctcccaatgccttccctcggcctgggcccactcggcgatcctcctcccgggtcaactcgcccgtgactcaccgcagagctgccccgcccctgaccccaacctctactacaagccagtcatcggaatcgtcagccatcccggcgacggcgcctccggccgcctcagcaacgccaccggcgcctcctacatcgccgcctcctatgtcaaattcgttgaggccgccggcgcccgtgtcgttcccctcatctataccgagcctccggagaagcttctcaagaagctcgaattggtaaatggggttctcttcactggtggatgggctaaaagtggtttatattttgaaactgtcacaaaaatatttaagaaaattttagagaagaatgatgctggagatcatttcccattatttgccacctgcttaggctttgaactcataacgatgatcataagccaggacaataatattcttgaag

SEQ ID NO: 223216 - DNA, 367 bp, Glycine max
ggaaagattcgattttactgctggtatactgctggacaggagaaagttggtggcctcagagatggatactatatccatggacaatgcgctattatcatgtttgatgttactgcccggctaacatacaaaaatgttcccacctggcaccgtgatctttgcagggtctgtgagaacatcccaattgttctttgcggtcacaaggttgatgtcaagaacaggcgagatagggcaaagcagggtacattccacaggaagaagaatgtgcagtactttgagatttcaggtaagagcaactacaactgtgaaaagccattcttatatttggccaggaaacttgcacgtgatcctaacttgcacttcgaagaat

SEQ ID NO: 223217 - DNA, 507 bp, Glycine max
ccttaacctctccgataccaccgagaaggtgatcgcagagtacatggggatcggtggatcaggaatggacctgaggagcaaagcaaggactctcccaggaccagttagcgacccttcagagcttcccaagtggaactatgatggttccagcacaggtcaagctcctggtgaagacagtgaagtgattttatacccacaagccattttcagggatccattcagaaggggtaacaatatcttgggtatctgtgatgcctacactcctgctggagaacctattcccactaacaagaggcacgctgctgccaaggttttcagccatcctgatgttgttgctgaagtgccatggtacggtattgaacaagaatacaccttgttgcaaaaagatatccaatggcctcttgggtggcctgatggaggtttccctggacctcaaggtccatactactgtggtgttggcgctgacaaggcttttggccgggacattggttgacgcacactacaaag

SEQ ID NO: 223218 - DNA, 327 bp, Glycine max
gcgagaggcaggcataagcatgttagaatttgttgcacttgcacgcgttgacggacaatgaaggtgccctgtgcgatacttgattgttatttcgaccttcatatgcaccttggtttgctacatcgaacgagaagggttttccatcgagaacacagttgatgatgacagtgccaaactgaatcaatcgagcaaaggtacaatactgagcactttctattacagatacgcctgttctcaaactcccggaggatgggcagctcaaaaaatcggggggaggagggtactgattctttcatttctcgggagacattaacttgggcactactt

SEQ ID NO: 223219 - DNA, 488 bp, Glycine max
cggagccaaacagagtattgctcaggcagtgcttgcagtttcctcccctggagatgaggttattattgcagctccattctgggttagttacccagaaatggcaaggttggctgatgcaacacctgtgattcttccaaccttaatatctgataatttccttttggatcccaaactcctcgaatccaaaattactgaaagatcaagactgcttattctttgttctccatctaacccaacgggatctgtctaccccaaagaattacttgaagagatagcccgaattgttgcaaagcaccccaggcttctggttctctctgatgaaatttacgaacacataatttatgcaccagcaactcacacgagctttgcatctttaccaggaatgtgggacagaactcttactgtgaatggattttctaaggcctttgcaatgactggttggcggcttggatatattgctggtccaaaacattttgttgcagcatgtg

SEQ ID NO: 223220 - DNA, 552 bp, Glycine max
aaaatattgtacacataaatctagctccaattcctaatcacctggttaatttcttggcatagagctgtcaagatccaacgttaacatgaagaatgttttagtaaggtcagctgcgcgagctctgcttggcggcggtgggcggagctactaccgccagctctcaacggcggcgatcgtggaacagagacaccagcacgggggcggcgcgtttggaagcttccacttgcggaggatgtccactcttccagaggtaaaggatcagcactcagaggagaaaaagaacgaggtcaacgacaccagtaacgccgtcgttacgagttactggggaatcacaaggcccaatgttcgtagggaggacgggacagagtggccgtggaactgcttcatgccatgggatagttaccactctgatgtgtcaatagacgtgaccaagcatcatacaccaaagtcattaacggacaaggtgcttttagggcttgtcaagtttctaaaggttctctctgatatctacttcaaaggacggtatgggtgccatgccttgattgctgaaac

SEQ ID NO: 223221 - DNA, 490 bp, Glycine max
tctctctctctgtttcgctttcaccgaagaataacttgactttgcggaactccacctgagaaaaagatacccttaattcgcaggcgcgtcttgtgttggacaacaaccacaagatgattaacttcgaaaaaaccgagttgcgactcggcctccctggcaacgactcagcactcaagggaagtgctgccaagagaggcttctctgaaactgcttctgttgatttgaagcttaatctttcttcttgcattaacgactctgcctgggattcaccctcatctgtgtgtacagagaagcccaaagagaacaagactaccactgctgaacctcctgcagctaatgatccagcaaaaccacctgcaaaggcacaagtggtgggttggccaccagctaggtcatttagaaagaacatagttcaaaggaacagcagtgaagaagaggcagagaagagcacgaagaatgctttcgtgaaagagagcatgggtggtgcacc

SEQ ID NO: 223222 - DNA, 329 bp, Glycine max
caaggatgcacttgatgctgagtatttctggacggatccattacgatgtgatcctgagagtgtacccaaatacgagtcatcgcatgagtttcaaaccaagaaaaaacgtgtgcagctacgaccaaacgaataaaacgccaagcgactgaaaatgcaacatcctctgcagcatacacgtttgccccccattcagcaggctgggcaacaacaccctcagatgacggcgaggctatccaccctattgctgtgtcaggtgacagcggttgctgtaagacgtagacatgtttatggaaagcctctaggcccttttgttgggcctggaacatctc

SEQ ID NO: 223223 - DNA, 512 bp, Glycine max
agagaacaaagcacttagtgctattcaataattacgaaaaaccaacagcgagtgtggtttttgtttggtccaggctggaccagggaatgaatagagatgagaggctttcggttgaagagaactgagttaagcggcgaagccaaacgcagaatcggcggcagaaattgccaccggaagcacgtcgaagacgggtgaaccaaacacaaaattccatccaccacttctcttttcaatccccaactcaaatctgtgaagaaaatctcaatttctaaattgtaattcttagcactactgctagtagtagtaaaaaaaaacaattagaaagtagtagagtgtttttttttctttttttcgtttgttttacttttaagatgggtgagaagagcaacgttggcggcgacgcgattaacacgactctgctttacgggaagtacgagctgggccggctgttaagccacggaaccttcgcgaaggtgtaccacgcgcgccacctgaagacgggaaagaagcgt

SEQ ID NO: 223224 - DNA, 334 bp, Glycine max
  unsure (1)..(334): unsure at all n locations
nnaacctgaattacatcatgtaaaacatttccgacgcgacatgctcagctagccggaggtcggccttttgttctagctcccattctctcgcaactcaatacccttttgatttgtgaaaagaaagcaaacgtgcttaatgagggccaacaccctacaattattgacaaggtctcaggccagctccataatgcgctctggggtttatggtattaggagatatgaaggagcctactgccaccccacaatgtaccaaagaccctcttttgagaattactccaaagctgcaatacaggctcccgggatgcccttacgcaaagatactatagattcgctt

SEQ ID NO: 223225 - DNA, 323 bp, Glycine max
ctcccattctctcgcatctcaatacctttttgatttgtgaaaggaaagcaaacatgctggatcaggtgcaacaccctacaatcatggacaaggttgctggccagctccatctccgttctggtggttctggtattaggagttatgaaggagcctactgccaccccacaatgtaccaaagaccctcttttgggaatcactcgaatgctggattgcaaaatcctgggattgcctcatgcaaagcttctatggattttgctggtggtagcacaactgtcttccccgttttttttgctgctccaacaaaaaaagggcctttttcttat

SEQ ID NO: 223226 - DNA, 468 bp, Glycine max
gtttctatgtctcagttccagaaagtgtgaggtggccggtgcttatcttaactatgggagcttctgtggtgggaagccaagcaatcatcagcggaacattttctatcataaaccagagccaatctctgggttgcttcccaagagttaaggttgttcatacatctgacaagatacatgggcaggtctacatccctgaaattaattgggtactcatgatcctctgcattgctgtgaccattggatttagggacacaaaacacatgggaaatgcttcagggttagcagtgatgaccgtgatgctggtgacaacaagccttactttcttattaaatcgagtttcgttggcataaacacccctattatagccctttgcttcctgttgttctttggctttattgagctgctgtatttctcagcttcactgacaaaatttcgtgagggggcctggatacctattctgctggccct

SEQ ID NO: 223227 - DNA, 467 bp, Glycine max
cttcacttcatgacggattcttcttctcttatccctccctcaccggtcacagtcacggagatcgacctggaagagggaccctccgaacaaattcaatgccggatttgtcttgaaactgatggtagaaatttcatagttccttgtaagtgcaaaggtacgtcaaagtacgtacatagagagtgtttagatcattggcgagccgtgaaggaagggtttgcatttgcccattgcactacttgcaaggctccataccatttgcgtgttcatggtgcttatagacaatggcgtactttcaaatttcgggtttttgtaacccgagacattgtgcttatatttctggctgtgcagcttgtcattgcttcacttgcttatttgggttaccaaatagatggttacgagaaagattggcttcgtcttgtttggggctttggtagtgagctgagcttttactatatatgtggagcact

SEQ ID NO: 223228 - DNA, 523 bp, Glycine max
tttctctctcctccttccccctttaatttccttttccttcttaattgtcttaatttgccttgtattggggtaatctagctaaccctttttatttccattagccacgatatcatcaccatcgccaccttctaggtgggatccagggtcaacaatatcacactcagcacagttaccaactccaaatctcaagaaatggatagtaagttcagaaaaaacaaccgcaactcatataccagtgaacaagatcaagacactgatcatgatgtagctcaagaaaacattgccgagtcccctccttcttccactgtgttcaacatcgatggcttagtcccatcccccaccccttcatcaaagagaaggagggcaatacagaaaagggtggtgcaaatcccaatgaaggagacagaagggtgtatgctaaaaggagagagcaacaccccaccctcggattcatgggcttggagaaagtatggacaggaacccatcaagggttccccttatcccagggtactacaggtgtagc

SEQ ID NO: 223229 - DNA, 535 bp, Glycine max
gttgaaactgccggaaaacacagcgtcgccggagcgaagatcggaaaacgcaaccggaccacataattagggtttctcgaagaatgccactctgcaggcaccacattcggagcgcgcacgctctggcggatccggagctgcgccgcaccgccgatagcgacgactccgaagtgctcctagaagccgtcgcaatgtccggactcgtcggctttctccgccagctcggcgacctcgctcagtcagttcgcattctctctctctctaacttctctctctaaaaccgcttccgtcgtcgttgcgggggttacgcaattcgagctgcgctcgtggtttgcttgatcgcgattagtttaacagtgtgttgctgggtttgatgaaataaaaaaatttctcgtttaatgcagtgtttaaagtttaattcttgttcagtttaaagttcatggagtttgttaatggagcgtgagttgattcactagtgtttttttttttttttttgcatttcttttctttttggctgggttggagcttttagttc

SEQ ID NO: 223230 - DNA, 493 bp, Glycine max
  unsure (1)..(493): unsure at all n locations
gtgacaggtttggatttagactgtgggcctttcctagctgtgcacgcgcagaatgcggtcgaaaaagggttgcttagcgaagctgatgtgaacggtgctttggtgaatacactgacggtccaaatgaggttaggcatgtttgatggagagccatcggcccatgcatatggcaaattgggcccaaaagatgtgtgcaaaccggcccatcaagaactcgcccttgaagctgccagacaaggaattgtgcttcttaagaacactggtcctgttttgccactctccccacagcgtcaccataccgtggctgtgattggacccaattctaaagccaccgttacaatgattggaaattatgctggttagtgcatgatatccccaagtctaaataaataaatttggctaaaacagctttaattgtcttgttacctgcctaaatangtgttgcatgtggatacaccaatcccttacaagggagtagaagatatgccaagac

SEQ ID NO: 223231 - DNA, 460 bp, Glycine max
atcagccctcactccttcgcacaccaaacccttccttcctatctgtcactaatctgatggaatccgcagcactgtcgcgcataggcctggcgggcctggcggtgatgggccaaaacctagccctaaacatcgcagaaaaggggttcccgatctccgtgtacaaccgcacggcctccaaagtggaccagaccgtagatcgtgcccgcaacgagggctccctccctctcacgggccaatacacccctcgcgacttcgttctctccctccagcgccccagatccgtcatcatcctcgtcaaggccggctccccagtcgaccacaccatcgccgccctctccgaccacctcgaccccggcgactgcatcatcgacggcggcaacgagtggtacgagaacaccgagcgccgcatgaacctcgtcgccgacaaggcctcccctacctcggcatgggcgtctcccgc

SEQ ID NO: 223232 - DNA, 566 bp, Glycine max
  unsure (1)..(566): unsure at all n locations
attacaaataggaaaaaaatgaaagtaacagttgtgtgttgtgtattggttgtgcgtgggtgcactaccattctcttcggatgcacaactagacccctccttttatagggacacatgtcccaaagtgcattctattgtacgtgaagttgttagaaacgtttcaaaatcagaccctcgaatgcttgctagtctcataaggctccactttcatgactgctttgttcaaggctgtgatgcatcaattttgttgaacaacacagccacaatagaaagtgagcaacaagctttcccaaacaacaactcaataagaggtttggatgttgtgaaccagatcaagactgcggtggaaaatgcttgtnctggtgtagtttcttgtgctgatattcttgcccttgcagctgagatatcttctgctctgggtcatggtcctgattggaaagttccattgggtagaagggacagtttaacagcnaacagaacacttgcaaatcaataatttccagcttcattcttcaaccttactcaacttaaagatgccttttgctgttcagggtctcaatactact

SEQ ID NO: 223233 - DNA, 610 bp, Glycine max
  unsure (1)..(610): unsure at all n locations
nnaattgaaatgcatcctgtaaacttcttngaccatctgctcacaacctaaggtcggaatttttttctagctttatatttagttattgacatcaacaaattcatggaggaagttaatgtggttgaaaccaagaggggaactgtttcagtagcttctgcgtttgctggccataaggaagctatacagcaaagggaccacaaatttttaagaattgctgttgaagaagcgtataaaggggtagactgtgaagatgggggtccctttggtgctattatagtttgtaatgatgaaattgttgctagatgtcacaacatggttctgaggaacacagaccccactgctcatgcagaagtcactgtaataagagagggtttgacaaggcaaatatattatgcatatggtatcaattcaggacatacttcagggtattagaatcaattggagttttaatatctagtctttcgtgaaaagtttacttcacaacaaccacaaattattaatttcttgccttactcttctgagctatgggttttggcccactttataacacttttaaattccttaaaacacaaccgattttacactactctgcatttctcttttttaaaaa

SEQ ID NO: 223234 - DNA, 445 bp, Glycine max
tgctggattaggggatgaagacaatctattcatctgcacaatggattgtcttggggcgaaggagcttgcaaaagattttgttgtttctggaactgcatctgactctctgtatggtgcttgtgaggcgatgattaagcctgacatggaaccagaggaattgtttgagaccatctcccaagcactgctatcatctgtagatcgtgattgtttgagtggctggggaggacatgtctatgttgtcacgccaaccgaagtgaaggaaaggattttgaagggaaggatggattaacttgtaagccacctgggtttttctgtttagtttggagttgaatggcatgacatttacaatcctttgttaaagggtacctttgctattggggctcttaaataaatgtaccccggaaattatttatagaccggctacttggtctatattttaaattat

SEQ ID NO: 223235 - DNA, 474 bp, Glycine max
gacaagccatgggtcttgccaattctttagatgcaggtgcctctgctgaaaattctggggcagatgagaccgaggatttgggaaatgaacattaatcaattgttcatcatactgctagtgttggtgatgtggagggcttgaaaaatgcactatcctctggtgctgacaaggatgtagaatattcagagggaagaactgctttgcattttgcctgtggatatggcgaggtaaaatgtgctcaagttctcctcgaggctggagcaaaagtggatgctttggataagaataagaacactgctctccattatgcagctggatatggcagaaaggaatgtgtggcccttctccttggaaatggggctgcagttactttccagaatttggattggtaaactccaatcggtgttgcgaagctaaactatctaaatgaagacctaaagctacttgagaaagatgcttttgtgtagtgtgtat

SEQ ID NO: 223236 - DNA, 560 bp, Glycine max
gagagaaaagcgtgaatcatgtcggacgaagagcatcacttcgattctcaggcggaggcgggagcgtgcaagacgtatcctcagcaggctggtaccattcgcaagaatggctacatcgtcatcaaatccaggccttgcaaggttgtagaggtctctacgtcaaagacaggcaagcatggacatgcaaagtgtcactttgttgcaattgatatttttaatgggaaaaagcttgaagatattgttccatcatcccacaactgtgatgttccacatgtgaatcgcactgactatcagcttattgatatctctgaagacggctttgtgagtctgttgactgataatggaaataccaaggatgatctgaagcttcctactgatgaggcattgcttgctcagattaaagatggattttctgaaggaaaaaatcttgtggcttctgttatgtctgcaatgggagaagaacagatctgttcactgaaggacatcggtccaaaaattaatatgatgctatggctgtagctatagctgatagcacgctttttcttcttatgttgctaaca

SEQ ID NO: 223237 - DNA, 345 bp, Glycine max
atcagaagacaggccgttccaggggatttgggtttgtttcttttcggaatcagcaggatgctcaaagggctataaatgatttgactggaaaatggcttggaagtagacagattcgttgtaattgggcaaccaaaggggccagtgccagtgatgaaaagcagacttcagattcgagaagtgtcgtggagttgaccaatggatcatctgaagatggccaagaaacaaccaatgatgacactcctgagaagaatcctcaatataccactgtttatgttggcaatcttgctccagaggttacttctgttgatctccatcaacattttcattctcttaatgccggaacta

SEQ ID NO: 223238 - DNA, 477 bp, Glycine max
gcaaaagccatttggatcctctcttctcttctttgatctccgttacccttttcgttttctcaacacagagagagaaagagagagagtctttcggagttcgtttgcgtgtgttgtgtgatcagtcaccgatggcagcaccacctgcgagggcacgtgccgattacgattacctcatcaagcttcttcttattggcgatagcggtgtcggaaagagttgtctgcttttgcgattttctgatggttccttcacaaccagttttatcaccaccattggcattgattttaagataagaaccattgaacttgatggcaaacgcattaagttacaaatctgggatactgctggtcaggagcgatttcgaactattaccacagcttattaccgcggagccatgggcatattgcttgtttatgatgttacggatgaagcatctttcacaatattaggaattggattcgcaacattgaacaacatgc

SEQ ID NO: 223239 - DNA, 491 bp, Glycine max
atatgactctggtgttatttttgattttgcaaattaaattacacaatcacagccgtacatcacacatgagttgggcctcttccaacttaaaagcagaggataacattggcccatgacgcgacacatgcaccacctaataatcataattttacatctttacatacaaaatacaaagactttaaattttaaaaagaagaaaagagataaacagatcatcttaatgaaatgaaaccaaaacccacaaacattggcttgatttttgttgttgttgttgttcccaacttgattaagcatgaaccgtttgattgaatcacttggacttgaagggaatggccctgattacgacctggtggtagagtgctgcaagagctgcaccgatgaatggtcccacccagaagatccagtgttcatcccaaccaaagtccttgttgaagatgatagcagcaccaagactacgagcggggttgataccagttccgtggatgggatgg

SEQ ID NO: 223240 - DNA, 239 bp, Glycine max
ccaatgaacatgacaatggcatgggttattattatacttcacaatcagcatttttttgttcaagactgataataaccattaaattattggcatggcaacaatcggaaaacgagggaagggaatagaagaaaacaatgaacaacccttgccagttagttgcaccaaccaacagggcaccaaccatagtaccaatcaaaaggtaaaaagagagagagaccaattcctactaagaaaagcat

SEQ ID NO: 223241 - DNA, 368 bp, Glycine max
ggtaaaacaaaattttcttccttaagaacaatggattacaaagcagtgttaaacaaaaaaagaaagggtaaatctacatattttcaagaagtctttggcttcgggaaaacttttttctccatgaaattgatgaaacgcttaccatatgtttttggttccaccactgatataatcatagggtcatattgcagtgatttgcaggcatgcttaagtttcttttttacagtgtattcttgcgatatattaattatgcccatgtatagcgaccacaacattaacctcaaaaaggtctacttatgattccttcaccttatccccctgaagtttgcgtgttgcttgagccggaatgtttacttctaattgcaccc

SEQ ID NO: 223242 - DNA, 531 bp, Glycine max
atatgactctggtgttatttttgattttgcaaattaaattacacagtcacagccgtacatcacacatgagttgggcctcttccaacttaaaagcagaggataacattggcccatgacgcgacacatgcaccacctaataatcataattgtacatcttcacatacaaaatacaaagactttaaattttaagaagaagaaaagagataaacagatcatcttaatgaaatgaaaccaaaacccacaaacattggcttgatttttgttgttgctggaggccccaacttgattaagcatgaaccggttgattgaatcacttggacttgaagggaatggccctgattacgacctggtggatgagtgctgcaagagctgcaccgatgaatggtcccacccagaagatccagtgttcataccaaccaaggtccttgatgaagatgatagcagcaccaagactacgagcagggttgataccagttctcgtgatggggatggttgccaagtggaccaagaacacagcgaacccatttggca

SEQ ID NO: 223243 - DNA, 495 bp, Glycine max
aagcaccaagggggcttggtatacataaacataaagcatagtattacaagggactttgtttgacacaaaccttaattaattgatcaattatcttagtacacactttaaaatggtcattattaattataattatatgatgagttaataatatattggggttagggcttgggataaacgaccacttttcctggggctcttgaagtttttaagtaggaaatggttttaataacctgagaaaatggcactggagttttggcatcgagtataggcttcaacttaccactctcaaaggaagggcttaaattctctaagatagatccctttgaggggagcacaaaaaacatatctggtggatgtccaggtggcactattgtcacaactttcccatcttccttaacggccttaaatgctttatcaccttgccctactacattatacactaggatcgtttttttctggagggtcttgaaaagttttccttttgtgtaaccaata

SEQ ID NO: 223244 - DNA, 489 bp, Glycine max
attggccgctggaatttttcacaaaagccattaatttaggctaacaaaatattacagtaattattttcacaaacaaaaaaatattacaatcagattagcaactgtatttttcatttgattctgtgcaccgctgatgtcacggcataaataggttttactctaattcacctcatttgatctcagctacctatgccgccaatagaattggcaagaggaattgaagaggaagtacaaaaaggaaaccagaaacctcgttcctataccattaactgtgccattccattgtctgacaaagatcaatcgccttgtaaacaataaagctgacgaatgtttcctgaagcatataaccagtccttgaagtagacatgaagtgcagatgacaattctcgtttgcgactatcttctaaaggtgcttctcgcaagaggtgccttatctcccctaaattattttgatttttatgctgagataccatatacgcatttggtaac

SEQ ID NO: 223245 - DNA, 406 bp, Glycine max
gttgcttctctctctagccctagggtttcgttctctactaccgttctttcatcagatcgctgcgggttccggcgtcattccgataattcggcggcatgaagctaacagtgaagactttgaaagggagccatttcgaaatcagggttcaaccctccgatactgttatggctgtcaagaagaatattgaagatgtacaaggaaaagataatcacccatgtggacagcaattgatgattcacaatggcaaggttttgaaagatgaaactacattagcagagaataaagtctttgaagagggctttcttgttgttaagcttagtaagagtaaaacatcaggttctgctgcggcttcatctgttcagagctgtaaacaacagtacatctagcacagacgccctatctacaa

SEQ ID NO: 223246 - DNA, 589 bp, Glycine max
atttgatatggttttcccagatggtaaataccctgcaggagggaagtctgacatagaaggcatcttccctccaccttactttgagtggtttcaattcgaaaaggacttcacagtgtactttaacttggaagaatgcatctcatacttatgcgaatatattacagccaatggaccctttgatggcttccttggcttctcacagggtgcaactctttcagcacttttgataggttaccaggcacagggaaagttactaaaggagcatccaccaataaaatttctcatatcaatatcaggatgcaaattcagaaatcccagcatatgcgatgttgcctacaaagacaccatcaaagctaaatctgttcatttcattggggaaaaagattggctgaaactttcttctgaggatctcacatctgcatttgacaaacccctgataataaggcatccccaaggtcacaccgtaccacgattagatgaagtggctaccagtcaattgagaaaatggattaccgaagagttctatgtcaaccaaaggttggcatttagtttgtgagcatgaaacagaccatgaagaaaagaagtcaga

SEQ ID NO: 223247 - DNA, 527 bp, Glycine max
gacgcggggagaaaagtaatgcatctataataaattagaaagatcagttaatatcattgcctaatcaaaattttttatctcaaaataagtccaaaaccccgtactacagactacagtattttaaagcaaaggtttacatctacttgctgtatagatgaactgcggtgaagatgaagaagcctgccatcattgaaaatgctgctccataatagggataagctgctggtataaatctttcatattcattgtgtctaaagggacgaacaggaatctgctttgataaagataagcttgtatatccaagtttttcgcactcaactttgaattggaaaaccccatagacatctggaaccttaaatgatgtgaaataacggcccttgccgtcagttgataaagtcttcaagacataggggctcatcatgtaaaattgcacttgaacatcatcagctacataaggttcccatgttgtcccagaccactcataaacttcaacagagtattccaaaatatcattgatcctatagatg

SEQ ID NO: 223248 - DNA, 482 bp, Glycine max
tttgttttttttttttttttttttttgtttttgtttttttttttttttttttctttgttttgagcggtgcttttttttttttttttttgcaaacaagtaggccccgggataataaaaagggggggcactgcttccccccaaactcaagattgtccaacttcgaggcgttgttaaaaaaaagggcgggggcgataacaaaacgcggcatccggctactttggggggggcttggccttgccccacccggccttagaggcttaaaaaatagactcgctcattggcggatgttcatggaaaaaacggggggagacccctccccccgcattttacttttccgccattgaaaccccctgaataaccctctcttgaatagaaagtcataatggggcattcccaacccataaaatgtggggttttggggcccttgcccccacaaccctaaaggggggcccatagccataaaaaagggggggggcgggggc

SEQ ID NO: 223249 - DNA, 478 bp, Glycine max
aaagttcggaatatcacaaaaagatttggcctaaaaatagaacaacaataataatctcaagccccaagctaaattatcagtgtcacacggaaccctcatgttttgtaaaaaaaaaaatgacccagtagggaacatagagagccaaaactttgattacagtaaatctcatttcacgttgacatgcaccatgtcagctataacttttatttccaatcaacaactacttccatgggaataaaatgtagaaactaaaacctcgtgccaaaaaattttggaaagaatacaacatccatttgttactctcacatggctgacagggtgttagtagaagatgttgacattgcagctagaacttcagtaaccgacgccatgacacttagagcagctttcaaaacctcctgggggcattctggcttcacaatggttcgaacctgttcaaggtactcctgaagttttttaatgcggcccatgtagtcct

SEQ ID NO: 223250 - DNA, 525 bp, Glycine max
aggatggcctttaacgaacatatcctatgttttcttaagtggaagaaatggttttaagctagttggatgaatggcacaagatcaaattgcctgggaaaaaatgtacaaacaagtctatctataactgcaattaatcctcttaactccatacaaaattgccaaaatgcaatatgacctttaaaaataaggaaccttggatctgctcagtcactgcctttcaagaaactagctaggtgttcatcacttgcgtatggaaagatcaatgtgaagatatgccacagaagcctcacaaaacaagaaaaatgcacattccagcatcaatgggttaccttgcatgaatatggggttaaaactgtagtacacctgaaaaggagctttttgctcacgaactgcatttcttttttgtagaaccaccacagttctggcgacaacatcaagatatgaatacttgacctttatatgttgcttcacttcaaaaggaatctcaactgggggaactttggatccctctggcaggacaacttt

SEQ ID NO: 223251 - DNA, 490 bp, Glycine max
atccctaccaaggctgactcatgttattttgacaacatttacattggtcatatgagacacggttatacataggtctcctttccaaaacaaggtgattctcagagttcataagctggaaatttagacaaggaaggatcactcatttccaaaaagaggtgagccatgccccctagcccttcaaacattgaatatggtttatcacccccatgcattttccctcgagatatcaacttatgagctctggcaagcaaaaagcaagcaaaagctttggccctgtataagtactttacatacccgggaagttggtccagtgacagaaagacatatgcattcccactaataccatggcatatcccaacttttttaagcggaccacgatgccaaaccacttctgctgcttctatagcgggatccaggaattctttatatttaaaaaccttatgtgttttgacaagggtgagtgccattccaggagctccatgacaccaat

SEQ ID NO: 223252 - DNA, 603 bp, Glycine max
ggccagtggagtggggtatggtcaaggagtagtttgggagattgtgttgacgttttctttgttgttcactgtgtatgcgaccatggtggatcccaagaagggagcacttgctgggcttgggccaacgctggttgggtttgtggttggggccaacatcctcgcaggtggggcttactctgctgcttctatgaacccagcaaggtcttttgggcctgccttggtcgctggaaactggaccgatcattgggtttactgggttgggcctctcattggtggtggccttgctggttacatctatgagactttcttcattgaccgatctcatgttccacttcctcgtgatgaagaaaactaaacaataggattgacaacttgcactttcatcccttcttaaaaaatgctgcattattgtagttaatttaatctaataataatctttttttttgcgtgttatgtatgtttgaaaaggtctatttatgtataatatatcgttaaatgatcttccccaaaataagatcaacgatttagttgagatctggcccctgtgtagactttgtggacaggaatgaatgaataaatatatatttcaatggcttctgcttt

SEQ ID NO: 223253 - DNA, 439 bp, Glycine max
ggaagcaaaaccccttgaaaaatatttttattcattcattcctggccacaaaggttacacagggggccagatctcaacaaaatcggtgatcttattttggggaagatcatttaacgagtttttatacataaaaagaccttttaaaacctaccttacccgcaaaaaaaaagattttttttagattaaattaacccccatattgccgctttttttaaaaagggatgaaagggcaagttgacaaccctattggttaggtttcttcatcacgaggaaggggaacatgagatcggtcaatgaaaaaaggctcattgatgttaccagcagggcccccaccaaggggaggcccaacccagtaaacccaatggtcgggccattttccagggaccaaggggggcccaaaagaccttggtgggtttataaaagcaggaaaagaagcccc

SEQ ID NO: 223254 - DNA, 441 bp, Glycine max
cttacttgacaacgggttaaaaatccatttttaacaaacaaattgaacattgttaatttccccacaagttaaacatggggggggcaaacttgtttgcccaactccaataatttatttaactcagccactcaagggatcaaaagttgctttgtttttgccacaatgaaggggctagaatgggtaattgtttgttctgacctcaaaccttcaaaagctgctttttgttggcaaaagcaatggcaatccaatcgggctgggcgggggaccactgcaggtggttaatttcacagccagcagagtacatgccgacgggatcaatcccagtgggagaagcaagcgtgggcaattcccaaataagagcctgagtttcatccccagcagaacaaatatgcgtggagctttgaggagcccaagcaatggcgttcacactcccacggggcc

SEQ ID NO: 223255 - DNA, 516 bp, Glycine max
atccgatgtcgaaaagcacttgaaacataaatgccaaatagggaacaaatactacccaaaaaatactcatccaacaaaactgtagaacgatgaaaaattctgtcaaacctatcgaaagacaatatattaggtgcgatcagaaattcactgaatttaagaacaactcaaaagacacggtacgatttccccatggtactcttcagatacaggcagcgaacgttctgccaattctttttcaacaaagagacaaggaagttaacactcagttgtacattttggaagatttgcttttcctccatgctaacattccccacggctactcccatgcaaagcaccttcttaagctggaacttcaccatggccttggtctcattaacctttgactcgagagattcttggtgagtcacaagcgtagggaacttccctgccttgttgagaccaggtcccaagagacgaggaatctgcttgatgactgcttcagaggccaaaaaggcatgatattttatggctagtttt

SEQ ID NO: 223256 - DNA, 340 bp, Glycine max
  unsure (1)..(340): unsure at all n locations
tgcattactgactgaatccgctnncgaanccnnngttataattncaggaactacctgctactattccgcggccgtccttttttttttatattactacttttttattaaagctcttgcaacttaaattccaggtagggtaccattcctcccacataatttctcctctttctcaactttaaaacaaaatgataacattggtcccatctctcgacacatgctccacctaattttaataatcttacatctttacatacaaaatccaaatactctcaattctaaaatcaagaaatgacacttaaaaatcatcttaatgaaatgaaaccaaaacccacaaacattt

SEQ ID NO: 223257 - DNA, 499 bp, Glycine max
aaagaaacaccaatcatcgggcatttagttggattgaacattgagagctttaaaataatagcagtttcatattgtcttccctacaaacaacaggttacataaaaacggaaacaaacagaaccagttttatagaacagtaatggaaactagatctagccggaacagaaccatcccctcaaaagagacaatcaaccggcaacaggaagttgcggcatgttatacatcttcaagccaccgcaatacattaccaagttcaaaatcacatatcatgttggccatactcctcctcctcctcttcctcctcatactcatcctcatcagcagtggcatcctggtactgttgatactctgacacaagatcgttcatgttgctctcagcctcagtgaactccatcttgtccatgccttccccggtttaccaatgcaagaaggccttcctcctgaacatagcaaagaattgctcacttactctacggaacatctcctgaatggaggtaga

SEQ ID NO: 223258 - DNA, 357 bp, Glycine max
ggacttaaaaaagcccactgcatattcatcaaagcattattaaagcccactggattctaacagcacacctccctaaaaaggggagattccaggttttgcccaacatacaccacacaccctaatttattttttatacaatcttttggggcccaagatgcacatgcctgggctaattaaacaacaacgtttggctgataggccgtgtccataaataaattggggacccataaaatggccttgcttccaaggaaatggcaaaccggggtagttccaggatcaactcccatgagttcatgaagcctgtgatgattcattccagaagtttctgaggggcgaacaacaagtggctgggttttg

SEQ ID NO: 223259 - DNA, 565 bp, Glycine max
  unsure (1)..(565): unsure at all n locations
tgcttccaatgatgagcttgctgagctttactggagtgctggtttgacggacaaagctgcaggtcttgtgcagaaacttattgacaggagcaaacatattctggctgtcaagtttgtttttgagttcaatcttgctcataagattccaccagttcccattttggaagctcatgtgaatgagtctcagaaacttgttaaaagactttctgaagaagggaagtcacttagtgagatcacggcgagagaaatccatgcactgaaatcggcgattaaggttattgagagtcataatcttcaatctgaatatccacctgaaagccttcaacagcgtatagagcaattgatgaagcataaggcaaatgtaaaatatgctgcatcggctttttctgcaaagcctcctccacatcagcagcaacaaagtggaatcaagcgtcctcgaatgtccgagccagttggttctgcttctgttctgaacagtgccagtggtgccagctcaaccgttcactaccaacaacctcattttcagtcatanggtttgtgcggaacatctaattcctacatgaac

SEQ ID NO: 223260 - DNA, 480 bp, Glycine max
gaaattcagtagatcaatctaggagggaagaagtggctgtctgtcatcatgtccaacacgatgagtggcctcctcatttgctccagctgccatatttataaaggattcctttgacctttgtttgtcatgaacatcatgcagttccagcacaccattttgttcatctttaacttttgaaagtggtgaaaagaactggtgcattgagatgaatacaatagagatgccaataacgaagttcattgttaaagtatgtccaaatagtacagcagatgctataccagtgaagattgttgctactgttgatgagtacttcttcaaaattgtatctgcatatttgaagaagaaagaggataaaatcccttgggcagcattgtttgctatcaaaagcattgtggcttttgaatgaccttgtaggatatcaaagctgctaggccctttgacaacaacagtcccaagtatcccaagaaaattgaatatagc

SEQ ID NO: 223261 - DNA, 610 bp, Glycine max
  unsure (1)..(610): unsure at all n locations
gttgttaccatttgctcccagtacagagcttaaccgagcttcacaaagatgaatcgggaaaagtggatgaagatggccggttcggttagaactgggggaaagggtaccatgagaagaaagaagaaggctgtccacaagacaacaaccacagatgacaaaaggcttcagagcaccctgaagagaataggggtgaatgccatcccggctattgaggaggtcaatatctttaaggatgacgtagttatccagtttctaaatcccaaagttcaagcatccattgctgctaatacttgggttgtcagtggttctccacaaacaaagaagttgcaagatatactccctagcattatccaccaattaggaccagataacttagaaaacctgaagaagctagccgagcaattccagaagcaggctcctgaaggagccgccggttcaaccacagctcaagaggagaatgatgatgacgatgtcccggagcttgttccaggccaggattttgagacagctgctgaggagaccaaggctgcttcttaagtgttattggtactgtgccatcgncatatatctcctgtggttttatttttttcccttgattttccttttttaa

SEQ ID NO: 223262 - DNA, 533 bp, Glycine max
gcgggcaaaaactgaatacctagttagatgaaagaaagcatatttaatagagtatttgaactgtttagagtatatgaggggagaaccgaacacctgaaatacttttaaaaaaaaggaaaatcaagggaaaaaaaataaaaacacaggagatatatggcgatggcacagtaacaataacacttaagaagcagccttggtctcctcagcagctgtctcaaaatcctggcctggaacaagctccgggacatcgacatcatcattctccttttgagctgtggttgaaccggcggctccttcaggagcctgcttctggaattgctcggctagcttcttcaggttttctaagttatctggtcctaattggtggataatgctagggagtatattttgcaacttctttgtttgtggagaaccactgacaacccaagtattagcagcaatggatgcttgaactttgggatttagaaactggataactacgtcattcttaaagatattgacctcctcaatagccgggatggcattcaccccta

SEQ ID NO: 223263 - DNA, 395 bp, Glycine max
cccgcgttctggcaacttttctcttttctgcctgctgccacattggttattctgcgacacgcgacagtgactcaaatcaccattcattcttttttcacctttttgcaacaacgctatggcacgaaaatcccttcctatactaaagcacctacttctctcgcgggggatcccatcccgattcgtgacgtacatgcaccgcccgggcgacgagtcttcttaggctgtagacgctgatccctggcgacagtatcagtccgatggagacggtcaccgcgtagcaggtcatggaggccatgcatgcacccgtatacttggagaagttcgaggtccacagccacatgaaggccgtgccgactgaagtcctcgattcgatacggtagaacatggtctgtctc

SEQ ID NO: 223264 - DNA, 471 bp, Glycine max
gtaggttctatcaaacaattaatgccctttttaatcagaactattacagaattgctgggttgtaattactccaaatcgcagttttaaatatgatggaaacaattataactttctgtgttccataaacattattcgggacgaaaaatgactattttgcatttgatgggtgcaaaacaatgttggcagaatcgtttactaaggaacaagactgacttcgtttgggaaataagaatcagaaattactcaatctaaagcatctatcactgtattcaccacctctggggaggtgcttgtccctacaagatcctttgttcggcattagccctccaggatgactgtttccacagcagatttcaaacggccagccaatgcatgagactggagatgcctaagcattatcattcgcgagagaggaagcgccactggattggttgtgttttgtaaccttattttatcactacgcgacatttc

SEQ ID NO: 223265 - DNA, 501 bp, Glycine max
aaagaaatgtattctatacttctcttcatttaaaaataaataaatagagataattacaaaataaatgagtcaaagaaatcaataaccctccaaagtaatcataatgatttattacaaacagtaacgctaacgcatatttctcaaagcctaaacacgtgctacgaatggataacaaagaagagaaaagctcctaaaaactccggcaaatcccagttaaatccaaatcaaggcttcaccagaaacaatccatctccgtggtccattcagtatcctgtggggaattcgcagttaccatacttagggggctgagtgacgacataagcagtgccaccaaaatcgcacgtgccggatgcacgtgccttcttctgatagtaactgttgaaggcgtaggaagcatgtgcctccaaggtgttaggattgtaacacgtggcacctggttgaattggagtgcaatcaagcccaccctcttcgcaagcgtagttaagagcgttctgcactttt

SEQ ID NO: 223266 - DNA, 406 bp, Glycine max
caagaaaggggtgaagccaaattaaaatttttttagaacacacccaaaaatttttaaaaagaaacttccgggaatttagcccgaccaaaatcataaattaaggaaattttaacccatcgataattaaatttggggggaattatgatgtagcagtagcacacgtctcccctttaaaatcaaaataccgggtcaaagtttcaagtaacttaggacagaacgtaaaaaaaaactccataaaatgagtggatggctggggccattaagaaacttagcacttgccctcttttaaggcatttgcaaagtccaggattgttggatcagcgccgccgaccttgtagtaggcaaagaccaagcaggcgtttttacccttgcttttaccaagaaaaaattggaaatttttaatttt

SEQ ID NO: 223267 - DNA, 496 bp, Glycine max
caccaacgtatatatctattaaaagaggtgaatttgaaaatggaagaaaagaacaaacagatttggaaaaagagaattttaatacaaatccaacatgattcagaatacaataaactatagctagctgggggcacttgatacgaataatgggcctatagcttctttattagggaccttcattcacataatttcccagggtatataaaactcttcctaattcatttatattgagctaaccacaccctcctttgattcggatgccacaatacctatatcaagttcagcagatttcttgttaacaaagttacattgttttctgatttctcctttcttcccagttagcacaccaatgtttcccattttaatcatcgaagcggaaaagctcttaaagaaagctatttggtcactactgaacttgttgacaatgctgatggtatcagcaccaggtgttgagaacaactcttgatcactttggagcaaacccttcttaacctta

SEQ ID NO: 223268 - DNA, 489 bp, Glycine max
gaggactaaagacaagatatgtcatttaacaagacagaataattcctacaggtaaagtgcataacaattgagtataccatctaataatgaaaataacgcaaataacataatgcttaaagcaacgttcatatcagaagggaaaaatagtttgaatcccatccaacaaaaatcatgcgattaaaatccaattaaaaaagcataaagtaaaataagtttttaaaacaggtatctggaggaaagcaactacatttagtccacttcctcaatcttggggccagcaccacttccaccagaaggaggagcagcatactcatcctctgctgcaccagcaccacccacgtttggaccagcaccaccttggtacatcttggcaatgattggattgcagatgctttccaattccttcattttgtcctcaaactcatctgcttctgcaagctggttgctgtctaaccactggattgcttgctcaattgcatcctcaatctt

SEQ ID NO: 223269 - DNA, 446 bp, Glycine max
gggggcacaaaacataactttatccgacgaaattcaatgtaccattaactggggcaaatcaataaacaaacaatttattggattaaacactaaaaacacttttccatcaaaactcaattaaaagcagaaaaaactctaattaaacagtcccaatcccatattatcattggactcttcctccacctttttttcctttttctcaacagctggggcagcattaactgcggtagcaccacctggaggggcagttggaacaggaccaccaccaccttcaacgaatactggaccaccactattacctggaacacaacggaggtaggagacacgggagagaaagaggactgaacttcaccgggggaatcaacggggagagcgggttgcaccagctttcgttggagatcgaagggggaatcggcggaggcctctatgtccccggaatggtgctt

SEQ ID NO: 223270 - DNA, 345 bp, Glycine max
atctattgttttggggtcttgccttaccaaatcgtttttcttttattatttttttttttagaacacaaaaaaaaagagccccgaaatccccatccccgggaaattatacccttttgcggccaaagaaaccccggctccaaaaaaaaaattttccgcacaccggcggggcatacaccagccccccacagaaactgctgctgcgaggaccaagaaggggatgttcatgctccgtcttccccggcgcccccctcttctttttcccaccccgggggggggcatcaccaaggaccttgtccgggaccctattctcaagcccccccgtgggctccccatgggggtgaaaaa

SEQ ID NO: 223271 - DNA, 470 bp, Glycine max
ctcgagccgcttattcttctgctttcactctctgactcaatcgttctaatccacaaaagatgaccttaaattacaacattgccctcgccttctctgcggtgctcacgctgctcctctttcccctactgaccgtaggggagctcgtggaggagcagccactagtcctcaagtaccacaacggccagctcctgaagggccgcatcaccgtcaatctcatctggtacggcaccttcaccccgatccaacggtccataatcgtggacttcataaactcgttaagcagcgcgccaaacgcgcctctcccctcgaccgccacgtggtggaaaaccacggagaagtacaaggtgggaggaggatcccctgcgctcgtcgtagggatgcagttcctacacccggcttacacgctagggaaaaatcttaaaggaagagatctcctcgcactcgcgtcaaagttcaacgagattaactcg

SEQ ID NO: 223272 - DNA, 473 bp, Glycine max
aaaataaaaatatatcacattcatgatatccctttttttaaaatcttattcctcgtttttcataatttattatttatacaacatcccagttcttcttcctctatagtctttagcaaaagagaatttacacgtcttacacgtcacactaaacgacaaaagcaggcttacagaatatagaaaatttagaaacactccgaagtccgaaccaaatccatcaccacctctattatccattccctgcttccgttcccatcgaccaatatctacaaccattacacaacctcgccacgtggcagtcttcagacgagggtcttgcatgtcgaagtctgcgggtcccacatcgctggcacgagatacctccttccattcgcaccatgcgcattgtaactcgccccggttgccttatccacgagaacccgacccggataacccgggtacgacccacttccgaaaacaccagtgcaagccgaaac

SEQ ID NO: 223273 - DNA, 559 bp, Glycine max
ctcgagccgaatcggctcgaggcaattcacactggtctttgcttctcgttactcattgggtcacctaactttctattcttctcagtctcagatcagaaccttggccatggcagcgttccagaagatcaacgtcgccaaccccatcgtcgagatggacggagatgaaatgactagggttatctggaagtcaatcaaggacaagctcattttgcccttcttggagttggacatcaagtattatgacttaggccttccttaccgtgatgagaccgatgataaagttacaattgaaagtgcggaagcaactctcaagtataatgtggcaattaagtgcgcaactattactccagatgaagctcgtgtgaaggagtttggtctgaagtcaatgtggaagagtccaaatgggacaattaggaacattttgaatggaactgtcttcagagaaccaattctttgcaaaaacattccccgccttgttcctggttggacaaaggcaatatgcatcggaagacatgcgtttggtgatcaatatcgggcgactgacacagtaataaaggag

SEQ ID NO: 223274 - DNA, 559 bp, Glycine max
aattcagcagaaaatccattataaattgggagttggaagggatcaataagaaattacaaaggacaaatcagttcacaaccaatattatggagaagaaacagccaacccttgcattcccaaccaacaaacaaatgaaggaaacggggctaaggaccaatgctttttttccctttcttatttcttctgaatagaagagagtagcagacgcacgcacgctccttgttgctaacgtcttttttccgcttgtcttgaatcaagtctatgcagaaagcctcgcactaagctcggctgccacggcatcgatgaattcctctgtgttcaaataatgctcccttgacagcttggatccatgaagaataagtgccaaatccttggtcatcttcccagcctctactactccaatgcaagctgcctctagcttttcagtgaaatccaagagtttagcattgtcatccagttttgccctgtgggctagccctcttgtccaggcaaagatggatgctatgctatttgtgctggtttcgcctcccttctgatgaaccctaaaatggcgggtaac

SEQ ID NO: 223275 - DNA, 510 bp, Glycine max
gtcgctactaagagttgctgcttcttcagccactccgcacctcgcagcctctgtgccctcaacggccatggctgaaatcgaaactaccgttccagatcccacccaaatcgacgtcaaactcttcaatcgctggagcttcgaggatgttgaggttaatgatatgtctctggctgattacattggagtgtccccatcaaagcatgctacatatgttcctcacactgctggtaggtactcagtgaagaggttcaggaaagcgcagtgccccattgttgagaggctcaccaactctctgatgatgcacgggaggaacaatggaaagaagctcatggctgtcaggattatcaagcatgccatggagatcatccacttgctcactgacctgaacccaattcaagtcattggtgatgccgtcatcaatagtggtccccgtgaagatgcaactagaattggttctgctggagtggtgaggagacaggctgttgatatctcaccccttcgacgtgttaa

SEQ ID NO: 223276 - DNA, 528 bp, Glycine max
aaaatccttacgcaaactaaattaactaaataaatcgttcatgtaaaatccttacgcgaactaaaaattaactaaattcatcaaaagtaatacacaatattcaaaatttaaataaatgaagtacaaaggtcgaaatctttctggccacaatactggttgttgggttggcttaacgattagccttggcaactctctcaatttcatcctttttcttgatagcataactattggatgaacctttggctgcattaataagttcatcggccaagcattcagcaattgtcttgatgtttctgaaagcagcttcccgagcacctgttgttagaagatatatagcctgattaacacgtcgaaggggtgagatatcaacagcctgtcttctcaccactccagcagaaccaattctagttgcatcttcacggggaccactattgatgacggcatcaacaatgacctgaattgggttcaggtcagtgagcaagtggatgatctccatggcatgcttgataattctgacagccatgagct

SEQ ID NO: 223277 - DNA, 492 bp, Glycine max
ggctacagctcacccaacatatgggcggtggggatgaagatgaagaaagcacgtcaaaatgtcaaattacacgaagcaaattctacatttacggcaaaaaaaaaaaaggccacagataaaaaagcaaattcttttcttttttaatttcctttttttctctcttttggaactcgttgtctaccttatggatccacagcttatggatgaaaccttgcaaacgccagctgatggggtgagtggaacatttttgtagcatgccaccagttcctcatttgtgtgcaaatcgacttgcaatgtttcccaaactttcttctttgggtttaagagtccatcaggattaccttcatacccagggaatggaattctttctcctggttgagcagaactgggaggctcaaccaactcaaccttggtgtgatcaccatcggaagcagcaagaaccattgcttgagatttaatgccccccatggttactggctttagggggcaaag

SEQ ID NO: 223278 - DNA, 533 bp, Glycine max
aagaaaaataatattcatcaatgattagaacgctgtacactgggaagaagaaacacatgagcccaaccatttaaaatttctttcccctttgcaacatttctcccagggaacaaacagaccaacaccaaccaagcataaggccccagctatcatcaatttccagctggataaataaataaacccaacatttttgtttgcaacaaaagttaaatttattaatagtagtaataatagtaacatattaaatactataatcactagccaatcaagacacacccctcttcgagtgagtgatgaaccttgcaatttgcatcaaccttttccaagtttcaaccccaattaaccgaaattggggatccaaccaggtgcttcccatcggaccattctacccttccaaaagcgttttctgtatgctgtggcgaacccgatgacgaaaacgtgacggtgaacgttttcttctcgttctccttgaaactcaacacttgcggttcaaccgagattttaacggacgcaatgtctgacgtcacggaagc

SEQ ID NO: 223279 - DNA, 561 bp, Glycine max
tttgttttttttttttttgttgaaacaagaaatgaaaatagttaagcatacttaaataatacacaagaaatctttatctgtgctataggctgataaattaacactcacaaagcactacaacaacaacaacaacaacaaaggccttattctacaagttgttggctacattgatcacaaagcactaaaaacagtccaatttacacatcaagggtgaatttattccacttacatcattgaacatcttggctagtgattagggcccaaaagtgagagaagaaaagtcctggagtgactggatgtttctgagtgtacttcatcgttcagaggattcttgtgtttctttaaatatgcagctttgatatactgcatatcaacctcagtccttgacacaacgaccctaatgagagtggaatcattagtccccaagcctttcatcgacttatgcaacacctttgcaaaatactctcctggattaacagcacattggattattgtcaaaagtgcatgtcaaaggccccagatgtatattctttactgactcttcagggaatgaccatacat

SEQ ID NO: 223280 - DNA, 579 bp, Glycine max
gctagcaataagtttggtaggtgatatattgatattaataagccactctcattaaaggcaaacaaggcccaaggagtgatacaccaaaatacataaaaacataatatcatagagtgccaccaaaaggggctagtagcatttggtagctagtgcattaaattggcacaaggaaggaagcaataaaaatgtaggaaagcgacaattgaagttgaacaagttgaagctcaagggcacttgggtcctccttccttggtcttccagttgttgtagcaagggcacacagctttattaccataataccccgggggcacacacaggcatttcctgcagcacttctgacagaaaaacatgcagggcttgtggtattgggtctggctacatctcctcgagcattgtgatgggcattggtaactcttgacacttccacttccatatttgctcttgttgtcatacaagtggcctccttgttcattagcagccattaccactgtttgaagtatggaaatggcaaagagtgccaagatcatagcagcaaagaacttagccattgttgcaaacacacactatgatcttaaaacc

SEQ ID NO: 223281 - DNA, 499 bp, Glycine max
cacgccatcgagcatcaacgcaaatcgatggcggcgatgggttccctcgcaaaactcatcatcggtcactgatgaaaccaaaacctaaaccctactccttcctccctctcaaccgatttcttcgcgcgctacaatctcgtcccctcatggcccaaaccccaacatctctcgatgcagagcacccctccgacaacgaccagcacatgggctttcgggcgcggagcctgagcggagagtctcgggcggagcaagcgtgggcccattggaccaagctgggccggcccaggttcatagtggccccgatggtcgacaactcggagctgcctttccggatgctgtgccgcaagtacggtgcccagggcgcgaacacgcccatgctccattcccgcattttcaccgagaccgaaaagtttaggaccgaaaagttcaccacttgcaaggaggatcgaccgttgtttgttcaattctgtgccaacgatccggatgtgttgttggaagc

SEQ ID NO: 223282 - DNA, 433 bp, Glycine max
agagagaaggggagatatatatattattcaacaaggataagaacaacacaatcattcctcttattatgcaaacaagtaaacaaggggctaatttgcatttaaaaacctgaatctaaatttaacacaggatgtatcatctccaagtcattgtaaaattcttggacaaaaatgaaaacaagaagtagcaaccggctccttttaaatgtgaatgggcttgtcataagtggccattgcggcttctttcacagcctcgctcattgttggatgtgcatggcacacacgtgcaatgtcctcactagatgcatcatactgtagtgctattgctgcttcatgaataagctctcctgcattgggtgccataatgtgcactcccaatatcttgtctgtctccttttcagccaatatcttcaccagtccttcagcattgtcaatt

SEQ ID NO: 223283 - DNA, 532 bp, Glycine max
gacagcacttactagtccaacagcgacggctgaacctctttgttctctctgtctaagaggaagaagaagaagaagaagaagaagaatcaaatatccttgagccagacatgtacaggaacgctgcttcacgtcttagggtcatcagtgcccgttcgtgcagcagcagcaggatacctgccagtgccagatttgcaagttccgttgccacacaacaatcctcttctggtttgggtggtttatttggatggctcactggagaccgatccagttctttaccatctctggatttcccgcttgcgggcgttacacttcccccttcattgcctgattttgttgcgcccggaaaaactattattactacactcctaaatggactcaaagtggcctgtgaaacatcaccgactcccactgcgtcggttggcttatatgtagattgtggttcaatatacgagactccgataagttgtggggctacacatctgctagaacgaatggttttcaagaccactagaaaccgaagtcactttcgggt

SEQ ID NO: 223284 - DNA, 535 bp, Glycine max
attcaaaaccagttcctgatccattgattatgatttggtttttcaaagggattcaatccaaaaaatagtctgtgagaactatcagatcaatgtttatgtaccccgaaataatgagatgtgcaaatgtggctagtgcacaatcactaatttattgactacaacaaggatagttagggaagtttaacttaattttacacctttcagccgtacaagacttgattgtatacaaagaagactcaatatgatggatggaaacaatctcattaggaacggaacttgaggctcactgattcatagcttggaacatagagaacatctccatatgatgccattgtgagaggggaagaaatgagtttttgcgaaattgaagtgatatcctttgaggttacttcatccactgccttcaagaaatcctccacaggtttcctctcaccatatgtcaaaatttgtcttcctatatcttctgaaacaaccattcttgattccaaattcatcaaaattgcagatttggtagcctgtttggctcgattaagct

SEQ ID NO: 223285 - DNA, 393 bp, Glycine max
cctcggggaattccaattccacattttcaagaaataaggaggcaaaaatgttcatatatgaattggaatgatttggtttcttattaggcctatcctgaagccaaaggaaatgagatcggaattcctcggggaattccaattccacattttcaagaaataaggaggcaaaaatgttcatatatgaattggaattatttgttttcttattaggcctatcctgaagccaaaggaaatgagatcggaattcctcggggaattccaattccacattttcaagaaataaggaggcaaaaatgttcatatatgaattggaattatttgttttcttattaggcctatcctgaagccataggaaatgagatcggaattcctcgggggtaccgagctcgaatt

SEQ ID NO: 223286 - DNA, 485 bp, Glycine max
catatccatttgttattatcgttattatcccacaggtatccaagaaaagtcttggcggcatccaagcttggaaaatacgtcggttcaaggaaaatctgagtcaacgagtcagccgagtcgcaactcaacccaactcggttaccgttagcctctgaacttcccatcaccaccgccaacacctgcttatacgcgtagaagaatctcttcatcgccgcctcaatcgcctgcatcgcctgcaacaagtgaaccttctcgaactcgctcttcgaaacgtagagcttcatcgccgcctcttgaatcctcggtcctcccttcggatccacctccacctccaatatctccggcaccttgtgcctcagatctctgcacatcttcgtcagttccactaactcattcgatctgaagcagaacgatgccgtttcgccgctcgaggatttcaccgagagttgattctttagcctcaagaaatcgtccggatccatcat

SEQ ID NO: 223287 - DNA, 437 bp, Glycine max
ggggggaaatatgtcaagatactaaaatgagaaaaggtctttttaaccaaaggcaacagagaaatcattttttaagtccaatgattcatgggaaacaacatacattagcaatatcattcataataaagagtttttttcaagaggaagcaaacaagggcttggggtataacacatacccaactgagagtcttagggtattaacacaacagatcctgacgtttttcgattctccagggcttcgggggcttttgcagcctcagacaatgggtaagtttgattaacacgggccttcaacacaccagaagcaacgttgggaaacaccttttcagcagcctccaacagcttatcccgagggacaacatattgcattagactaggcctagtcaagaaaagggattttgcagccagggaagataatggaaccggatcaggggaac

SEQ ID NO: 223288 - DNA, 543 bp, Glycine max
atcactaacacggtcctagataattgattagtttactcaaatcccaaaacatagttcaccgaacaggaaacaaatactcggtgtcgccatgatctgtaaatgtaattaacagtaaatatctcaataaggcaaaaggatttacagataactttggtgtagaaaataaaacttggcgctccaaaaaggaaatggtaatggaagttctcgaatgcagaaatatgagcagcaaatataggaaataaagagatcctgacaacaactggcaatataaaaaagagcaagtcattatcagaagtcatcatcatcttcctctgcgatatgcttagccaattcttgctcttgttgatgcctctctctcctcttctcagcattttccttttccttgtctttgtttggtggaaaacgcagtgctcgaacagcctcattgtacatgttaagacaaaaggcaatccgagaattaagggccaactgaggctcatttgagagtaaatatctccagttcctttggataccatccacccattggcatgatccaatgaagca

SEQ ID NO: 223289 - DNA, 254 bp, Glycine max
gcgcgactccatctattattcatccacactccctcccttccagatccgatcctcgatggcggcggcgtcgcggaggctccgggacctgcagtccgaggccgggaacaagatctgcgttgactgctcccagaagaacccgcagtgggcctccgtctactacggcgtgttaatgtgcctcgaatgctccggcaagcaccgtggcctcggcgtccacaatttcttcgtccgatcggtcaccatggactcctggcccg

SEQ ID NO: 223290 - DNA, 212 bp, Glycine max
gcatacaatcaaacaatgggtctaatagcatttaaaaacctggatcgacatttaacacaggatgaatcatctcccaagaaaaaaaaaaaatgtgggacaaaaattaacaacatcaaaaagtttccggcttccttcaaaaggtgaacgggctggccaaaagaggccattgctgattatttcacagccccactcattgatggttgtgcatggac

SEQ ID NO: 223291 - DNA, 410 bp, Glycine max
gagggagaagaggtgtcaagagataatgaacagcaacacatgggagtttatggaaatgagtggttgtttagtagtttctgtgcaaattggcgccgattaagacaccagaattcctgttctatgcctccttttgagtgaaaaaaaaaaaacatcaaaacaaaaacttgttctctctcagcttttcatcttccgatcttaatatacattgactaaaagaaaaataaagggatcaaatttaagttccttgatctaataagatccttgcttttaattgtactactcatgaagagacttggcagttcggatacactgggtgctctcatgacgatttgtccaccaacagacgaacacagtccgaggaacaaccacgtgtatgggaaggagttacagtccatgctggaaggactcga

SEQ ID NO: 223292 - DNA, 363 bp, Glycine max
cagcatagcactatctcgaaattgttcattttcctctaatctatggatcccgaaacagcgttagaacttgtcaagcacggtgtcactctcctcttactcgatgttcctcagtacacccttgtcgccgtcgatactcagatgttctctgtggggcctgcttttaagggtattaagatgattcctccaggcgttcattttgtgtattatagttcatcaagcagggatgggaaggagttctcatcaattattggattttttattgatgctggcccttcagaggtaattgttcgtaaatgggatcaacaggaggaaaggttaatcaaattatctgaggaagaggaagaaagatatagtcaagctgtt

SEQ ID NO: 223293 - DNA, 489 bp, Glycine max
gtgatcaatatgttcagtatggccttgaaatgttcatttactttcaaataagtttcctttgtttgtggatgtattttgtttcatgtaataatgggttcaacatggtgtctcaactcccagatgaaaaaactgatgctttattgtagttatcagcaagtaaattttttgccatgagttttagggaaattaatggttgagtatactgaggaaatatgcttttatgttcccgatctctaaggtttccttgctacacttctctataacaccactaacattttttttgtctctttaatttacaaaaaggcccaagctggagcagatgttgtcagtcctagtgatatgatggatggtcgggtaggagcactgcgtgcagctctggatgctgaaggctatcagcatgtttctataatgtcctatacagcaaagtatgcaagttctttttatggtccatttagagaggcactagactcaaacccccggtttggagac

SEQ ID NO: 223294 - DNA, 496 bp, Glycine max
acttcccagaatgcaccttgatttcagcaccaactgagttacaggacgaaatattctgcaggtgagtgcacactttcattcatacaatgggctgacaatccacacgtaaagtttcaattaacaccaaaaacaacggccaagtctttttctattatgtccttaaatatattaaatcaaacgaggccataatattttattatgaatgtctttctatacacaaacctccatgtcccttttaaacaatttacaataaccaaaatccagcagatactggttttataaacttttcaaccttctacttgaacaacgccctacataattagagaactttacctcttctttccacacaaacatctggcaggttgcagagcagaatatgtgaggatgatatcaacaccggcccttcggaggcacatcagtgactccatcataaccctttcttggcttatcatattgagagcaccggcagcctttattattgcatattcaccaaaaa

SEQ ID NO: 223295 - DNA, 544 bp, Glycine max
catcaacatgaattgtctcattcattctactttcaataagatcagtcgcaacacatacaaatctttcatgattttagatgcacaaacagaccattatggacaaatatagatttgttcatgacacaaatctttcactatacagttaaaagcacaccactcggaatcatgtcattcgtaacactttattcaaatgtatgctgatatagatgcataccgtatatcctattataaaaagcaacaccactcgactatatagtagttaggtgacacattttccctcggaaacttggaactgaggaacgtgatgctcaaaactccctttctggaaacatgataggagctacgagagaccacaagtacagcagagcagttgcccaggaagtgatgattcgaacccacacagaaggccaccccacgtgaaccaacttcccgctcctccaacagatgtagaccaaccagtcagaagcattgcagaatacatgctagcaagagagaaaatcaagtggaagaaggcatatgaatatgtaactgggcttgctttctc

SEQ ID NO: 223296 - DNA, 601 bp, Glycine max
tgtttgtagaataccctatcttctcccatccccttcctatattacataaccttgcatttcactgcatgcccttcttcttgttctgatcatttggggtgtgtgagtgcgtgtgtgtggttggttgtttgtttgtttgtttgttcatcaacaatgaagatatctgatgagaacagttctaaaccaatcaaccccacaagttttcaaggagggatagaatgtgtggggaacagaaagatggggcagaacagaagggctttgagcgtgatcaatcaggatctggtggcggaagggagaccttacccttgtgttgttaacaaaagggcattggcagaaaaacacgatgtttgtgagaagaagcaggcggatccagggcatcgacccatcacaaggaggtttgctgcacaaattgctagcacacagaaaaatcgtgccgagggaaccaagaagtcaaacttggggaattcaaattcgaatggatttggagacagcatatttgtcgatgaagaacacaagccaactacggatgaccagcccatgccaatgtctttagagcagacaggaccaatgcatagtgaatcagatcagatggaggaagttgaga

SEQ ID NO: 223297 - DNA, 527 bp, Glycine max
gaatgaatgaaattatttctatgccatcgtttcaattattttgttcaatgggaacaagagaaatacaaactcaaatggacgaagtatgttctgttcagttagaacataacagaaaagaaaaaaagggtggaaaaataacagaacaataaatactcttaagagaaaaaaaaaaacatcagaggattatgaaaatcctctgaacaatatatgtgcaacccaagttgctcacatgtgggcccccaattatgaaaagtcatatgtatgatatcatggtgttgttagtggctgtacgtacatggcctgctacaatggtttctccagaagaaaacgtggtggttcacattttgcagtatagctaaatttagatgagcagtacttcctatgtaccccagttagtttcccattcccagccttctgatgaaaatcagccattaatgttgagcactctaatagccgatcttctgagtaattggagtgccattcacatgttttgttccattgtttgaaaccataaattgtgcattggg

SEQ ID NO: 223298 - DNA, 534 bp, Glycine max
atttttttttatttgaaataatgtccgggatcatccacaagattgaggagaccctccatgtgggagggcacaagaaagaggagcacaaaggagaacaccatggtgagcacaaaggtgaacacaaaggagaacaccatggtgagcacaaaggtgaacacaaaggagaacaacaccatggggagcacaaggagggacttgtggataagatcaaggacaagatccatggtgatggccatgacaagggtgagaaaaagaagaagaaggacaagaagaagaaggagcatggacatgaccatcatggtcatagcagcagcagtgacagggattagatcttatatgttaagcaggtgtacggtacgatggtagtgaggagccagaatccctcttcctgctttatgatataataaaaataaaatagcgattccggaaatcatgtctgtagctgctctttttatttatgtgataaatgtaaaacgctttggtttggcttggccgttgtgcattaggttgaaaaaataaatgttataattactc

SEQ ID NO: 223299 - DNA, 537 bp, Glycine max
  unsure (1)..(537): unsure at all n locations
tttttttttttttttttgagtaattataacatttattttttcaacctaatgcacaacggccaagccaaaccaaagcgttttacatttatcacataaataaaaagagcagctacagacatgatttccggaatcgctattttatttttattatatcataaagcaggaagagggattctggctcctcactaccatcgtaccgtacacctgcttaacatataagatctaatcactgtcactgctgctgctatgaccatgatggtcatgtccatgctccttcttcttcttgtccttcttcttctttttctcacccttgtcatggccatcaccatggatcttgtccttgatcttatccacaagtccctccttgtgctccccatggtgttgttctcctttgtgttcacctttgtgctcaccatggtgttctcctttgtgttcacctttgtgctcaccatggtgttctcctttgtgctcctctttcttgtgccctcccacatggagggtctcctcaatcttgtggatgatccncgacattatttc

SEQ ID NO: 223300 - DNA, 449 bp, Glycine max
actgaatgtttggtcaaagtaaaggggcaaaaatacaggtttatttgttcttctaggaagatgaatcaaaaagtgaagagaaaaaattacagacaatttgttctaagagaacgcataggccaacagcagtcaagtccctattgctcaagaggaatccactcgagttcaagatctaattctccagattcaacatcctggagcttgagtgacatcatttgtttaaccttaccatcaacaatattgactgtgctatcctcaataagggcattgtcatctgattttaaccattttcctatctggatatcaccaaacattccagcatttccaaatgccatagcagatgttatcagagactgaagatcaatgtctgcttttcccattatatcatcagcagaaaatgtgtcatgggcaaatactttcaattttatctgtccataatgctcaggaac

SEQ ID NO: 223301 - DNA, 552 bp, Glycine max
gtgtcttcacttttgactataggaaatagtgggaaaagtacagattgaaaaggataacacctattaccttggtatatctagaatacaacctaatttctcaacattttagttcagataagcatggggaaaaactttctgactacaaaatcgtgttttaagatatcctcagaagaatgactattttgtaatagttcctacaggactagtaatctctgttcttttttcatcaccatcaacaattcaagactttataatatttgaacttagctagtaatctctatgacactctattcaagatctagactcttcttcatactttcataaaccatataagtaatgcttgcagctggcacaactttgaggagattaggaatgagtcccttgtagaaacctctaaaaccttcatccttaagagttttccagaaaacatcagacattcccttgtaagcactagtactgttggcaggttgtgcctgcagtcttgtacgaataacctgcagcggatagacacatgtagctccaagagcacctgaaacagtcccacatccgagt

SEQ ID NO: 223302 - DNA, 549 bp, Glycine max
aattgaaaggtgttaaaacaccaacattccataaacaaaaaacctatttaattttcaacatctgtggaatgcaccattctacattgttcaatgcccgaagaaattatggtgaaagcaggcaattgggaagcatcaaccacatccctagtttaatcatcctcatgcaagaataggagtgaagctggaagagtcttgcagactagcagcatattttcgcgcccacaggtcatagtgaataatttcctcaagggaaggagaggataccaattcattttgatgcttctcacatgttagctccacaactttgaatatatccaaatagctaatcttttcatcaataaacatctctacagctttttcatttgctgcactaagaactcctgtcattgtgcctccagcacggccagcagaaaatgcaagattcatggatggatactttacattatctggagttttaaatgtaagtgaaccaagcttgcaaagatcaaggcgtggccaagtgacttcagaacaataaatcctgtcaggccatgataatgtatagaggat

SEQ ID NO: 223303 - DNA, 521 bp, Glycine max
aattaagaattattttatttttacgagaaaaaaaaaactcagtatatacaagcaagaataaggggagggagagttggatcagctgggaacctaaattaaacttttttatctcaattgaaatagtcaacaaattctactaatatctgaaaaaatttggagaggatggtgagggttggaaaaaggggaaagaaaacctatgatgatataatacactagaggcagaaccaaagatgggatttccacatcaaacaggtcactgctgaccttgctgcaccctttaggtggtgatagaagaatagcctaagcaagaaatgctcttcagagagagagagagagagagagagctttacatgaaatagctcagagatctcatttttcttgatccttcttctccatagaggtcattccattggagtagctcattcatatttggtgactctgatgacacacttgcacacacctgctcatgtgcatatctaaaatcatccatctttaagggacgaatgtcaccgctgctacac

SEQ ID NO: 223304 - DNA, 524 bp, Glycine max
atgaataacactgaaatggaccaccatggtttcacacttctccactatattttgagttccttctgaacacaacacaagctacaacatataggcttccatttgtcgccaatttgtagtttttgtacaagaacccatatgcaaaaatagttcatccttattctattctctcttaataatatgagtataatagaccatcctctatacaaaagtactagtaataaatatataggttgttgaatatccaagcgtcctccgctatattcattttggtttgtctttcggactctcttcttaagtccatacttaataactttcaaaccaacccaaacctctaattatctattgcctctgcgagtgatgttcttcttgacgtattatgttgctatttatctccttttatgccggcaaagccttaaaagtgtcactgaaggtgtcttgttctgcaaaaatatccagcagagacaacgcctcgggcacattcagctcaagacggaacttgggaccatcatagtggtgaaggattg

SEQ ID NO: 223305 - DNA, 654 bp, Glycine max
aagaacaaaaagacctcagtaaaataactttatccgcaatacatgtgtctagtaatttacaacagcaattcaaacacagggattcacaaagtaatttatcatattgcatccctcattgctcctcttgcagcctcctgcttcatctcagcagccttaccactgccacggaagtacatatatacttgctgaataacccagatactgatcaatgtttcaatgcagaacaatccaaatgcaacaaagtagaaaattccaatcactgcatggtcacccaccacatctatggctgacagaatgcctgtcaaggattttcctttgaaaactatgggaggagcaactgcagctaagatacagaatcctaggtgaagcaggtaaaacaagaaaaaccatccaaaattcaaagcactgtcagtcctaaaagcacgatataatgggcgataccacaagacatatgctccaggaattcctgctatgaagtagataatagcaagaaaccatattttcactccttctcccttaatccaagctgaagtgacagctacaatattccatgtgaggcacaatgccattcctaacaatgaagtaaatgcaacatactgcaatctttgaagatggattggtatttcatagcaattcatgatggataatgggaaa

SEQ ID NO: 223306 - DNA, 454 bp, Glycine max
ctcgagccgcagaaagttgagagagaagtgttcacgtctttgagaaatgggtgcttcggcatcggtcacagaaaaatccatccatgaattcatggtcaaggatgctaagggcagagacgtgaacctcagcacctacaaagggaaggttcttcttgtagttaacgtcgcttcaaaatgtggatttacaaattccaattacacccagttaactgagctttacagcaaatataaagacagaggtcttgagatactggcatttccatgcaaccagtttctgaaacaagagcccgggagtagccaggaggcagaggaatttgcctgtacaaggtacaaggctgagtatcccatttttggaaaggtacgtgtcaatggacctgatacagcacctgtctacaaattccttaaagcaaataaaacaggatttctgggtagtaggataaagtggaatttcact

SEQ ID NO: 223307 - DNA, 537 bp, Glycine max
caaactaatgcccattaattaattgttaaataacgacgaaagggacaaacaaaacagaattctaatacaacaaacacaaaaaaacctaggcatgaaatatgtaagaaataatcactagaagaaacatctacaaatatacattcccttatgtttcaatcattttcaacaagagcaccaatttgaagtgattgtagagtctttcaagcctcccccaatgctgtcttgatgtcattttcaatggacaacggtgaggtggttggaccataacgagcgaggacatgccctttcttgtcaaccaaaaacttagtgaaattccactttatcctactacccagaaatcctgttttatttgctttaaggaatttgtagacaggtgctgtatcaggtccattgacacgtacctttccaaaaatgggatactcagccttgtaccttgtacaggcaaattcctctgcctcctggctactcccgggcttttgtttaaaaaactggttgcatggaaatgccagtatcttaagacctctgctttatatttgc

SEQ ID NO: 223308 - DNA, 538 bp, Glycine max
ctcgagccgcttaactagtaatatttattagaatttgccagagaattagaagaataaacataataccccagatggcttcaaaaacttgttcctcccttgcccttttcctcacactcaacctcgttttcttctcacttgtctctgcatgcggatatacaccatgccctggtccaaacccaaagccaaggcccaaccccaaccctaaccctaaccccagcccaagtggctcgtgcccccgtgacgcactcaaactaggtgtatgcgccaatgtgctaaacttggtgaacgccactttgggtcaaccaccagttaccccttgttgctcccttctcgatggtctcgttgaccttgaggctgcagtgtgcctttgcactgctctcaaagcaaacattttgggcatcaaccttaaccttccgatctcactcagcttgcttctcaatgtttgctcaaggaaagccccacgtgatttccaatgtgcctactaagcttatactataagtataacatatcatcttaaatcttctttcgcttcgggttt

SEQ ID NO: 223309 - DNA, 502 bp, Glycine max
gatggctggtgttagtggcagtagcactactcccttattgtgctctttgttctttatttgttccttactttttgcttcctgcacccatgcctcctcccaggcacctcctccaattgtggatggactttcatgggatttctataggacgagctgtcccatgcttgaagggatagtgagcaagcatctccagaaggtgttcaagaaggacaatggtcaagctcctgccttactcaggatcttcttccatgactgctttgttcagggttgcgatgggtcgatattgttggatggaagtccaaatgaaaaggatcaaccggcaaacatagggataaggccagaggctttgcagaccattgaaaatcttcgatctcttgttcacaagcagtgtggaagggtcgtctcttgcgctgacctcgttgttctagccgcacgcgatgctgtttttctgtcaggggggccaatatttcccgtgccactgggaagaaaagatggtctaactttc

SEQ ID NO: 223310 - DNA, 572 bp, Glycine max
gcaaaaatggcacctgcaacactgtctctgtctctcctcctcctgttctcactcagcatcgccgtaaccgttagatcgagcgactacgactacgattgtgtgtacactgcatacgttagaaccggttcggtgttgaagggcggaacggactctaagatcgggctgaagctgtacgacaagtacggctactacatttacattaaaaacctcgaagcatggggcggcttgatgggcaagggctacgactacttcgagcgcggcaacctcgacatcttcagcggaaggggaccctgtcttgacggacccgtctgtgccgttaacgttacttctgacggatcgggttctcaccacggctggtaccttaactacgtcgaggtcacctccactgggccccacctttcctgcgctcaagatcagtacgaggtggagcagtggctcgctctcgacacttcgacttaccagctttgggccgataggaaccactgccgctacagtttggaccgggcccagcccgtttaagagcgccccggatccagatgcggatctgcgttctctattttgaatgcacgagc

SEQ ID NO: 223311 - DNA, 578 bp, Glycine max
atctatccaaggtagtttttgtggctacagcaaataggttgcaacccattcctccaccacttcgtgataggatggaaataattgagcttcctggatatacacctgaggaaaagctccacattgctatgcggcatttgattccaagagttttagaccagcatggattgagttctgagtttcttcagattcctgaggcaatggtgaagcttgtcattcagagatatactagggaagctggtgtgcgaaacttagagagaaatctagctgccttggctcgagctgctgcagtaatagttttagagcaagaacaagtagttccattaaacaaagggatgcagggacttgctacaccacttgtggaaaacagacttgctgatgggactgaagttgaaatggaagtgataccaatgggtgtcaatagtcgggacatctcaagcacgtttaggattgcctctccattggttgttgacgaaactatgcttgaaaaagtgcttgggcccccaagatttgatggcagagaagctgcagaacgtgtggctacccctggggtctctggtggctagtttggactgcttttg

SEQ ID NO: 223312 - DNA, 524 bp, Glycine max
ctttctctctagacgttactttctctattctcaaagtcacacacagcactttctctctcagcttaactctctcccatgtttcctcagtttcatcgatggagagtgaagccttaactctgcttattccgagttccagatctcgttgctgcttccgattctttgattcttcgcttctttcttcttctcacttcacattccgattcgtcgcagattcttttggtttctaaacatgatcgtcactgcctccatctgtaatcgctaattgaaggcatgggaggtggtccagagaaatcaaaatctccttcaacttcgtcttccctttaggtgtaaaagtcacagctaacgatatagaaatgaaatcgctaactgttaacactgaagattctttttccagtttactggaacttgcttctaacaatgatattgaaggcttcaaggtccttttagagaaggattcttctacgatcaatgaggttgggctctggtatggcccggcaaacggatcaaagcattttgttcttgag

SEQ ID NO: 223313 - DNA, 621 bp, Glycine max
  unsure (1)..(621): unsure at all n locations
tggatttggagtgtcctagattcgtgtcctggtttggtttggtttggttcgtactgttgtgcgagttttgactttttctggatttggagttttcaatcagataatgttcaacggagccgcttggtgggttcagattcagaagcagagggagagggtgtttgtgattgcaagtgttggtgaattcaaaagagagagtaagaagagtgtgcatgaacatcatgagtagtagtagaagcagaggcagctggtgcggtttgtggcctggttccttcaatatggaaactgagttgactattagaggaaagagttttggtggcatttttggctcctctgctaagcctagatcactcagggttcagtcttctgatgaagatgttgaggatcttgtcccctctaatatttcgggcaaaccttctggaactgttctgccctatgttggtgttgcttgccttggagccatgttatttggttatcatcttggggtggtaaatggttctcttgagtaccttgccaggatcttggaatcacccaaaaacactgttatacaaggatggatngtcagtgcactgcttgtggtgctactggtggttcattaccggtggagcattggttgacaattgg

SEQ ID NO: 223314 - DNA, 547 bp, Glycine max
  unsure (1)..(547): unsure at all n locations
cgtgatttagcatttaccacaccaaaatcaatctgcggagtcagaaagccatggatccctacaagaatcggccatcaagcgccttcaattctcccttctggactacaaattccggtgctcccatctggaacaataactcatcgctgactgttggatctagaggtccaattctgctggaggattaccatctggtggagaagcttgcaaactttgacagggaacggatccccgaacgtgttgtccacgctcgtggagctagcgcaaagggtttctttgaagtcacgcatgacatttctcacctcacatgtgccgatttccttcgagcccctggagttcagacccccctcatcgtccgtttctccactgttatccacgagcgtggcagccccgaaaccctcagggatcccagaggttttgctgtcaaattctacaccagagagggtaacttcgaccttgtgggaaacaacttccctgtcttcttcgtccgcgatggcctaaagtttcctgacatggttcatgcncttaaacccaaccccaagtcccacat

SEQ ID NO: 223315 - DNA, 559 bp, Glycine max
gagaaattgctcagaaggatgcaaagggtctttacaaagcaggggagaagaaactgggaactgatgaaaagacttttatccacatattcagtgaacggagtgcggcgcatttggctgccgtcagttcttattaccatgacatgtatggtcattcactgaagaaggcagtaaagaatgaaacatctggggcctttgaacatgcacttttgacaataatccaatgtgctgttaatccaggaaagtattttgcaaaggtgttgcataaggcgatgaaaggcttggggactgatgattccacactcattagggtcgttgtgacaaggactgaggttgatatgcagtatatcaaagctgcatatttaaagaaacacaagaagactctgaacgatgaagtacactcagaaacatccagtcactacaggacttttcttctctcacttttgggccctaatcactagccaagatgttcaatgatgtaagtggaataaattcacccttgatgtgtaaatttgactggttttagtgctttgtgatcaatgtagccgacaacttgtagaat

SEQ ID NO: 223316 - DNA, 503 bp, Glycine max
cgagaacaaaaaaaaaaaaaaaaaatccgcgattcgctcttctcttggaaaagtgaaaaccagaagtacgaacgaaagagaagagcgatttagaagtgagagaagatggggttgtcgttcacgaagctgttcagcaggttgtttgcgaagaaggaaatgaggattctgatggtaggtctcgatgctgctggtaagacaaccatcttgtacaagctcaagcttggagaaatcgtcaccactatccccaccatcggatttaatgttgagactgtggagtacaagaacatcagcttcactgtgtgggatgttggtggtcaggacaagatccgtccactgtggaggcattattttcagaacactcagggtctcatttttgtggttgatagcaatgatagagatcgagtggttgaggcaagggatgagctgcacagaatgttgaatgaggatgaacttagagatgctgttttgctttgttttggcaacaagcaagatcttcctaatgc

SEQ ID NO: 223317 - DNA, 615 bp, Glycine max
gagatggcggcggagataccgtgctgtggaacaaagttttcactgtacgttttggtgatcataggtttggtctgcttcgcgggactaatggctggtctcactctcggactcatgtctttgggactcgtcgacctcgaagttctcatcaaatctggtcgtcctcaggatcgcatccacgcttcgaaaatttatccggttgttaagaatcagcatcttctgctttgcacgcttttaattggaaactccttagccatggaggctcttcccatttttcttgattcactggtgcatcccgctgcggcaatcttgatttcggtcacgctcatcctcatgtttggagagatattgccccaagcaatttgtacaagatatggattgacggttggagccacgctggctccacttggtcgggttcttcttatagttttcttcccgctttcttatcctatcagcaaggttcttgattggatgttgggtaaaggacatgctgcccttttaagagggcagagctcaagacttttgtgaattttcatggaaatgaggctgggtaaggaggagatttaactcatgacgagacaaccatcataactgtgcacttgaattgacagaaagact

SEQ ID NO: 223318 - DNA, 592 bp, Glycine max
gaagatacaaagtgacgggactgttaaagttgatctagaaaaagatgcacctcttgcatcagaattgttgaagttccaatcttttgaagagtcaacaatgagtggaactattatttctgaatcaaaaaaatcagctccctggttacaaattgtcatacttgtggttggaactagaggcgatgtacaacctttcctggccattgcaaaaaaacttcaggagtatggacattgtgttaggctggcaactcatgctgattttgacacatttgtaaagtctgctggtgtcaatttctatccgttgggtggcgatcctcgagctttggcagaatatatggcgaggaataaaggtataatcccatctggtccaactgaaatatctatccaaagaaagcagctgaaggctattattgattctcttcttccagcatgcatatcacctgatttggaaactggtgttccgtttagagctcaggctattatttccaatcctactgcatgtggacatacacacgttgctgaagctcttggggtgccccttcacatcttcttcacaatgccttggacgcaggccaacatatgagttctcacaccc

SEQ ID NO: 223319 - DNA, 544 bp, Glycine max
aagtttctgactggcttgttctggtccaatggagatggattgccagctgaattgatagaaaagcattctaccactgtcaaaggtgtacttcccttgtttcgtgctgatactgagcacataattcagcagttcagtcaacttactatggaaatgtacggttctacagccaaattccggctttcattgcctccaacagcagatcaatggagtccaacagaaccgaacacacttttgcgagtcttgtgtaataggaatgatgaggcagctgcaaagttccttaagaagaattacaacttacctaagaagctctaacaattgacaagtaaccactactctgatatgccacgcctttccacccaatataaatttgaagtttgttcgttatgtgttgtgaaaccctggcctagtttttgaggatgtgattcacgtaaaggtggtacggtatgcattatacacttactgatcaactctaggaaatatgatgctctatcatcaataatgctcaaaagtttaaattgtacaggagtgattcttttgcctttgc

SEQ ID NO: 223320 - DNA, 404 bp, Glycine max
  unsure (1)..(404): unsure at all n locations
ctccctctcccactttctattaacacccctctttccttctctacctctatggaactgattctacaatctgttattacttttgcttgcatctctctgtgttcaatcttcaaagacttgaattcttcttacttaggttctgaatggctggaatttgctgtggtgttgtcggagaaggtgacactccggctccactcgagccaactactcgcccctccaggcgccggagtttggacatcttacccttaaaatacatcgctgacatggcggtgccgccgtcggatggttcacggaaacgtcccaagctggatctcanggaccgcgataacgtagttcataattgcgacgaatccactggacacaaggtggtgaaaaaaggaaccaaagtggaaatccacgacaatatt

SEQ ID NO: 223321 - DNA, 363 bp, Glycine max
gccttgttcggtgaagtgagtagtgagtgctgaatcgaatcgaatcgattctccgggcatggcggcaagcgatcgcacagtgttgcaattctcttcatcatcttcttcttcttcgcagatcttgtccgcgaaggtccaccctctggtcatcttcaacatctgcgattgctatgttcgacgccctgaccaagccgaccgcgtcatcggaaccctactcggctccgtccttcccgacggaaccgaggatatccgaaattcctatgctgttgctcacaacgagtctatcgaacaggttgcattggatatagagtgccaccacaatatgttcatatcccaccaaagagtgaattccaatgaaatcat

SEQ ID NO: 223322 - DNA, 320 bp, Glycine max
caatatattccattctctctttgtatttccctacctctcccttcaagatggggaggtgtgtgaagaccctcaccgtccagaccatcacccttgatgtggtaagctttgacaccatcgtctacgtcaaggtcagtatccaggacaaggaatgcatcctcacggtatattaacgtctcattttcgccggaaagcatctagaggacgcgtctgcccttggtgtctacatcattcgaatggagactactttgttgcttttacttcgccacctcatcggcaggcacatattcgttatgacactgacctttgtgaccatgatccta

SEQ ID NO: 223323 - DNA, 371 bp, Glycine max
aaaaaaaaaaaaaaaaaaaataaaataaaaaaaaaaaaaaaaaaaaaaaaaggggaagggtcgttaaaaatatagctaacataatcctctgcgttgaccctctctacaacgattcctacgccggcgcactcattcacacaggcctcctccatgactccaccgatcgcgactgcctccagaactaacccaaatttatgaccctcctttcacctcacccatacatacttcaaatcttccatgttttcgaggacgaccaatgtctctccatagtaatggatctctgccaaccccttacgcttttttacacgagggtctatagttccatccagtattaccaagccgccgcccttatgaagaaccttctggaagct

SEQ ID NO: 223324 - DNA, 391 bp, Glycine max
  unsure (1)..(391): unsure at all n locations
aagaaaaaaggagagcgaagcatactcagcgcggcggtggaagatggtggcgacggcgatcgaggaagtgcgaaccctctggattggcgatttacagtactgggtggacgagtcctatctctctcagtgcttcgcccacaacggcgaagtggtttccattaaaatcatccgcaacaagctaacgggccagcccgagggctacggcttcgtcgagttcgtctcgcacgcctcggccgaagcctttctccgaacctacaatggagcccaaatgcccggcacggagcagaccttcaggctcaattgggcctagttcggggactccgggcccgaccactccatcttggtgcgcgatctnacccccgacgtcaccgattttgtccttcaggaaacc

SEQ ID NO: 223325 - DNA, 384 bp, Glycine max
taaaaccctatctctcaccaacttccgctacttcctactccaaccactttgttttttcccgcagtcatgggcaaggtcaagatcggaatcaacggatttggaagaattggccgtttggtggccagggtggctctgcagagagacgatgttgaactcgttgccgttaacgatcctttcattaccaccgattacatgacatacatgtttaaatacgacagtgttcacgggcactggaagcatcacgatgtcaccgttaaggatgagaagacccttctcttcggtgacaagccagtcactgtttttggacacaggaaccctgaagagatcccatggaagtcgactggagctgacatcattgttgagtccaccggagttttcaccgat

SEQ ID NO: 223326 - DNA, 561 bp, Glycine max
  unsure (1)..(561): unsure at all n locations
gatgattctttattgaatgatgaagctcgacagcctctttccaggaaggtttctattccatcttctaggataaatccatatcgtatggtcattatgctgcggctggttatcctttgcattttcttgcattatcggataacaaatcctgttcccaatgcatatccattgtggttggtatcagttatatgtgagatttggtttgccatatcttggatattggatcaatttcccaagtggcttcctgtaaaccgtgaaacatatcttgacaggcttgcactgaggtatgatcgggaaggagaaccgtcacaactagctgctgttgacatttttgtcagtactgttgatccattaaaggagcctncacttgtgactgccaataccgtactatctattcttgcagttgactatccagtggataaggtctcctgctatgtgtctgatgatggtgctgctatgttgacatttgaagcacttgctgagacatcggaatttgcaaggaaatgggttccttttagcaagaagtataagcatgaaccccgtgcgcctgagtggtatttttct

SEQ ID NO: 223327 - DNA, 403 bp, Glycine max
gttgttccttcacctttcttatattcaggaaagtaagatcatctgcatcgcggacgcttccaacaataacaatggccgataatgcaacaacgcaaggaagcaacaccctattttctccttacaagatggccaaattcaacctctctcatagggtggtgttggctcctatgacaagatgcagagcgttgaactggattccacaggcagcgcttgctgaatactacgctcaaagatcaacaccaggtggatttctcatcagcgaaggcaccttgatctcccccactgctcctgggtttccccatgttcccgggatatattcagatgaacaagtggaggcgtggcgaaacatagtggatgccgtgcatgccaaaagcaacattatcttctgtcaactttggcatgt

SEQ ID NO: 223328 - DNA, 320 bp, Glycine max
cggtccgggagtgctagggatgcctactaatccatacatgtatgcatctgggctgagtgaagtcttgaagaagaaacatgcttctggaagttataaaagcctactattttatctagaggcatgtgaatctgggagtatctttgaaggtcttcttcctgaaggtctgaatatctatgcaacaacagcttcaaatgcagaagaaagcagttggggaacatattgtcctggggagtatgctagtcctccctctgaatatgaaacctgcctgggtgacctgtacagtgttgcttgtatggaagacagcgacatacacaatttgc

SEQ ID NO: 223329 - DNA, 456 bp, Glycine max
aagacgagagaatagaggaagcttggggtttgaatcgaatcgaatcgaagcgattcatcgatcgatcgatggctcttgtaggagttgaactgaagcatgcggcggagggcgtaccggaggcgaattgctccgccaagcccaccaagcagggcgagggcctccgccactactattctctcaacatccacgagcatcagctccttcttcgccaaaagactcataacctcaaccgtctcgaggctcagagaaacgacctcaattctagggtgaggatgctgcgcgaagaattacagcttctgcaggaacccggctcttatgtcggtgaagttgtcaaagtaatgggcaagaacaaagtccttgtcaaggtccacccagagggaaatatgttgttgacattgacaaaaatattgacattacaaagattactccattcactagagttgcactccgcaacga

SEQ ID NO: 223330 - DNA, 397 bp, Glycine max
gtgggtgggtactatgatgccggggatgctatcaagtttaactttcctgctgcgtggtccattactatgttgagttggagtgtgattgagtatagtgcaaaatatgaggctgctggggagcttgaacatgttaaggagatcattaagtggggtactgattattttctcaagagtttcaatagtactgctgacaccatcaccacccttgctgctcaggttgggcttggagatacttccggtggtgacagtccgaatgaccactattgctggatgcgcccggaggacatggactatgaccgccctgtgactgaatgccatactttgttccaatcttgcagctgatatggctgctgccttggcatctgcttacattgttttgaaggacaacaaggcctat

SEQ ID NO: 223331 - DNA, 372 bp, Glycine max
ttttgccctttgggtcattgtacacctttaccctttcctcaagggtgtcatgggagaacaagaaggtgttcctaccatcattttggtctgggctattctcctgtcttcaatcttaaccctactttgggtgagaatcaacccattcttggccaaaagtgatgtggtgttggaaatttgtggattgaattgtgactaaaggtaacaaaaaatggaagggcatgccatggtttgacgttttacactgataagatctgcaacatgcataagtttttggtcaaagacacatgacacatccctggatctgttggtgagaactgccactgcaaaaaaaaatgttatttgtgggtggtgtttgtagatacaacatatgtt

SEQ ID NO: 223332 - DNA, 497 bp, Glycine max
ctcgagccgaatcggctcgagcacgaaatatggcttcaactcatctgcttcccctggcaaccttcttcttacttctctccgcttcttatctccagattgctggggcggaagcacaaccgttgactagtctcaaacttaactctcatattcttcaggagtctactgctaaagagattaatgaaaatcccgaggcaggatgggaggctgctataaatcctcgtttctccaattatacagctgaacaatttaagcgccttcttggagtcaaaccaatgcctaagaaggaacttagaagtacacctgctatatctcacccaaagacgttgaaattgccaaagaattttgatgcgaggacagcttggtcgcagtgtagcactattggaagaattctagatcagggtcactgtggttcttgttgggcatttggtgctgttgaatcattgtcagatcgcttttgcattcattttgatgttaatatctctctctctgttaatgac

SEQ ID NO: 223333 - DNA, 364 bp, Glycine max
  unsure (1)..(364): unsure at all n locations
gcaagtacaattacgtgcacagatctttgtatatggagctttgattcaaggcatggtaccagatgaggcttatatgatatcagcttttggaggatcagatggtggaaggagcctttgggataatgcttggcgtgcctgcatggaaaggcaacatggtcaaaaatctcatcctgctaacccagaaacacctctgcaatcacgatctgttgctagaacctctgatttgccacataagcaaagtgctgctcaagcgaaaggtatctcttcgccacttggtcgaaccagcagcaaggctanctcccccaattgtaaaccccttaatacctctttcatctccactgtggagtctatcaactctaggtct

SEQ ID NO: 223334 - DNA, 418 bp, Glycine max
caacatggagcagaagagggcacgtagttgcgatggtttattaatcagcttcattgggcttcttttggaattcgctttcgttgctgcggaggacccttatagattcttcgactggaccattacctacggtgacatttatcccctcggagttaaacaacagggtattcttatcaatggccaattcccaggccctgaaatctattccgttaccaatgacaatttgatcattaacgtacacaataacttgaccgagccgtttcttctatcatggaatggtgttcaacaaaggagaaattcttaccaagatggagtttatggaaccacatgtcccatcccttctgggaagaacttcacctacacactccaagtcaaagatcaaattggaagtttcttctattttccatctcttgctttccac

SEQ ID NO: 223335 - DNA, 349 bp, Glycine max
gtttctgtctctgtgtttgcggctgaggattccgaacgagcgaccttcttcgttggtcgcaaagtttaagtcctcatgggtaaggaaaagactcacatcaacattgtcgtcattggacatgtcgactctgggaagtcaactaccactggtcatttgatctacaagcttggaggtattgacaagcgtgtgattgagaggttcgagaaggaggctgctgagatgaacaagaggtcattcaagtatgcctgggtgcttgacaagctcaaggctgagcgccgaagaggaattaccattgatattgctttgtggaagttttgaaccaccaagcactactgcacagtcatcgatg

SEQ ID NO: 223336 - DNA, 387 bp, Glycine max
gcaggaagcagcattaacagaggagaaagatggtctctcaatggaatgactgctcttgtcaccggcggcactcgtgggatcgggcactccatagtgagtgacttggctgcgtttggcgctgcagtgcacacctgttccaggacccaaacagagctcaacaaatgcttacaagagtggcagagtcaggggtttcaggtaactgggtcgctctgtgacgtgtcctcaccaccccagagagagaagctcattcaggaagttgcatccaccttcaatggcaagcttaacatctacgtgaacaatgttggaataaacattagaaagccaaccattgagtacactgctgaagaatattcacagattatgacagttaatttagactcctcattc

SEQ ID NO: 223337 - DNA, 327 bp, Glycine max
  unsure (1)..(327): unsure at all n locations
ctcgagccgaatcggctcgagctttgacacctaaaatccttaaatgacaccacttgtgtcttagcctcgtcttctcaacactctctctgctcactcaggttgcctgcccttgctatttggagaacacaaatcaggggtttccaaataagttaaacatgataaaacggtttccaagtaggaacaataggtccaaaggcatcaaggtaaagcatgttctgcaaattgttctgttgctgggtgtttgcttctggttgatctaccaggttaagcacaatcatgataagaagaaatgatntgctcaggatgcanaactgtcagtcagtacac

SEQ ID NO: 223338 - DNA, 335 bp, Glycine max
gtttcagttgactctagtactgttaatgaagccgcagccgggagagttttctccccttctggggttcctggcatgcaatggagacctggaagtccctttcagaatcagaatgatgcaggccagcttcgtggaagaactgaaatagctcctgatcaaagggaaaagtttttgcagaagtatcagcaagtgcaacaagggcatagtacccttcttaatatgccttctcttgttgggggaaaccataagcagttttctgcccagcagcaaaatccccttttgcagcaggttaactcttatggctcatctgtttcttctcaatctggtattggacttgg

SEQ ID NO: 223339 - DNA, 307 bp, Glycine max
ggcagttgtatggtgatcatcatgatgtgaagaagaaattagagaagccgggattgactgtcgtggatcatatcggccctggaagggttccaaaggctatagaaggagagcaagttgcggcaggatggccggcatggctttcttctgttgctggtgaagctattaagggatggataccacgtagtgcaaatacttttgagaggttacataaaattgggcaaggaacttacagtactgtatataaggcacgggatgtgattaaccaaaagtttgtagcattgaagaagtacgctttgaaaatctggat

SEQ ID NO: 223340 - DNA, 341 bp, Glycine max
tgcgcttccgctgccattccttccattgtgtttttgcctgctaataaaatctctgtggccgagagcttgttcagcctattgccaatggagcctttgtgttgagtatcgacactgattctgatggttgcatgcaaacgatcagagaggtcactgctgagttgcctatttatttggctaactctttcaacagtttgaggttggaagggcagaaaactgctgctattgagatactgaagcagactgattggcaagatcctgattggggcattgtgcctggaggcaaccttggctacatttatgccttttacaaaagagtttagatgtgtcaagagcttgggctt

SEQ ID NO: 223341 - DNA, 427 bp, Glycine max
ccaacctctaagtccaacctacccctttttcttctcccaccaacttcaccgtctggttgctcgatcatgtctcacttcaagggcaagtaccatgatgagcttattgtcaatgctgcttacattggcactcctggaaagggtattcttgctgctgatgagtcaacagggacaattggcaagcgtttggccagcatcagtgtagagaatgttgaatccaacaggcgtgctcttagggagctgcttttcaccgctcccggtgctcttaaatatctcagtggtgtcatcctctttgaggaaactctctaccagagcacagctgcaggcaagccctttgtggaagtcttgaaggaggctggtgttcttcctggcatcaagggtgacaagggcacagttgagcttgctggcactaatggagaaaccaccactc

SEQ ID NO: 223342 - DNA, 375 bp, Glycine max
tattattcttcctcagtagtgtcatttacgcttctcttatctgcaacaactatgcgtggcggtaaggtcttatccgtcacgaccatctgcggtcaatctggtggccgcatcttgatggagctctacgtcgacgtaactaccatgaccgtcgagatcatgcgtgcgactagcaccacttagatgggcagctggcaggtcgtgaagcccctccactacaagggctcgagcttgcaccgaatgatccccagattgatgtgtcaaggtggcgacttgaccgaccgaaactgaaccctaggggtgctaatatatggctccctgttcgacgacgagatcttggtactgaagcacacctgtctctgcatcctgctcatggtg

SEQ ID NO: 223343 - DNA, 484 bp, Glycine max
ggaacaatggcgggtagggtttcgacgtgcttcttcttcgtgtttgctctttctggccttcttccttttcagatctccgctgaggaatcatcggagaaagagttcgtactcacattggatcactctaactttcacgacactgtcagcaagcacgatttcatcgtcgtcgagttctacgctccatggtgtggccactgtaagaagcttgctcccgagtatgagaaagctgcttctatcttgggtagtcatgatcctccggttgttttggctaaaattgatgccaatgaggagaagaacaaagaccttgcatctcaatatgatgttaggggatacccaacaattaagattctgagaaatgggggaaagaatgttcaggaatacaaaggtccccgtgaagcagatggcatcgttgactatttgaagaaacaaagtggtcctgcttcaactgaaattaaatctgctgatgaagctactgctttcattg

SEQ ID NO: 223344 - DNA, 550 bp, Glycine max
  unsure (1)..(550): unsure at all n locations
ccactctctcttaattaaattaaaacaaaaaatgtgcgctgccatatccgaagtggaacaagaagagttgctcgaaaaattggaggtgttcaagatcaaaggcagggacaagcatggccgcaagatccttcgcattatcgccaaattcttcccagcacggttggtgagtgttgaggttctgaaaaagtacctggaggagagggttttcccgaagctgatggggaagaggaaattcgcggtgctgtacgtgcacaccggcgtccagaggagcgagaattttcccggaatctccggtctccggtggatctacgacgcgattccggcgaacgtgaaggagaatctcgaagccgtttattttattcacccgggcttgcaggcccgcctttttctcgctacattcggccgcttcctctntaacgctgggctgtatggaaagctgaggtacgtaagcagggttgattatctgtgggagagtgtgaagaggaaccaggtggaaattcccgagtttgtgtttgatcacgacgaggatttggattaccgtccgatgatg

SEQ ID NO: 223345 - DNA, 303 bp, Glycine max
gaagaaacgaagatagaatgtgcacagccctaaagacgaattaccagcttagcgaggagatcggtcgcggtcgtttcggcaccatcttccgctgcttccacccactctccaacgaaccctacgcctgcaaactcatcgacaaatccctcctccatgactccaccgaccgcgactgcctccagaacgaacccaaattcatgaccctcctttcacctcacccaaacatccttcaaatcttccatgttttcgaggacgaccaatatctctccatagtaatggatctctgccaaccccacacgcttt

SEQ ID NO: 223346 - DNA, 435 bp, Glycine max
  unsure (1)..(435): unsure at all n locations
cttatctatctagaacaaacaaaaatgtttcgggttatcaagtcaaagttgtgctctgaccgtacctttgacaattaataatctcttgcaacctgttccatcttcgctgtccttaattcttaagaaacataacatcatcagcttccccctccaactttggttaatttgatccataaagaattagaccatggaacacttagacatggtgagtgaagtgaagcaccaaagaatcaaaaccaacgggatatggatacacgtggcagagaaagggacaggtccactagttctgctgcttcatggcttcccagaaacatggtatgcctggcggcaccagatcaatttcttggcccagcatggctatcatgtggttgcacctgatcttagaggatatggtgactctgattctcctattgatcccacttnctacactatgca

SEQ ID NO: 223347 - DNA, 478 bp, Glycine max
  unsure (1)..(478): unsure at all n locations
caccacctaatcacttcccctgtaaatcaagtttagttcgcacaaggttttaaaagaggggggatgctgaggacattcaacctcttgttgttgataatggaactggaatggtcaaggctggttttgcaggtgatgacgctcctagggccgtgttccccagtattattgggcgaccacgccataccggtgtaatggttgggatgggtcagaaggatgcttacgtgggtgatgaagctcaatcaaaaaggggtatactcaccttgaagtatcctatagagcatggcatagtcagcaactgggatgatatggagaagatttggcatcacacattttacaatgagcttcgtgttgcccctgaagaacaccctgtacttcttaccgaggcacccctcaatcccaaggccaacagagagaagatgacccanattatgtatgagactttcaatgtgcctgccatgtatgttgcaattcaagctgt

SEQ ID NO: 223348 - DNA, 472 bp, Glycine max
  unsure (1)..(472): unsure at all n locations
cttcctctttcttcttctccttctcttcttcttccccgcgcaagaagattgtgattgggtgttaggttagaattgtgcaaagattcttctgatttcgatgtactcaaaggaggagagaatagggggcattatataagctatgccgacatttactgcaatagcatttgatagattgatagagcctggagcttcaaaacctgcttataaatctgctccggtgccaatgcctgtcccaaagaagattgagaggcgaactagtgaaccaaccataaggaagaagccccgtcctcgtcctcaattaaagccagcactctatgccactcctgaggtgacaccgcttncggatgcaccctcttcgttccctccttctccgtacatcatcaatcacaaacgccgtggcccacgcctgctgaagagttattctgaggccaatgtgcangccaagcangagaaccttgacaatgaaatgctt

SEQ ID NO: 223349 - DNA, 533 bp, Glycine max
  unsure (1)..(533): unsure at all n locations
ttctaaggtgaccttggaactggtttaattcaaagacacttattccatttgacattagaggccgtgttcgaatacttcatcctccagttatgacttgtttcccattctcatttggtaagaaagtgcgctttgtggcaacacatgatccagatattgatgaagtactctcaggcattcaaaatgtaagaatctatacctacaaagaactaaaagttgcctctgacaatttcagtccggccaataaaattgggcagggtggatttggttcagtttataagggactgctaaaagatgggaaagtagctgccataaaagtactttcagcagaatcaagtcaaggggtaaaggaatttatgacagagattaatgtaatctcagaaatagagcatgaaaatttggttaagctatatggttgntgtgtggaagggaatcagcgaatcttggtctacaattatgttgagaacaatagccttgcacaaacccttctaggttcaggtcacagtaatatcgtttttgattggaaaacacgatct

SEQ ID NO: 223350 - DNA, 482 bp, Glycine max
  unsure (1)..(482): unsure at all n locations
ttctaaggtgaccttggaactggtttaattcaaagacacttattccatttgacatgagaggccgtgttcgaatacttcatcctccagttatgacttgtttcccattctcatttggtaagaaagtgcgctttgtggcaacacatgatccagatattgatgaagtactctcaggcattcaaaatgtaagaatctatacctacaaagaactaaaagttgcctctgacaatttcagtccggccaataaaattgggcagggtggatttggttcagtttataagggactgctaaaagatgggaaagtagctgccataaaagtactttcagcagaatcaagtcaaggggtaaaggaatttatgacagagattaatgtaatctcagaaatagagcatgaaaatttggttaagctatatggttgntgagtggaagggaatcagcgaatcttggtctacaattatgttgagaacaatagccttgcacaaacc

SEQ ID NO: 223351 - DNA, 504 bp, Glycine max
  unsure (1)..(504): unsure at all n locations
tatacactgcattggcatggagaaataggtcatttggttcagcactggaatttggtggggcttctgagggagaatatgctgccagagaaagtacatcaaagattaaaattttcagcaaaaatttccaggaaaagaggagtgtccgaccaacattttcagctgaaagaatatttggtggcactctactggcgatgtgctccaacgatttcatctgcttttatgactgggctgaatgcatgttgatctatcgcattgatgtcaatgtgaaaaacctctactgggctgacagtggtgatctagtaacaattgctagcgatacatcattctacattctgaagtacaatcgcgatgttgttgcatcacatttagatagtggaagacctgcatatgatgaaagtgttgaagatgcttttgagctcttacatgaaatgaatgaacgtgtcanaacaggcatctgggttggggattgctttatctacaacaattcctcttggagacttaatt

SEQ ID NO: 223352 - DNA, 311 bp, Glycine max
ttgcaaaattatcctaacaaaagcatttatcaaactaaccacggtctagaacacggggtgggttgaacttgcacttgctttattgggattggctctgttgcagcacttgcgatccacacccactgcaaattcaatagcccttcgccatttgccaaacccgccaatcccaaagtattgtcttttcttcatacgacaccttcatgtttttcttgacacacttatccactacccactccttgacctctctaaaaaacacggacctttattttatgtctactttctctccatgccaaccgttgtttccgacacac

SEQ ID NO: 223353 - DNA, 522 bp, Glycine max
ctcgatttccttctctacaacacaacacaacacaacgctctcttctcttctcttgcaaccaaattacaacttgttccactctctactactctataaggatttgatttgggacatgtgcagtgattcaaaaagtaaactactttcttccccaaccctcgtcatggaggatggtctctacaacaactcggttttgcttgaattgtctgcatctgatgattttgaagctttcaaaagagaggtggatgaaaagggcttagatgtgaacgaggcaggcttatggtatggtagaagaattgggtcaaagaagatgggatctgaaaccaggacccctctcatgattgcttctttgtttggaagcgctaaggtgctcaattgtattctttttggagaagaaaggaggaagtgttgatgtgaacagggtctgtggttctgatagggccacagctctacattgtgcggttggccgcggctcttaatcctcacttgagattgtcaagctcttgcttgatgctggggctgatg

SEQ ID NO: 223354 - DNA, 501 bp, Glycine max
tcttttcttcagtgtccgctgctgcaaattgcaaagtgcaaaacctgagagagaaagagagaaaaatggagaagatgaaaatagaagaggttcagtcaaccacgaagaaacagcgtgttgctacccacactcacattaaaggcttaggtctcgaggcgagtggaaaagcattgccttttgctgctgggttcgtgggacaagttgaggcgagagaagcatctggtcttgtggttgacatgatacggcagaagaagatggccggccgggcactttttctcgccggaccacccggaaccggcaagacggcgttagctcttgggataagccaggagcttggcaccaaggttcctttctgcccaatgggtggttctgaagtttactcctcagaagtaaagaagaccgaggttctcatggaaaattttagacgggccattggtctgcgtttaaggaaaacaaggaagtatatgaaggagaggtcaccgagctctcttccgaagaaac

SEQ ID NO: 223355 - DNA, 520 bp, Glycine max
  unsure (1)..(520): unsure at all n locations
atccccttctccttctctctctctttttcgcctcattccattttcatctatcaatggctccagtagcagcagcatcttcagattcaatcaagccaagagatgtttgcatcgttggtgttgcacgtacaccaatgggtggatttcttggtactctgtcatctctatctgccaccaagctaggctctatagctattgaagctgctcttaaaagggccaatgttgatccatcccttgtggaagaagtattttttgggaatgttcttagtgctaatttggggcaagctcctgcaagacaagctgctcttggagcaggaatatccaattcagttatctgcactaccgttaacaaagtttgtgcatcaggaatgaaagctgcaatgcttgctgcacagagtattcaattaggcacaaatgatgttggtgtggctggtggtatggaaagcatgtctaatgtacccaagtacctggctgaagcaaggaaaggatcacgccttggacatgattcacttgntgatgggat

SEQ ID NO: 223356 - DNA, 472 bp, Glycine max
atcgtttgcagcgtgttatcccttatgtgattgtgatgctttctgattcagcagcaattgtgcgttgtgctgctttggagactttgtgtgacattcttcccttagtgcgggattttcctcccagtgatgcaaaaatatttcctgagtatattcttccaatgctttcaatgcttcctgatgatccagaggaaagtgtgaggatatgctatgccagcaatatagctaagctggcactgactgcttatggattcctgatacactcaatatgcttgagtgaggcaggtgtccttgatgaattgagttcaccacagaagccattgacatcatccactcatagttctggaagattgaagaggataaatggtgatgcccaacttctgcagctgaagaaatccattgcagaggttgttcaagaacttgttatgggtcctaagcaaaccccaaatataaggagagcacttcttcaggatat

SEQ ID NO: 223357 - DNA, 517 bp, Glycine max
aatatgagcagcagtgcagggaagttggtgtgtcaccggtgctgccggttatattgcttcatggattgtcaagttcctacttgaacgtggttacactgtcagggccactgttcgaaacccaaatgatcacacgaaggtagaacatttgctaaaacttgaaggtgcaaaggagagactgcacctttttaaggcagatcttttgggtgaaaattcttttgactccattgttgagggctgtgatggcgtctttcatactgcttctccttttattatcaacgtcaaagacccacaggctgacctacttgacccagcaggtgaatggaactcttaacgttcttaaatcatgtgtaaaatcgccatctgtgaaacgagtcatcttaacatcttctgtggctgcagttgcatataataaaaggcctaaaagtcctgaagttgtagttgatgaaacctgggtggtctgatccagattactgtagggaattaaagctgtggtatttactttcaaagactttggctg

SEQ ID NO: 223358 - DNA, 427 bp, Glycine max
cttccaacgctcctcctccttctcatagccttcgccacctctgtctccggccgccgtgacctcgtcggagactttctccggctgccctccgaaactgataacgacgacaacttcaagggcacccggtgggccgtcctcctcgccggttccaatggttactggaattacagacatcaggctgatgtttgtcacgcctatcaaatattgaggaaaggtggtctgaaagaagaaaatattattgtttttatgtatgatgacattgcattcaatggggaaaacccaaggcctggagtcatcattaacaaaccagatggaggtgatgtttataaaaggagttccaaaggattacaccggcgaagatgttactgttgataacttttttgctgctttacttggaaataagtcagcactgactggtggcagtggg

SEQ ID NO: 223359 - DNA, 262 bp, Glycine max
  unsure (1)..(262): unsure at all n locations
gctaaatggaggaagaaagaaggagaaaagatagaagtgggggatgtactatgtgaaattgaaactgacaaagctacactagaatttgaaagtcttgaagagggatttttggctaagatattggtacctgaaggttcaaaggacgtgcctgttggacaaccaattgcaataacagttgaggatgaaaatgacatccaaaatgttcctgcttccgtggggggtgagactggggttgaagagaanaaaccaacacttgggggtg

SEQ ID NO: 223360 - DNA, 425 bp, Glycine max
attcgtcattcatcttccatcatccatccactttcctcaatcttccattccagatcgctcaccttcttcttcttcctctgtgccacccttttgttccatgattgttttttgtgtctgtatcagcttgatctttttgtttttttccttgttgtaaaaacatttcaatctgcaaggtatgtactgggttcttgtttgaattgttcttccatcttttcatgccacaaagtatttgaatttttagattggagtgtctgatttgcgttgcagttttccatttcctcctcttccgaccatcaaaacgcatgtccctgaacattaagatagctcttttgttgacatgttctgttctggatctcaacatttaattagtattattaatctgagtgaaacttttttagcgctttcatatttataaacttatatta

SEQ ID NO: 223361 - DNA, 517 bp, Glycine max
actttttctcgcagcacacacagcatagtaccatggatgcgctgcgcgtcgcccccaccaccccgcctctcctccgccgccaccctctccgcaaaatggcgccccatcccctcaccgcgcgtccccgccgcgcgcccctcatcgtcgccacgctttccatgccgccggaggccactcactcctccgccgtcgccatcgtcgaagatccctcggaggcggctcctcctccgcgcccccgcgtctcgccggattccctccagtacccgcccggcttcgtcggcgcgattcccgccagctctcgctcagacggcggcgacggcgacggtatgaataatgccatgacttatttgacgaacattctctcttcgaaggtatatgacgtggcgattgagtcccctctgcaattggcgccaaagctctctgcgagactcggggttaagggtttggctcaagagagaggatatgcaacccgttttctcatttaagcttcgtggagcttataatatgatggcaaagc

SEQ ID NO: 223362 - DNA, 524 bp, Glycine max
gcaggaagcaacattaacattggataaagatggtctctcaatggaatgacggctggggtcaccggcggtactcgtgggatcggtcactccataatgagtgacttggctgcgtttggcgctgcagtgcacacctgttccaggacccaaacagagctcaacatatgcttacaagagtggcagagtcaggcgtttcaggtaactgggtcgctctgtgacgtgtcctcaccaccccagagagagaagctcattcaggaagttgcatccaccttcaatggcaagcttaacatctacgtgaacaatgttggaataaacattacaaagccaaccattgagtacactgctgaagaatattcacagattatgacagttaatttagactcctcattccatctgtgccagcttgcatatccttttctgaaagcatttgaaaagggaagcattgtgtacatttcatctgttgctggtgtagtgagtttaggtactggagcttgtcttgccagaaagtcaagctgccaattatcagc

SEQ ID NO: 223363 - DNA, 545 bp, Glycine max
gcaaagttgattctttctctctttatctttctttccccaatttgtgagtgttactgttgaatcgattggattggcattaggttgatctgaaatacgcaattgacatggcgagcgcgatggtagaggacgcgaacttcgaagatgaccaactagccaatatgaccaccgacgacatcgtcagagcttcacgtcttctcgacaacgagattcgcatcctcaaggaagagttgcagaggaccaatttggaattggaatcgtacaaggacaagatcaaggagaatcaggagaagattaagctcaataagcagttgccctacctcgttggcaacattgttgagatattggaaatgaacccggaagacgaagctgaagaagatggtgccaatattgatcttgactcacaaaggaagggaaagtgtgttgtgctaaagacttctactcgacagacaatctttctacctgttgttgggcttgttgaccctgacaagttaaaacccggtgatctggttggtgttaacaaggatagttacttaatcttggatacc

SEQ ID NO: 223364 - DNA, 343 bp, Glycine max
cacccaagtattccaaggccaggtatgatgaaattgtgaaggaagtctcttcctacttgaagaaagtaggatacaaccctgacaagattccttttgttcctatctctggttttgagggagacaacatgattgagaggtccacataccttgactggtacaagggtccaactctgcttgatgcacttgaccagattagtgagcccaagaggccctctgacaagccccttaggcttccccttcaggatgtgtacaagattggaggtattggaactgtgccagtgggacgtgttgagacccgtgtcttgaagcctggaatggtggtgacttttgcaccaactggact

SEQ ID NO: 223365 - DNA, 398 bp, Glycine max
ggaacaatggcgggtagggtttcgacgtgcttcttcttcgtgtttgctctttctctgcttgttccttttcagatctccgctgaggaatcatcggagaaagagttcgtactcacattggatcactctaactttcacgacactgtcagcaagcacgatttcatcgtcgtcgagttctacgctccatggtgtggccactgtaagaagcttgctcccgagtatgagaaagctgcttctatcttgagtagtcatgatcctccggttgttttggctaaaattgatgccaatgaggagaagaacaaagaccttgcatctcaatatgatgttaggggatacccaacaattaagattctgagaaatgggggaaagaatgttcaagaatacaaaggtccccgtgaagc

SEQ ID NO: 223366 - DNA, 507 bp, Glycine max
gccggcagcaaccccacgtggaactaccccgtgaaattctctgtcaacgaatcgctggcgaaggaaaatcgcttatctcttgagatcaagctcatctccgaccgcaccctcggcgacaccagcatcggcaccgtccatgttcctctcagggaactcctggataaccccggcgatgacagctccttccgccaagtcagttatcaggtgatgaagcaatcaagaaaatccaagggatccttgaattactcctacaaattccgcgaacatgttcccgccccggccgccaagacacccaaagcggccaaggcgggacaagagcctgtgatggcttatccttctgctgggccgggatccagttcgatgccctatggtacgccacaccctcccccgccgcagcaatatgcggcgacgggatatggggtatccacctcaacacgtgcatggtggatacccacctcaagcagcatatgggtacccacctcagaccggatatggatacccacaaca

SEQ ID NO: 223367 - DNA, 575 bp, Glycine max
atcacgcgcccccactttaaacgatttatttggatcatatatttgcaattggctcggggtttttgcaacccctacattcttgtgtacgtcaagggctaaggtgcaggtgtacgtgaaagctccattcgtgggcaattgatgtattctagtacttgattttcgtctgccttagggctgcttttcctcgtttaagtaagtttattaatcatgactgacatcatgtccgcacctgttgacccacccatgaaacttggtcatgaaattgaatattccgaggatgaaaggaagaaaaagcttggatcgttcaagaaggtggcaatcagcgcctcatctaagtacaagcattcctttgctaagagggggaggaatcacagcagggttatgtctctttctatcgaggatgatcttgatgcagaagagttgcaagcagttgatgcttttcttcaagtactcatcttggaagagctgttgccctcaaacatgatgatcatcatatgatgcctagattcttgagaagaaggaagtttgacatttagaaaacaaaacaatgtggacagatatgctaagtggaggca

SEQ ID NO: 223368 - DNA, 541 bp, Glycine max
ggacgttcaagggaagaatgttcttacaaacttctggggaatggatttcacaactgacaagttgaggtctttggtgcgaaaatggcaaactttaattgaagctcatgtggatgttaagaccactgataattatacattgaggatgttctgcattggctttactaagaggcgtagtaaccaggtgaagaggacctgttatgcacaatcgagccaaatcagacagattcgcaggaagatgagagagataatggtcaaccaagcaacagcatgtgatttgaaagaattggtgcgcaagttcatccccgaaatgattggaaaggagattgagaaggcaacatctagcatctatcctctacagaatgtgttcattcgtaaagttaagatccttaaagctccaaagtttgatcttggaaaactgatggaggttcatggggattactctgaagatgttggtgccaaggtggacagacctgccgatgaaacattggctgaggaagccactgaagtagttggggcttgatctggctcataatgcattttt

SEQ ID NO: 223369 - DNA, 397 bp, Glycine max
  unsure (1)..(397): unsure at all n locations
naccgccgaaagttctatagcatgctcagcangaaggtgcacgcacgcatccgtaagattcgacttcaggtcgtgttaatgccccttacattatctctgtttctgaaaaatctatcaccaaataagagcacgggttctttctatgaaacaacacaaaatctgactgggaaacataaactaattgcgttttttagcagagcagcccttgccatgtaccgaactaacgacaaagatggagcatgcccagaatatgacgcgtgccgtttatcccaggcacgggcgatacctaacaggatcatgcatgttccgtggcaagatgaactctaaagatgtggatgaacatatgataaacctgcagaacaaaaactcttcttacttagcctagtggattcccaac

SEQ ID NO: 223370 - DNA, 256 bp, Glycine max
gagaaagggagaaagggtgttagtttggagagcaaagaggaagacgttagggggggggcaacttatgtctcagataggcaaccaattgttacagcagcttagggtgacaaggacttcaaagaaccacccccaacacctctgtttgagcctggtgagctaaagttatgtaccttctacagagctggaattggtgagtgaggggccactttattggtcctctacattaccatcttaactgtcatgggagtcaacaggt

SEQ ID NO: 223371 - DNA, 488 bp, Glycine max
ttccacttcaacaaaccctaaaccctaatgctctgaaactcacattcccataaagttgagaaatatgagaattccaagcaattgcgagttcacacgaatcacgccctctgctttcagctaccaccgtctcaaatcctacgtttccgactgcagagccgtgcttctcccctcattcggcggcccgcacgtgctccagcttcgctcgcacgtgccagtccctccgctcaagcctcacgatgtcctcgttcgtgcgcgcgccgtctccgtcaaccccttggacacccgaatgcgtgctggctacgggcgttccatcttcgagccgctgttgcctctcattttggggcgcgacgtcagcggcgaggtttcggcggtcggaataaggtgaggtcgtggagtgtgggagaacaggttttcggggcactgcatcccactgccgtgagaggcacttactcggattacgcgattctctccgaggggaggttactccg

SEQ ID NO: 223372 - DNA, 552 bp, Glycine max
  unsure (1)..(552): unsure at all n locations
tccaaacagaacaggctcctcgttgactgagataacaactccgactcttgagttgagtgtgtctggtcggaacagtatgcagttcagtatcacatcacaattccttcatatcttctctcttaccatcttcattatcattacctcttcactttcacaatccagccagttttgtgatgtgggaactgaaattccatcatccaagctgttgatcaagggtggcacggttgtgaatgctcagcacccccagattgctgatgtttacgtggaagatggcatcattgttgcagttaatcctaacatcagggtaggagatgacgtcactgtcattgatgccaccggcaaatatgtcatgccaggtggcattgatcctcacacccatctagatatggatgttggttttactgcaacggttgatgacttcttcagtggtcaggcggcagcattggctggtgggacaacaatgcacattgacttccgtataccacttaatgggagtttgacggctggttttgaagactatgnaaagaaagccaagaagtcttgcatggatta

SEQ ID NO: 223373 - DNA, 345 bp, Glycine max
ctctgcttcaacttgctccctcagaagcgaagaagaagccacagagaactagtctgctactctcacccgcaagaaaaaaatggcatctcacatcgttggatacccccgtatgggtcccaggagagagctcaagttcgctctcgagtctttctgggatggcaagagcagcgccgaggattcgcagaaggtgtcttctgatctcagggcatccatctggaagcagaaggctgatgctgggatcaagtacatccccagcaacactgtctctcactatgaccaggatctcgacgccaccgacaccctcggcgccgttccaccaaggtacagctgcaccggcggcgagat

SEQ ID NO: 223374 - DNA, 293 bp, Glycine max
gtttggaagaacacaagaggggttggaaaatggtggtgaggattaggctatcccgggtggggtgtaagaacaaacccttctatcgagttatggccgctgatagcagatcaccaagagatggcaaacacctctaagttctcggttactacaatcccttaccaggtcaagatggtggcaagagaatgggtctcaacttcgacagagtgaagtattggctttctgttggagctcagccttcagagcccgcggagcggtttctatttggagctggaatgctacccccaccacccatg

SEQ ID NO: 223375 - DNA, 436 bp, Glycine max
ttttggtctgtgatttgttgctttggtgagagagtggatatggacgaacggtacgagactttgaaggagcttggttcaaggaacttcggagtggcaaggttggccaaagacaaggagacaggagaacttgttgccatcaaatacatagaaaggggaaaaaagattgatgcgaatgttcaaagggagatagttaaccaccgatctttaaggcatccaaatattatcaggctcaaagagctctcaaaaagcaaaactgtgcagttcatcggatgttattgttgattcataaagaaatccaggtgtaactcaatggcttctgcaatgagttattaccgttggcattaatatgtcaaaactcacaagctataggggtgtgtagtgtagctgtagcctactatgcttggagattattactacaagaaatatgggcaccata

SEQ ID NO: 223376 - DNA, 362 bp, Glycine max
aatttttcttctctaactttcgcatattcgaaaaccaaaagcatgggtcagggaacaccgggcggtctgaaccggcagggtcttccgggggaccggaagccggacggcggcgacatgaaggagaagaagttcgagccggcggcgccggcggcccgcgtgggccgtaagcagcgtaagcagaagggcccggaggcggcggcgcggctgccgacggtgacgccgctgtcgaagtgcaagctaaggctgctgaagctggagcgcataaaggactacctcttgatggaggaggagttcgtggcgaaccacgagaggctgtagccgctggaggagaacgccgaagaagacatatccaaagtcgatga

SEQ ID NO: 223377 - DNA, 273 bp, Glycine max
cctcggggaattccaattccacattttcaagaaatttggaggcaaaaatgttcatatatgaggggggattattagttttcttatcaggcctatcctgaagccaaaggaaatgagatcagaatccctcggggaattccaattccacattttaaaaatataaggaggcaaaaacgttcatatatgaataggaattatttgtttttttattaagactatcctggagccaaaggaaatgatatctgaatcccttggggaattccaatgccacatttc

SEQ ID NO: 223378 - DNA, 469 bp, Glycine max
  unsure (1)..(469): unsure at all n locations
ctgtttcatttcatcttctggttttggatcattcagcgccacacagacatacatggctcttgagtcagctcctgcttcagctgacatcagaggagttcacactcatggtggaggctatgttcagtataatatctatggaaacctctttgaggtctctaggaagtatgtccctcctattcgccctgtgggaagaggagcatatggaattgtttgtgctgctgtaaatgcagagacgcatgaagaagttgccattaagaaggttggcaatgcatttgacaacagaatagatgccaaaaggaccctacgagaaattaaacttcttcggcacatggaacatgaaaatgtgatagcccttaaagacattattcgaccaccaaaaggtataacttagntgacgtgtacattgnttatgagttaatggatactgatctgcatcaaataattcaatccaatcaacacttgactgatg

SEQ ID NO: 223379 - DNA, 562 bp, Glycine max
cattcagtgaaacactagctagggtattgggagctctcgttgtttcggaggtagggaccttacgcagccatggccactgctacgaatgccgacgccgccccaccacgccagctctcccagaaggaagctgacatccagatgatgttggccgccgacgttcacctcggcaccaagaactgcgacttccaaatggaacgttacatcttcaagcgccgcaacgacgggatttacattattaaccttgggaagacgtgggagaagcttcagctagcagctagggttatagttgcaattgagaacccccaggatatcattgctcaatctgcaaggccttatgggcaaagagcggttctgaagtatgctcagtacactggtgctcatgctattgctggaaggcacactcctggaaccttcaccaatcagcttcaaacttccttcagcgagcctcggctccttatttttaccgatccaagaacagatcaccagcctattaaggaagctgcttttgagataatcccaccattgctttctggacaccgatcacctatgaggacgtggacat

SEQ ID NO: 223380 - DNA, 404 bp, Glycine max
tacagagatcactattacaatttccatttccaaggacattacatatacacagagagtgtgaaaggaagcatactagggaaacgcatccgcttccaagttacaaacttcagggaggctttatatatatatagaaagtgacaactatatatatatatatatattggaggtgaaatggtgaaggtgttgtcggtgtttctcctttgctttcattataattagggtgtttattggtgccgtctatggtgacaatgtcacctacgacgggagatccttaatcattgatggccaacataaaattctttactctggttcaattcattatacttgtagcactcctcacatgtggtctaatataaatgccaaagctaacgaaagtgtattagaagtatacaaacttatgtgtt

SEQ ID NO: 223381 - DNA, 542 bp, Glycine max
ctcagttagcttgcttatgatatgctctatgattgctcgatatgctccccgcgatcggatacaacttcctcaatcttattcgccttggttctgataaaacaactatatttgaacagcgaatggggaacattgataatgctgtccctttctttggagataagtttaacagaatctatccacttattatggttatatacacccttttggttgcaagcaatttctttgatagggtatttgattctcttgggagctggaagagatatgttttcgaaactgaagctgaagatatggatggttttgatccgtcagggttaattatcttgcagaaagaaagatattggcttgagcaaggaggcaatgtaggcgagcaagttgttccactagtgaggaattttaatggaattgatgttgagtctagtgacaatattatggtgaagaatggtgttgaaatgaagggaaattctgctttagttaataaagaaacagatggaaatctggctaaaacttttgaggaagagacaaggagatatagctcgagcagg

SEQ ID NO: 223382 - DNA, 411 bp, Glycine max
tccaactttccttcttcttcttccttccttcctcgtttcgttaaccttctaggtcgagtcatttctcacttccttttccaaccgaaccttttctccgataatcagagagagataatcatggattggggaaacgtaaccgcggaggatctgatcgacgcgctccgtgaggtggattggtcgtcgccgccgcgccctctgtcggaattcttctcgcgattcaccgatcccaggtcttcctccaaatggaacagccgcctcaaatgcaatctctactactaccggaccaactactttattctgattgtttctgttgtcatattggggtttcttaggaggccgattgctattgtaggtgcactttttactgcacttaacattgcttttttgaatgacagctttgtatgcaccttt

SEQ ID NO: 223383 - DNA, 353 bp, Glycine max
gtttttcttctctctctcaatctctttcatgtgagggtagaaccacaacagaacagagaccacacactctcctaactcgaggttatttttttctttccccaaagaggcatgagttgcaacgggtgccgggtcctttgaaagggttgcagcgagttttgtattctgcggccgtgtctacagtggatcgatacgcccgaagcacaaggccatgccactgtctttgttgccaaattcttcgggggcgccgacctcatgtccttcatttctaacgtgcccggaccccaaaggacagggcatttattgctttacttggcaactatgaacctcacctcagtgccatcactctttcgttg

SEQ ID NO: 223384 - DNA, 554 bp, Glycine max
ctttgtttgttgatccatctcttgtttcttgctttctttcttcaccatgtgacttgctgggaaaatcaccactgaaatcggggttcatgcaaccgctacaaagtggttcaacctcttcgcaacacaactccatcatgttcaaaacctaactgatagagtgcatggaaccaagctgcatcaaggtgaagactggcatcacaacgagacagtcaagcactggacttataccatagatggttaggttacaacatgtctggagagtattgaatccattgatgaacagagcaaaacaatcacctacaagctcttccgtggtgacattgatcataattataagaactttaagttcatctttcaagccattgatgataatgatcatggcggtactattatcaaatggaccgttgaatacgagaggcttcgtgaggagggtgatcctccatatggccacattgaatacctgcacaaatgcactaaagatattgatggtcatcttttcaaagcatagctagttctaaaagttatgcacttaaaaataatgggcttgacctttg

SEQ ID NO: 223385 - DNA, 399 bp, Glycine max
gttaatttgtctttctctatctctatcggtcatgggtgcttttgcttttgaggaggaaaacttctccaccgtggctccggcaacactctacaaagctctgacaaaagatgctgacactatcatcccaaagattattggggccatccaaactattgaaatcgttgaaggaaatggaggacccggaaccgtcaagaagataacagctagtgaaggtgaccaaaccagtttcgtgctgcaaaaagtggatgcaattgacgaggctaacttggtatacgactacagcatagtgggagggacggggttgcatgaaagtttggagaaggttacattccaaacaaaggtggttcctggcactgaaaggaatggttctatctgcaaggacactcttacattccacac

SEQ ID NO: 223386 - DNA, 423 bp, Glycine max
ggctaccagagtcttcagaccactgtgattccatttttgtatgagagcatgtttaggctagaagtccagattagaacagaagaaatggatttgatagctgagaggggcattgctgctcattatagtgggagagaatttgtcacaggcttggttggaagtgcaacaccaagtagtaaaagctcaagagggaagacagtttgtctgaacaatgccaatattgcactcagaattggctggctcaatgcaattagagagtggcaagaagagtttgttggcaacatgagttctagggaatttgtcgacactattacaagagatctgctgggcagacgtgtctttgtgttcacaccaaggggagagattaagaatctttctcagggtgctactgtcattgactacgcttatatgatacacactgcaata

SEQ ID NO: 223387 - DNA, 498 bp, Glycine max
atgggacagtgacttccgaattaacatcggatgcttgctcgccagctcccaggggtggtaatgtaatctttcctcttaaatttgtactctttccaattttttctttcccaccctgagactggttttgggtcaaactttgtcgtatctgctacctgctttagtgcacgtcaatgcacaatctcgattggcacatggggatggtcccattgtcttagttctagcaccaacacgagagttggcttgttccaattcaagaagatgctctgcaatttcggacccccccaaataaaagacacactttcatctatagcggcccaccaatacggcccccaaattcgggagcttcatagaggcgttgaaatagattattgctacacctggccgcctaatacatctgttggaagctcagaacacaaacctgcagagagtgacttaccttggcttggatgaagctgatctaatgttagacatgggttttgcacctcagatacatgaaat

SEQ ID NO: 223388 - DNA, 507 bp, Glycine max
tctcactcctccatctacgtttcttaaatcattttcttctttctctctttgggtaggttctcatttttctcattacactcttttttttttctctcaacttttctcttattaaccatagttcaacatattatatcatcacatatcatagtgatatattatatcatatcacaatgtgtggcatacttgctgtgcttggttgctctgattcatctcaagccaaaagggtgcgcgtccttgagctttctcgcagattgaagcaccgcggtcctgactggagtgggctccaccaatatggtgataactatttgggtcatcaaaggttagccataggtgatccagcgtctggtgatcaacccctgttcaatgaagacaaaactgtagtggttacggtgaatggagagatctacaatcatgaagaactcaggaaacagttgcctgatcacaccttccgtacaggaagtgactgtgatgttattgctcagctgtgtgaggagcacggagaaaact

SEQ ID NO: 223389 - DNA, 480 bp, Glycine max
tctctcgcgcgattatcgctgtttttcccgaacaagagagcatggccgtagctgatcccaagcctcactccgaacctaaggtctggaacttcttcaagcttccgttccgccattccgccgccaccaatacgacgccgtcttccgctaaccttcaccatcttcatcatcaccataaccaccaccaccaccaccaccaccaccacaaccctaataatctccccctcgagggttccacttcccacacctccaattccgtttcctccgtcgcgagatctcttctcccaacacgacgtcgtctcaagctcgatccctccaacaagctctacttcccttatgagccgggcaaacaggttaaggagtgccatcaggattaaaaacaccagtaaatctagcgtagctttcaagtttcaaacaactgcacccaaaagctgtttcatgcgtcctcctggggctatccttgcacctgcggagagtatcata

SEQ ID NO: 223390 - DNA, 382 bp, Glycine max
atccaattactttgtgttgaattcaatatgagtcttaagggatttttcgagggtggtgtcgcttccatcgtcgcaggctgcaccactcacccactcgacctcatcaaagttcgaatgcaacttcaagaaacccacactctccgcccagcctttgcctttcacgctcccactccaatgcctcctccgccgccctccggccccatctccgtcggcctccgcatcgttcagtcggagggactcgccgctcttttctccggcgtctccgccaccgtcctccgccagacgctctactccaccacccgcatgggcctgtacgacgtcctcaagcgccactggagccgaccccgaccgcggaactattgcccctcacaagaaaaatcac

SEQ ID NO: 223391 - DNA, 513 bp, Glycine max
  unsure (1)..(513): unsure at all n locations
ccaaacagttggaatcgacgaaacgcaaaggcatattgacattggcatggctacctcgctgtgtacacccagctacagagtcacactgaaactgtacggaacagattcccataagttaaacgcaaagccctcagttcgttataggcgtcgttttggcaccaccaccagaatatgctgcacctctaataattacaacgacaacaacatccaacgacgaccccaatccgaagctattcaagtttactcgcaaatcgagagattacttacagattctgttagacaatcacaggatggttggtggggttccccagactggagtgaagttgagggagcttggattctcaaaccgaaaagctctgaacccaattatgtagtgcattttatcggaggtatatttgttggagctgctcctcagcttacctaccngaggtttcttgagcgtctctcagaaaaggtatattgatcattgcaacgccatatgctagagggtttgatcacttcctcattgctgat

SEQ ID NO: 223392 - DNA, 438 bp, Glycine max
atgaatttgatgtccaaaacaaggtttcactcagctggttactcagccttggccatactttaggctttgcaagagtacgaggaattggccttgtgcatactgagctagtgtctggaatccctgctattttctcccactttgtgaccaacctaccagcattccaccaagtcctggtcttcctatgcatcaagcatgttccagttccacatgttagacctgaggaaaggttcctagttggtcgcgtcggtccaagagaattcagagtctataggtgcatagtgaggtatggataccatgatgtccacaaagatgatgatgagtttgagaaagaccttgtatgcagcatagcaaagttcattcaagcaggaagtggatgcaataagaacttttaaaattcaaatgatgagcctgagagggaggtggcaaaatgacagttgt

SEQ ID NO: 223393 - DNA, 471 bp, Glycine max
  unsure (1)..(471): unsure at all n locations
ctcgagccgggaaaaaatagcaatattgttgcctctggtggccttggtggggagggttttatatgggatatcgaggctgccatcactccggtttctaagtgcaatgatgctacaattgatgaatcttcaaatggtatcaatggttctggcaacttactaccattgacaagcttgcgtcctattaactcaagcaacaatatgtccatgcacactactcaaactcagggatacattccaattgctgccaaaggccataaagattctgtttatgcattggctatgaatgaaagtggaacaattcttgtctctggtggcacagaaaaggttgtgcgtgtctgggatgcaagatcacgatcaaagactctaaagcntagaggacatacagataacatcaaggctctgcttctggattctagtggcagatattgtttatcaaggatcttcagactctatgataacgctttgggatat

SEQ ID NO: 223394 - DNA, 488 bp, Glycine max
  unsure (1)..(488): unsure at all n locations
atccactcacctgcctcttcctcacccctttctccatctaacgagtaaggaaaaatggcgcgtaagaagatcagagagtatgactcaaagaggttgttgaaggagcactttaagagactntctggcaaggagttgccgatcaagtctgcacaaattactgcatcaactgatttcactgagctacaagagaaggaaccctggctttcatcttctaaattggttgtgaaacctgacatgttatttggaaagcgtggcaaaagtggtttggttgccttaaatttggattttgcacaagttgtttcgtttgtgaaggagcgtcttggaaaagaggttgagatgagtggatgcaaangacccataacaactttcattgtcgaacctttcatcccacacaatgaaagagttttaccttaacatttgtctccgagagacttgggaacagcataagcttttcanaatgtggaggaattgaaattgaagacaactgg

SEQ ID NO: 223395 - DNA, 455 bp, Glycine max
  unsure (1)..(455): unsure at all n locations
caaactccacctccaggaaagcaatttaatggcactatgcatttagcacctgattcatcaggtgaggctcaggttcgcaatgggcggcctcgagcagatgcccgaggaagaaatcagttattgccacggtactggccaaggtgtacagatctggagctacagcaaatttctattgattcaaattctgtaattactcccttgtttcagaaaaccttgagtgctagtgatgctgggcgaattgggcgtttagtgctacccaagaagtgtgctgagacctacttcccaccaatttctcagcctgaaggattgccacttaaaatccttgatgcaaaaggcaaggaatggatatttcaatttcgcttctggccaacaataacagcanaatgtatgtttagnagggtgtcacttcatgcatacagtccatgcagttgcaggctggtgatactgtaacattt

SEQ ID NO: 223396 - DNA, 540 bp, Glycine max
cttctccttcttttgggaaaagattaacaataaaagtgtggagtactgttgatagcaaagatgtttgggatcttcgacaaggggcaaaagataaaggggacagtggtgttgatgccaaagaatgtgttggacttcaacgccataacctccatcggtaaaggtggtgttattgacacagccaccggcatcttaggccaaggcgtcagcttagttggtggagtaattgatactgccacttgcttcttaggccgtaatatctccatgcaattgatcagtgctactcagactgatggcagtggaaatgggaaagttggaaaagaagtctatttggaaaaacatcttccgaccttgccaacgttgggagcaaggcaggatgcgttcaatattttctttgaatgggatgctagttttggaattccaggagcactttacatcaaaaactttatgactgatgagttttttctcgtcagtgttaaactcgaggacatttcaaaccatggaaccattgaatttgtttgcaactcatgggtttaccactta

SEQ ID NO: 223397 - DNA, 545 bp, Glycine max
gtctcgaggcgaaagcacacgtacaatgacgagctggagcagagcaagcgcagccgcggcgtcgtccggcggcgaggctccgccgccgccggcaccgcaaactcaatttccggcgcgtgctttactaaggcacgtgagcagctattcgagaaggctgttacgccgagcgacgttgggaaattgaaccgtttggtgataccgaagcagcacgcggagaagcactttccgttacagagctctaacggcgttagcgcgacgacgatagcggcggtgacggcgacgccgacggcggcgaagggcgttttgttgaacttcgaagacgttggagggaaagtgtggcggtttcgttactcgtattggaacagtagccagagttacgtcttaaccaaaggttggagcctgttcgttaaggagaagaatctgaatgctggtgacacggtttgttttcaccgtccactggaccggacaagcagctttacatcgattggaagacgaggaatgttgttaacaacgaagtcgcgttgttcggaccggtcggaccggtt

SEQ ID NO: 223398 - DNA, 448 bp, Glycine max
gtacaactcccttgtttgtgagttttgcgaagccgaagacatgctgagaactctagggctgaggcgtttccttggtctccactcgcattttcaccacctcctgcttcggcgatgcttatcatccggggcgcccaacttctccgcggatgcagaaacccgcaagtacgccggctacgctgccctcctcctcttctgcggcggcgccacctactacacattccccctcccggacgacgccaagcacaagaaggcgcagatcttccggttcgccccgctgccggaggacctgcacacggtctccaactggagcgggacccacgaggtgcagacgcgcaacttccttcagccggagaacgcggagcatctggagcgcgcgctgagggaggcgcggagccgtatccggccggtggggtccgggctttcgtcaatggattcggctttccagacc

SEQ ID NO: 223399 - DNA, 498 bp, Glycine max
  unsure (1)..(498): unsure at all n locations
gtgaccttcttcgtttctcgcaaagtttaagtaatcatgggtaaggaaaaggttcacatcaacattgtcgtcattggacatgtcgactctgggaagtcaactaccactggtcacttgatctacaagcttggaggtattgacaagcgtgtgattgagaggttcgagaaggaggctgccgagatgaacaagaggtcattcaagtatgcctgggtgctcgacaagctcaaagctgagcgtgaaagaggaattaccattgatattgctttgtggaagtttgaaaccaccaagtactactgcacggtcattgatgctcctggacatcgtgactttatcaagaacatgattactggtacctcccaggccgactgtgctgtccttattattgacttcaccactggtggttntgaagctggtattttaaagatggacagacccgtgagcatgctcttcttgctttcccctaagtgtgaagcagatgaactgttgctgtaacaagat

SEQ ID NO: 223400 - DNA, 463 bp, Glycine max
gtgaccttcttcgtttctcgcaaagtttatgttatcatgggtaaggaaaaggttcacatcagcattggcgtcattggacatgccgactctgggaagtcaactaccactggtcacttgatctacaagcttggaggtattgactagcgtgtgattgagaggctcgagaaggaggctgccgagatgaacaagaggtcattcaagtttgcctgggtgctcgacaagctcaaagctgagcgtgaatgaggaattaccattgatattgctttgtggaagtgtgaaaccaccaagtactactgctcggtcattgatgctcctggacatcgcgactttatcaagaacatgattactggtacctcccaggccgactgtgctggccttaatattgacttcaccactgggggtgttgaagctggtattttttaggatggacagacccgggagcatgctcttcttgctttcaccc

SEQ ID NO: 223401 - DNA, 464 bp, Glycine max
cactcagccgctgcgaggcgaacagatagatccgaagccagatttcaagatgaagtgcaagattgtgaatcccaccactggttgtcagaagaagctggagatcgatgatgacctgaagctacgagcattttgggacaagaggatctcacaagaggttgttggtgatgctctgggtgaggaattcaaaggctatgtcttcaaaattactggaggttgcgacaagcaaggatttccaatgaagcatggagtgttgacccctgggcgtgttcgcctcttgctgcatagaggaactccttgtttccgtggttatggaaggcgctatggagagcgtaagaggaagtctgttcgagggggcattgtcagccctgacctctctgtttcaacttggtgattgtgaagtaaggtgaaaaggttttatctggcctgacagatgttgaaaagccatgatgaggggtccaatgaga

SEQ ID NO: 223402 - DNA, 486 bp, Glycine max
gtttctttactgatgcctatgatctcttctgcatttccctagtcaccaagctactagggaggctatattacacagaaccaggtgcaccaaagccgggaactcttcctccaagagttcaagcttctgtgactggtgttgcactgtgtggcacattagctggccaactattctttggttggcttggtgacaaaatggggagaaaaaaagtctatggactaactcttattctcatggtagtcagctcccttgcctcaggactctcctttgggtcaactgcagagggtgtcatggccacactttgcttcttcaggttctggctaggctttgggattggtggggactaccctctttctgccacaattatgtctgaatatgcaaacaagaagacacgtggcgcattcatagccgctgtgtttgcaatgcaaggatttggaatcctggctggtggagtggtggcattgattgtctcatatgcatatgatcaaa

SEQ ID NO: 223403 - DNA, 433 bp, Glycine max
aattaacctcactcaaactcgcgatttcatataccaacaacagttcttgcactgggggtgaggatgtagctggaacctgcacttgctttgtttgtgttacgcttgtttctgcacttgccgcccacaccaagtgcaaaatcaaaagcactatgccaccttccaaaccctccaagcccaaagcactttcttccctcaattggccaccttcacctcttaaaagataaactttgtcactatgcactaatcgatctctccaaaaagcatgggccgttattctctctctccttcggatccatgccaaccagagttgccttcacccctgtgttgttcaagctctttctccaaacccactaggccacttcctttaacacaaggttccaaaccctctgcataagacgccttacttactacaacttctgaggccatggttcca

SEQ ID NO: 223404 - DNA, 618 bp, Glycine max
caaactactccttgtttatgcctttttatgactacatctatggcaccacagacaaggcttgcgataaattacacgagtcagcattaaaacaagaggaagaaatccctaatgttgtacacctaacacatctcacgacccctgaatccatatatcatctcaggcttggatttgcttacttggcttctaagccttacacgtcaaaatggtacctttgtttgatgtggccagtaacagcttggtccatgatcctcacatgggtttatggccgtacatttattgaggaggggaatcgttttgacaaactgaagttgcaaacttgggcaatacccaagtacagtctccaatacttcatgcaatcacaaaaagtggctatcaacacaatgatagaggaagcaatactcgatgctgacagaaaaagcataaaagttttgagcttaggccttaggaatcaaggagaggaccttaacatctatggaggactatatgttagtaggcatccaaagctaaaagttagggttgtagatggaagcagtctttgtagttgctgttgttcttatagcatttccagggaacaactcaagttttacttaggcaactcaccagaatggtatgctcttg

SEQ ID NO: 223405 - DNA, 559 bp, Glycine max
ttctgaaacaatttgcccaattgtttgagatgttcaatatgagatttgtatctcaagattgggtggtttcatgtgcactaatacttctggtgtcatgcacaacatactcatcagcttctttggggaaacctgagaacaacataaaaacatctgtttttaaatcacccaagattgagctaggtccagggttagtttcaaacaaattttattttgatgttgactttccaagaggccatattgcactcaagagtttcaatgctgaattggttgatgagtcagagaaatcagtgcctctccaagaaacctatctccatcactggcttataataaaataccaccagccaaaaaatgtgacacacaataaccaaacagatattgtttttatgagaaacagtggcttttgccaggatggtactcttatccagtattttggtcttggatcagaaacaagaggaaccgccactgatattcagacccttttggatagaagttggaaacccttcagaaatccatatggatatgatgagaaatggttgatcaacgtgcatgccattgacac

SEQ ID NO: 223406 - DNA, 397 bp, Glycine max
ctcgagccgttcaaatctgaagaatctcattccttcaaaatcatctcctaacttcaagtttgtgaagggggatattggaagtgctgatcttgtcaactaccttctcatcactgagtccattgacacaataatgcactttgctgctcaaacccatgttgacaactcctttggcaacagctttgagttcaccaagaacaacatttatggtactcatgtcctattagaagcctgcaaggtaactggccagatcaagaggttcatccatgtgagcactgatgaggtctacggagagacagatgaagatgctgttgttggaaaccatgaggcttctcagttactccccacgaatccatactctgcaacaaaagctggggcagaaatgcttgtcattgcatat

SEQ ID NO: 223407 - DNA, 471 bp, Glycine max
ctcgagccgttcaaatctaaaaaatttcattccttcaaaatcatctactaacttcaagtttgcgaagggggatattgaaagtgctgatcttgtaaactaccttcttatcactgactccattaacacaataaagcactttgctgctcaaacccatgttgactactcctttggcaacagctgtgagatcaccaagaacaacatttatggtactcatgtcctattataagcctgcaaggtaactggccagatcaagaggttcatccatgtgagcactgatgaggtctaccgagagacagatgaagatgctgttgttggaaaccatgaggctttttaattacttcccacaaatgcatactctacaacaaaaggctgtggcagaaatgcttgctatggcatatggcgagggcgtatgggttacctgtgatcacgactcgagggaacaatgtttatgggcccattcagccccctgag

SEQ ID NO: 223408 - DNA, 385 bp, Glycine max
gtcttcgtttccctggtcaactcaactctgatctgaggaaactggccgtgaatctgatccctttccctcgtctgcacttcttcatggttggatttgcgcctctaacctctcgtggctctcaacagtaccgtgcattgacagttccagagctgacacagcaaatgtgggatgccaagaatatgatgtgtgccgctgatcccaggcacgggcgttacctcacggcatcagccatgttccgtggcaagatgagcacgaaggaggtggatgagcagatgataaacgtgcagaacaaaaactcttcgtactttgtcgagtggattcccaacaatgtcaagtcgagtgtgtgtgacattggtcctagagggctctccatggcgtccacatt

SEQ ID NO: 223409 - DNA, 502 bp, Glycine max
ctcgagccgcttgggcagcgaatcacaatggcgagaggattgaagaagcatttgaagaggcttaatgccccaaagcattggatgcttgacaaactgggtggtgcatttgctcctaagccctcatctggaccacacaaatccagggaatgcctgccactcatactcattttgcgaaaccggctgaagtatgctctgacataccgtgaagtcattgctattctgatgcagcgacatgtccttgttgatggcaaagtcaggacagacaagacatatcctgctggtttcatggatgttgtatcaatccctaaaacaaatgagaacttccgcctgctgtatgacaccaaaggccgattccgtcttcactcagtcagagatgacgaggctaagttcaagctttgcaaagttcgctcagtgcaggttgggcaaaaggtatcccatacttgaacacctacgatggtcgcactatccgctacccagaccctctcatcagagctaatgacac

SEQ ID NO: 223410 - DNA, 408 bp, Glycine max
agagaacgtgagtactttaatagttcccctgaatataaacaccttgcaaacagaatgggttctgaacatctggcgaagatgctctcaaagcatttggagacagtaatcaagtccaaaattcctggcattcaatccctaattaacaaaacaattgccgaacttgaagctgaactaactcgtttaggaaaacctgttgcagctgatgctgggggaaagttgtatgctatcatggaaatatgccgctcatttgatcaaatatttaaagaccatcttgatggcgtgcggcctggaggtgataaaatttataatgtctttgacaatcagctccctgctgctttaaaaaggttgcagtttgataagcagctttcaatggaaaatataaagaaacttattacagaagctgatggg

SEQ ID NO: 223411 - DNA, 499 bp, Glycine max
  unsure (1)..(499): unsure at all n locations
aacaaattacaaataggaaaaaaatgaaagtaacagttgtgtgttgtgtattggtggggctgggtgcactaccattctcttcggatgcacaactagacccctccttttatagggacacatgtcccaaagtgcattctattgtacgtgaagttgttagaaacgtttcaaaatcagaccctcgaatgcttgctagtctcataaggctccactttcatgactgctttgttcaaggctgtgatgcatcaattttgttgaacaacacagccacaatagaaagtgagcaacaagctttcccaaacaacaactcaatangaggtttggatgttgtgaaccagatcaagactgcggtggaaaatgcttgtcctggcgtagtttcttgtgctgatatcnntgcccttgcagctgagataatctttgttctgggtcatggccctgattggaaaattccattgagtacaaagggacagtttaacagcaaacagaacacttgcaaaataaa

SEQ ID NO: 223412 - DNA, 476 bp, Glycine max
ggctcgaggcgaaagcacacgtacaatgacgagctggagcagagcaagcgcagccgcggcgtcgtccggcggcgaggctccgccgccgccggcaccgaaaactcaatttccggcgcgtgctttactaaggcacgtgagcagctattcgagaaggctgttacgccgagcgacgttgggaaattgaaccgtttggtgataccgaagcagcacgcggagaagcactttccgttacagagctctaacggcgttagcgcgacgacgatagcggcggtgacggcgacgccgacggcggcgaagggcgttttgttgaacttcgaagacgttggagggaaagtgtggcggtttcgttactcgtattggaacagtagccagagttacgtcttaaccaaaggttggagccggttcgttaaggagaagaatctgaacgctggtgacacggtttgttttcaccggtccactggaccggcaagcagctt

SEQ ID NO: 223413 - DNA, 478 bp, Glycine max
  unsure (1)..(478): unsure at all n locations
aatttctctctgccttgctcatttacacacctctccaacctttcactttcagctttatttgaatccctctctctcctttccaaatggccagcgttgaggttgcacatcaaacaccaacaacagttccagaaaatgaaacaaccgaggtaatcaagacccaggaaacaaccccggaaccagtaccagccactgaggctcctgcaacagaacaagcagcagctgaggttcctgcccaagaagaacaacaagcaactgaggttcctgccccagaatcaaccaccgaagcaccaaaggaagaaaccaccgaagcgccaacaacagaaacagtagaaacaacaactacagaagaagccaagccagaggagcctaaagaagttgcagttgagaccgangagngtggtgacaaaggagacagaggaagagaagccagcagcagaagagaaatcagaggagaaaactgangaagtgaaagaagaag

SEQ ID NO: 223414 - DNA, 527 bp, Glycine max
  unsure (1)..(527): unsure at all n locations
accacggctccatcgacctcaacaaagtcagctacctcttccgcgtcggaagggcgcatcggctccaaacccctccacctgtgggaccggtcctccgaccttgccatcgacttcgtcacgcgtttcaccttctctattgagaagttgaacttaaccgaagtcgcctatggagacggcttcgcgttttacttggctccgttggggtaccggattccgccgaactccggcggcggaacctttgggcttttcaacgctaccaccaacagcaacctccccgagaatcatgttgtcgcggtggagttcgacactttcatcggctccaccgacccgccgacgaagcacgtnggcgtggacgacaactcccttacctcggctgcgttcggaaactttgacatcgacgacaacctcggaaagaagtgctacaccttgatcacttacgccgcctccactcaaacactctttgtttcttggtcctttaaagcaaaaccaggatncactaaccacaacgacaattctttttctttttc

SEQ ID NO: 223415 - DNA, 407 bp, Glycine max
tctagatcgcgagcggccgccctttttttttttttttttagttcaacgagcacaacccaattccaattccaatcaagctaaattcaaatttcgaggcttcaaaaagaatacaaatatatctaatcctcacaataaaagccggtaacaaagtttactagatagaagagaatcttaaaattccaattccatataataaaaacttcagtgtccttaataaaataggcaatttggaaaacacttgagaaaatggaaggacaaactaaaacggcccagtacatccacaattcataacagacatgaatgcctaaaatcccagtaccaaagagatattagcaacaaacaccttctcccttcaaaaagatatggaggagaagttcaattctaattagcagtaaaatatttttact

SEQ ID NO: 223416 - DNA, 434 bp, Glycine max
  unsure (1)..(434): unsure at all n locations
gaagagttggaggatttgatgaggtaaggatgaatgtattcttgttggtcaccatgttttaggacaaagttttggaagaaagagtttgtggggagtggacttgagagaaggtttgaggagaagaatttggagggatcaggaagaacagtggattgtgtttgagggaagatgtaagatgtattggattggatgttaaccattgttgctgaaggtggtttaattcgagtttgattatggtgaacaatggttgaatggttatgctatgccatgtggtgtctggctgcatatgagtgatcccatatggtatggttgtagtatgtgtgttggaataagnngggatccattgtaattcttattttcaacttcgttggtagatcatgctcttgcaataagaagcagaatttcttgtgcttaanaaaaaaaccccaaactac

SEQ ID NO: 223417 - DNA, 541 bp, Glycine max
  unsure (1)..(541): unsure at all n locations
cacaacacaacaaacaagaagatgaccaccaccttcctctgctccttactcttgctgttgaggacaaccttatcagagtcccaaccagaccgtttcatgagacgcaaaccccttagtggttctcaacaagaatacttcgaagtgagttaccctccaaactcacacgaacccacaacaccttcatgcacccaccgaataatccaccacgccttcgccaacaccatcgattctccaccgtacaccacctcttacacaccgcccccgcggtgcggggcaccgtggtctcgggtggtcctccacttccacgcgcggtgcaagggcgagcagtacgaccgcatcgccgccatctggctcgccggcgccgagatccttcgcaccagcaccgccgagcccagccccgccggcatcttctggaacgtccgcaaggacgtcaccaaatacttcgncctcctcgccaagcccaaccaagacctcaccatgatgctcgaaaacatcgtcaataacgaattcaccggtgtctaccacgtcaccgtcactcttt

SEQ ID NO: 223418 - DNA, 573 bp, Glycine max
cttgcagcatgctacaaggctttgaatgatcaccacgtccttcttgagggtaccctattgaagccaaacatggtcacccccggatccaattctgctaaggtttcccctcaggtggttgcggagcacactgttagagcccttcagagaaccgtgcctgctgcagttcctgctatcgttttcttgtctggtgggcagagtgaggaggaggcatccgttaacctcaatgccattaaccaggtcaatggaaagaagccatggtcactctctttctcctttggaagggcacttcaacagagcacccttaaggcatggagtggaaaagaggagaatgtgaagaaggctcaggaagcccttttggtaagagccaaggctaactcagaggcaactctgggaacctacaaggggtaactcaaagcttgctgatggtgcctcagagagcctccatgttgaggactacaagtactgatcaatctaagtgcgggtaggaatccgtattttatgggtacaaccgaattttcttgttaatgagtattgtgcttcgactcttcccagaataataaatcgttggaattt

SEQ ID NO: 223419 - DNA, 507 bp, Glycine max
gacgggggacgagattcttccttggttattgaatcaacagtcgtcaccggttcccagattaacaaagacagaattcatctcatctgctatgaaacgccttggtgagcttgaagaaaaggttgacatgctacagtcaaaaccaaatgtgatgccatatgagaaagaggagctgctgaatgcttctgtttatcgtgtggacgcattggaagcggaactgatcgctacaaagaaggctttgtatgaagctttgattagacaagaagaacttctggcatacattgatagtcaggaaagaagcaaattcgagaaaaagaagttttgctgttgaagagataactgtacagaacggagctgttcggcaaaatgatggagatatatattacttcctttcctgcttgtatattttacctgcacagtactttgtcttcaagatggctttttaattttcatcataaaattcttgtattatggaactctattacacgtctacttgtatgtctttctctt

SEQ ID NO: 223420 - DNA, 357 bp, Glycine max
tgctgcggttgctccaccacctaattactttccctgtaaatcaagtttagttcgcacaagggtttaaaaaatggctgatgctgaggacattcaacctcttgttgttgataatggaactggaatggtcaaggctggttttgcaggtgatgacgctcctagggccgtgttccccagtattattgggcgaccacgccataccggtgtaatggttgggatgggtcagaatgatgcttacgtgggtgatgaacctcaatcaaaaaggggtatactcaccttgaagtattctatagagcatggtatacccagcaactgggatgatatggagaagatttggcatcgcacattttacaatgagct

SEQ ID NO: 223421 - DNA, 515 bp, Glycine max
cgttagtgctttgtttaggtgaactaattctgagaccttgcaagacttcatcaatggctgtgaaagtttatattgtgtactactccatgtatgggcatgttgagaaactagcagaagaaataaagaaaggggcttcctctgtggaaggtgttgaggccaagttatggcaggtacctgagacactgctggatgaggtgcttggtaagatgagtgcaccacccaagagtgacgtaccagtcattacccccaatgaactatccgaggctgatggctttgtattcggcttcccaacaaggtttggaatgatggctgctcagtttaaagcctttctagatgctactggaggcttatggagagcacaacagcttgcaggcaagcctgctggcctcttctacagcaccggttacaaggtggtggacaagagactacagcactcactgctatcactcaactggttcatcatggaatgatattcgttccaatcgggtacacattcggtgccggcatgtttgaga

SEQ ID NO: 223422 - DNA, 547 bp, Glycine max
cgatttccttctctacaacacaacgctctcttttcttgcaaccaaaatacttgttccagtgtctactctactcataaaggatttgggacatcatgtgcagtgattcgaaaagtaaactttcttccccaaccctcgtcgtcatggagaatagtaacattcagaagcagaatctggatggtctctacaactcggttttgcttgaattgtctgcatctgatgattatgaagctttcaaaagagaggtggaggaaaaaggcttagatgtgaacgaggcaggcttttggtacggtagaagaattgggtcaaagaagatgggatctgaaacgaggacccctctgatgattgcttctttgtttggaagcgctaaggtgctcaattatattcttcttcagaaaggaggaggtgttgatgtgaacagggtctgtggttctgatagggccactgctctccattgtgctgatgctggtggctccgaatcctcactgagattgtcaagctcttgcttgatgctggggctgatgctgaatgccttgatgcaagtggcaac

SEQ ID NO: 223423 - DNA, 599 bp, Glycine max
  unsure (1)..(599): unsure at all n locations
ctcgagccgctcgttccttcgcaaactctctccgactcgatggcgacgtagacgacgaaaacgacatcgtactggatccacctaccacctcatcgagagaccccgcgcaacagcaacacgaggcacgagaaaatgcattcggatcagaagctgaagaagacgaagaaacgcaagatcgtgctggagtcaaagaggacctcgacgaaatcaagcaaaccctaactcgtcaattttggggaatggcctccttcctcgctccaccgccatctgattctcattctcattctcaatccgatccctcttcgttcgtttccgatcaatccaatcatcgcgctgtttctccgaacgaagaactgcaattggatgaggctgcgatttccaatcactctaattcggtttcggtgggatccgattcggaaggggattttggtctcgagcaacgcgcggttggaattaccgaagaggtgctggtcttcgcgatgaacattgctatgcatcccgagacgtggttggattttcctattgatgaggaagatgacaccgacgatnttgacatgtctgatgcacaacaagagcatgcttgcggtgttgaaagattg

SEQ ID NO: 223424 - DNA, 508 bp, Glycine max
attcaaacattgggtacttcaaagtgtcgggaagaaaagaaataaataaacgaaaacgtgttttcccataagcaataactctataacccacgcagttacacttgcaccatttttttctccccaaacgtggtacccaccaaaccaatgaaaaaatcaagtctttttccatctgggaatttccttttccttttccttcttcttcttctcaatgtctctgcttcgttggcagcaccaacaccagaatcggtgtacacctccttcctccagtgtctcacaaactacacaaaatcacctgaccaagtttccaacatagtatttgctcaaaccaacgcttccttttcttcagttctccaagcctacatacgcaatgcccgattcaacacaacttcaaccccaaaacccttgcttgttgtcactccctcggaagaaccccatgtccaaggtgcagtaatttgcgccaaaagcattgcgattcaactcaagatcagaagtggtggccatgactatg

SEQ ID NO: 223425 - DNA, 471 bp, Glycine max
acagaataagaacatatattagattgaaatacaatttgctacgggttcaaatacacgtccaatagcgttataaaacatacatcataggaaaatgaaaagtaaattttggttttcttaagaaaaaaggtagcaccatctcagcatattggtagaggagcaccattccactcttttagacagtccaacaaaggatcgatgaacttcccttcacacaatgcagtaaataccttatcagattcctcaccaggtgacttgactttctctcctgttagcaaagttgtacccaaattttctctcacaaacttatataatgggtaagacctgcattccttaattcggttaggaatagcaggatttccattctcaacttcaatcctagcactttccacctttttgggcaaaagggcattgagctctttttcaaaggcaccaatcttttggaaaattgaggtacttgaatttcgctttttt

SEQ ID NO: 223426 - DNA, 560 bp, Glycine max
cggctcgaggttgtaagtatgttttgggtcgaatgatacgtgaagttgcattttgtattttctctaatttgtcctaatattacaggttgcaatcaagaaaatgaaaaagaaatattactcttgggaggagtgtgtaaacctgagagaagtcaagtcattacggaaaatgaatcatgcaaatattgtgaagctgaaggaagttatacgagaatgtgacactctgtgccttgtttttgagtacatggaatacaacctgtaccaacttatgaaaaacagggaaaagctgttttctgaaaatgaagttagaaattggtgttttcaagttttccaaggtttagcttacatgcaccagcgtggatactttcatcgtgatcttaagcctgaaaacttgctggtcaccaaagatgtcatcaagattgctgattttggcctagccagagagatcagttcactaccaccctatactgagtatgtctccacacggtggtatcgtgctcctgaagtcctgcttcagtcccatctatatagctctaaagttgatatgtgggcaatgggtgcta

SEQ ID NO: 223427 - DNA, 588 bp, Glycine max
  unsure (1)..(588): unsure at all n locations
cttggtaaacgcaacagcgattgaactctagacatagaatagtaaacggtgtgtagcttcgatagattaaacgaacacagagcgagcgaaagtagaatctgaaaaacaatggcggcgaagctagacacccacgccgtggcttccgatctgatcgacttcctcaacgcttctccaacggctttccacgccgtcgacgaggcaaagaggcgtttgcgtagcgcggggtaccaccaactctctgagagggaagtgtgggaactgcaaccgggcaacaagtacttcttcaccagaaatcactccaccatcgtcgccttcgccatcggcaaaaagtacgttgctggaaatggattctacataattggggctcacacggatagtccttgtctcaaactcaagcctgtcaccaaggttgttaaggctgggattttggaggttggtgtccaaacctatggaggtggtctgtggcacacatggtttgatcgagacttgactgtggcggggagggtcattgtgcgggaagagaatgctggttctgttncgtactcacatcggcttggtagaatgaggaacctataatgcgaataccgc

SEQ ID NO: 223428 - DNA, 435 bp, Glycine max
aggtattccgatattcggacccatcaacttgttatgaaatcacattgatagcctctactcgggtcctagctcgtctaagagctagatttgcctcaattggttggctcttgccttccgccttattcaaattagcttctgctatttcaagagtttgctgggctttttggggatcaatggcactacccttttccgcattatttactaaaacagggatctcattattggttattctagcaaaaccgcccatcaaagccatcgttaaccattggtctttaagaagacgtattctcaaaatacctatatctacgggtgtggcaataggcgcatgatttggtaatactccaatttggccgctattagtagataaaatgatttccttcactttcgaatcccaaacaattcgattgggggtcagtacacaaagatttaaaggca

SEQ ID NO: 223429 - DNA, 489 bp, Glycine max
cgaaagaagaaaattaaaacgaacatgcatgtatctatgaatgatggaaccaccacagacgaggttgatgatcaacgttttcatagtgagtttcttagcactacttgtgaacttggtggtgggagtgctcggcgctgataactatagcagagatgattttcctcttgactttgttttcggttcaggaacctctgcttatcaggtggaaggagctgctaacaaagatggaagaactcctagcatctgggacacctttgcctacgctggatatgcccatggagaaaatggagatgtagcctgtgatgggtaccacaagtacaaggaagatgtgcagctaatgctggaaacagggcttgatgcctatagattttcgatttcatggtcaagattgctaccaaatggcagaggacccgtcaatcccaaaggattacagtactacaacaatctcatcaacgaacttatcagcaatggaatccaaccacatgccac

SEQ ID NO: 223430 - DNA, 529 bp, Glycine max
cggctcgaggttgtaagtatgttttgggtcgaatgatacgtgaagttgcattttgtattttctctaatttgtcctaatattacaggttgcaatcaagaaaatgaaaaagaaatattactcttgggaggagtgtgtaaacctgagagaagtcaagtcattacggaaaatgaatcatgcaaatattgtgaagctgaaggaagttatacgagaatgtgacactctgtgccttgtttttgagtacatggaatacaacctgtaccaacttatgaaaaacagggaaaagctgttttctgaaaatgaagttagaaattggtgttttcaagttttccaaggtttagcttacatgcaccagcgtggatactttcatcgtgatcttaagcctgaaaacttgctggtcaccaaagatgtcatcaagattgctgattttggcctagccagagagatcagttcactaccaccctatactgagtatgtctccacacggtggtatcgtgctcctgaagtcctgcttcagtcccatctatatagc

SEQ ID NO: 223431 - DNA, 552 bp, Glycine max
ctagtagttaagaaacattagttgaataaaataagaaacattatacctagctattagagtttaagatggcttcaaaaacttgttcctcccttgcccttttcctcacactcaacctcgttttcttctcacttgtctctgcatgcggttatacaccatgccctggtccaaacccaaagccaaggcccaaccccaaccctaaccctaaccccagcccaagtggctcgtgcccccgtgacgcactcaaactaggtgtatgtgccaatgtgctaaacttggtgaacgccactttgggtcaaccaccagttaccccttgctgcacccttctcgatggtctcgttgaccttgaagctgcagtgtgcctttgcactgccctcaaagcaaacattttgggcatcaacctcaaccttccaatctccctcagcttgcttctcaatgtttgctcaaggaaagctccacgtgatttccaatgtgcctaatcatggcccatgagcaagttgctacgtgcttattcctagttgtgggtttccgttgtttttttttttttttgaaatt

SEQ ID NO: 223432 - DNA, 541 bp, Glycine max
gaattaaacctattttcccttcatttcttttcacattagacaagagtaaaacaatgccctacaaccaaatgaattacaaatcaaaggtcaagaaaactatacacaagaatgaaggacaaagcgaaacaagaacttatgctatggattaataattagactccccacgctaaaagaggcaggcagttctgaatgatgaaccactctctaatctctaacaagggttttccccaaaccattcagcaagcaaaacttcactggtcccacatggcctggaatattgcaggtctgtgcttcaaccaatgaaccatctctctgtcaagtggagagttattaattacagcgtctaacattgggctaccaaaaaatttcggagaatttttgaatgaccaaatccggtctttgggccaaggtttctggggctgcttctccattcttgccagcatagatctgacagtccttggaccataaacacgatgtcgtgaaggcttctgagctttggcataaaaggaactgatgtcttgtaatgacaaacaaccccgct

SEQ ID NO: 223433 - DNA, 448 bp, Glycine max
agcaaagaatacgatccttcaaatcttctcagcatatatattacttgaaaataaaaccaaaaaccatagtcatctctttaaagaacaacctccaacggctaaaagaaaaagaacaccacaatgataaattgacttaactagctaaattataggttcttaaaaaaattaagaccacataacttatccagccttcaaatacacatcaaaatgatatggcaaattgctagctcaacggcgactgcaaggtagcaaaacccatgaaagttgatacattctctaagcaaccagagtgctagcagttgatgattcgtacttccagactggtgggagcttcttagtcttcttgtaatagcgagcaagtcggtggattctgctctcaacaagaatcaacctgaacttggagtccttgtccttcctgttcctctcaagatgctttctaactgaaact

SEQ ID NO: 223434 - DNA, 598 bp, Glycine max
aagaaagctacctagagcttgcacctattggtatcttctacaatatcctctcatagtgctcttcttcttcttcattttcattatcaagatgtctttgctttcggatctcatcaacctcaatctctcagaatccacagaaaagatcgttgctgagtacatatgggttggtggatctggtatggacctcagaagcaaagccaggactcttcctgggccagtgagtgaccctgcaaagcttccaaagtggaactacgatggctctagcacagaccaagctccaggggatgacagtgaagtcatcctatacccacaagctattttcaaggacccctttaggagaggcaacaatattcttgtgatttgtgatgtttacacccccgctggtgagccacttccaaccaacaagaggtatgatgctgccaaaattttcagccaccctgacgttgctgctgaggaaccatggtatggtattgagcaagaatataccttgttgcagaaagatgtaaattggccacttgggtggccacttggtgggtttccttgaccacgggcccatactactgtggaactggtgctgataaagcatatggccgtgata

SEQ ID NO: 223435 - DNA, 432 bp, Glycine max
caaacatcttcacaaactagtaatatttttcttctaatccattttattattcataatgggtatttttacatttgaggatgaaaccacctcccctgtggctcctgctaccctttacaaagctctagttacagatgcctacaactacatcccaaaggctgtcgaagccttcaagagtgtagaaaaccttgaggggaacggtggccctggaaccatcaagaagatcactttcgtggaggatggacaacgcaaggttgtgttgcacaagaacaaatcagatgatgaggcaaacttgggatatagctatcgcgtagatgggggagttgggattccagacacagtggagaagataacattccaatgcaaattgcctgctgtcgccaactgagggtttgctgtgaagcctactgacaaattccaaaccaaaggagatgc

SEQ ID NO: 223436 - DNA, 541 bp, Glycine max
ccgatggctaatctctcactcttgttcttcggtctcctcctattctccgctgccgtagccaccgtcgaacgaatcgacgatgaagacaaccttctgatccgtcaagtggtgccggacgcggaggaccaccacctgctcaacgcggagcaccacttctccgccttcaagacaaagttcgccaagacctacgccacgcaggaggagcacgaccaccgcttccgtatcttcaagaacaacttgctccgcgccaagtcgcaccagaaattggacccctccgccgtccacggcgtcaccaggttctccgatctcactccggctgagtttcgcggccagttcctcggcctgaagccgctccgccttccctccgacgctcagaaggctccgatccttccgaccagcgaccttcctaccgatttcgattggcgcgaccatggagctgttaccggcgtcaagatcagggctcgtgcggatcgtgttggtcatttagcgcccgtggagctttgaaggtgcccatttctttctaccggtgggctcgtgagcc

SEQ ID NO: 223437 - DNA, 410 bp, Glycine max
  unsure (1)..(410): unsure at all n locations
tgccgatatcgatactcgntgactaaaacccangtttnatgatcacgggccgaagcagctaactagtctggaggcgccctctcctgttaatgcatctgtttttgaatggtatgaaagattccaaagaactggggactgttccagaaatggacgccgaactatctatggaacctgcacaccagacctctactcgagttctaaccggccaaagaccaatactcgccccaattggtggagattaggcttacgccttgttcaaagcagcttctgctctttcaacagttaggtggccttattgtggggcaatggcactacccttttccgcgttatttactaaaacagggatcccatatatgggtattctaccgaaaccccccgtcagagccatcgttaaccattggtctttaaaa

SEQ ID NO: 223438 - DNA, 450 bp, Glycine max
ccgcgccacttctgaatctattgaatcaacaattatgtcggacgaagagcaccatttggagtacaaggacgacgccggagcctacaaagcctacaatcagcatgccgggaccatccgcgagaacggctacatcgaaaacaaaggccggccctgcaagggttgtggaatggccctacctcccaaaactagaaaaagcactcggcacttctaagaagaaactgctgggggaattgaggatcaactgccaacacactttgcgatatatgtgccaaaacagagaactgagatgtggctaatgtgaaaaaaactgacaaccaacccattgataaccctggggatggaaaaaagagtctgcttacagaacctgtttacactgatgatgacataaggccatgcactggtgatactccaattactccgataattgatggataagaggatggccttgat

SEQ ID NO: 223439 - DNA, 548 bp, Glycine max
aatggcgagcaggtactgggcagtgtctcttcccgtccccaactccgcatctcagctctggaaccaattccaggaacgaatctccaagcattccttcgacactcctctctacagattcaacatccccaacctccgcatcggaaccctagactctctcctctccctcagcgatgacctcgccaagtccaacaatttcgtggaaggagttacgcacaagatcaggcgccagattgaggagctcgagagagtttccggcatcgacaccggcgccctcaccgtcgacggcgtccccgtcgattcctacttgaccaggtttgtttgggatgaggcaaagtacccgaccatgtcgcctttgaaggagattgtggatggtattcacagtcaagtggcaaagattgaggatgatctcaaggttcgtgtttctgagtataacaatatccgcagtcagcttaatgctatcaaccgaaagcaaactggaagcttagcagtccgtgatctttccaacttggtaaaacctgaggacattgtaacttcagaaaatttaacta

SEQ ID NO: 223440 - DNA, 471 bp, Glycine max
ttccatccaccattcctaagctcactctttctaagtttcttctatcatctctccaccatggttctctccaaaaccgcctccgaatccgacgtctctgtccactcaaccttcgcttctcgctatgtcagaacttcgcttcccaggttcaagatggcggaggagtcgataccgaaggaggcagcataccagatcataaacgacgagttgatgttggatgggaacccaaggttgaatttggcatcatttgtgacgacttggatggagccagagtgtgataaactcatcatggctgccattaataagaactatgttgacatggacgagaaccctgtcaccactgagctacagaatcgatgtgttaacatgatagctcatcttttcaatgcaccactagaagagactgaggcagcagttggagttggcacggttggctcatcagaggccattatgtcggctggattggcattcaaa

SEQ ID NO: 223441 - DNA, 452 bp, Glycine max
caacgactggttctgttttctctctgctgcttcgattcattcacacaaccatgactagccttactaatggcgatgctggctccctcaacaaggtccccacgatcaagttcaccaagctcttcattaatggagacttcgttgactctctgtcaggaaagacatttgagacaatagatccaagaacaggagatgttatagcgaggataagcgagggagataaagaagacattgacattgctgttaaagcagcacgtcatgcatttgacaacggtccatggcctcgccttcccggctctgagagagcaagaatattgctgaaatgggcagaaataattgaggaaaacgcagaagaacttgcagcactagatgcgattgatgcggggaagttgtaccatatgtgtaggaatgtggaagttccaagcacgagcaacactctttgttactatgctggt

SEQ ID NO: 223442 - DNA, 423 bp, Glycine max
aaaggaggctttcttttattattataacatattgatttattgatgaagggacatacaaagacatcaactggctctcacaattctggggaaaaaggaaataagaaaggaaacactcgttacatcaattggaagccacaccacacactcaaagggattgaataacactccacacaaggcaagaaaactcttgtatataatataaaacaaggtctttgcagatcactgaatactgaagatcgaattggatcagttgtaatgaggattggccaaaaggtaggcctcaacggccttgaaaagagcatcagacttgactttgccaattttgaggtcgtctgggttgggctgaacatctcctttggtttggtatttgacagttagcttcccagcagaccctccgttggcgccagcagccaatttgcattc

SEQ ID NO: 223443 - DNA, 514 bp, Glycine max
  unsure (1)..(514): unsure at all n locations
aaaaaaacactgtttctcttctctgtacctccccctatatattcctccccctttattatgagagcacagaaagaatttctgtgcctgttttgattagaagggaggagggagaagaagaagaagggagggaatagaaattaacccagtgtttgatcaatttgtatggttcaagattgaacacaaaaaatggcggttactactcgcactctatctgccacagaaaagaaacactggtggcttaccaaccgaaagattgtcgagaaatacattaaggatgcaaggagcttaatagcgacgcaagatcagagcgagatagcttcggctctgaaccttgtagatgcggcactggcgatttctacgaggtttgaccaagcgcttgagctgagagcgagggcgttgctgtatttgcggcggttcaaggaggttgcggatatgcttcatgactacattccgagcctgagaatgggaaacgatgactcatcatcgncttcttcttcttcttcttcttctgaca

SEQ ID NO: 223444 - DNA, 439 bp, Glycine max
  unsure (1)..(439): unsure at all n locations
gggagggagatccaaaaagagagagtggaaaagatggcgcggttgatcacagtggtgtggtgcgcggtggcggtgctattatgcgccgcggccggtgcgtcgtgggtggaggaggcggcgaacccgatacgaatggtgtctggcgtggaggcggaggtggttcgggtgatcggggagtgccggcgtgcgttgaagtttgctaggttcgtgagcaggttcgggaagagttaccaaagcgaggaagagatgaaggagaggtacgagatattctcgcagaatctcaagttcatccgctcccacaacaagagagcgttgccctatactctctttgataatcattttgctgattggacttgggaggagttcaaaagacacagactatgagctgnccaaaattgctctgccactcttaacggcaaccacaagctcaccgatgctg

SEQ ID NO: 223445 - DNA, 367 bp, Glycine max
ggtcccagttccacctattgttaccggtttcaacgttcctagaacacctgaggaaggagtcaccgatctcattcacaggtggcaatacatagcacatgacttgcatgaggaccttgacattagagtaattgctcaaattagtggccaggacagatcaaaaaaattgcgagcaacctacaactctattttcctaggaggagtagacaggatgaccccactgatgaatgagagtttacctgaattgtgatacgcaggccaaatactgcactgaaatgagctgtatgcaatccccaatgttcatagctggaaacatcatagaggaccctgtagaactcttgctcatctgaactacccatgcaaaaagatc

SEQ ID NO: 223446 - DNA, 379 bp, Glycine max
gagaatccgaggcgaagagaagatgaataattaatatggaggggaaggagcaggatgtgtggctggtgtgcgaacaagttcccggagagacagccgattgggacggcggtgcatagccaagacgacggcatggactaccaggagccggcgccggcgccactggttgacccgacggagtttacgtcatggtccttttacagagcagggatagcagagttagtggccacttttctgtttttatacatcactgacataaccgtcatgggagtcgccggggctaagtctaagtgcagtaccgttgggattcaaggaatcgtttgggtcttcggtggcatgattcttttcctcgtttactgctccgttggcatttttggggaca

SEQ ID NO: 223447 - DNA, 472 bp, Glycine max
acaaaatctaatcaggcattctcttatttcagggatgttccaaccaccaaggggcgggtgtgatctcgaaagataatgagtccttacactactatacatgatgcggaacctcgagctgaaactctagcagcgatgaactttctctggacttggtgatcaggtcacgaactctagtttataaggtggcaagagctgctaacaaaaaaggacgaacatctagcatacgagacacctttgcctactctggatatgcccatgtgaaaaatggatatgtgacctgtgatgggcaccacaagtgcaacgaagatttgcacctgatgctggcaacagggcttgaggcctataaattttctatataatgggcgatattgcctccaactggcgcaggacccgttaatacaacagagtacagtactacaacaatatgctgaacgaacttatcagccttggaaatcaaacacatgccgcgctt

SEQ ID NO: 223448 - DNA, 512 bp, Glycine max
caaagaacgcaactgcttaaacgttactcttggtattgttaataaaagcaatgagacacactttggatgtaacaatttgaagacgtttggtagatattttggggtcaacattcaaacaaacgaatttcagaaactgctaattgaaagaaacatgcgcccttaaattttcactggtaaccgctaatatagtttctgggaaatagaggaaagaattactcagttataaaccatatacttgggagttgcactgaacttctggtatcctttgatgactttattaactgcgtcaaggaagtctttctctgtcacggtcttccttctggctcgaatagcatacataccagcttcagtgcaaacgctccttatatcggctccggtagaatttgggcaaagccgagctaaaagttcaaagcggatatccctttcacagttcatggttcttgtgtgtatcttgaatatctgagtcctactctctaaatcaggaaggccaaattcaactttacggtccaatc

SEQ ID NO: 223449 - DNA, 508 bp, Glycine max; identical to SEQ ID NO: 223424

SEQ ID NO: 223450 - DNA, 458 bp, Glycine max
ctccttgaattggataaaaaaattattgattcttacagggtacaagtcagagcgtattttatagtacaaacataattctgtgacttgcgtgtatgattatgcaacatataattcggctttcccatcaatgaatagactcatgaactcttaaccatccacaggttctttttctatgagaagttgagcaagcttgtgaaggatatcaatgtgagttgagataatatgtgttgccctaaaatatgctctttttaccagttccctcacttccgaatccactacatccgcagttgccatggagtaatccttttgcgatgacatctgttgacccaagaatggatttccaccaggtccaccaatgggaacttgtccaattttttggctgaatccaaatctctcaaccatctgccttgccactcgtgaaacttgcatgaagtcgtttgatgctccggtggtgacat

SEQ ID NO: 223451 - DNA, 389 bp, Glycine max
catcatattaaatatatatgtaccgaaagaacacatacggggacacataaaaaatggggaatttcataaaaaaatacataaaaaacataacatgattgagtattatggaccgaacacatagagaaaatttttccatcatgataataagaacccagtataatagcaaaattcccttgacaagagtggtggaacccctattaggtaaggagggaccggttccgcccttgagtggcttcaccacttcccatgtaaaggcagggccatttttcccaaagggtccatatgaagtagtctttcaagaacctggcattgccaccccttttgagatcaaggatgatagaaaccatgccagccctgaaataaaaacttactttcacaacgctgaggat

SEQ ID NO: 223452 - DNA, 426 bp, Glycine max
  unsure (1)..(426): unsure at all n locations
ttaggatctttgctcatacatccctctcctatcntgtttttccatctctcttaacgaacacacgcagagggttaaattttaaaaatgtcaaaggccaaagtttccggtgatccaagacgtgcagtgtgcacaggtatcaccatcttcctcctcttatccggcgtcactctactaaaactctggctggtctaccgtccccacaagccgcgcttcacggtcatctttgccgccatctacggtctcaacaccagcacgccttcgctcatgtcaaccaccatgcagttcttcggtctcataaagaacccgaacaggcgtgtctacatttactacgacaggttctccgcctttgtctcgtacaggaaccaggccataacgccgcatgttctgcttgccacccctgttccaagagaagcgcagctcggtttc

SEQ ID NO: 223453 - DNA, 438 bp, Glycine max
gaataaaataaacagtactataaataaaatacactggtgagattttccacagaatgtgtacatttttgtatcaacaatcatgactcaaggaacaaagacttgtacaagcactgccaaaaaaacttaaaccagattcaaatattggcagcaccaaaacttggtttgcacaaaacaagggtctatatttacagcatgctatctgtgagagcaggcaacctgcggaagaaattgatcggtgctcctggcgtcttaccccgaagcatagggtgcctcattaggtaaaatccagatagaataaacaacatctgtggtggtgtcacatacaaaactattgcagtcacaaggcaaaacaccatgaatatcgaagtggcacgtggatccctccaattataagagcatggattctctctccttgagttgctatctggtcaacaacac

SEQ ID NO: 223454 - DNA, 529 bp, Glycine max
  unsure (1)..(529): unsure at all n locations
cggggnnttgctccatggcatacgtatncccctttangctgcgggccaagcccggaactcggatcgaggaaacagccaaaatggcatcctgaaactttactatgcttgcctgaacatgcccgcaactagaagaggggaaactataccaaacagcgctctgcaatccccatcagagcctgggaccccgaaaaacccccgctatccaggtgtgtcggagacctactcggagcccagcatgcttccaaaccacacaatccccggcaactgcggcttccaagtgatcacacccttcaaggaccgccaagactatttctacaagcaagggcccgaccaattctcaaagtcccgcattcaaaagtaccagccaacggtcttgcgcaccaacatgccccctgatcccttgctcgcccccgacccaaacgacatcgatatcctcgatgccaaaagtttccccgtcctctgcgacaactctaatgtcgagagaaaagacgaataaactggaacgctcatgccttgcaccgaactcacc

SEQ ID NO: 223455 - DNA, 386 bp, Glycine max
aacaacgaagtaactgtccctatagaacaataagaactggtagagaaaatttaaggtaatcacacatgaagtaactgggtgaaatactggaaaattaataagaagtggcactaagatataatttgccacatattaagggcgaaccaacattgaaccatttatttctgtgcatattttggccttcacattttactggaaagaggaagaaacttggtatgacgcccctgggcaaaaactttgccagtttttttcttcttgaactccacgcttataacggcaacagccttccctacacgcagagccctggcctcgatctcaatctcctcatcggcataggcagcatccaaaaacgaaacattaatctcaacagaaaccccagttttggg

SEQ ID NO: 223456 - DNA, 402 bp, Glycine max
  unsure (1)..(402): unsure at all n locations
aggggnnnnnaatggaattgcannatcatgatcnnttangataaagccaggacgaagctcggattcgcttagctttatcacccaccactttttcgtttagcccaaccgcacctacttacagagaaaggaagatttttaatgaaaaggcccacatcatcctcgcaaaactaggccatgtcgactctagaaaatacaccaccactggccacctgattgccacccttgattacattcactagacaccaattgctagctgtctgaaggaagctcctaacatgaacaacagggccctccgcccacctgagtgctggacaaactcaaacctaagcctgaaaaaccaaacaccacagatttggcttgggatgaagttgccaacaccaacaaaaaatgcctcatttaatc

SEQ ID NO: 223457 - DNA, 461 bp, Glycine max
  unsure (1)..(461): unsure at all n locations
agcagataccangtagctaacncaaaaattttgggacacactctactggtcggcggccgcccttttttttttttttttttgaacactaaatatatttagtcgacatttaataaaccaaagccgcacaggtttaaaaagtccagaaactcgctcccctaacaaatgaataacgcctccacaaacccaccattaagccccgctaattaaaaccaattctaccaccgacgatcaagaacccaaataagcgaacaacagctgaaagaagatggcccaaacaaaaaacttagtccgaaaaacaccctacccataaaagaagactcaggagttcataaaagaaaccaacatttatagcaaccaacatcccctgatgaaccaatccacacgatccacttcttttacggggcaggctaagtgaccaaggaaactgtaagatccttcttctcaaccttctataagactcc

SEQ ID NO: 223458 - DNA, 351 bp, Glycine max
ctctctctctctctctgctcttttctctgatcgccagatacgccttgcccatgggctgagcaatatgtctagaagatatgatagccgtacaacaatcttctcccccgaaggacgtctttaccaagtggagtatgcaatggaggccattgagaatgctggaactgcaacaaggatcttgtcaaaagatagggttgttctggttggtgaaaagaatgtcacatacaagctgctgcagacctcaacctacactgaaaaaatgtacaagattgatgatcatgttgcatgcactaaggctggaattatgtctgatgccaacatcttaatcaagtctgatagagatcaggctcaacg

SEQ ID NO: 223459 - DNA, 547 bp, Glycine max
aagagcaatgattttatgcaaatatcatagatctaagtcctggagggtaagataaatgcgaactaaaaaccaattagcatacaccaagatacacaatgcttaaagtttgaactttgaaataaattttgggacactttctggcgtctattatgaaaggaagaacgttcaaatgcattgcataggcataactaaaccacatatgacattaaacaagaagctaagcagtgtctgttgtcggttgggtcaccccaaacttcaccaacagcttagtcaggttttctggggagcaaacttgatacttgacttttccagcaggtgacagaaaaacctctgcaagttcaagcttttccgaggtaagacttgtgctgtccatagttttacttagtaccttaagtgcaagttgaactgcttcttcccttgagatatcatccttgtagacctgtttcagaattgactgagctgcctggttgttggcaccaatagctgcagcttttcaaccaccataatttccactggggtcacttgtgtaaagttgaaagctcaaatc

SEQ ID NO: 223460 - DNA, 487 bp, Glycine max
gtcatccatcccaaaagcattcatcatttaactgctaagctaactgaactctcgctctggccttcctcgttcctttcgcctctcactacaaatacacatctcatctcatccgtctctcacttttaatttttctctgcaatctgaaccttccggatttcgtttttctttgttccggtagccagccagccagccatggtgctcttcaatgtttcacgcgttgagaccactcccttcgatggacagaagcctggaacctctggtctccgcaagaaggtgaaagtattcgtgcaacctcattacctccataactttgttcagtcaacattcaatgcattaactgtggaaaaagttagaggtgcaacgctagttgtatctggtgatggtcgttatttttcaaaggaagctattcagattataactaaaatgtcagcagcaaatggagtaagacgtgtttggattggtcaaaatggattactttccactcctg

SEQ ID NO: 223461 - DNA, 535 bp, Glycine max
atattaagactatttaattagcactcggctgttgcaaattattcagcatatcaaaatttagataaagaaactcaaattccactcaatttcccatagcaaaggctgcaaacaaccaaatctactgttcggctatccgtaagatactggacaaagaagaaatgaaatgactgggagaagcttcaggatctaaccaccttccacttgaatgtgttcatgtaatgactgttggagcggatcgaccagtgaattcttccatcttcgaaagtttcaacgcaacttccacaagaggagcaagtgcttcgtttgaaagtctcccaatctttgatggatccttctcatattgctcaatgtataatcgaattgttgcaccttctgatccagttccagataggcggaaaatcaatcgtgatccatcctcaaacaaatatcggattccctgatgtgatgagatggaaccatccacaggatcattgtactcaaattcatcaccgtggacaacattcgaaacatctgaccttatcccttaacaatctga

SEQ ID NO: 223462 - DNA, 472 bp, Glycine max
agattatcctaagtctttgggaatagttctgcaatggcttcaagtcaggaggaggtgacgggttttgggagctactggaagcccatttgtgcgcagggttcatattgccctcaagttgaagggagttgaatacaaatatgtcgaagaaaatttgaggaacaagagtgaactgcttctcaaatccaacccagttcacaagaaggttccagtgtttattcacaatgagaagcccatagcagagtctcttgtgattgttgaatacattgatgagacatggaagaacaaccccatcttgccttctgatccttaccaaagagccttggctcgtttctggtccaaattcattgatgataaggtttttggtgctgcatggaaatccgcattcacagctgatgagaaagagcgtgagaagaatgttgaggaagcaattgaggctctgcagtttcttgagaatgagataaaggacaagaag

SEQ ID NO: 223463 - DNA, 477 bp, Glycine max
aaatatgctatatatttattctttgaaatggcaaaggttaagatcaacctaggatttcaaagggagaaatcctagattacaacttataagcatcattttgaaacaaaatccttattaacagcgatatagctcaatgacaaacaaaacaagtagtccacaccacacacaattttccccagagattctgagtctcacatacatgaatctattttgaagcagtgaggctttcatagaagcctttaacaaacacataattcttagaaatactaagtctcacaccacatcatcaaatctattttgaaccaaaaaggctttcatagagacccttgaaaaaggagaaaacaggatctctagggggcagactttctttgacaattggatggttcaaaaattcttggctccaattgtggagcttaagaaatttctcacttgtgaataactccaaccctgcaatttttttgaccatagggacccaaa

SEQ ID NO: 223464 - DNA, 538 bp, Glycine max
gtttcacagcctgcaagcaaacttcattttaacaccctcgttccctttcggctacaaagcgtgtcatccacaaccacggattcagattgttcatatttggaacaaattcaacaatatctccttcacaatgattcaacaattctaacaccacctcaagcttttccaagccctagccatgatagtagttcggatgcaagtgttcactttgagcacccttcggaagcgcatgacgtgaacgcgccacccaaatggaggcgctaccggggtgtgaggcgtaggccatgggggaagttcgcatcagagataagagatccaaagaaaaatggttctagggtttggctcggaacttatgttaacgaggaggaagcagctttggcttacgacaaagctgctttcaacatgcgtggccaaaaggctaagctgaattttcctcacctcattggctctgctgtgcagccggaaccaccgtgtctggcggtttctagaggagcttaccagagtcttctccccaacacaccatatgatagttgtgagtcaa

SEQ ID NO: 223465 - DNA, 550 bp, Glycine max
ctttttgtctcctcttctgccctccactcaacttttctctcctctctctctctctacaggggctggggtcttctcttcgctgctcactgcagcgtacccatggctttcagagttggcggagcgggaggaggaaatgcctcttctggcatgggtgttgctgagcatagcgcaagcacgttcctggaattgcagaggaagaaagtacatcgctatgtgatttttaaaagcgaccagaaaaagaaagaggttgtcgctgaaaaaactggaggccctgctgagagctatgatgattacactgcatccttgcctgaaaatgattgccgatatgctatctttgactttgattttgcgacatctgagaactgccaaaagagcaaaatcttttttattgcatggtctgcttcgggagcccgcattcgccctaagatgctatatgcaacatccaaggacaggttcagaaaggagctgcagggcatccattatgagattcaagcaacaaacccaaccgagatggatcttgaagtcctcagagagcgtgcaaactgagcac

SEQ ID NO: 223466 - DNA, 588 bp, Glycine max
ttcaatgggttcatcaatagcttcgttctactacttgttaccttcctgatatattgctaagtgagggttcttttttcaaaattaattaagaatgagcccgaaagctctttttgttgggtgcataatatggttgggtttggtagaatagtcaatcggaggaatagtgagacactacaagtttgatgtggagtacatgatcagaaaaccagattgcttggaacacgttctgatgggaatcaacggtcagtttccaggcccaactattagggctgaagttggtgacattcttgacattgctctaaccaacaagctttttacggaaggaactgttattcactggcatggaatcagacaggttggaactccttgggcagatggaacttgcttcatctcacagtgtgctattaacccaggagaaacttttcattacaagtttacagttgacaggccttggtcatatttttatcatggacaccatgggatgcaaagagcacctgggttgatgtgtcattgatagtagatttggcaaagggacaaaacgaacccgtttattaacatggagaattcaaccttttttttaatgatttg

SEQ ID NO: 223467 - DNA, 564 bp, Glycine max
  unsure (1)..(564): unsure at all n locations
agaaaaaaaaaactgcgaaatggactctcgtgngcanctcnaaagtattaattcctggaccgacacgctactagttttcggccgtcctttttttttttttttggagatttctttattcaacataatcttaatcttatacatgggtataaacgttaacatgtaaatttaaatgtaatattatttgaacattgaaaaattaaattaaataaataccatttaacatttattttatgttggtactatgactagttttagtagtgtccattttctactaacttctttcctgtaagtccacaagatagtgcttctcttgggattttcccaactttgtgaacaccctccgtaaaaatcacacccattcccatgtgcaaatgaggctcaatgtgacaatggaaggcccaaactcctgggttgtcagccttaaaccttaaggcagtccaaccatatggaaatatcactgcggtgttcctcaatggtgcatgtgtcaaattgaattttttctcatcacctaaattgaattttcttcttcatattccaaaaccccaaagtcattgtccggcaagt

SEQ ID NO: 223468 - DNA, 396 bp, Glycine max
ctctatttctcagtctctgtgtttgcttttgaggattccgaacgagtgaccgtgttcgggtctcgcaaagattaagtaatcatgggtaaggaaaaggttcacatcaacattgtcgtcattggacatgtcgactctgggaagacaactaccactggtcacttgatctacaagcttggaggtattgacaagcgtgtgattgagaggttcgagaaggaggctgccgagatgaacaagaggtcattcaagtatgcctgggtgctcgacaagctcaaagctgagcgtgaaagaggaattaccattgatattgctttgtggaagtttgaaaccaccaagttctactgcacggtcattgatgctcctggacatcgcgactttatcaagaacatgattactggt

SEQ ID NO: 223469 - DNA, 455 bp, Glycine max
  unsure (1)..(455): unsure at all n locations
aacaaaacttccttataaattaaatgcaaatttaagacatgcctcctcagcagcaaaggaaatggactaaaaccctatggctgcttgtgaatttgaaaatctcagacttttaccatcaaaacaaaaaacagtactcatcaaaaacaaacagcaacgaaaatgttaccgccgatcaagaacccagttttgaaggctacggctacatgaaatcggcggacacttcaaaatataactggtaaaacaaacacctaagactctgcaaagataaactactgtaaaggaacaagtttttttgaaaccacgttgatgatcacatgtgctagcaaaattgccaaaatgcaatcacttcttcttggcggcagcctttgtgaccttggctccggtggggtctttcttctcaacactctngatgactccaacagctacggtctgacgcatgtccctcacagcaaaac

SEQ ID NO: 223470 - DNA, 496 bp, Glycine max
ctctatttctcagtctctgtttttgctgctgaggattccgaacgagtgacctgcttcgggtctcgcaaagtttaagtaatcatgggtaaggaaaaggttcacatcaacattgtcgtcattggacatgtcgactctgggaagtcaactaccactggtcacttgatctacaagcttggaggtattgacaagcgtgtgattgagaggttcgagaaggaggctgccgagatgaacaagaggtcattcaagtatgcctgggtgctcgacaagctcaaagctgagcgtgaaagaggaattaccattgatattgctttgtggaagtttgaaaccaccaagtactactgcacggtcattgatgctcctggacatcgtgactttatcaagaacatgattactgttacctcccaggccggctgtgctgtccttattattgactccacccttggtggttttgaagcttgtttttctaaggatggacagacccgtgagcatgctcttt

SEQ ID NO: 223471 - DNA, 512 bp, Glycine max
aacaaaacttccttataaattaaatgcaaatttaagacatccctcgtcagcagcaaaggaaatggactaaaaccctatggctgcttgtgaatttgaaaatctcagacttttaccatcaaaaacaaaaaacagtactcatcaaaaacaaacagcaacgaaaatgttaccgccgatcaagaacccagttttgaaggctacggctacatgaaatcggcggacacttcaaaatataactggtaaaacaaacacctaagactctgcaaagataaactactgtaaaggaacaagtttttttgaaaccaccgtgatgaacaccattgcctacaaattggccaaatgcaatcactttttttgggcggagccttttgtgcccttggctccggtggggtcttttttttaacactcttgatgactccaacagctactgtctgacgcatgtccctcacagcaaaacgaccaaggggaggatactcagagaaaggttcaaccaccatgggcttggttggaaccat

SEQ ID NO: 223472 - DNA, 305 bp, Glycine max
agcaaacataacttgcagtattggcttttatgaataaccaaaaagaaattgagctcttggagggccaatctcttctgtacatgcagctatatgggcacctaagacctatgtgtcttaagtgggctgttcaactaggtattccagacataatacagaaccatgccaaacccatttgtctttctgacttggtctctactcttcaaattccaccagctaacgctgcttttgtgcagcggatcatgcgctacttggcacacaatggaatctctgacatccatgagagccaagaagatcatgaactaaca

SEQ ID NO: 223473 - DNA, 499 bp, Glycine max
gatgtctgaggattttcataaatataaacgttaagtgtgacatacacatcataaaaatgttcaaggatagacctcaatcagagatctaaaaccaaagatgggaaatattttgtagtgtttgaatcctgcttcgatgaagagttgtttccattctttttccgttctctctcttccattcatcgtcaacataataatgtccaaactaagctttgtttgtgtcatatccgggtcatctagcttctcatttattacggcatctatgataatcacttttccactgttgcctttgcttgaaatagaatctctacacttttgcaggatctttatgcaattttcgtcggtccaattatgtaaaacccactttagtagcactgcatcagcttgagggatagagttgaacatgtcaccaccaacaaaactcaaattattggtccctgtcaagttctctacaacatgaggaaggtcaagcacaacacatttcaacttaggaaatgcgtca

SEQ ID NO: 223474 - DNA, 441 bp, Glycine max
caaacacctcgtccctcacattgcagttagcaatggcggccaacgctgtcgggcaccggggccgttccgacctcagccctttctccggtcatccttctccggcgtctccgtcaagctcactccccaatccataacgctttcacgctccaagcccctcaccgtcttcgccgccaccaagaaggccgtcgccgtcctcaaggggacctccgccgtcgaaggcgtcgccactctcatccaagaagacgatggcccgacgacagtttctgttcgcatcactggccttactccggggcttcatggttttcacctacatgagtatggcgatacgacaaatgggtgtatttctacgggagcacattttaatcctaataaattgacacatggtgctcctgaggatgaagtccgtcatgcgggtgacctgggaaacatagttgctaatgc

SEQ ID NO: 223475 - DNA, 490 bp, Glycine max
aacaagtaaccagtcgttgcacttgtaccattaatataaaatatgaacataggttctttctcaagcagacaacaaggactacagcaatcaatttcattggggaataaacatctgactgcatgatgaattttattggggagtacagacccgactgcacgatgaatctccagtaaaggactaacaacatgttttcatgattcatttgcacactcatctttagaaggacattatgctttacagtttacattggtaactgaagaaaacagtgagtcatcatgcttcacagagaacataatatctgataacataacacgactgctacaaaaaattcgctgcactgattatgctggagtcaaaccaaccacaccacatgctaatcttccaccagcatttccagttgtcaaactgagttcatgcccaccctttccaaggtcatcctcaagctcatggaccaccaaggctctttcaactactgaattggggccagaga

SEQ ID NO: 223476 - DNA, 519 bp, Glycine max
cggctcgaggttttgtagtaagtgaggtgaggttccaaaatggtgaagataactcttggggcttgcgatgactcttttggtgttgcctctcttaaggcttatttggcagagttccatgcaactctgattttcgtgttcgctggtgttggttcagccatcgcttacaacgagcttacaaaagatgcagccttggatccaacggggctggtggcagtagctgtggcccatgcatttgcactgtttgtaggtgtcttcgtcgcagccaacatctcgggtggccatttgaacccagctgttacttttggattggccattggaggcaacatcaccctcattactggtttcttatactggattgcccagttgttgggttccattgtggcatgccttcttctcaatttcatcaccgcccagagcatttcaagccacgcaccggcaactggtgtgaacgattttcaagctgtagtgtttgagattgtaatcacatttgggttggtttacactgtgtatgcaactgca

SEQ ID NO: 223477 - DNA, 445 bp, Glycine max
ggggatggaggtcgaattataatttacataatttttacaagcggggaataataaataaagggcccgttaaaaatgcaaaaagccttgaagcttgagacattaaacggggaacaaagatgaaacttggaggggccggacccacaagtgaataaaacaagaagtcatttttttcaagttgaagctcaaggggaggttttaaagggtgggacagccccatatgaaccaatgaagaccttttcataaattaagccagccaaaccttctccaataaatgggcccacccaatagatccagtttgcagggaagttttcactgaccacagttgggcccaatgagcgagctgggtttattgaaccccccctgaatgggcctgcttctaaaatgttggcccccacaacgaacccaatagcaaggggggcaatgaaacccaaagaccccttttttg

SEQ ID NO: 223478 - DNA, 285 bp, Glycine max
tttttttttttttttttttttatattttttttttttttttttttttttttttttggtttgtttttatttttatttccctttaaaacccatcaatttttttcaccctacaaaaaaaccaaacaatacctcccccaaaaaaaaaaaacctcttcaccacacaaaaaaacaaataccaaataaaaaaaaaaaaaaatcattaaaaaaaaaaaaaaaaaaaacacaaaaaaaaaaaaaaaaaaaaaaaaaaacaaaaaaaaaggaaaaaaaacccacaaaccaccgttg

SEQ ID NO: 223479 - DNA, 518 bp, Glycine max
gtcgatgaagaaaacgcgaaaatcatttctgatttacaaacatggtctgcctctgttaggggcaaagcttaggttgtttgttccgaacccaaccatggaagagttcagatccaaatcgtacggtgacggaaggatgcagattgaggcctaccggggaaccaacatgcaagatctgcggtgctacagcgcctcctacgcctattcggagcacccaacaacaacacagcaaacccagatgggaaataacgactccaagtttaagaagggaaagtcaacgaatgggtccacatccaaaagttggagctttagtgaccctgagttgcacaggaaaaagagggtcgctagttacaaggtctatgctgttgaaggaaaactcaaaggctctctcaggaagagttttaagtggttcaaggacaggtgcaacagaattgtctatggctggtggttattacaacaacaacaacaactatgggtgttttatataatgcacgaataataattttatcatttatttggct

SEQ ID NO: 223480 - DNA, 453 bp, Glycine max
aaacagcaagcaatcaaggtgattgcactctttacatggaccaaaaggaacacaagaatcacaatttctcttccatattacaccctttatgtggtactttagcagccacagaaaagaaacactaagtgcagcaaatagataaacaaagccaaataaattataaaattattattcttacattatataaaacacccatagttgttgttgttgttgtaataactaccagccatagacaactctgttgcacctgtccttgaaccacttgaaactcttcctgagagagcctttgagttttccttcaacagcatagaccttgtaactagcgaccctctttttcctctgcaactcagggtcactaaagctccaacttttggatgtggacccattcgttgactatcccttcttaaacttggcgtcgttatttcccatctgggtttgctgagttgttgttgg

SEQ ID NO: 223481 - DNA, 661 bp, Glycine max
caaagagagtggagaagagtctgtcgatctctttttattttgactcagcatgcgactcagccttcggccactgtctcgctctcacacagcacgccttcgaaggagtgttcccttaccaactcaaaaccgtcttcgattacatgcacgccaacaccacacaccctgtcattcgaaattggctccccacacctcccgatcggacccaaatcgacgcagccctccggcgtctccctcccaatttcgatgacacacttccactttccctcttcaaaaactgggcccaccacctctacaccgacgccgtcgtgtccgccgccgccaaatcgcttaaggtgcgcgttcccgtcggcatcgccgggatcgtcggagtcagcgccctcactcgggctcctctccgaatggttggcaccttcattggagcctactccctcgctgttgcgctctccattttagatggcttatccacataaatcgtatttctaatattccgcttttttatgcttcggcaatgatactgttatttgattacatagagtaattacaatcctttgcaagtaagatattaatctttgtattattatcttaaaagtatattcatatatatttttatcagcactatcgacaaaaatatactgccgcattaattttttttataaatttt

SEQ ID NO: 223482 - DNA, 394 bp, Glycine max
gacgtaaaggagaaggcagaacacacttgaattgaatgcttctagaaaagacctacaccagattagtgaataccagtattgcactaacaaatatcaaattacataataaaaattttataaaaaaaaaattaaatactggcagtataattttttgtcgattagtgattaataaaaaatatataataaatataatttttaagataataattacaaaaattaatatacttacttacaaaggattgtaattactctatgtaatcaaataacagtatcattgccgaagcataaaaaagcggaaaattagaaatacaatttatgtggataagccatctaaaatggagagcgcaacagcgagggagtaggctccaatgaaggtgccaaccattcggagagg

SEQ ID NO: 223483 - DNA, 392 bp, Glycine max
acaatttctctctctagaataaaacattttctaccgcctccaagtcctacaagaacccagggccctctcacaccgcccccaaaatctcactcttctgccttctcttttctcttctcttcttcctccaaaacaagtaaacaaacaacactctcacattcaccacaacacaaacacaaacacaaacaaagacaacaaccttgtttgtctgcaatcaaaacctttcaagctggcgttcgagaaccaagacacccctgtccgagaaatcaagcccaagaaccggagaatcatgggtgctggaggccctgatgacgaggacaataggtggccaccatggctgaaacctcttctcaaagagagcttctttgttcaatgcaagcttcacgctgattcgc

SEQ ID NO: 223484 - DNA, 510 bp, Glycine max
  unsure (1)..(510): unsure at all n locations
tcgaggcttaaagcgtcagactcctaanaatagtgttgatcacttttcgcatntgacctgtaanccttttcgtggtccggggaccaaaactcgtaagttggctgaacatnnggacccgcnnaatcgccggttcgggccggaacctaggaagcctccggttcccgaccgttcttccccacggtttcgctgctcacatccaagttcgcaagcggaaaaattcgcgaatcgcggtctgatcttgagcgacgaagagtgcctacgcggtacggctgggccggtgcaaatactaacctgcgaccgggccaaccgcctgaatccttcttcacgtgcgtcccacgagcgttctctacggcgcggactggggctccgtggatctgagcgcggcggaggaccgcggcgacgaggagtcgcggcggaagctggaggacgacttccacaacttcacggcgacgaaggcgagcgacctggcgcagccgctggtggaggcgcagataccgttcaagatctaca

SEQ ID NO: 223485 - DNA, 495 bp, Glycine max
gacagagaattcattacaaatcaataaaggtcagaatctaaagagcttcaaaacaattctcccagtaacaggaaatcaacaagggcattaattcatcaagaagcatacaaaatccgactatcgaagccttgtatttcctatagatgttccaaatgctcaattacaagttatgaaatgcaactttgaaataaacatttctagtctattaatctgcatccatttcttcaagagctgctttggcagctgcctttgctcttctagaagctcatccgggaccttctcatgttggcggtttgactcatcacacacccagctcatttctagctcaaaatctttgtcctttgcctcatcatgaactccatatataattttagccacttcaataaccccttgtcgacatgtcatatcagcaagctttaacttttcaatctctgttttagcagcctgcctgcccttcccaattgcagcaccgaaatatctattggaaacaccgga

SEQ ID NO: 223486 - DNA, 252 bp, Glycine max
gcggcgccgcccttttttttttttttttttttttttttttttttttttttttggggttgggtttttttttttttttgttttttttctttttctaaaacaattggggatttgttttttgcccttgaagggcgaaccaactaatgtttttttttgggggaaaaaaaaaaaaaaaaaggggggccgcccactaaatgagcccttccacccggaaattaattttgaaccacttccttgaggcagccccactttccc

SEQ ID NO: 223487 - DNA, 559 bp, Glycine max
cttattggcaataataatggcttcccttttctcatctaattctgctgctcctagtcatggggaagttaatcctaactcaagatttgaggctactttgatagaagaaacatgtagtgctcaaaaaccaaaagggaccaaaggaggagaaacttcaggttggaataataatgagagagaagagaagggtacgtgcttgagttggaaggatgtaagggtgactgcttctgtgggaaagaatggaagcaaatcaattcttgagggtctaactggttatgccaagccagggcaactctaggccataatgggtccttctggctgtggaaaatctacacttcttgataccttagcagggagattaggttccaacacaaggcaaactgtggagattctgatcaacgggaagaaacaagcactggcatatggaacctcagcatatgtaacacaagatgataccttactcacaaccttaacggttggagaagcagttcactattcagctcaactccaattacctgacaccatgcccaaggaagagaagaatgagagagcccatttcaca

SEQ ID NO: 223488 - DNA, 436 bp, Glycine max
ccgagcttttgatcaggaagctccccttccagaggctggttcgtgatattgctcaggacttcaagactgatctgcgttggcagagccatgctgtgcttgcattgcaagaagctgctgaggcataccttgttggactctttgaggatactaatctgtgtgccattcacgctaagcgtgtaactattatgcccaaagatatccagctggcaagaaggattcgtggtgagcgtgcttgatgtggtggtggtggtggtggttgagaagatgatgatgggtggctgcggatggtgttttgttattcacgattcttttttatacaaagatagggtggggagggagtaagtattaattggtgatacgggcaaaatactgctaagtgttcatgactgtgtctttttcattaagaaaagcggcatgtaattgaattttggacata

SEQ ID NO: 223489 - DNA, 528 bp, Glycine max
  unsure (1)..(528): unsure at all n locations
ctccgcagaaaaataaaaaaagagtagctagcttttgctagctaaacacagtacgagtagtgatgaggggcaagcaaaagcatattcataatatggcaaccatggaagacatgaacaacatgagtggtgaaattacacttccaggcttccgattccacccaactgaagaagagcttcttgatttctaccttaaaaacatggttgttggcaagaaacttcgttacgatgtcattggtttcctcaacatctatcagcatgatccatgggacttgcctggtttggcaaaggttggggaaagagagtggtacttcttcgtgccaagggacaaaaagcacggaagcggtggaaggccaaaccgcacaactgaaaaagggttctggaaagccaccggttcagaccggaaaatagtgaccttatctgatccaaagcgcataattgggttaaggaagacactggttttctatcanggaagagctcctaggggatgcaagaccgattgggtcatgaatgagtacccgttacctgaca

SEQ ID NO: 223490 - DNA, 492 bp, Glycine max
gttgccattctgatctaaagcttgtgtttttcttcttcgtttgcatcttctgctgcgtggaggttgagttcttttctgattcttccgtagatttcatctctgaaactagttctaatactttatctacagatctctatattctaggtgaaggtttgcttttgatccggcttgggagttttgatagacttgattttaactctttaagagaatgtcattccgcagcatagttcgtgatgtaagggatagtttcgggagcttatctaggcgtagttttgatgtcagacttactgggcatcatagaggaaaatctcaaggatcagtgcaggatttgcatgaccaacctctagtaattcaaaatagccgttgggccagcttacccccggaattactatttgatatcattagacggctagaggagagtgagaatacatggcctgctcgaaagcatgttgttgcatgtgctgcagtttgccagtcttggaggaatatgtg

SEQ ID NO: 223491 - DNA, 485 bp, Glycine max
acatacaatcaccatgtgacagagtgtatgtacctttcaattaccaaacatgtaccagacaatgtagactgcagcagagcctaaaatatgttaaatgatggtttgttggtagaatcaactgagaaagaaacatagcaacattgtatgttaaaaatgctctaaaatcctattacatcagagatgcactacggttacaatttagtcatacaaaagctgagtaacaacaattgcctactcccatgatactgataatgaaaatgggaaaagaaaagaaaaacaaagggaaatataccatcaacatcattgtttcattagctcacttataacccttctgattcatgatttatcttattcacaagccaatttggtgtcaaagctgctcaagcatattgcaaaagcttggaatgcagataaagggtaccgataatccatggtgaacatgttctttccaactttgccaaactgaagaatgatcttatcgtgct

SEQ ID NO: 223492 - DNA, 356 bp, Glycine max
gaaagaagaaaaagaagcgtttctaatgtcagcattcgaaaaagatgagtagggtcggggcaggttacgatctatcggtcaccactttctcccctgatggccgcgttttccagatcgagtatgccgctaaagccgtcgacaacagcgggactgttattgggatcaagcgcaaagatggggttgtgttgggcgttgagaagcttattccgtcgaaaatgatgcttccgggttccaatagaagaatacactccgttcattggcactctgggatggctgtagcaagattagcagctgatggcagacaaattgatggcagggcctaagctgaagctactaactatgacagcctctatggc

SEQ ID NO: 223493 - DNA, 551 bp, Glycine max
  unsure (1)..(551): unsure at all n locations
gacagagatttcaacacaaatcaataaaggtcagaatctagagaacttcaaaacaattctcccagtaacaggaaatcaacaagggcattaattcatcaagaagcatacaaaatccgactatcgaagccttgtatttcctatagatgttccaaatgctcaattacaagttatgaaatgcaactttgaaataaacatttctagtctattaatctgcatccatttcttcaagagctgctttggcagctgcctttgcttcttctagaagctcatccgggaccttctcatgttggcggtttgactcatcacacacccagctcatttctagctcaaaatctttgtcctttgcctcatcatgaactccatatataattttagccacttcaataaccccttgtcgacatgtcatatcagcaagctttaacttttcaatctctgttttagcagcctgcctgcccttcccaattgcagcaccgaaatatctataggaaacaccggaaggttcaaccatgtacaactgtggtccatccctgtcataacctnctagtatgaca

SEQ ID NO: 223494 - DNA, 466 bp, Glycine max
cttttctctctttaagctacttttgtgctgagagctgaagaggagatggggggtggaagtcaagaggcagtgaagcagctgcagaccctgatggaaaatgtggatgatgagcagctgaagaacacattccagattatgcaccagggttatcaaactgaaacgttaatacggtttctcaaagctagggactggaatattgccaaagcccataaaatgttaattgattgtttgaactggagggtggaaaatgagattgacaatgttttaaggaagcctatccccatggatttgtacagagccatacgggattctcaactcataggaatgtctggttactcaaaggaggtattcgtgttttagctaggtcttttgatctctaatatgaatctaaagttttatattcatcctcccctttggttctttcctttcgtaccttaacctatgtggatgatgttattattataag

SEQ ID NO: 223495 - DNA, 474 bp, Glycine max
gatgtaaacattacaatattacatctaatggccggctataagtttgacctcacaagcataaccctcctaatcagaaagggatcatatagttatcaacaaataaaaggggcttcaggacaggccaaaaaacacagttactagtagctttagtagcatagctttcaatggccattaactctaagaccatttagtgagttggtaaagccattcttctgattctccaatttggggaactcagtttctatggtcttggctattttggcatcatcagggtctggctctggtatgtctacatagaaggacccttgtctgattggtgaaattgactccacaatgatggattgttgcttgatgtgattggagagttgttgatggaaggcgtgattgaaggagaaacaatttccaatgtttcctaatgcatgatgtttggaagacttggaatcttcttttttgcaaagtgtgggagggatgcat

SEQ ID NO: 223496 - DNA, 486 bp, Glycine max
tctgagtgttactattttgtctatatttatatataggcactcaagcttctgggatttgggcctgctgcatcaaaatgggaagcaacttgaggtttttgagtctttgcctcttggcattgattgcatcaactcatgctcaacttcagcttggtttttatgctaacagttgcccaaaagcagagcaaattgttttgaaatttgttcatgaccatatccacaatgctccatcactagcagctgcattaataagaatgcactttcatgactgttttgtaaggggatgtgatgcatcagtccttctgaactcaacaaccaatcaggctgagaagaatgctcctccaaatctcacagaaagaggctttgacttcattgacagaataaagaagcctgttgaagctgaatgccctggtgtggtctcttgtgctgaaatcctcactttggctgccagagacactatttgagccacaggtggacctttttggaaag

SEQ ID NO: 223497 - DNA, 489 bp, Glycine max
aactcagctgggggtagcacaaaaaattctggttcttattacaagagcatgatctaccagcaaagttggaaatatgaataacaatagagcccacttattccaacacacatacaacaaccataccataaaggatcacacgtatgtagacagagaccacatggcatagcataactaatcaaaaaacatggcatagcataaataatcaaaccccaaaaaataaatgatacaagattcatccatgaacaagacaagattcttagctatttataaatgcacaatgcttcctgatctctccttctggccctgtcttcacattaattcttcccattttctcgatggaggttgcaaactcagcaaagaaattttcaactgacccttcaagcaattggatgatttgtgcctttgtaactgagttagtcaataatgcagcatctgactcaaatagaccccttttcttaataacgtgactatagtagctaagatcaaatg

SEQ ID NO: 223498 - DNA, 457 bp, Glycine max
caaactctaaagcctcgatgcgtgctatccttttatcggatttttatcctttgtgatcgtgacagagatggtgcccttagtgatgctgagctgaatgactttcaggttaaatgtttcaatgctcctttgcaaccatctgaaattgtgggtgtaaagaaggttgtacaagaaaaattgtctgaaggggtgaatgaacgtggacttactttgactggattcttatttcttcatgccctttacatagaaaaagggcgtcttgagacaacatggactgtgctcatgaagtttggatataatgatgatatcaagcttgctgatgatctaattccacctataaaacgtgctcctgatcatagtgtggagctgacaaatgaagcaattgagtttttgagggcaatttatgatgcgtttgatagtgattgtgatgggatgttgagaccttgagaaattaataatt

SEQ ID NO: 223499 - DNA, 358 bp, Glycine max
aattgcctctttcaagaagcatctgattttttattattttgtactatatttatatatagggactcagagcttctaggatttctgcctgctgcatcaaaatgggaagcaacttgaggtttttgagtctttgcctcttggcattgattgcatcaactcatgctcaacttcagcttggtttttatgctaacagttgcccaaaagcagagcaaattgttttgaaatttgttcatgaccatatccacaatgctccatcactagcagctgcattaataagaatgcactttcatgactgttttgtaaggggatgtgatgcattcagtcttcttaactcaacaaccaatcaggctgagaagaatgc

SEQ ID NO: 223500 - DNA, 462 bp, Glycine max
agctcaaaaaattctggttcttattacaagagcatgatctaccagcaaagttggaaatatgaataacaatagagcccacttattccaacacacatacaacaaccataccataaaggatcacacgtatgtagacagagaccacatggcatagcataactaatcaaaaaacatggcatagcataaataatcaaaccccaaaaaataaatgatacaagattcatccatgaacaagacaagattcttagctatttataaatgcacaatgcttcgtgatctctccttctgtccctgtcttcacattaattcttcccattttctcgatggaggttgcaaactcagcaaagaaattttcaactgacccttcaagcaattggatgatttgtgcctttgtaactgagttagtcaataatgcagcatctgactcaatagaccccttctcttataacgtgactatagtagcta

SEQ ID NO: 223501 - DNA, 509 bp, Glycine max
gtttctctgtacttcatacattttcacaaaccccatgaagaatggaacagggaagaagagaaagatgttcttttggtcctatgtcctcaaccattccttgtcttctcctgcttttgttctgactctcaggatctgctgaggcctacaagaattacacagttggcgaccctttaggatggtgtgacaatactgtgaaatccaacgtcaattaccataagtgggctgacagttaagaattcagcttaggagatttcctcattttcaacacggatactaaccactcagtggttcaaacatacaatttcaccacatataaagaatgtgactatgacgatgcacacgataaggacacatcccaatggacagcagctgatccatccaacacccaaacacatcctgtgacagtgtccgctcctttggtgaaggaagggatgacatactttcttctaggtgattatgatggtgaccaatgcaagagtgtgcaacccttcaaaataaatgtgccttat

SEQ ID NO: 223502 - DNA, 584 bp, Glycine max
gaagagaaaagattagtgagcgaatgttgttgtttcaagaacttgttccaggttgcaacgggatgactggcaaagctgtaatgcttgatgagataataaactacgtgcaatcacttcagcaacaggttgagtttctgtccatgaaacttgccacagtgaacccagaactgaactttgatgtagacaggatcctatccaaggatattctccaatcacgcataggacatggaattggtgcatatggtcctggtatcaattcctctcacaccttccccaatggaagtttccatggaacattggctggcatgtctagtacatcctcacaattccctcctttgccacagaatgttttggaccatgagttccaaagcttctatggaattggatacgattctaatacagcacttgacaacttgggacccaatgggcggttgaaaacagagttatagtgtgtgcattattacatagccatgttactacagcaacaaagactttggaattttctttgtgactgcacaatttaaccgaagatgaaaatgggaggacaattgagagggaaagaaaaagaaaaaaaataaaggttt

SEQ ID NO: 223503 - DNA, 559 bp, Glycine max
tgttttttttttttttgaaccaaccaacttaaatatgaatttccatgtactaaatccaacggagtggttatactaaagagttacaagagaacccaagatgtctaatgactttgaaaattgctgtactacaaaccaactataaaaagtttgtctctgtccaaatccacatgtatattacatcacaaaaaggctaaaagacataacaggccatatgaccatagaggatatctacctgatagtgacaaacttgttggcgccatgttttgcccaataagtcctcaaatcaatcggattagaaaagttataaccctccgctgcgagttactctaacactttcttaaatgctcctatactcattttccttccagctatcctagcaccacttcgcttcgtactcataggcaaaggatataccgacatgcctgttgtgcaacatgcttacttgccaccaccagatccccatttataacactgttgaggtgccccggtgcaagaacaaaccggattcggtatgctaaaatatccatcctatcccatttatacaatttcattatttttt

SEQ ID NO: 223504 - DNA, 322 bp, Glycine max
  unsure (1)..(322): unsure at all n locations
aggggnnnnnnggggcgaatgcccttcgatgncgccnangntnaagaaaagacgaaactcggattagcctcaagcttatggtgaatcagatttctaactttcaaaatgccccattaacaggatagggggtagtctgacttcaataacactgcacaccctaaccccattaagctcgactatgcactacagaagcctccatcagcggcagtgcaagaagggtcaccgcataaccgcaacccgtgcgaggactcaaaaaacgctgtctatcctaccaacgagaaagcataaagaggaccatcgaacatacataactaccagagac

SEQ ID NO: 223505 - DNA, 337 bp, Glycine max
  unsure (1)..(337): unsure at all n locations
tgcttctcttatcgtaacaaaatanatgaaacctcnacagacggggcatcgttttttttttttttgacataatttattttttcattaaagctaataaacctagtcgggtttatactcgctactccaataccctataaataaagttctataccttcctcttataaacaattattgtagtttaatttaacctcgagctctttttttacaccatattatgcttctgtttaaaattaaaagaaataaattatatattttggctgcttacacataggagaaaagagcccccaaaattttcaaactttgactgctacagattttcaatatacatggtaaacac

SEQ ID NO: 223506 - DNA, 390 bp, Glycine max
ctgaagaggaggagcgatctgaggtgagtaaatttaaagagcaatgctagcacagggatgggaggacgaagagaaatggctcgccgaggggatcgccggcattcagcacaacgcattcttcatgcatcgcgcacttggacgataacaatctcagagacgctctcaaatactccgcgcagatgctatccgagcttcgaacttccaggctctcacctcacaaatactaccaactttatatgagagccttcgatgagctcaggaggttggagattttcttcaaagacgaaagcagacacggggtttccatagttgatctctacgagcttgttcagcacgctggaaatatattgcctagactgtatcttctttgcacgtaggatctgtttatct

SEQ ID NO: 223507 - DNA, 507 bp, Glycine max
tggttttgtttcaggagccacccgctgctgttgattttttaacgcggtttggagtggaagtgccagtgctcgcatcgtttgagttcatcatatccagaatttttcagaaaacagggttaggagaatgaagaatacgggacgaatggccaatttggctttagcaggtttaaccttagcgcctcttgtggtgaaagtagatccgaatttaaatgttatttcgactgcttccctcactgtgtgtgtgggctggtaccgctccgataaaccaaccccaccaactgagacaatgtccaatgaacatgccatgcgttttccctttgttgggagtgcaatgggattgtcactcttcttactcttcaagtttctatccaaggacttggtgaacactgtattgacaggctacttctttgtacttgggattgttgccctgtcggcaacattattaccatttattaaacgttttgctgccaaagcatttggaatgaggacctcataaactggcgtttt

SEQ ID NO: 223508 - DNA, 456 bp, Glycine max
cttagaatgtttgttatggaaacccagactggggcagtcgaccagtgaaagcaaaacgccaatttgaaaaataagtaatacatttttttttaatcacaatcagttacagaggtgtgctgttgaaataagttagctttaaaagaaacggttttctcagaaaaaagcagtatttgttctgtgactcggaagtattggtattgggcatgcttcaacttattcaaccttttttgttagacttgtcgtcagcacttttttgaggggaattggcagttttggactcatcgaactccaacaactgtttgacatcaccattccatacgcaatgagcagccaaaaatccaattacagaaggtgcaatatacaaaagagcaggctgtgcaggctgaaaccagttcatcacaacaattgtaaggaccaagccaacagtgtttcctacaaatgcactcttgaaatact

SEQ ID NO: 223509 - DNA, 313 bp, Glycine max
gcatttcctcgtttttttcttcccttttttctttctccggcgacgatctcagattccggcgcactcctctcgccggcgagcccttactcttccctcctccgtcgagccctctccgattcgaatcgttcccagcctcgcaccaccatgaatcccgaatacgattatttgttcaagcttttgctgattggagattctggtgtaggcaagtcatgtcttctcctgaggtttgctgatgatacataccttgacagctatatcagtaccatgggagtggactttaaaatccgcactgtggcgcggggggggaagacta

SEQ ID NO: 223510 - DNA, 518 bp, Glycine max
cgagggataaagattcaaggcaaatactgctattcaccagtgattccgaattttgtacaaatgttttttcttttaaaatcaaatacatagaaaataatggaagttttaacaacggcttaacgataagaggaacaaatcatgacgaacaatcttgatatgaaagcaatgtgaaaagctagttttagatgccactgagacacatgaacttctaagaccccaaatacttcgtctctctctaagtcgagcagcaaccagccttctggttcactggctgtcctcgaatttgaactgttggaggcctcgcattgttcactggctggcttgccattctgtttttaatttcagcagccatggccatgaaagcctgttcaacattggtggcatttttagcactagtttccatgaagggaattccaatttcatctgcaaaagcctttgctgtctcataggacacaactttatttgccgtgagatcgcacttgtttccaactagaagcttgttacattttcacttgcat

SEQ ID NO: 223511 - DNA, 545 bp, Glycine max
  unsure (1)..(545): unsure at all n locations
tcgcgatctagaaccgcttacattatcccacctctgccatccttgtcttttaagcaaaggctaataccaaatgcaaatactatccccactgaccaaatcttctttctcatcattcatgaattttgcttcttcattcagtttttcacccaggaagttctcgcctcagtagtctctaagttcgatctatactgaagggtacgttcaaatcaaatgggttcattccagacacccattggaatgagaagttcaacattgctagagacttcatgtggattcctgttgcaggaactgcagataatatgggatgaagttggagaagataagtttgaaagggagaaagttctgttagatttggagcaagagtgccttgaagtttacagaagaaaagttgacagagcaaatatatctagagctcatctgcatcaggaattggccgaggctgaggctgaatttacccaccttcttttgtcccttggtgaacgatctctaccagttccgccagagaaaagggcangttcactaaaagagcagctagattcatcact

SEQ ID NO: 223512 - DNA, 516 bp, Glycine max
aatttagtgacacttaactagctacctttacatttcttcaaacatcaaaattgttgtgtgcactggcattccttgagatggatttagattttgattccacttttttcctaaaccaaaaccttagtttcttcccagaaaactcctctatttttggagacactttttcttgggactacaactttgttttggatgatatcttcaacaacttgagcgacaattcgtcacaatcacaaaccaaggaaacatcctcagcgtgcaatgtttccagttgtattggtagcgttgagttacaagaagtctcatctaacaccacttacaaggaagtgaaaaaagtacgaccaccaccaccatcaccaccactaccttcacaacaagttgccaaggagcccaggatgtacagaggagtgaggaagaggccgtgggggaaatttgccgccgagataagagattccactcgaaacggcgttcgagtgtggatcggaacctttgacacggccgaagccgcggcttttgctt

SEQ ID NO: 223513 - DNA, 501 bp, Glycine max
ggaattagtggtattcttaaagatattttatctttttctggagtttcttctaaggcctgtgtttgtcctgcattaagtaggccgccagaacagatatttgagattgtaaacctcacgaatgagcttctgcctccattgccacatggaacaatttctctccctatcatctccaacatgtttttgaaagggcccattgtaaagaagtctcctgctggtagctctggaaaacaagaagacacaaatggaaatgttcctgagatatcggctcgtgagaaactattaaatgatcagcctgaactacttaagcaatttgcgatggatctccttccagttttaatacagatatatggttctagtgtcaatggtcctgttcggcacaaatgcctttctgtcattggaaaattgatgtatttcagcacagcagagatgatccagtctttgttgagtgtgacaaatatatcaagtttcttagctggcgtcttagcatggaaagatccacat

SEQ ID NO: 223514 - DNA, 471 bp, Glycine max
catctccatcaatttccatttgatatttctctgaagagcctgagctccacatttgaagtacaactttttgtaagtcatgactgagaagtgtgtagaactccagagtgggacccagaccggtgccaacttcaccaaaatattctacttcaagtacagccttttgactagaatacaactccatcaccttagcagcagaatccaaaatgcgatttcgagagacacgaaccttttgacgctgcaatctcccaaccctgacctctctttcatttgttgatccatgaccatcagcaccctgctgctgctgaaggcgatacaatgcacgagataacccaaaggcagttgaataaaaatactgtcgccgggtctcaaaaggaaacaaaaaaggacacgctttagataactggtaacaccatgagggaagactcccactacataaggcaagggcatcttgtatttgcctagctaattttg

SEQ ID NO: 223515 - DNA, 371 bp, Glycine max
cagagatgtgtagctgatggggagctttatgaggaggatgttgctgctttggcgaggatgcgtgtgatgctctgcataccccaacacattgttgaagcaactaactcatatatctgtggcagattgatgcaaagggtggcctagcggcaatcccataagcgggagatggatatcatcgctgaactcctacacctattaagagcaacccaacacacgcactgcgaaccactagggaagatgctaactctattgctagcaaggcagagacgacgaatgtgatcacatacataaaacggaccctgacagaccgagatttgcccaggaaatggaagggaactagttacaatgtctatgctgaagaccgaaaactc

SEQ ID NO: 223516 - DNA, 353 bp, Glycine max
atgaaaacttattttcattcataaaaaatagcaattgattaattcaactgtctcaaacaaaatattatctaagatttcagcactgcactcatctctattccaaagtttatacatcgggatattctttttctgctaccgttaaacaaaatggaaaataaaaaatggcaaaattaaggggacttgcagcctctctagtgtgcctaaaatgcccaacattttatcacaagactagaatacaaacttctcttcctccgcagtagtattgagtaatctatctccaatctccctaagagcagcagctgtggaatcatttatacccaacagatattgcaaacgagacaaattctcaagag

SEQ ID NO: 223517 - DNA, 504 bp, Glycine max
agcacaaaaaattctggttcttattacaagagcatgatctaccagcaaagttggaaatatgaataacaatagagcccacttattccaacacacatacaacaaccataccataaaggatcacacgtatgtagacagagaccacatggcatagcataactaatcaaaaaacatggcatagcataaataatcaaaccccaaaaaataaatgatacaagattcatccatgaacaagacaagattcttagctatttataaatgcacaatgcttcctgatctctccttctgtccctgtcttcacattaattcttcccattttctcgatggaggttgcaaactcagcaaagaaattttcaactgacccttcaagcaattggatgatttgtgcctttgtaactgagttagtcaataatgcagcatctgactcaaatagaccccttctcttataacgtgactatagtagctaagatcaaatgtcttgcgacttccagggtccatctcaatttt

SEQ ID NO: 223518 - DNA, 557 bp, Glycine max
  unsure (1)..(557): unsure at all n locations
acaatttctctctctagaataaaacattttctatctcctccaagacctacaagaacccagtgcctgggacaccgtccccaaaatctcactcttctgccttatattttctcttctctttttctacaaacatgtatacaaacagcactctcacattcaccacaacacaaacacaaacacaaacaaagacaacaaccttgtttgtctgcaatcaaaacctttcaagctggcgttcgagaaccaagacacccctgtccgagaaatcaagcccaagaaccggagaatcatgggtgctggaggccctgatgacgaggacaataggtggccaccatggctgaaacctcttctcaaagagagcttctttgttcaatgcaagcttcacgctgattcgcacatgagcgagtgcaacatgtatagcttagatagaatgaacggcgctctctgctctctctgccttgcttaccacaaagatcaccgtgctattcaggttcgtgtngatgtcatcacttcttcttcttcaacttttttttttaagagaaataaaataaaatttttttctt

SEQ ID NO: 223519 - DNA, 528 bp, Glycine max
ctaaaacaaatgcctgttattgataattaggctaaaaagccaccaaacacgtattattattttaatataaacgtacacaaacaaactctaaacgagttttttttttttggtggttgttgttgttacaaaccccaagcaagtttgaaaagtggtacacaataatgaaataatatatgaggcatctcagatggccacactatgcaaaacaacagtttcaatggtaagtccaggtccaaaaccgaacaacacaccccattcaagtccttcacctgtggttttatgtccattttcagcagatttcctcctcatctcatccaagatgaaaagaacacaagcacttgacatgttcccatattcactaagcacatctctagtggccttcatcttctcaggtttgagacccaacttttgctcaacttggtccaaaatcgcaggcccaccagggtgtgcaatccaaaagatggagttgtaatcagagatgttcaatgggttgaaagcctcaaaaagtgccttatcaatgtttttgag

SEQ ID NO: 223520 - DNA, 530 bp, Glycine max
agcggattgaaaatggcttggtttgtgttacgttgtaagtattgtttccgtgtgactcagaatatcatgatgaagttctaattttgcccaagaaatgagcaatttttcatacagtatgataaacaaaatttagacggtagattaaaagaacaaaacattcacctatctatgatacacaaactataccttcctaagtttaattaacagtacactcaacagatcaatcaatacaaataatcaacaaaagtagttggctttccaatcttcaaaaactccaaatcattctcaaagggtgtcagattcaaatccaaaaccaaaactctcttgttgtcagctttcttctttggcgatgaatcaaaactgctacccccaatactacaactcgtagcccgaagaatgggccacgtttcattcaaatccgccgctctgtgccttctcatgtgaccttccaaggcttgccctatagcaaactccaacccacaaatggaacactcatgagtcttaggctttgggggagaatcatgaagcaa

SEQ ID NO: 223521 - DNA, 509 bp, Glycine max
ggatgccaaaaagaacaggcttcccattgaaggaacctgcaaaaatgagggctaaatgactgcacactccggtaaaaaggaaccgagtcactggacgatgaagacctgttaaggacctaaaaaactactgtgcaacactgagcataacaagcttcctgctgatgtgatcctggcctaaattgcagtgagattagtttttctttcagctcaggagaggatgtcacacctccagagaagctccacaagtgtgtcaaccgtactgctgttgattgcattgcagtgctggatgtttagtcccaaaagggtgtgacccaattctctcaacgcaggcaagctcctgtctgagaccaaagtgcaacctgacaaagaaagaacttgcagattaatctgtttagcatgtgccagggcttcaatcccagcatcggttatagcacacttggagacattgagatcacatagcaatgcacagttttcagcaattgccatcaagctagcatcactgatgtttt

SEQ ID NO: 223522 - DNA, 500 bp, Glycine max
tttcagaggaacaatggcgggtaggagtttcgacttgcttcttcttcgtgtttgctctttggctccgggttccttttcagatctccgctgaggaatcatcggagaaagagttcgtactcacattggatcactctaactttcacgacactgtcagcaagcacgatttcatcgtcgtcgagttctacgctccatggtgtggccactgtaagaagcttgctcccgagtatgagaaagctgcttctatcttgagtagtcatgatcctccggttgttacggctaaaattgatgccaatgaggagaaaaacaaagaccttgcatctcaatatgatgttaggggatacccaacaattaagattctgagaaatgggggaaagaatgttcaagaatacaaaggtccccgtgaagcaaatggcatcgctgactattcgaagaaacaaagtggtcctgcttcaactgaaattaaatctgctgatgaagctactgctttcattggtgaaaat

SEQ ID NO: 223523 - DNA, 415 bp, Glycine max
ttgttattattaattgcaaaacattcttttttgaaaattttatatcataacatacgggacggggtgaaacttaaaattactattaagatatctagagactagagatactgggtgatctaaaaacatccattaatttaactcgtatcccagctacacctttccctgcactaaactctactacaccaagcaaaagctcccgtttttattaagtaaaccatacataaaagaaaaccgaaaagaaaagaagatcaaaggaagataggttgcacctaaggttcactaaattctgataacgagatacaaaagggtgtgcagcccacatgtaactttgtgtctatatcccatgtgaggaacagctccctttaaagctcatctttttctttttcttgctcaatttgaccttgttcttgctgag

SEQ ID NO: 223524 - DNA, 537 bp, Glycine max
tttcaacccttctacgtgtcctccattttttctttttctcctccatctacgttatttaaagcattggctgctttctctctttcattatctactcatcactctcattacactcgttttttgtgtctctcaacttttatcttattaaccataggtcacatattatatcatcacatatcatagtgatatattatatcatatcacaacgagtggcctacttgctgagcttggttgctctgatccatctcaagccaaaagggttcacgtccttgaactttctcgcagattgaagcaccgtggtcctgactggagtgcgctccaccaatatggagataactatttggctcataaaaggttaaccatacatgatccagaggctggtgatcaacccctctgcaatgaacacaaaactgttttggttacggttaatggagagaccttcaatcatgaagaactcaagaaaacagtgcctaatcacacctttcctacaagaagtgactgcgatgttattgctcacctgtatgaggagcacggagaaaa

SEQ ID NO: 223525 - DNA, 489 bp, Glycine max
gcctcacaaaagcaaagatcaaacaatctaaggtctagaacacgatgttgcttgaactggcactgggtttattggttttggctctgtttctgcacttgcgtcccacacccactgcaaaatcaaaagcacttcgccatctcccaaacccaccaagcccaaagcctcgtcttcccttcataggacaccttcatctcttaaaagacaaacttctccactacgcactcatcgacctctccaaaaaacatggtcccttattctctctctactttggctccatgccaaccgttgttgcctccacaccagaattgttcaagctcttcctccaaacgcacgaggcaactttccttcaacacaaggttccaaacctcagccataagacgcctcacctatgatagctcagtggccatggttcccttcggaccttactggaagttcgtgaggaagctcatcatgaacgaccttctcaacgccaccactgtaaacaagtga

SEQ ID NO: 223526 - DNA, 494 bp, Glycine max
gatgtggctactcaaaattaatataaggattgatggtttatagtagatgatgtgattcaaaaaaaaaaaaagattgccttaggtagcaaacgaagacaaatgggagatgatacaatgtgcatggaagggcttatatacttcataaaaagtagatgaacgagaccttattgaaatgatgattatcaacacacaaaaagtaaatattatatatgatgatgatcttaattaagaaaggagtttagatgcaacgccgatccttgcaagtggaacacagacaagactatgtgcccttggaacagtgaggccggctctctcttccatgctaactttggcgtcaccacccttcaatatctgtccttgtggacccagcacttgcaagtcgaagcactgaataagagatgcaagaagtgttgccattcccgaagtagccagattgactccagggcacattctccttcagacccaaatgggagaagttaaaatgttgtccccta

SEQ ID NO: 223527 - DNA, 563 bp, Glycine max
  unsure (1)..(563): unsure at all n locations
ccctttcctctccgaaccctcgatcactctcacttcgctcctatattcgctcctccaccggggctgggtcgaacaaccacaacaccatcttcatcacatggcaaacgcagcatctggtatggcagtccatgatgactgcaagttgaggtttttggagctgaaggcaaaaaggacacaccgtttcatagtttttaagattgaggagcagcagaagcaggtcattgtggagaagcttggtgagcctgcccagggctatgaagatttcactgccagccttcctgctgacgagtgccgttatgctgtttatgattttgagtatctgactgaagggaatgtccctaaaagcagaatttttttcattgcgtggtcccctgacacatcaagggtgaggagcaagatgatttatgcaagctccaaagacagattcaagagggagctggatggaattcaagtagagttgcaagcaactgatcctactgagatgggtcttgatgtgtcaaaagccgtgcccactaanatgattatataaaatagtatgctttctggtgggagcagcacccctg

SEQ ID NO: 223528 - DNA, 332 bp, Glycine max
attagtactctcgttaatttttttgctttttgctaattgggcacaatggaaaagcttggggctgtgtgcatcccatacccagcacaaggccacataaacccaatgctcaagctagcaaaactccttcatgttagaggcttccacatcacctttgttaacacagaatacaaccacaaacgccttctcaaatcaagaggttctgattccctcaatagtgtcccatcatttcaatttgaaaccatccctgatggtctctctgataaccctgatgttgatgccacacaagacgtagtttctttaagtgagtctactagaaggacttgtttaactcc

SEQ ID NO: 223529 - DNA, 508 bp, Glycine max
aaaaactaaaaatatattatacctttatttcaatagagttagaatggttgtaaaatcattacactactacatgaacgaattcatgccattgagcattgtaataatctaaacactactttgtagcaattttgttcataagaacttgacgaaccacgttgtccatgttcacaaacgaagacccatgtggactcgaagcagcctcgtgtgccaatttcttccactccaaagctcttgccttcatctccttacccttttccccttccatcaactccctcacaaatgcttcaactttctccctcttaacatcctctatctccaacccaatcccccactccttgcaacaaaatcgacaattggtttgttgctccgcaaagaaaggccaacacaacattggaaccccttcacacacactctccaacgttgaattccaaccacaatgtgtcaagaatcccccaaccgctgggtgagccaaaacctcctcttggggacaccaacttgccaacatgcc

SEQ ID NO: 223530 - DNA, 496 bp, Glycine max
cacacaccacacacatagtagctattattctctctagagtaattgcggaatctgctaggggtttctaataatggcgaaagacgttgagcacgtcacagagcaaggtgaatactccgcgaaggactaccatgaccctcctccggcaccgttgatcgacccagatgagctcacaaagtggtccttgtacagagccgccatagctgagttcatagcaacactcctttttctttacatcaccgtgttgaccattattggctacaagagacagagtgacaccaaaatccccggtaacaccgaatgtgacggcgttggcattttgggcatcgcttgggccttcggtggcatgatcttcatccttgtttactgcactgccggaatctctgggggacacatcaaccctgcggagacattcgggtttgttcttggacgcaaggtgtctttggtgagggcgttgttgacatgaaacacagtgtgcctgtgcaaactgcggtgctgg

SEQ ID NO: 223531 - DNA, 505 bp, Glycine max
aattaagcattgtttctgaaggatccaagagctttgattgcagaggctctaataatgtattgatggtagattgcacccaccgcagctccaacaaacggtccaacccagtaaatccattggtctgcccaggctttgtcgttgttgaagatcacagctggtccgaaactccttgcagggttaatgccggttccagtgacagggattgtagccaagtgaaccatgaagacggcaaacccaatgggaagtggtgctaacacaggaacatgagagtccctagcgttcctcttaggatcagtggcggagaaaacggtgtagacaagaacaaaggtaccaatgatctcagcacccaaagcggtacctttgttgtagccatcgctgacagtgttaaccccacctccgtacctgttgtagaacgatttctggaactccttggccaacccagcaccgcagattgcaccggcacactgtgctatcatgtacaacaacgccctcatcaaagacacct

SEQ ID NO: 223532 - DNA, 473 bp, Glycine max
aaagcctcgttaacagcaaggtgggggtggggtatcaataaaacaaagttacatcccctcccctgtttgcacaggtttgaccaatacaccgaattactaaaattggtttggaggaactctaggaaaaacaaaatgcaaaattccaaacgattattattctgggaagagtctaagcacaatactcattaacaagaaaattccgttgtacccataaaataccgattcctacccgcacttagattgatcagtacttgtagtcctaaacatggaggctctctgaggcaccatcaacaagctttgagttacccttgtaggttcccagagttgcctttgagttagccttggcttttaccaaaagggcttcctgagccttcttcacattctcctcttttccactccatgccttaagggtgctctgttgaagtgccctttccaaggagaaagagagtgaccatggcttttttccattgacc

SEQ ID NO: 223533 - DNA, 480 bp, Glycine max
attttcccctctttggagaaatcaaaattggggaacccatgattcctcctccatcttccggtctcttgcagttcctcctcctctttcctctcatactctcccattccgattccgattccggtcaccccgtgctcccgcgcccgctgatcgtggagtacccggagttcgacgcggtgctgcggtgcggcgcgtggcgcgtggcgggggaggcgaacaacctaggcgcgtgggcgataattcccgaggaatgcgcggagtacgtgaaggactatatgagcgggaaaggctacgcgcttgacctggaaatggtctccaaagaggcggaggagtacgcgaggactgtgccactcggctacgacgggaaggacgcgtgggttttcgacatcgacgagactctcctctccaatctcccctattatgccgcacatggatatgggcttgaggtctgtgaccacgagaagttaacgattgggtggaaaa

SEQ ID NO: 223534 - DNA, 467 bp, Glycine max
ggaaccataaaggagggggggctataaccttatcatttcagattattcctcatgtaaacatgccaaatctttcagcaacaagtacaacgcacaatgccatttgaatggatttgggtggtttaaacacaaaataacaaaatttatccagattacaaaagcattaaattggggcagtcatgccaaacagaacatgcacatatattccaatcttatagcatttatttaatatacaaacttcattttctattctaaaattagcaaatatgttttagaaattaccttaatatgagctgggcccagtccttaaacccagcattgatcaaattatcaacagggacactcctgggcctttcattacgtccaggcagtaaaataaccttgaatcccagattcaaaacatcttcatagagctttaaactgggttcaatggctgtagctacacccttttccacccaatcgttaaactt

SEQ ID NO: 223535 - DNA, 465 bp, Glycine max
cttcttctcttgcggctagggttaagcttcatttcttctagatttaaggaagatgggtgaggaaaaggttcacatcagtattgtggtcattggccatgtcgactctgggaaatccactaccactggtcacctgatttacaagcttggaggcattgacaagcgtgttattgagaggtttgagaaggaagctgctgagatgaacaagaggtctttcaagtatgcctgggtgctggacaaacttaaggctgagcgtgaaagaggaatcaccattgatattgctttgtggaagtttgaaacaacaaagtattattgcacagttattgatgcgcctggacatagggatttcattaagaatatgattactgggacattccaagctgactgtgctgttcttatcattgattcgaccactggtggttatgaagctggtatttccaaggatggacagactcgtgaacatgctct

SEQ ID NO: 223536 - DNA, 594 bp, Glycine max
gaacactaaaattagaaagttgacatttaataaaccaaagcagcggaacgcagcaaagtcctgaaactcgctgcgcttaacaaaaatgtaatcaggggttccgacaaacacaacacattaaaacacagataaataaaagcaattttgccaccgtcgatcaagaacccagttctgggaacaacagttgcgagatgatggtggagacttcaaactttgtccgaaaaacaagctacctagaaaagaagacacaagagtacagaaaagaaaccaacatttattgtaaccaacatcccctgatgaaccagcccgcacgattcacttcttcttctgggcagccttggtgaccttggctccggtaggatccttcttctcaacgttcttgatgactcccacagcaacagtttgacgcatgtccctaacagcaaacctaccaagtggaggatactcggagaaaagttcaacaaccatgggtttggttggaatcatcttaacaaaaccagcatcacctgttcttaaaaacttgggctccttctcaagctctttgccggatcgcctgtcaatcttggtcatgagttcagcacacttgacagcaat

SEQ ID NO: 223537 - DNA, 453 bp, Glycine max
aaatctgcaaactaggctttttcccatttggttttgtttattcaagttttacaatttcggggctcggaaactattagatggggaattgtttgcgcaaggctcatgcggatgatgattctgatcatattgcggagcttgcttctgggaatgtgcaacttattactaccaaagaatcttgggaccaaaagttgcatcaagcgaagaaggagagtaaaattggaattgcaaatttcagtgcaacatggtgtggtccttgtaaggtgattgcaccacattattgcgagtcgtccgtgaaatacccgtctatcatgtgcttattagtcgatgtggatgaactagctgacttcagcactttgtgggacatcaaagccacaccaactttcttctttcttaaagatggaaaagaagttgacaaacttgtaggagccaacaagccacagctggagaagaaga

SEQ ID NO: 223538 - DNA, 514 bp, Glycine max
ctcaattttctgagcagccaaacactctttctctgtctctcgaaaattctcagtttgcagagaaaatctgaatcatgtcgtggcaagcgtatgtcgacgatcaccttctgtgtgacatcgaaggtaaccacctcactcacgctgctatcatcggccaagacggcagcgtttgggctcagagtaccgacttccctcagttcaaacctgaggagataactgccatcatgaatgactttaatgagcctggatcacttgctccaactggattgtatctcggtggcaccaaatatatggtcatccagggtgaacccggtgctgtcattcgagggaagaagggtcctggtggtgttactgtgaagaagaccggggcggccttgatcattggcatttatgatgaaccaatgactccaggtcaatgcaacatggtagttgaaaggcttggtgattatctcattgaacagggtctctaatctttgcttaatgtcttggtatcgggcatatttcattggcttct

SEQ ID NO: 223539 - DNA, 392 bp, Glycine max
ttttttttttttttttttttttttttttttttttattatttttttttattttttggggtatgtttttattattttttttttttatttctcttttcttttaactgtatgtgaaaaaaaacccccccccctatcccagaataaaaaaaaaaaaaacccccttgaaattttaaccccccccccccaaaaaaagccaaaaaaaaaaattttattttatatttctaaaaaaaaaaaaaaatttttttcaaacaacaaaaccccgttttttttttaccccaaaaaaatatccccctcgaaaaaaaccatttcccccaagggtagaaaaaaaatttctcccaacaccaaaagaaatcccctcctaccacaatactcctcaagattttggccccccctgt

SEQ ID NO: 223540 - DNA, 365 bp, Glycine max
gtggacaatggaactcctgttaacaggttcttattcagcaacttcctgtcagacccagggcacggagccattaaagtttgcgctgaactgagacccacagtagacatttctgtgccaccagatgcagactttgttcgtccggagttgcgttctagcaattagaacttaaaagcaattatggctttcacttcgaatctttttcagatttctcagaactgcagttatcttgttagtttgggttttcatgattggatgctagtgtgtaagttgtattgtcattttacagtttgtacccgcctgtgttctgccactgaggaacgttacttggtgtcctatttaaatgagtcacgctagtacttaccatt

SEQ ID NO: 223541 - DNA, 504 bp, Glycine max
  unsure (1)..(504): unsure at all n locations
aaatgcgcgnaatttcttgggtanngcacgncaaccggatataatttcccgggtgcgacgacgctcacttagtcggcggcgcgccctttttttttttgttttaatggtaatgtactattgcgtgactcatttaaatacggacacacagagtaacggttctctcagatggcgaaaacactaggtcgggtacataactgtaanaatgacaagtacaancttacacacttagcagtccaatcatgagaaacccaaactatacaagatatactgtcagttctgagaagatctgaaaaagaaattcgaagtgagaagccattaattgtcttcttaagttctaatattgctagagacgcaacttccggaccgaacaaaagtctgcatactggtggcacagagaatgtctacttgtgggtctcagttcagcgcaaactttaatggctccgtgcactgggtctgacaggaagttgctgattaagtccctgttacagggagttcatttgtcac

SEQ ID NO: 223542 - DNA, 469 bp, Glycine max
caaaccctaacaccaaagccttaagctttatcgcaatccaatcccgcgaatatgaaggggtcgctgcatacttgctccagtgttgggagggaatccttccccttctgccgatgacatcaaacacatcctcggcgcagttggagctgaggctgagaatgagttgattgagttgctcttgactgaagtcaagggaaaagacttcaatgagctaattgctagtggaagtgaaaagatgtctgcagtgtctggtggcggtgcagcggttgccgttgctgctgcaccagctggaggtgctgctgcacctgctgccgaagcaaaggaagaaaagaaagtagaagagaaggaggagtctgatgatgatatgggtttcaggttgttcgactaaaaggtctgaagtgtttttgtcttacatttgcagttctatttagtatttagcccaatcacaaggttttgttacctgagttacata

SEQ ID NO: 223543 - DNA, 480 bp, Glycine max
gaagtgatggtgtaacagtcttaggctttacaattcagaatagtcaacaaacccatctgcgggtttgtctcttgcacaaatgttcaagtctctggcattagcgtttcatcacctggtgatagccccaacactgatggaattcacttacaaaattctcaaaacgtggttatctatagcagtacacttgcttgtggtgatgactgtatctctatacaaactggttgctcggacatatatgtacacaatgtcaattgtgggcctggccatggaatcagcattggaagtcttggaagagagaacaccaaagcctgtgttagaaatgtcaccgtccgagatgttactatccaaaatactctcactggtgtcagaattaaaacatggcagggtgggtctggctcggtccaaaacatcatgttctccaatgttcaagtttctggggttcaaattccaattttgatcgaccaatactattgtgatggt

SEQ ID NO: 223544 - DNA, 539 bp, Glycine max
aaaaaagtaaaaggttgtggcactcataaggggggaaaaaaatgatatatcataaggctaattcattctttccactagatacatttttaaatctaagcatatggtggctagtaaatcttctcccccaacatcttttcggcacacatattacaatccactgaatcgagaattatattacatgaatgtgaactaattttaagatatcatgataactaactagtaacaactttccatggtatgtatatataataatgttaatctatatatccctgacattgtgttgataaatttagcaagaatcaattttagaattgattccacctgcttttgatgggtttcctctctgaagacattcaacgggagggactgttttggtcttcaactccccatatgcttcccaacaaaatggaacattggaatttttagtttcttgggctgattctagccgtatggtatcaagggttatgccagtgcaaggtaagttgtcactacatgcaaaataaataggctgcttagtgtatgttcccttataatcacat

SEQ ID NO: 223545 - DNA, 511 bp, Glycine max
  unsure (1)..(511): unsure at all n locations
gaaagaaatagaaaaagaagaaaaaaactcagcgtcctagatttcctcttctctgcttcggaagaaagagaaaacaaacaaaacaatggcgttcgcttctttcctcggcagagtcctcttcgcttctgtcttcatactctctgcttaccaacaatttaatgaatatggagttgatgggggacctgctacaaaagcactcagacctaagtttgatgcctttacacatcgggtgcattctcaagtgggctttcaaattccagagattaatctgaaatttttaattgctggggctattgctctgaagggtcttggaggggttcttttcatatttggcagctcttttggagctttgcttctgctcctgcaccagctgattgctactccaatccattatgatttttacaattatgatagtgaggacaaagaatttactcaactgttcatcaaatttacacagaatatggctcttttcggngctgtattgtttttcattggcattgaaaactccatc

SEQ ID NO: 223546 - DNA, 534 bp, Glycine max
  unsure (1)..(534): unsure at all n locations
agaacagaatgaaattggcactgtgaagattaagcgcaaaggcttctcatccttttgttttcctttttgacagacaagtttggcaattgaaagatagttcctaacgccgtgataacagatcatacaaaaataataatagtagccaataatataatccaagtgaagccaaaactacaaaactcaaagggaggaagattggttctgaaccagagaagagagtactcggtgcaaatcctgccagattggagaggatatgatgaaaaaccaggaaacaacagctcccacagcccccacttcttgaaaggggtcctcaatgctgcaaaactaatatgtttttgtctttggagccttcttgggtacccttttagggatggagtttttcatgccaatgaaaaacaatacagccccgaaaagagccatattctgtgtaaatntgatgaacagttgagtaaattctttgtcctcactatcataaattgaaaaatcataatggatgggagtagcaatcagctggtgcaggagcagaagcaaagc

SEQ ID NO: 223547 - DNA, 503 bp, Glycine max
ctcgagccgattcggctcgaggacgacgccggcttcggagctcacggtggaggagcgcggcctcctctcggtggcctacaagaacgtcatcggctcgctgcgtgccgcgtggcgcatcgtctcctccatcgagcagaaggaggagggccgcaagaacgacgaccacgtctccctcgtcaagcactacagatccaaggtcgagaacgagctcactcaggtctgcgccagcatcctcagccttctcgactccaacctcgtaccctccgcctccgccagcgagtccaaggtcttctacttgaagatgaagggcgattaccaccgctatctcgccgagtttaaggttggggacgaaagagaaaccgctactgaggataccatgttgtcttacaaggctgcccaggatattgcttctgcggatcttccccctactcaccccatcagattgggtcttgctctcaacttctccgtcttctactatgaaatcctcaccagtctgataaagc

SEQ ID NO: 223548 - DNA, 370 bp, Glycine max
atattcaataatttattttttatcccattatacagtttcctttcgggtcggtttgacacacaaaaaaaagaagcctcctctcttctcatacaacattatatcacagattgccaatcattttataaaacaatgtgcgatttcttaaataaccacatatcaatgacattcaaagcccacctccatgagaggaagaataccacccatcaacctataagggatattagggctcatttagctggtcctgaacatcataagtccaaagggtgaggtcgtctcttaaaagctgcattatgagcgtgccgactttgtaagattcttcttccaaggtgtccaactcaacaattgcttccttaaaagcctgtttatccat

SEQ ID NO: 223549 - DNA, 599 bp, Glycine max
  unsure (1)..(599): unsure at all n locations
aaaaaaaaaaaacctgcgcaatcaangttcgtagtctactacgacgggttaggcgcactggccgacgctcgtagttgtttcgagctgaatttgccttacaggtagaatctgttattgctccttatcgtggcctacttatggggctcttctttatgacggttggaatgtcaattgatccaaaactttttgtttcaaacttcccagtcattacgggcacactaggactcttaatatgtggcaagactatcttggtttgtttgataggtagaatgtttgggatttcactcatttctgccatcagagttggtctacttcttgctcctggtggggagtttgcatttgtggcttttggtgaagctgttaatcagggcataatgtcttcccagctgacatctttgctgtttcttgttgtgggcatttcaatggccatcacaccatggctagctgcaggaggccagctgattgcttcccgctttgagcagaatgatgttagaagtttattacctgtagaaagtgagacagatgatctgcacgatcatataattatttgtggatttggacgagttggccagatcattgcccaacttctttcagagcgt

SEQ ID NO: 223550 - DNA, 494 bp, Glycine max
cttctgccatctactttgtatatatgcgcgactcttcatattgctagtgtcccttcggagacaggggtctcatctaatgaatctggggatggagatttgggtttgttcataattctattaaatccataaccaagagaacttccacttgcttcacacagctcagtgagctcagccagatgtcgagatctgaattcatttatagtagctgcaatctccgacgtagggagtttagcctgagaaagcacagcagctgctagttgaagacttggttccaaggtctctgggacaacagcagtagctccagccttttctaaattcaatccatgatcaacgtcatgggcacgaacaaaagtcttcacatttgggaagtacttgcttaaagcccaaactgttctatatattgcaccaggcgtatcaagagttattgctgcagcacatgccctttcagcctcaaccttatgtaggacctttttactaccagcattttcaaagta

SEQ ID NO: 223551 - DNA, 568 bp, Glycine max
ctcgagccgaatcggctcgagcggctcgaggatgaagcaagcaagcgatttgtgaaagcgttgaccagaaagtgtgaactacaaagtgtaggaatgagcatataccaccagatacctgcgttgattctggattcttgaagccattccttctattttctggtgacagcttcgtcttgtgctatactatataacaactcaccctctctccttacctcttcattcccaacacaaaacactctctcctccttcaacctagccctggtcactaccaaccaagtgtcccccctcctctcccttgttaacaggtagctgagttagtgagtgatggcgggaggacaactaggagtgcttaatgcactcgatgtggcaaagacacaatggtaccacttcacagctattgtgattgctggaatgggattcttcaccgatgcctatgatcttttctgcatttccccggtgaccaagttgttggggaggttatattacacagacataaggaacccgaagcctggggttctttcttctaatgttcaagctgctgtgactggtgttgcactatgtggcactt

SEQ ID NO: 223552 - DNA, 518 bp, Glycine max
agacaacactttctaattaaaaacaagaatgaaatacacgcactttgtaattgatttaaagttacagacagcaccgagaaacatatatctacatcattattgagcatctagctgtagaaaacccgaagtaaaattgtcacacaataatagcatcactagaattatgaactaagtactttgttgatcagagactttggttaaactggaaccgtcctagcagaccctgccatctctatagcctcagcaccatcatcttcattctccccactcaactcttccagtgattttccctttgattctggtactaacaaggtgaataccattccaaagaagttgatcacaccaagcacaatgagggagttcttaaccccaataccagttgggtaaccatgatcaaccttgttggggttcgtactttgtgcagcatacaagaatccaaatgcaccaacaattgctcctgcctttcctgccgcagctgagattccatgacaagtagatctcagccttgctgggaaaat

SEQ ID NO: 223553 - DNA, 471 bp, Glycine max
ctacccttgatagttatgataaacgggcgggcccaacatgggagcattgactggagcagtttctggctgtgatcttgaaaagcaaatgattaaaattggaaaagaagggtgtacataaaaggcacaatgcaagacaaaaagacatgatcgaggaaccaagcaatgaatctctcccattttagagtggggcataccctttcttccaatgcagaaggggccgcgccgtctgctaccagcttgtccccattcccttagactatcatgccccatcctcttttgatctcttctctctaaatatgcctctacatttattaataataaaattaaaacctagcgttttcgaagccgtgcaagtcgctgactctattcaaagacttcttcatcattgccatcttagccagcttcttcgcggctctccaagccgaagtcggcgtaagcggttcgccgttctcgtccagcagcgccatgacc

SEQ ID NO: 223554 - DNA, 386 bp, Glycine max
cgcaagcaaaaagaaagaatcccaggcgaggagtaagatggaggggaaggagcaggatgtgtcgtggggagcgaacaagttccccgagagacagccaattgggacggcggcgcagagccaaaacgacggcaagggactacccaggagccggcgccggcgccgctggttgacccgacggagtttacgtcatggtcgttttacagagcagggatagcagagtttgtggccacttttctgtttctctacatcactgtcttaaccgttatgggagtcgccggggctaagtctaagtgtagtaccgttgggattcaaggaatcgcttgggccttcggtggcatgatcttcgccctcgtttactgcaccgctggcatcttagggggacacat

SEQ ID NO: 223555 - DNA, 470 bp, Glycine max
tttttttttttttttggtttttttttttttttttttttttttttttttttttttgggtttggtttttttttttttaaaaaaaacccggggggaattttggatttggcaaaaaaaattacccaatcccggccgcccataaaaaaggaggggggccctttccacctaaaaagcgggggaaaacttgggcccagggccggacccaggcccccccaaaaaaaaaaaatttaacatttttcccaccaaaaaccaaagattttaatttttaaaaagaaaaaaagggataccccgccctttttatggaaaggaaccccaaccccccaaacctgggctggattttggggggggggggggcccccaccttgaaaaaccaaaaaccggtggaaggaacccctgggcctggaagggaagggccccgaatccaacccgggggaaaaggcccccaaaacctccccccaaaaagggcccccccc

SEQ ID NO: 223556 - DNA, 468 bp, Glycine max
gtctccatttgacacagtcctagtggtgtacttcttattatggccacaccagcatccatcactagggtcactgtggagttccttcaattccccgcactggtgacacctcctggctctaccaaatcctatttccttgccgcgcaggggtgagagggttgaatattcaagaagaatttgtgaagttcacgggaataggtgtttatttggaagacaaggccgtgtcatcactcgctgccaaatggaagggcaagagtgcagctgaattgctcgactcccttgacttctacagcgatatcatcaaaggcccctttgagaagttaattcgagggtcaaagttaagaacattggatggtcgtgaatacgtaaggaaggtatcagagaactgtgtggcacatatgcaatctgttgggacttacagtgatgaggaggaaaaagctattgaggaatttagaaatgctttaaggatca

SEQ ID NO: 223557 - DNA, 511 bp, Glycine max
cacattatggccacaccagcatccatctccaatgtcactgtggagttccttcaattccccgcggtggtgacacctcctgcctctaccaaatcctatttccttggtggcgcaggggtgagagggttgaatattgaagaagaatttgtaaagttcacgggaataggtgtttatttggaagacaaggccgtgtcatcactcggtgccaaatggaagggcaaaagtgcagctgaattgctggactcacttgacttctacagagatatcatcaaaggtccgtttgagaagttaattcgagggtcaaagttaagaacattggatggtcgtgaatacgtaaggaaggtgtcagagaactgtgtggcccatatggaatccgttgggacttacagtgaagcagaagaaaaagctattgaggaatttagaaatgctttcaaggatcaaaattttccaccaggcttcactgttttctacaacaatcacccactggacattggggcttagtttctcgaagatg

SEQ ID NO: 223558 - DNA, 316 bp, Glycine max
attatctaactggtttgctcattcattagagggggtgctaatccaaacactgtggggatttttttgttgttcctgtttccaatgccccctaaagattgttctcagttttcattgttgggattggcctctaactctttgaaaaactgaggaaaccttgttgccaaactctcttttaaagcaggggaaacaggaatctctccgatcatattctccagaacggcctcccagagtgtgttggtaactactactgcatgctcatgtctccggcttgactcatgcttctagaaactaatccccaatgttccagtgggtgatt

SEQ ID NO: 223559 - DNA, 529 bp, Glycine max
ctacagcattcttctgcaattctaatttaattttcaaaccatggcttcctccaccaacgctcttcctcccaccggcaacggcctcatcgtgagcttcggcgagatgctcatcgatttcgtccccaccgtctccggcgtgtcccttgcggaggctccgggcttcctcaaggcccccggcggcgcccccgccaacgtcgccatcgccgtcgcgaggctcggcggaaaggcggcgttcgtcggaaagctcggcgacgacgagttcgggcacatgctggctggaatcctgaaggagaacgacgtgcgatccgacgggatcaacttcgaccagggcgcgcgcaccgcgctggcgttcgtgaccctacgcgccgacggagagcgtgagttcatgttctacagaaaccccagcgccgacatgcttctcacgcccgaagatctcaatctcgaactcatcagatctgcaaaagtattccattatggatcgataagcttgatcgtggagccatgcaaatcagcacacctgaatgcaatg

SEQ ID NO: 223560 - DNA, 581 bp, Glycine max
  unsure (1)..(581): unsure at all n locations
cggctcgagcggctcgagccttgctttcttcttcacttcaaacttgccaatcgcgaagatggcaatagaattggcatctcccaattgggttccaaccgcagccgcatgtttggcagccttggccgccctcctcctcttcctcctccgcggtctccgccgccgtaaatacaatctccccccaggccccaagccctggcccatcataggcaacctaaacttaatcggctccctcccacaccagtcgattcacgcgctgagtaaaacatacgggcccatcatgcacgtgtggttcgggtcgaaccccgtcgtggtgggctcatccgtggacatggcgaaggccatcctcaaaacccacgatgccaccctcgccggcaggcccaaattcgcggcgggcaaatacacaacctacaactactcggacatcacttggtcccagtacggnccatactggcgccaggcccgtagaatgtgcctgatgggattattcagtgctaaacgcttagaagaatacgaatactttagaaacangagcttcgtggccttcttacgaactcttcaattccganacaaaacaatttact

SEQ ID NO: 223561 - DNA, 509 bp, Glycine max
gagagattaaatggctacaaactttcactaacacatttggtattacattggttaccacaatctctattctaacaccacaacatcatttttattttattttttataacattggtatgagaagaaagaaaaattcattgcaatccagtgtgacaaacataagctcacacaagacccattttattcctacagcaatcttattagagagaaaccctttgtgcaagggcactgctcaaagagaataaagatggtgtggaagcctaggctcaacaacagtttccagtggtattttcttaggtgtagagagcccaaaaatctcatccatattcaaatcctcattcttgacattatcaggcagtctccagttaaatccatgcaacaaattggccaaacttgcttgaatgaccttaaggccaagagggtagccagggcacattcttcttcagcaccaaatggcaatagctcataggcatgccctttaacatcaatctccttattaagaaacctctctg

SEQ ID NO: 223562 - DNA, 587 bp, Glycine max
ctcaaacccatttccttgatatcttagttatctaattacctcaattaatcccttaattgcgagcatcatggctgaggagaaacaccaccaccacttccaccaccacaagggcgatgatgtgcctggcgaggttgattataagaaggaggagaagcaccacaagcatcttgagcaccttggggaacttggtgctgcggctgccggtgcttatgccttgcatgagaagcatgaggccaagaaagacccagagcatgctcacaggcacaaggtagaagaggagattgcggcagcagctactgttggtgctggtggttatgtcttgcatgaacaccatgagaaaaaggaagttaagaaagaagatgaggaagctcatggaaagaagcaccaccatctgtttggctgaacatgataaatattcatatataattaatattcaagctccaaagtatcaccatgcctgtgtatctctatcatatcttccatttctagtgggcctttgaataaattctgtgcgagcttgaagagtgttaattatgcctatggtgttacttcatatatataattgcgtatatataatgtatgctatg

SEQ ID NO: 223563 - DNA, 436 bp, Glycine max
atcaatatagccaacatagcatacattatgtatacgcaaatatatatatgaagtaacaccataggcataattaaacactcttcaagctcgcacagaatttattcaaaggcacactagaaatggaagatatgatagagatacacaggcatggtgatactttggagcttgaatattaattatatatgaatatttatcatgttcagccaaacagatggtggtgcttctttccatgagcttcctcatcttctttcttaacttcctttttctcatggggttcatgcaagacaaaaccaccagcaccaacagtagctgctgccgcaatctcctcttctaccttgtgcctgtgagcatgctctgggtctttcttggcctcatgcttctcatgcaaggcataagcaccggcagccgcagcaccaagttccccaaggtgctcaag

SEQ ID NO: 223564 - DNA, 541 bp, Glycine max
tattattattatctccacacccttcactctctctcactcttctctcgaatcttccaccggaatggccaccgctgccgagaaactctccgctctcaaatccgccgtcgccggattgaacgaaatcagtgagaatgagaagaacggattcatcagcctcgtcggccgctatctcagtggcgaagcgcagcatgtggaatggagcaagatccagacgcctacggacgaagtggttgtgccttacgacactttggcgccaactcctgaaggttcttcggaggtgaagaatctattggacaagcttgtggtgttgaagctaaatggaggcttgggaacaactatgggttgcactggtcctaaatctgtaattgaagttcgtgatgggttgacatttctagatttaatggtcatccaaattgagaatctcaatttcaaatatggaagcaatgttcctttgcttttgatgaattcattcaacactcatgatgacactcaaaagattgttggaaaataccaaaacttaaatattgagatcatactttta

SEQ ID NO: 223565 - DNA, 506 bp, Glycine max
  unsure (1)..(506): unsure at all n locations
gtaccaaatgacatgaaacttatcaccaaacttgtcatttttttgctgttctaaacagaattccaagacaatgagtaaagatccacaccaagacatcctctcaacaaaagacttcttattttatttacctatcaaacatgggagtagtaaaaacactagaccatatagatagataagatacggtctgatacaattcattctttagttaaagtcatctgtcttcctcacaggtcctctgggccattaatttccttgtctacaatggtaacaccgtcgggaacttccagctttacaccgggctttgatacgatgctgactttccccttgaggataacaccagctccaaaccatacatcaccagccacttttagactgtcaagctcaacaatactaggaattgacttgaagcggcccaagaagttgctaaccttcttaaattctggtcccagttcaatagaagggttttcaggattntcccttgctttgttccgaatgacaaatccgtc

SEQ ID NO: 223566 - DNA, 552 bp, Glycine max
gtgaaaccctagctagccacattgcatatattcgtgaaaaccctaacggggaagacgaggaccctagaggtagagtcttcggacacgatcgacaatgtgaaggcgaagatccaggacaaggagggcattccgccggatcagcagcgcctgatcttcgccggaaagcagctggaggacgggcgcacccttgccgactacaacatccagaaggagtccaccctccacctcgtcctccgccttcgcggcggcgccaagaagcgcaagaagaagacctacaccaagcccaagaagatcaagcacatgcacaagaaggtcaagctcgccctcctccagttctacaaggtcgacgactccggcaagctccagaggctccgcaaggagtgctccaatgccgaatgtggcgccgggacctttatggtcaaccacttcgaacgccactactgtggcaagtgcggattgacctttgtttaccagaaattctgaagcttagattggttttcaattgttactggattttggaatttttatttagtataatactggatttttttg

SEQ ID NO: 223567 - DNA, 501 bp, Glycine max
cagtcataaatcattcacttcatttcaaaattaaaatcaaattcaaaaaatgatgcatcaagatttaagcagtcataataatatgaaaaggcagatcatttaggcagtcataataataaatatgcgaccccaaaaaaaaacagtattatactaaaataaaattccaaaattcagaaacaaatggaaaacaatcctaagcttcagatttctggtaaacataggtcaatccgcacttgccacagtagtggcggtcgaagtggttggccatgaaggtcccggcgccacattcggcattggggcactccttgcggagcctctggagcttgccggagtcgtcgaccttgtagaactggaggagggcgagcttgaccttcttgtgcttgtgcttgatcttcttgggcttggagtaggtcttcttcttgcgcttcttggcgccgccgcagaggcggaggactaggtggagggtggacttcctctggatgttgtagtcggcaagggtgc

SEQ ID NO: 223568 - DNA, 544 bp, Glycine max
  unsure (1)..(544): unsure at all n locations
cgataattttccattgggtggaagaaagtctctacctttattcgaaagagcaaggatctgagtggagttgagtgatcatgtgtggtggtgcgattatctccgacttcataccggcaggtcccgccagcggggcgcggcgcgtgaccgccgacatcctgtggccgagtttgaggaagcgcttctcgaagccgctgctggacgatgatttcgaggctgggttcagagaattcaaggatgattcggaaatcgaggatgttgatgacgaggacgatgaagacgaggaggagttgaagaagaagccctttgggttctctcgctccagcaacaaggctgcttctaagcctctctctcgtggatcagcaactgtggaatcaaaggggcaagctgagaagtgtgccaagagaaagaggaagaaccagtttcgtggaatccgtcagcgtccatggggaaagtgggctgctgagatccgtgacccaagaaggggggttcgtgtttggcttggaactttcagcactgctgaagaagctgcangagcttatgatgc

SEQ ID NO: 223569 - DNA, 422 bp, Glycine max
  unsure (1)..(422): unsure at all n locations
agaaaagacacacaaaatcaatcaaggctttgaactatggccactcttcagagttggagaaaagcctacggtgccatcaaagacactaccaaagtcggtctcgctcatgtcaacagcgacttcgcggtatctcaattctcaatcttatttttattttcgttttcgttttcattttttttccgaaatatttctcgtgcgagtgatcggtttttcgcttttattataatattattaggagttggacgttgctgttgtcaaagccaccaaccacgtcgagcgtcctcccaaagacagacaccttcgaaaaatcttgttcgcaacttctgttgtacaggctagagctgatgttgcttactgcattcatgcaatcncgcgtcgattggccaagacgcngaactggacggtggcattgaaaacattga

SEQ ID NO: 223570 - DNA, 513 bp, Glycine max
  unsure (1)..(513): unsure at all n locations
ataagcaaaataatgttcctacatcaagccagtgcttccaaatggatttttattatgagggtgagaaacaggattcacaggaaatgccccgtatcctgcatccccaaagggatttgctgggttcatcagcatatgctgctgcagtggctgatatggttggtaatgaaggaatggatttatatgctgttgagcaattgctgccatttgtacggttgacgtgggagggatgctacttgataaagcaaaaggatcttgcacttcaaatggatttggggctggcactacatatactggttgctgcgcagatctatatgctccttcatcatataagctgctaagggtgagagaattcaacccacccgccaactgtctctcattgactgaagaaatattggtacttggagtggagaccagggcaatctcccattcagttggatcaaaatctcttgcctgagcaccacttgaatctaaagcagtacttncagtttcagtggagactatgggctagggcag

SEQ ID NO: 223571 - DNA, 479 bp, Glycine max
cgcaagcaaaaagaaagaatcccaggctaggtttaagatggaggggaatgatcaggatgtgtcgggggaagctaacaagttccccgagagacagccaattgtgacagtggtgcatagccaagacaacggcaaggactaccaggagccggctccggcgccgctggttgacccgacggactttacatcatggtacctttacagagcagggatagcagagtttgaggccacttttctgtttctctacatcactgtcttaaccgttattggagtcgccggtgctaagtctaagcggacggccgatgggattcaaggaatcgcttgcgccttcggtggcatgatcttcgccctcatttactgcaccgctggcatctcatgaggacacataaacccggcggcgacatttgagctgtttttggcgacgaagttgtcggtgcccagtgcgattttctacatcttgatgcaatggtcgggtgctattt

SEQ ID NO: 223572 - DNA, 539 bp, Glycine max
ctttgtataatttgcatcctagctttggtcttatagttattagttagagcttacaaagtaaatagacaatgaagcggccatgtagttccagcggttattacttttgtctaatgaatatgttcctgttgcttttgccagtaaggtcccaactgacaacagacttctataagtcatcatgtcctaacctttccaaaatagtaagaagagaggttcaaaaagctctaatgaatgagattcgaatggctgcttctttgcttcgccttcactttcatgattgctttgtgaatggttgtgatggatcgatactactagatggtggtgatgatggagagaaatctgctgctcctaacctgaactctgctagaggatatgaggttgtagatacaatcaaaagttcagtggagagtgcatgtagtgggggttgtctcctgtgctgatatattagccattgctgccagagattctgttttcctaagtggtggtcctttttggaaggttccgctaggacgaagagatggaacagtctcaaacggaacact

SEQ ID NO: 223573 - DNA, 410 bp, Glycine max
  unsure (1)..(410): unsure at all n locations
atttcctctcagaaccctcgatcactcccacgcgctcctatatcctctccttcaccgtggctctctccaacgatcacaacaacatcgtcatcccatggcaaacgccgcatctggtatggcagtccatgatgactgcaagttaaggtttttggagctgaagacaaagaggacacaccgtttcatagtttttaagattgaggagcagcagaagcaggtcattgtggagaagcttggtgagccagcccaaggctatgaagatttcactgccagccttcctgctgatgagtgccgatatgctgtttatgattntgagtatctgactgaagggaatgtccctaaaagcagaatttttttcattgcatggtcccctgacacatcaagggtgaggagcaagatgatctatgccagct

SEQ ID NO: 223574 - DNA, 491 bp, Glycine max
  unsure (1)..(491): unsure at all n locations
caataacaatattattctcctcattccttcatttttaaacctagctccatctccctccactcaccataacatggcatcagaagcaaatgctgccaacaccaacttctgtgtaaatgttagcaacaatggctacattagtgctaatgaccccttgaactggggtgcggctgcggaggctatggctgggagccacctcgacgaggtcaagcgcatgctagaggagtaccggaggcccgtcgtcaagctcggtggagagaccctgaccatctcgcaggtcgcggcgatcgcggcccacgaccagggggtgaaggtggagctggcggagtcctcagggccggtgttaaggccagcagtgactgggtgatggagagcatgaacaagggcactgacagctacngcgtcaccacccggtttcggtgctaccttccaccggagaaccaaacagggcgctgccttgcagaggagctaattaggtttttgatgctggaata

SEQ ID NO: 223575 - DNA, 400 bp, Glycine max
gccacagccttgtgttgggaaaccaattgcttaatattaaccccaacccctgtacagaaaaaaaaccccttttttagaaaaccgaaattaagaaaaactaacattttggaagaggggccccattccactccccaaggggtttcaaaaggggatcaatgatcttcccttgggacaaagaagtgaacactttgtcacacttttcacccggggagataaccctttcaccagttagcaatggtggccccaactcctttttaacaaacttgtgcaaggggggaaaactgcgttccttgatcttggttggaattgcacattgggcatttttatatgcaacttttgcaccttccactttcttagggaaaaggggcttcaactctttcttaaaagttgcaatcttttg

SEQ ID NO: 223576 - DNA, 458 bp, Glycine max
  unsure (1)..(458): unsure at all n locations
ttccaatacggaatctaaggcttagcaaaccaaacatcttgaatcatgggttcaacaggtgagactcagattaccccaacccacgtatctgatgaagaagcaaaccttttcgccatgcaactagccagtgcttctgtccttccaatgatcctcaaatcagcacttgagcttgatctgttggaaatcatagccaaggctggccctggtgttcatctttcccccactgacatttcttctcagctcccaacacagaaccctgatgcacccgttatgttggaccgtatattgcgcctattggcttgctacaatatcctctctttttctctccgcactctccctgatggcaagggtgagaggctctatggtctcgcccncgttgccaagtacttggttaagaacgaagatggtgtcttcattgctgcgctcaacctcatgaaccaggacaaagtcctcatgga

SEQ ID NO: 223577 - DNA, 552 bp, Glycine max
aatccacaaaatgaaacttgttatttgatattggcagtctacattgaacttggtcattattcttttcctaagagaaaattacgtttttccgggaaagctttggaaagtagcaccacaaccacaacctcaatctcaaaacccaaatgcagcttgacatgaatccatgccaaagaacttaaatctttttgagaaattccatgatgttggtattgaaagcacagcaaacaactcggaaaccttggaatccagaccctttggccagagcctcaaactctttctctgttctctctttcccacctggattatgtgccaacatgatcacatcgatgtgaaccacaccttttgtggccaagctagagtctggagccactggaagaatgcattctgccacaatcaccttcccattgtctggtagtgcctcgtagcagttcttcaaaaacttcaagcagtgctcatcactccaatcgtggcaaatccacttcataaaaatagcatcagctttcggaacactcgcaaacatatctccacctacatgctccactccaggataag

SEQ ID NO: 223578 - DNA, 589 bp, Glycine max
  unsure (1)..(589): unsure at all n locations
ctcttcttctcttgcggctagggttttttcgcatttttcttctagatttaaggaagatgggtaaggaaaaggttcacatcagtattgtggtcattggccatgtcgactctgggaaatccactaccactggtcacctgatttacaagcttggaggcattgacaagcgtgttattgagaggtttgagaaggaagctgctgagatgaacaagaggtctttcaagtatgcctgggtgctggacaaacttaaggctgagcgtgaaagaggaatcaccattgatattgctttgtggaagtttgaaacaacaaagtattattgcacagttattgatgcgcctggacatagggatttcattaagaatatgattactgggacatcccaagctgactgtgctgttcttatcattgattcgaccactggtggttttgaagctggtatttccaaagatggacagactcgtgaacatgctctgctttcattcacccttggtgtgaaacagatgatntgctgctgtaacaaaatggatgctactacacccaagtatttcaaggccaggtattgatgaaatgtgaaggaagtcttttctacttg

SEQ ID NO: 223579 - DNA, 590 bp, Glycine max
aatagaaagttgacatttaataaaccaaaggaacacggcgcagcaaagtcctgaaactcgctgcgcttaacaaaaatgtaatcaggggttccgacaaacacaacacattaaaacacagataaataaaagcaattttgccaccgtcgatcaagaacccagttctgggaacaacagttgcgagatgatgggggagacttcaaactttgtccgaaaaacaagctacctagaaaagaagacacaagagtacagaaaagaaaccaacatttattgtaaccaacatcccctgatgaaccagcccgcacgattcacttcttcttctgggcagccttggtgaccttggctccggtaggatccttcttctcaacgttcttgatgactcccacagcaacagtttgacgcatgtccctaacagcaaacctaccaagtggaggatactcggagaaagtttcaacaaccatgggtttggttggaatcatcttaacaaaaccagcatcaccgttcttcaaaaacttgggctccttctcaagctctttgccggatcgcctgtcaatcttggtcatgagttcagcaaacttgacagcaatgggaga

SEQ ID NO: 223580 - DNA, 534 bp, Glycine max
atccgacacgacatggtgaactcccttttttttctcctctgactccgaaacatttccgggtagatcgggtatcatggggcaggacacaaagaactacaacaacatcgcatcatctcctctgttggaacctctgccttcgtcgaattcgaaacgagcttcgaagcttcaaacgttgggaaacatcatcgtcaccgtggtcggaactggggttctgggattgcccttcgcttttcggatcgctggatgggtcgctggatcgctcggggttgccatcgtcggcatatccacctactattgcatgctactgcttgttatgtgcagagaaaaattggcatcagaagaaccattaggggaatcaaacacatatggagacttgggttataggtccttcggaacccctggtcggtatttgacagaagttataattgtggtagcacaatgtgcagggtctgttgcttattttgtttttattggacaaaacctttattctgtattccaaggccagggactatcaatggcctcctacatatttat

SEQ ID NO: 223581 - DNA, 529 bp, Glycine max
gtagaaatatcaaattgagttgtataaaagcttcaagccttcaactaagtaaaatacatgctagatgcatcaaactccaactattgtgttgtaagtgccataaaatgcgaaaaataatccagacaataatacaatagaatccaaggctttttgccagatgggtagggaagagccaaataactttaggtgaaatgtggctggcataacaaatgagagcattgcacataaggtactccccacaaatgaggcatatacaccaaattctggcacaaatgaagctaagactgccagtccaaccaccacaatcgctcggctgatgtacatgcaaatattttctagtcctgttgaatcattattgtttctgaggatgattttgagtttcccttcgaaaatctcattaattgggtgtaacatgattgggagtgtgaatgcaagccccacacataatcctacctgtactgcaagagatgaccaattcctagggagattgagggtcacaatgtctctagtttcttcaccaaaagccatg

SEQ ID NO: 223582 - DNA, 543 bp, Glycine max
tcttttttttttttttttttttttaggtaggccaccacatagggctcactttttatcttggcatcttaagaaaagtatgaaaaacgaatgataaacgaacacattaaattgttctgagtttcctagcaagaaaaagtacttgcttgcttctctggttcctaacatcagattcaggtcgcccgggggtaattaaataactttcttttgggagggtgagaaagggttaaactaaaattaactctaacatcacaaaaagcccaaataaaaatcaaatatgaagtgaattatggccatggcctaatgggtccggtcatgtttcttctcattaaagtgtgcaacaaatcatctcaaccacctcctaaggtcacctgttgaagaaggagaaacctgacccccaccaatactctcagtgcagcaagaagagtaatttgattgttgttctaaccccccaaagtgtgatccactcacactcttgaagcttggactccttaaactatgtccatagtttccataactcactcccacaccataagggtcaggagc

SEQ ID NO: 223583 - DNA, 560 bp, Glycine max
  unsure (1)..(560): unsure at all n locations
cttcttctcttgcggctagggttttagcgcagcttcttctagatttaaggaagatgggtaaggaaaaggttcacatcagtattgtggtcattggccatgtcgactctgggaaatccactaccactggtcacctgatttacaagcttggaggcattgacaagcgtgttattgagaggtttgagaaggaagctgctgagatgaacaagaggtctttcaagtatgcctgggtgctggacaaacttaaggctgagcgtgaaagaggaatcaccattgatattgctttgtggaagtttgaaacaacaaagtattattgcacagttattgatgcgcctggacatagggatttcattaagaatatgattactgggacatcccaagctgactgtgctgttcttatcattgattcgacactggtggttttgaagctggtatttccaaggatggacagactcgtgaacatgctctgctttcattcacccttggtgtgaaacagatgatttgctgctgtaacanaatggatgctactacacccaagtattccaagccaggtatgatgaaat

SEQ ID NO: 223584 - DNA, 537 bp, Glycine max
gaacactaaaaatagaaagttgacatttaataaaccaaagcgacacaacgcagcaaagtcctgaaactcgctgcgcttaacaaaaatgtaatcaggggttccgacaaacacaacacattaaaacacagataaataaaagcaattttgccaccgtcgatcaagaacccagttctgggaacaacagttgcgagatgatggtggagacttcaaactttgtccgaaaaacaagctacctagaaaagaagacacaagagtacagaaaagaaaccaacatttattgtaaccaacatcccctgatgaaccagcccgcacgattcacttcttcttctgggcagccttggtgaccttggctccggtaggatcctttctctcaacgttcttgatgactcccacagcaacagtttgacgcatgtccctaacagcaaacctaccaagtggaggatactcggagaaagtttcaacaaccatgggtttggttggaatcatcttaacaaaaccagcatcaccgttcttaaaaacttgggctccttctcaagc

SEQ ID NO: 223585 - DNA, 551 bp, Glycine max
  unsure (1)..(551): unsure at all n locations
ctctgatctcactcaccattcaccaacctgcttctctgttctcttctttcccttcccaagaagaagaagaagaagatgccttcttcagaatcatcaacaggcttctccgaaaccatttgtgtgaccggcgctggtggcttcatcgcctcttggatggtcaaactcctcttggagaaaggctacactgtccgaggaaccctcagaaacccaggcatgcctatctatttaagttatatgacgtgtagcggggacatgcatgcatgaattttattattttggtttggttttcagatgatcccaagaacgggcacttaaaagagtttgaaggagcttcccagagactaactctgcataaggttgacctccttcatcttgactccgttagatctgttattaacggctggtcatggtgtctttcacactgcttctcccgtcaccgataaccccgaagaaatggtggagcctgcggtgaatggagctantaatgtgatcatagcagctgcagagggctaagttagacgcgtggtgttcacctcatccattggtgccgt

SEQ ID NO: 223586 - DNA, 402 bp, Glycine max
cattgatggagtcatcctctgatgaaatggtgctaaagggtatttttctgccctttatatcaccgagtcatctggtgcccgtcgtagacatagcgaggatcttcgccatggaaggtgtggatgtgaccataatcaccacaccagcaaacgccgccgttttccaaagctccatcgaccgtgattgtatccgcggtcgctccattcgaacccatgttgtcaagttccctcaagtccctggcttgccacaaggattggagtccttcaacgcttccactcccgcagacatggtcaccaaaatcggccacgcgctctccattctcgaaggtccattccgtcaactctttcgcgatatcaaacccgactttatagtctccgacatgttctacccttggtccgtcgatg

SEQ ID NO: 223587 - DNA, 473 bp, Glycine max
gaatgagagcatcaaactcttcttcttcgatttccattgcgaagcgttactttggtcttgttctttctcttcattttcttcgctcttcgatcttcgtccggggactgctccgaataccaccaccaccactcgccgatggccacgatcggaggcttacacgactcccaaggctctcaaaacagcgtcgaaaccgaagcccttgctcgattcgccgtagacgaacacaacaagaagcagaattcgcttctggagtttgctagggtggttagggcacaggaacaggttgttgctggtaccctgcatcaccttactcttgaggctattgaggctggtgagaagaagctctatgaagccaaggtgtgggtgaaaccatggctgaatttaaagaactccaagagttcaagcctgctggtgatgcaccatcgtttacctctgctgatcttggtgtcaaaaaggatgtcaccaaccaggat

SEQ ID NO: 223588 - DNA, 469 bp, Glycine max
aaatacaaataggtcaacatccgcattttttatgatactaaagggggattgacgttacaaagttactcatgtaacatcaccggtagcttcccagttaataaagggatacacacattgtaaaactacttatttgccaaggcacagagaaaggggtaagcactagacatagataagaacaatattgctagggtgaccaaacttcagatcagaattaggaatgatcttgttccatctgatttagatggaaccccccttggttattcttgtgtacctctaccttaaacttctcttccttctgtcccctcttgactttgagaagcagattaaacttagcaaaatcatcaatgacctcagcctttgcatcagcaacctcatgaagctcatagggtactagtgaattagacctttgctggatggtctcgatcgcatgatttgctgcatcctgaacttgagggtcatgtgttggcac

SEQ ID NO: 223589 - DNA, 420 bp, Glycine max
atgatttctctgataatgccttcacgctatcaaatttcccgggtcactaagatgttgggagatgaatttggaactgcttcaaacatcaaaagtagggtgaaccgacagtctgtgttgggagccattacttctgctcagcagaggttgaaactatataacaaggtccctccaaatggtttggttctttacactggaaccatcgtcactgaagatggcaaggaaaagaaggtgacaattgattttgagcctttcaaacctatcaatgcatcactgtacctctgtgataacaagtttcacacagaagcactgaatgaacttttagaatctgatgacaagtttggtttcattgtgatggatggaaatggcaccctttttgagactgtaagtggaaacactcgtgaggtgcttcacaaatttact

SEQ ID NO: 223590 - DNA, 535 bp, Glycine max
aatcttgtaaccaagaaatagtataaaaggggagatgccatccttcatctaaaataaaacacttcgaatcatgacctcctgagagctatttcttgaagaatcagcgcacaatctggcagagttgccatatgcatacatggactaatagcaaaaatgcaaaatgtctgaagcatacgaaagggaaaaagtgaatgatacacatcttatggatcaaaaaccaaagggcaaagtctaagtcttagaaccataatcaataatatccaaatcatttttgaaggccccaatcttccaaaacaaagtaaaggttctgcagtaacaggaacttaatcagaatcctcatacacttctccatcatcagataactcatcaaatgatctgatgtcaagctgggaacgaaaaattccaccaatgccaccataccctctgcagaattgggagccctcttgaaattagttggtcacaatattcagggagcattcaaatttttttgtcttattggcaaaccactcgagcagggcattttctcctgaacttc

SEQ ID NO: 223591 - DNA, 473 bp, Glycine max
ctcgagccgaatcggctcgagcagaaaacgaagattcctgcggaatccgcgtcaccggggtgcagttctcctacgacgtgcagcaaccgccgctcttcctcgacttcaacctcaacgtctctcccggatcccgctgcctcctcgtcggtgccaatggatccggaaagacgactttgctgaagattctggcggggaagcacatggttggaggaagagacgttgtgcgcgtcttgagtggttccgcttttcacgacactcagctcgtttgtagcggagatctcgcttatttgggcggatcttggagcaaaaacgttggctccgctggagaaattccgctccaaggagacttctctgctgaacatatgatctttggagttgagggtgctgatccagaaaggagagataagttaattgagctgcttgatattgatctacagtggcgaatgcataatgtatctgatgggcagcggcgt

SEQ ID NO: 223592 - DNA, 483 bp, Glycine max
  unsure (1)..(483): unsure at all n locations
cagcaattatgtttcatttatggtatgaaaaaggaatacatgttatcgaccaaagccagccccatatgacttcatggggattataaggctatgattcatttaatcatgcttgtttaaacgtataactactccaaaacaaaatgttgaaaatataagcaaccacaaacttgacaagcatgaaagaatgaattacttgtatttgccacccaaattattttcataagaaatctgtgtcaaaaacactatctatagtatgccatgtgtctagatgaaaagaaaggagaactggcaacagaagtcttttggacagggttcttcttttcaagctttgtttcagcgcgaagccaggcctcaacaacagacagcagattagttgaagatttcaactctttaacatttgatattttttctgctcttctcagntcaccatcttgtatgtatgccaaatgagttgcccatgtctccagtccatcaaaaatatga

SEQ ID NO: 223593 - DNA, 605 bp, Glycine max
ctcgagccgcttgccttgccatggcctcaaactccatggctggcttgatcaccggttcggattctcacttctcgcgtgactccgatgagcatcagactcctcctacccgacaggcttcatcgaaaactacttgtcgagtttgtggcgatgagattggatacaaggaaaatggggagctgtttgtggcttgtcatgtgtgtggatttcctgtttgccgaccgtgttatgagtatgagaggagtgaagggaaccagagctgtcctcaatgcaacactcgctataagcgccacaaaggttgtcctagagtagctggagatgaagaggacaactttgatgcagatgattttgatgatgagtttccggttaagaatcatcgtgaagatctagatcggaaccatgatgttaatcatgtggaaaatggggactacaatccagagaagttgcatcccaatggtcaagcattctcttcagctgggagcgttgctggcaaggatttcgaaggggacaaaaaattctacagcaatgcagaatggcaagaaagagtagagaaattggaagtcaggcaagaaaagagaggtcttcttaacaaagagacggaaaagaag

SEQ ID NO: 223594 - DNA, 544 bp, Glycine max
gaagttggcaaaaatatatattcttattctcaatagatgaaaaatgatctagtagcaccaaaacacagaacatgttttcccaaacaatgacaatggctatactacaatatatggttttgttgtatcatcaaatgaatacattccaatcagacccaactttcctcttttaagactatgtacacagataactcttctaattaaggcaaaccactcaatagcagtaagaaaataaaagcatgcacacaagtgcaattaactcttatcattgggacatcaacatggcctctccacagagtcttattagcattccaccccacattgtttgagcactggaccagtttgcttgggcaagaagggatcaatcctgacccaaatcaatgagaaaatagatgctagaaggattgaccacaacactacaatggtaggagtcctgttttgctttcccatgagacctttgaggaaagggtacaagtgaacaatgacccagaaggcaaagaacagcttcccaaacaaaggtccccatgaaccatatccattgttgatg

SEQ ID NO: 223595 - DNA, 391 bp, Glycine max
caaattagttcattctctttgcgcagttcccttctctctcctttcaagatgcagatcttggtcaagaccctcaccggaaagaccatcacccttgaggtggaaagctctgacaccatcgacaacgtcaaggccaagatccaggacaaggaaggaattcccccggatcagcaacgtctcatcttcgccggaaagcagctcgaggacggccgtaccctcgccgactacaacatccagaaggagtcaacccttcaccttgtccttcgtctccgtggtggcatgcagatcttcgtcaagactctcactggcaaaaccataaccctagaagtcgaaagctctgacaccattgacaacgtcaagggccaagatccaagacaaggaagggaatcccccc

SEQ ID NO: 223596 - DNA, 548 bp, Glycine max
  unsure (1)..(548): unsure at all n locations
caacacaaaccaaacttattttcaaaggtcattacagacccattacacatgacatttcttcttaaaatgtttgggaaaatccaacatcgaacatcacacagaaatcagctccagcttaaaaccccccacgaagacgcaacaccaagtgcagagttgactccttctggatgttgtagtcagcgagggtccttccatcctctagctgtttgccagcaaaaataagcctctgctggtccggtgggattccttccttgtcctggatcttcgccttcacattgtcaatggtgtcggagctctccacctcgagggtaatagtcttacccgtaagggtcttgacgaagatctgcataccaccacgaagacgcaacaccaagtggagagttgactccttctggatgttgtagtcagcaagggtacgtccgtcctcgagctgcttgccggcgaagatcagcctctgctggtctggggggataccctccttgtcctggatcttanccttgacgttgtcgatggtgtcggagctctcgacttctagggttatagtcttg

SEQ ID NO: 223597 - DNA, 531 bp, Glycine max
gtgcgagtgatgaaattgaatccaaatacctaagcggtggacgaggcctacctgagccactgcttcgcccccgccggcgaggtggtctccatcaaaatcatccgcaacgagctcacgggccagcccgagggctacggcttcgtcgagttcgtctcccacgccacagcggaaagggttctccagacctacaacgccaccgaccagaccttcaggctcaattgggcctccttcggcatcggcgagcgcaggcccgatgccgccctggaacactccatcttcgtcggcgatctcgcccccgacataaccgattatcttctccaggaaatgtttcgcgcccattacccttccgttcgcggcgccaaagtcgtcagcgaccccaacaccggccgctccaagggttacggtttcgttaagttttctgatgagaatgaacggaaccgggccatgactgaaatgagcgggcgttattgctccaccaggcccatgcgaattagtgccgctacgcccaagaagaccaccagtgcttatgct

SEQ ID NO: 223598 - DNA, 510 bp, Glycine max
cccctctctattttgcgttcattctgttttcttgaagtctttccctagccaatggccactgagggtttgacccgggttcacagtctccgtgagaggcttgatgaaaccctcactgccaacaggaacgaaattttggcccttctgtcaaggatcgaagctaagggcaaggggatcctgcaacaccaccaggtcattgctgagtttgaggaaatccctgaggagaacaggcagaagcttactgatggtgcctttggagaagtcttgagatctacacaggaagccatagttttgccaccatgggttgctctggctgttcgtccaaggcctggtgtgtgggagtacctgaaagtgaatgtgcacgctcttgttgttgaggagttgcaacctgctgagtaccttcacttcaaggaagaacttgttgatggaagttctaatggcaactttgtgcttgagttggactttgaaccattcaatgcagccttccctcgcccaactcttaacaagtcaatt

SEQ ID NO: 223599 - DNA, 447 bp, Glycine max
ggaaaaaggcccggtttaaaattgaattgggggggaaaaccccccaatttgaagtttttccaatcaaaattcaaatcttgcaaaaaaaaaaaagtaaagggcttttttttttgggttcccttttttctctctttctggcttttaacgaaggcttaatcccaaaattaaaatctttggggcccttttttttttagaactcaaggaaaacaaactccaaatggaaaaaaaaaagccgggtcctccatttttttatccaactttttattctcagtttactcaacaggagggggcccaaactcggccaatttgggggtcttgggagcataaaacattttaagaaagggggggttttcacggggggaaaggttaaacacatgcttccaaaagccataaacccccgggggggggggaagcctctgtgggaaaaattgcgcaggggtctttttt

SEQ ID NO: 223600 - DNA, 489 bp, Glycine max
aggacaaaaatcaattacaaatttgggacggccagaaatcattagatatacaaaaacaaaaagaactggatcaactcctaacacaatcccaacacctgcacacaacaacccaaaaaccagaagaaacacaacaacaaaaaaagctatcacactgaagcatacagatttggaacaaaagaaaaccacttgaaaccacagctacatttgagaggcaaagaggggcaccttggaagccaatgccaagtcctcctagaaagcaagtaatacaaaatctctggccaagtgtagcagcaaatgcagatcatcccttcatgccaaaagcaataaacatgttcatagttatggtaacacactgacacaaactttctacacataagatcaggcaaactttgaacttccacccaataattcccatcttcacccaattcccacaacttgatgctccttgaaattccattggtcccaaccccaccaaccaagtacaatttt

SEQ ID NO: 223601 - DNA, 368 bp, Glycine max
aaactctactaaccaataggaatactaattatgattggcattcttggcagtgaacatacaattgtagagaatgagtctacagtcttttttttctatgcagaccatttcccagaaaatagaatgaagcagagattcaattagcaaaccacttttcaaaccaaaggagagcaaaaattttgactaacagaaaaatagctccacattgcaaattctaaaattttcccaaatctgaccatcatcaattaggtagctccataatggcagcaacaatgtcgccattggcagctttgagagccttaacagctcttgatctcaacacaccagcttgaggcatcaccagctctatttccttgggaactacaccaggc

SEQ ID NO: 223602 - DNA, 454 bp, Glycine max
gttcaggttgcaaaagaaagtgcagatgtcataattctggatgataacttctccacgatagtaacagtggccaaatggggacgttcggtttacataaatattcagaaattcgtacagtttcagttaaccgttaatgtggtgcattaatagtgaatttcacatcagcctgcttaacaggaactgcacccctcacagctgttcaactcttgtgggtgaacatgataatggacacactgggagcacttgctcttgctactgaacctccaaatgatgatttaatgaaacgttcacctgttggaaggaagggaaatttcatcagcaatgtcatgtggaggaacatcttaggtcaatccttgtatcagtttatggtgatatggtttcttcagtcaagaagaaaatcaatctttttacttgagggccccaattcagatctagtcttaaacacgcttatttt

SEQ ID NO: 223603 - DNA, 500 bp, Glycine max
gaacatagaaacaaatgagatttataaatataaaaattgaaacaaactgaggaaggctagtaatttacttatttacagcaagtcatcaatcattctgctatcctagaaaataaacaacgtattaaataaaatggttaaatggttaatgctagtcaaactgcttcgagacatcactccagtgatttgtttcactgctcgatttctgattccaacccaagaaagcctcaagcattaccaggcgagttagtgaatgtaaaggcataatggaccttgaagcaatgcaacaactaacggtaaccaactactgctttttatccattcaggtgcttcaaacagggatcttctttaagcgagcagcaattggcatgcccaaaaatccaaccaacaagcaaaagaaccactgtgccagggtgagaggtgttgtgtttgcaaaggttcccaaatactcaactattatgatttggaagaaacagtagcactgatgacacccacgaaaacat

SEQ ID NO: 223604 - DNA, 531 bp, Glycine max
ctcgagccgtttttcttctctttcaacaacttcaccttcttcctcctcgatcatgtctcacttcaagggcaagtaccatgatgagcttatcgccaatgctgcgtacattggcactcctggaaagggtattcttgctgctgatgagtcaacagggacaattggcaagcgtttggccagcatcagtgtagagaacattgaatccaacaggcgagctcttagggagctgcttttcactgctcctggtgttcttcaatatctcagtggtgtcatcctttgaggaaaccctctaccagagcacagctgcaggcaagccctttgtgaatgtcttgaaggaagctggtgtgcttcctggcatcaaggttgacaagggcacagtcgagcttgctggaactaatggagaaaccaccactcagggtctagatggccttggtcagcgttgtgccaagtactacgaagctggtgcacgttttgccaaatggcgtgcagtgctgaagattggtcccaacgagccatctgagctgtctatccatg

SEQ ID NO: 223605 - DNA, 434 bp, Glycine max
aaaacacgaagccttattcacagcacgggggggtttttcaaaaaaacaaagttacattcccttccctgtggcacaggtttgaccaaatacactgaattactaaaattgacataaaaggaacacttggaaaacaaaaagcaaaattccaaacgatttttttgggaagagtcaaaccccaataattcttatcaacaagaaattcgggtggtggacccataataccgattcctactcgcactagttttttaaaacaacaccaacttcgattgatcagtagctgtagttcgaaacatgggggctttttgaggcaccatcagcaagctgggagttacccttggagggtcccagagttgcctttgagttagccttggctcttaccaaaagggctttctgagcctctttcacattttttttttttccgccccatgccttaa

SEQ ID NO: 223606 - DNA, 593 bp, Glycine max
gtttatgctagtgacgccttcttgaatttgacaggttatgcaaaaaatgaagtggtgggcgcacaactgtagatttttaggtggaacagataccgatacctcgactttacatctgataagggaaagcattaaaacagaacaaccatgcacagtacgtattttgaattacaggaaggacaaaagctcattttggaattttcttcatatctcacccgttcgtgatgcttctggcaaggttgcatactttgtgggagttcaaatagaagacaacaataaaaacgatgatagccattgtttgagtcctgagaagagacaacttagtgtggttggtgtagtcaaggttgcagtgaggagtttatcaatgactgcgggatcttctgagtcgtagcaaaaggatcatgtgagtttggaacaaataatatttgcctacttcccagaaatattaatccattcgaaaaaataatcaatctcaattggtgattgttgagatgatagaaaggtaaaagaattaatttgtgaagaagaaaaaaaagagagtccatactgtcaatatgaagaaaaccattctttgttggacgtgtataaataaaatg

SEQ ID NO: 223607 - DNA, 351 bp, Glycine max
ctcgaacccttgagagcgagaaaccacgtttctctcttgaggttaattattattattattgagtattgagcatggaggcgccatctctcaccaaacccaacgacccaacaaaaccttccaacacttccagcacccttagtctggagggggggccgggcgaagcgagcccactccgaaaaatgtttgcggtggcgtccatcgccgccggcatacagttcgggtgggctctgcagctgtctctcttaaccccctacgttcagctcttaggagtcccccacgcggcggcctccttcatctggctcttggggcccatctcggggctgggtggtgcagcccattgtgggctactac

SEQ ID NO: 223608 - DNA, 497 bp, Glycine max
gtaaaaagtagcttttcccttattatcattaattgatgtaaaggggtaaactaagactcatccttaatcaccacattcctctgaacactgaaacagactaaaattatataagaggaagggtcttccaagaagttccaaccactgcaattatgtacaatcacaccaaactctgcaattactatgttcagtgggtgctacaaaagttacaaatgtagcacttggtgggtctattacataattacacaccagcttcaaatcaaaagagactatccaatttttcctcttttattactgggttttttttctttctattaaagcaggggacaaaactgaaacatgcaaaactccattaactagtgaaagccccctgccatcatgcttgaagccttggcctcatcagctggctttggagttggcagcaagacaatcgccattatggcgctcaacgcggttgccgcagcacccaccatgaaagccggcaagttgccaccaccaaa

SEQ ID NO: 223609 - DNA, 548 bp, Glycine max
caaactcacttagccggcacaaaaacttcttaatagaaaatgccttccaagaggcttcaatggagatccttagtacttggttgtttcaaggccaccaagaaccaatccttggaatctccaaacatagtttccaagaagtcatcttcaagtagaatcttcctttctgatttaagcctaagcgattattcatcagtttctatcatgagtgatttatccaattctcttgtgggatcaaatcttcgtattttcacctaccaggagctctcagaggttacacacaacttcagcaaatccaactatcttggggaaggtgggtttgggaaggtttttaaagggtttattgatgacaatcttaagcctggattgaaagctcagactgtggcagttaaggccttaaacttggatggaaaacaaggccatagagagtggttggctgaagtagtctttctgggacaattgaaacataggcatctggttaacttaattggctactgctgtgaagatgagcataggcttcttgtgtatgaatacatggagaggggcaatct

SEQ ID NO: 223610 - DNA, 432 bp, Glycine max
aaaacgaacaactacatagcatttatttttcgctcttctctcttctattcagccactggtcacaccatgagtgccgagaagaagaaactgattggcagattacgcctatttttcactaatgcaaaaccatacctcttaatgattggcttgcaatttggcatggctggaaattacatcttcggcaaggatgttcttaaccatggcatgagtcgttttgtgttcattgtttaccgaaatgctatggccaccattgctcttgccccttttgcattctttattgaaaggaaaagtacgcctaagatgacactttcagtctttctacagataatagtccttggattcctggagccagtttttaatcaaagcttcaattacttggggatgaagtatacttcggcttcattcacatctactattgtgaacgctgtgccc

SEQ ID NO: 223611 - DNA, 526 bp, Glycine max
gcctaaaacaaactttgtgtagttaatttattagaatgatgaaaaacaatagcccacaggagtggcctgagccaatagtcagagttcagtccttgtccgaaaggtgcacagattcaatccctgagaggtatatcaaaccccctcagtgaccgtccatctgatgatgcccgttgctgttgatgatgccaacatcccaatcattgaccttgcagggctttatggtggtgacccagatgctcgagcctccacactgaagaaaatctctgaggcttgtaatgagtggggtttcttacagatcgtgaaccatggtgttagccctcagctgatggacatggctagggaaacttggcgccagttctttcacatgcctttggaggtgaagcaacagtatgcaaactcgccaaaaacctatgaagggtatggtagcaggcttggtattgagaaaggtgccattcttgactggagtgatactattatctttattacctgcccttgtctttgaaggaaaatacaaaaggcccaatca

SEQ ID NO: 223612 - DNA, 579 bp, Glycine max
cggcaaagacggaggagaggtcgcaattgcaaaaatggtgaagtttctgaaaccaaacaggggccgtcattgtccttcagggacgctacgccggcaagaaagccgtgatcgttcgaaccttcgacgaaggaactcgcgagcgcccctacggccactgtttggtggcggggataaagaagtaccctgcgaaggtgatcaagaaggactcggcgaagaagacggcgaagaagtcgcgcgtgaaggcgttcgtgaagctcgtcaactaccagcacctcatgcccacgcgctacacgcttgacgtggacttgaaggacgcggttaaccccgacgttctcaacgcgaaggataagaaggtcactgctctcaaggagaccaagaagcgcctcgaggagaggttcaaaaccgggaagaaccggtggttcttcaccaagctcaagttctgagcggtaatcttatcgagttttgatattcgaatgcttttggatctcgctttaattgatactttaatatgctgcgctgagattagattatggaatttttggttaaattttggtaatattggatgaataaggggtttat

SEQ ID NO: 223613 - DNA, 393 bp, Glycine max
cctattcaattttccaccaaaatacatccaatactgaccgagaatggtgttccaaaaattccaaaatctaatcccaacacagaattataaagtatcaattaaagcaagacccaaactcattcgaataacaaaactcgataagatgaccgctcaaaacctgatcttggagaaaaaccaccgtttcttcccggttttgaacctattcccgaggcgattcttggtttccttgagagcagcgaccttcttattcttggcgtggaaaacgttggggtcaaccggggcctttaagtcaacatcaagcgtaaatcgcgtgggcatgacgggctaggtgattgactagttttacaatcactttcacgcgcgaattcttggtcgatttcttagccgagtcct

SEQ ID NO: 223614 - DNA, 505 bp, Glycine max
gttgggggtgaaacgcgtattattagtttaagacgggacatacgttttcatgagcttatgcttaaaacatcatccatctataatgaaactcatgtgataaagtatcagctccctggagaagatcttgatgcattggtttcagtatcttctgatgaggatctgcggaatatgatggaggaatgtcatgatctacaaggcggccgagaatcaaataagcttaggatttttctgttatctatgaatgatttggatgatactcagttcggtataggtagcatggatggtgattctgaaattcagtatgtcgttgctgctaatggtatgggcatgggttcaagaaacaactcaatccttcgtggtgaaagtggctctactaataacttacatgaattgaatggacacaataatgagagggagaccaacagagttctcatggacacatttggtgttagcagttcatccttgactgacaatgtttaaccatcactggctattcaatcttcac

SEQ ID NO: 223615 - DNA, 529 bp, Glycine max
aattgcaacatcttatcctttccattttccatggtacacagtcccggatgtgccagaacccagctctcgcaactcttcaagatcttcattctttatgaactgcacagtactggtgtcaaattcccctgctacaaccacattcctcggttcattcttgtcatcctggtattcagactcctgtgggcgtatgttttccattatggcatccatgttcttattttcattgccctttagttgggaatgctcatatttttggtgaaagatacttgcttctgttttagttgctacaggtacatttttctgattttcttcaccaatatttaggtgggaatctgtgcgtcctgccaaaacaccaccagctggttgaggagcagatggctgagatttactatccccctcttgtacttttctcacagcagacgaaaaaccaagattatcctgatcaattagagatacattatcaaacccctctagagccaagtttctgaaatatgaccaacgtttaggctcatgattgtccatatttaag

SEQ ID NO: 223616 - DNA, 539 bp, Glycine max
  unsure (1)..(539): unsure at all n locations
ctaaaaccttcttttccgttcttatcatttttgccgaattcgccaataagaagaaaaaacaaaggagggcacccagaacgaatcgaatcggaaagtttcaaatcttcgtgctttcattttcaaattgatgggccgnaatcgaagaaaatggagctgatgtctgttcggatatagaagttgatgatattagatgccccaatatagcagagaaagatgtcagcgatgaagagattgaagcagaagaattggagcggcggatgtggaaggatcgaatcaaactcaaaaggctgaaggaaaaacagaagctagaagcgcagcaagctgcagaaaagcaaaagccaaggcagtccagtgatcaagctcgtaggaagaaaatgtctagagcacaagatgggattcttaagtatatgctgaagctcatggaagtctgcaaagctcgtggatttgtgtatggtatcattcctgagaagggaaagccagttagtggttcctctgataacattagagcatggtggaaggagaaagtcaggtttgataag

SEQ ID NO: 223617 - DNA, 547 bp, Glycine max
  unsure (1)..(547): unsure at all n locations
gggctcaatgctgctcagtcttagaccctttctcaccaccatcttctttctcacactcacagtgctcaaggtttcagcatcatcctcagtgattttctacaacaagtgccagcacccagtgtggcccgggatccagcccagcgcaggaaagcccgttctggcccgcggaggcttcaagctcgccccaaaccgggcctactccctccagctccccgctctatggtccgggcgcttctggggccgccacggctgttccttcgacgccggcggccgggggcgctgcgccaccggggactgcggcgggtccctgttctgcaacggcatcggcggaagcccaccggcgaccctggcggagttcaccctgggcaacgagcaggacttctacgacgtgagcctggtggacgggtacaacctacccatctncatcacccccttcaagggatccggaaaatgcagctacgccgggtgcgtgagcgacctcaacaccatgtgccccgttggcctccaagtgcgctcacgcgacaacaagcgcgtggtggcctgcaag

SEQ ID NO: 223618 - DNA, 505 bp, Glycine max
gccatttgggagttaggttctgcacgctctgcttccagcgagtgttctttcttcgtttgaacaccttaatttgcacacgctgcttcttcagcttgagaaatggcacaagaaacctttctattcacatctgaatctgtaaacgagggtcaccccgacaagctgtgcgaccagatctctgatgcagtgcttgatgcgtgccttgaacaggaccctgacagcaaggttgcctgtgagacatgcaccaagaccaacatggtcatggtctttggagagatcacaaccaaggccaacgtagactatgagaagattgtccgtgacacatgccgcgaaattggattcatctctgatgatgttggtcttgatgctgacaaatgcaaggtgttggtcaacattgagcagcagagccctgatatcgcccagggtgtgcacggtcacttcaccaagcgcccagaggaggttggtgctggtgaccagggtcacatgtttggctatgccactgatgaaa

SEQ ID NO: 223619 - DNA, 454 bp, Glycine max
ggtacaaaattctgataaaatttccattgcatcagaacggtaacattgcataaccaaaaaataaattgtgagtaaaaggagaaaaggaaaaaaaaaaacagtttaagtattgatgagatgacattagacctatgaatgaagtagtagtagtcatgaaacacgcaaattattcatccacacctagcaagacatccattgaagggagtgattaacttcacaacaatcttaagcttgaggcttctcagacttgagtggcttcacaacttcccaggtgaagtcagggtcatcccttccaaagtgtccataagcagctgtcttgaggaacctatggccacccctcttaaggtccaagttaatggtgatcattccaggtctgaagtcgaaattcttcttcacaatttgaagaatctccttgtcaggaatcttcccagttccataagtgtccacaaacact

SEQ ID NO: 223620 - DNA, 489 bp, Glycine max
cttcattcatatttttgtgatcaagcctactcttgcacgctaactaacgccatatattgcttcttatcttattgttgcagactttcgggtcatcattgagcttgctgtagtgaggtgtttaatctgaaatttgtttgaccaaattcatggcggaactgatagggcctcgcttgtacagctgctctaattgtagaaaccatgtctcactccatgatgatattatttccaaggcttttcatggaagaaacggccgagcctttctgttttcccatgcaatgaatattgtcacggggccaaaagaagacaggcatctcttgactggcctccatactgttgctgatgtttattgtggcgattgccgtgaagtgttgggttggaagtatgaaagagcttatgaagcatcccaaaagtacaaggaaggaaagttcatacttgaaaagtcaaaaattgttaaggagaactggtagcattcctttctgcttcccattc

SEQ ID NO: 223621 - DNA, 445 bp, Glycine max
ttttttttttttttatttttaatttttttttttttttttttttttttttttttttgttttggtttaaatctaatatttctaaacctcccactatttaacattaaatcccaataatcaccacatataaacctcacactaaatctctttccctccacccccaaaaaaaaaaaccccccacacaacaaaaaaaaaaaaaaaaaaaaaaaaaaaaaaaacaaccctgaccaaaaaacagaacaaaccccacacacacaaaaaaaacccaccccttctcgcgcgaaggaagaaaaaacaccctgcccaaacaccacaaccaaaaaaaaaaaccccccccccaaaaacaccagccaaaaaaaaacggaccccaaaaaaaaatcacccccacccccccaaaaaaaaactacacaaacaaaaaaacaaccccccccctgccaatgcaagcccc

SEQ ID NO: 223622 - DNA, 346 bp, Glycine max
atcgaacaccctccccattcggtgcgtagcttcatggaggctgcatccacccgcgggggcggctcagacccgatgattcagggcaagctcaatcgcacttgtctttttgcgatcctcgcagaggcagagcaacatccctcgatgagattggtcccgataccattgtctctgtgggctgcgactacaaccactggctcatagagatggaattcaaagacaaagacaacaaaccctcttcctaagacatggttcgcgtttaccaagagactagagccaagggtctcaacatcagttcggaagaggccaagacgaaaatatatgcgcgcagcacaacatactacatagg

SEQ ID NO: 223623 - DNA, 529 bp, Glycine max
ttaccctccgtttctcaatctcgccgccggcgcaactgcttcatctctccggcgaacgcgaccgaattcttttcccatggcagagaatctgatagcgccgaagcttcccgtcgaaggaaagcgcaacattctcatcaccagtgccttgccttacgtcaacaacgttcctcacctcggcaacatcattggatgcgtgttgagtgctgatgtattcgctcgctactgtcggcttcgcgggtataacgctatttacatctgcggtactgatgagtatggaactgccactgagactaaagccatggaagaaaactgctctcccaaagagatttgtgacaaatatcatgctattcataaggaggtgtacaattggttcaatataagttttgatgaatttggacggacgtcatcccctgagcaaactgatagtttgccaagcaattttcagaaagatattccaaaacaagtggctatccgagaacacaatgcagcaactttactgcaacacctgtgaaaggttcttggctgatag

SEQ ID NO: 223624 - DNA, 505 bp, Glycine max
aaattaaaaagtttaataaataacaatgcaaataatttggctacagctcacccaacatatgggcagtaaaaatgaagatgaagaaagcacgtcaaaatgtcaaattacacgaagcaaattctacatttacggcaaaaaaaaaaaggcaacagataaaaaagcaaattcttttcttttttaatttcctttttttctctctttttgaactcgttgtctaccttatggatccacagcttatggatgaaaccttgcaaacgccagctgatgtggtgagtggaacatttttgtagcatgccaccagttcctcatttgtgtgcaaatcgacttgcaatggttcccaaactttcttctttgggtttaagagttcatcaggattaccttcatacccagggaatgtaattctttctcctggttgagcagaactgggaggctcaaccaactcaaccttggtgtgatcaccatcggaagcagcaagaaccattgcttgagaattaatgcccctcat

SEQ ID NO: 223625 - DNA, 571 bp, Glycine max
aggacaaggagggaatccccccagaccttcagaggctgatcttcgccgggaagcagctcgaggacggacgcacccttgctgactacaacatccagaaggagtcaactctccacttggtgttgcgtcttcgtggtggtatgcagattttcgtgaagactcttacgggtaagactattaccctcgaggtggagagctctgacaccattgacaatgtgaaggccaagattcaggacaaggaaggcatcccaccggaccagcagaggctgatttttgctggcaagcagctcgaggatggaaggaccctcgctgactacaacatccagaaggaatcaacccttcaccttgtcctccgtctccgtggggggttttaagctcgttgtgtaatgttggatgtgttcccaaaacatttgaagaactttgatgtttaatgggtctgtaataatgtcccttgaaaataagttcggtttgtgttgaactcaattgtgttccattaataataggactctaatatcccacctacgtttgttatgatgtgtgaatatgaaatgataaattgcatatcgtgttgttt

SEQ ID NO: 223626 - DNA, 507 bp, Glycine max
aaaacaacttgatatgacaattaatcatttcatatttcacacattcataacaaacgtaggtgggatattagagtactattattaatgggacacaattgagttcaacacaaaccgaacttattttcaagggacattattacagacccattaaacatcaaagttcttcaaatgttttgggaacacatccaacattacacaacgagcttaaaaccccccacggagacggaggacaaggtgaagggttgattccttctggatgttgtagtcagcgagggtccttccatcctcgagctgcttgccagcaaaaatcagcctctgctggtccggtgggatgccttccttgtcctgaatcttggccttcacattgtcaatggtgtcagagctctccacctcgagggtaatagtcttacccgtaagagtcttcacgaaaatctgcataccaccacgaagacgcaacaccaagtggagagttgactccttctggatgttgtagtcagcaagggtgcg

SEQ ID NO: 223627 - DNA, 540 bp, Glycine max
cttttcttagctgatcttggtggatggttacgtgttgttgttgagaaaccttttggtaaggatctagaatctgcagaggaactcagtactgagattggaaagttgtttgaggaaccacagatttatcgtattgatcactacttgggaaaggaactagtgcagaacttgttggtacttcgctttgcaaatcggtttttcttgccactttggaaccgcgacaacattgacaacgtacagatagttttcagagaggattttggaactgatggccgtggtggatattttgaccagtatggaattattcgagatattattcaaaaccatctgctgcaggttctttgcttggttgctatggaaaaaccagtttctctcaggcctgagcacattcgggatgagaaagtgaaggttcttgaaccagtgctccctattaatgatgatgaggttgttcttggacaatatgaaggctataaagatgacccaaccgtacctgatgagtctaacaccccaacatttgcaactgttgttcttgcgatacacaat

SEQ ID NO: 223628 - DNA, 336 bp, Glycine max
cttctcttcctttatgtcactttgctttccattattggctacaaaaggcagacggatacggcggtatgtggcaccgactgttatggggttggcattttgggcatcgattgggcctttggtggtatgatcttaaatcttgatcactgcactgtcggaattacaggaggacacataaacccggcggagacatttgagttgttcctaggacgcaaggtgccatagataagggcgttgttgtacatggtggaacagtgtgcacgctgctatatgtggtactggataggccaaggggtatcaaaaagcatactacaactggtatggaggtggtgtcaactt

SEQ ID NO: 223629 - DNA, 487 bp, Glycine max
ctacgaaagcattttaatgcagagtatgtattcatgatgtaaatacaacacggtaacaagtcatccataagcatataggatttctgagaggtacatgtaaagccagaagaaaaatatacaagatactcttcatccacaatgtctagtaaaaggaccctaaaaaaataaaatatgacatgatagggttttaactgatgatgaatctaaatttaacaggacattcatgaaaccccactaaaacatatttgtcagaatctagtgccacttcaatctttctttttatctttcaaaggtcctctgggtatcttgctcaacaccttcgcatcaaacactgcatattgcttcttaatctcggcaattgccttcccaccaaaagagtctacatgatcttcatatttctcataaagcacaggcacagtgtgcagcaaaacaaaagctatgtagaacagggtcaagaagttggcccagctacccaaaatagagaaaa

SEQ ID NO: 223630 - DNA, 409 bp, Glycine max
cgagcactatttttaagcaggccaatattctgtacaaaagtgtcccattctcagaagatgagcgtgaaaatataaagctgaccattcagagtaatgtttatgcctaccttggcatgctgcttgagggacgtgagcgtcttgaagatgaaagtttgggggattttaaaaaaaggcaatcatctgtacatgatacaacaggaactagtccaaaactggatgagaagactgtatattccattggtccaagatcgaaagcattctctgattggttactgaaaactatggtgtagggcaaacttgatgccatctttccagctgctactcgcgaatatgcaccattgattgaggaaatatggaatgatgctgtcattaaggcttcatacgaaaggagaagcgaattagaaatgct

SEQ ID NO: 223631 - DNA, 495 bp, Glycine max
gtcccaaagagctaacaagagattcattaccggtatggctaatgaagaggaacagatggaccacctcttcggcatcaaagatctcggtcacaagactctccttcagagtgatgcactctatcagtatatacttgcaaccagtgtctatccaagagagcacgagtgcttgaaagagatacgcaagatgactgcaaaacacccactgaacatcatggcaacaccagcagacgaaggacaacttctgagcatgcttggtaagctcacgaattcaaagaacgccttggaaattggtgtattcactggttactctgtggtctccactgccctggctcttccccctgatggaaagatcttggctttggatgtgaatcgcgaatactatgaggtaggattgccaatcattcaaaaagcgggagtggctcacaagattgatttcagagaaggacctgctgttccgtgtcttgacgagatgcctaaagatgaaaataaaaaggg

SEQ ID NO: 223632 - DNA, 469 bp, Glycine max
agcaagttgatttttaagataaatgttgatttgtatccgggcaggtaaatttctagcgtgacaagaaacacacaaagatctagaaaagacagtagaacatttgagaactccaccattcacgcaacctgttttaatgaaaggaatatctgtcatgaaaaatctacatgaagagaaaatgatcagatgatgcggcggcacagggtaatcccatcacccacggggagctggcaaatctcgatcctcgaatcttgagccagatacttgttgagctccatcacatggccgcgaagaggcttaatgtaatccatcaatggtgcatcgggtggtgcagccacagatccagcccatagggtgttatcgtatccgatcagtccttcaatcttcacaagctctagaaccctcttgtggtaggtcaagtaattgtccttatcagcatccacgaaaacgaaaaccaacgacccccttttat

SEQ ID NO: 223633 - DNA, 247 bp, Glycine max
attgaaacctcaggtggtgactccaatttgattatccccatcatagacttcaaagacgggcatgctaatccagctctgcgttcagaagtaattggcaaaattcgaagtgcatgccatgagtggggatttttccaggtgattaatcatggaattccaatcagtgtcttggatgagatgattgatggaattcgtagatttcatgaacaagacacttgggcaaggaaggagttctatactcgggattctt

SEQ ID NO: 223634 - DNA, 553 bp, Glycine max
gctctacctcctcacttctagggttcttagcttgtctctcaaacaatggcgctgttcggtctctacgaatccgcttcgggctacaccctgttcgaggttcacggcctcgacgaaatcggccagaacaccgaagcggttcggaactccgtttcggacctcaacaggttcggcaaagtcgttaagcttcgctccttcaaccctttcacttccgctctcgatgctctcaaacagtgcaacgccgtctctgaaggcatattaactgatgagctgaggactgttttggagactaacttgcctaaagtgaaggaaggtaagaagtccaagttcagtttaggtgtgtccgatcctaagattggttcgcagatatctgaagtgactaagattccttgccaaagtaacgagtttgtgagtgaacttcttcgcggtgtgcggttccattttgatacgtttgtcggtgatcttaagtctggagatttagaaaaggcacaccttggtctggtgcataggtacagcagagcaaaggtgaagtttaatgttaacctgttgacacatg

SEQ ID NO: 223635 - DNA, 463 bp, Glycine max
cttcttcctctctgatttatgatcctccacagcatcaccgttggggtctatatccacgtcatcttcagcatcagcacctttttgtttcttctttttggttttcttgcctgaaacttcagcaggtgcttctgtttccatctctgtatctttgttttcagcactttcaatagcagcctgcatgacatctatgttcttgcgaggggcaactcccttgtcataaaagtcaagtcgttcctcaacttgctcacggagtttctgcccaaaaacagtagtacccttttcagaaaagcagtcaatccgtgatgcaattgagcatttgtttgcaagataacgagccattctacccttatttttggcagatgcccgaccaataaaagaagagtggaatatcaaaccatatttgggagtgtttcctcttgtttttaatgccctgaacaaagccttctctgcaccaagaatttga

SEQ ID NO: 223636 - DNA, 511 bp, Glycine max
aaaaaaaaaaaaaaatacaagatgaattgcaagttcctttttgttttcctattattgggaattcttaactgtgaggcacaatatttcaatgccaacccatacgactatttacaactagccttaaggtggcctaattcctattgcttgacacatgaaggtggttgcagggaaatagtgccacaatattttactattagctaccttcatcccatgagaagaggaggccctgatctgcaaaattgcccctcaccatttaatatgccaaatagcactatggagataaacaagaatgacctactcaaatactggcctgatctgagaactgataattttattgagagcaagtcattatggagggaccaatggagaaagtttggttcatgctatagtatgatgccagatgactatattgcttatgcactcaacagtagaaagagaaatgacctcaaaacaatctagacaaatgcaggtattgttgcaagtggaaatccatatccaacacgtaggatac

SEQ ID NO: 223637 - DNA, 448 bp, Glycine max
gatccacctccaatcactcacttggttttcacttttatagattcttctctagtggggggaactcttcgtacaccgtggtggatcatacttatgatgctgttgtcgttggtgctggtggcgcgggattgagagctgctattggactttcagaacatgggttcaatactgcttgtattaccaagctcttcccaactcgttcacacactgttgcagctcagggcggtataaatgctgctttgggaaatatgactgaagatgactggaggtggcacatgtatgacactgtcaagggaagtgattggctaggagaccacgatgccatccaatatatgtgtagggaagcacctatagcagtcattgagctagagaattacggattaccattttcccgaacagaggatggaaaatttatcaacgtgcatttggtggtcaaagcttaaactatgga

SEQ ID NO: 223638 - DNA, 513 bp, Glycine max
  unsure (1)..(513): unsure at all n locations
ttgagagttcaagttttctttttccctaaacccaaagattttaggttacagaaaatggcggtggaactcatggggttcccaaaactagacgaacaaaaggccattcaagaggccgcatcagaaggcctcaaaggcatggagcacttgatccgaactctctcccaccaaccctctcacttaaacaccgaactcaccgatgttactgtttccaagtttaagaaactcatttcgctcctaaaccgaaccggccatgcccgattcagacgggccccggttcagtactcatctccacccgcacctgttcacaacgctaacacttccacctcatcaattcaactcccttctccgccgcaaaaccctaatattcccgcgccggcgcagtttccttctcctgcgccggtggccgatcaccacgcgccggtgacgctcgatttcacgaagccgcacaacgcgcttctgagctncaacgcngaaatctgtgagctcgagttcttcgaagagaccttcagcgtt

SEQ ID NO: 223639 - DNA, 564 bp, Glycine max
ttgagagttcaagttttctttttccccttacccatagattttaggttacagaaaatggcgtgtggaactcatggggttcccaaaactagacgaacaaaaggccattcaagaggccgcatcagaaggcctcaaaggcatggagcacttgatccgaactctctcccaccaaccctctcacttaaacaccgaactcaccgatgttactgtttccaagtttaagaaactcatttcgctcctaaaccgaaccggccatgcccgattcagacgggccccggttcagtactcatctccacccgcacctgttcacaacgctaacacttccacctcatcaattcaactcccttctccgccgcaaaaccctaatattcccgcgccggcgcagtttccttctcctgcgccggtggccgttcaccacgcgccggtgacgctcgatttcacgaagccgcacaacgcgcttctgagctccaacgcgaaatctgttgagctcgagttctcgaaggagaccttcagccgttcatcgaactcgttcttcatgtcctccgcgatcaccgccgatggcagcgt

SEQ ID NO: 223640 - DNA, 561 bp, Glycine max
  unsure (1)..(561): unsure at all n locations
ccgagggccgccctttttttttttttttgttggctttttgagaaaggagaaccagaacgcttgcaagtgaagttcttagttaaaagaaattatttgtttcaggaaaaaaaaagctaaaaatggggtcgaagtggatgtggttgatattacactttgcatcggttttggtgtttgtttggggagatagaacaattttgaaggtggaagggcctatgttgttggataattcacagagatatgaaggcagtttcattagcaaagcagtgaacttcttatggcaaccaggggaatcaggttatcaacacgtttggccagacatggaatttgggtggcaaattatcttgggtaccattgttggattctttggagcagcatttggaagtgtaggtggtgttggtggtggtggcatattcgttcctatgctcagccttattattggctttgatgcaaaatccctcacagctatttcaaaatgtatgataatgggtgcagctttgncaactgtttactataatcttaatctaaggcaccccacactggatttgcccatcattgactatg

SEQ ID NO: 223641 - DNA, 585 bp, Glycine max
attaaaataacatgatttcagtttctcaatcttcaacagtgtcatgaatacatgtcttagcagcaacaaaaatataaatgtacatatcatacctcttaacaagagcccaggcacacacagagcacaagtgagtgtttgaaatagtgtccaacatctaacatttttttcctcacaaaaaacccagataaatacatagaagcatgtatgcattgctttcaagtccactgttttttacgggaatccaagcataccttaagtcaattttggcgacctaggttctcttggctcctttattgggaacttgagacaaaacaaagcataaaataatttagtgaaatgggctatgaatcatatgtgcagaggtcatcaaatcccatatactcgtgattttcaatctttttgaccattgctacaatgccaactccacctagtgagactgcgctgacaagtattgtgaaggctagaacaaagatgattagagatgctctcccaagcacatcgatcagctttcttacaatatgctgccctacaattgctgaatagcagcaaccgcaataaagtacagagcataaggaactgggaaac

SEQ ID NO: 223642 - DNA, 397 bp, Glycine max
acacttttgtgttgtgttgggaaaccctaaaccccgttttcggtgagatcgagatcgatcgaacatggatgaggagtacgatgtgatcgtgttgggcacgggtctcaaggagtgcattctcagcggtcttctctccgtcgatggcctcaaggttctgcatatggataggaacgactattacggaggagaatccacttcgctcaatcttattcagctttggaagagattcaggggagatgacaagcctcctccacatttgggcgctagcagggactacaacatcgatatgaaccccaagtttattatggctaatggcaatttggtgcgggttctcatacataccgatgttactaagtatctctatttcaaagctgtggatgggagctatgtgtttaat

SEQ ID NO: 223643 - DNA, 560 bp, Glycine max
  unsure (1)..(560): unsure at all n locations
aagccttgttatttataattttttttatatttgaattaaaatgaagattaatacaacccacatgagtttcaactaatgaaagataaaagtatccaaacacaaattgccaggggtatgaaatggttggagagacgtgcaattaacatttaacaatatgaaaataacactacattaccaaactaaaaccactgcagaaggcaatgtatgtgaacacacaacagagcttctggacgggaaaaagttccccagccacacaaatcttgttttaaaaaaagaaaatatttattataaaacgttaataacattcgttgtcaagtccatcatcacggaacccatcagcaacagatcatcaccgagttttctttactcttctgcagcactagcagcactaagatccacactgaggtcaataacctttccagttatcaatgtatacatgttgagaacgtcatccacagtcgactcanagtgagtagtagcatcataacttgttgatataaagcagttgtccaaagtggngttcgtgactgggtcatatctgtcatagatatcaaaaaata

SEQ ID NO: 223644 - DNA, 455 bp, Glycine max
  unsure (1)..(455): unsure at all n locations
gtgtctttgacggcatcatgcgcgttaagccaaccgcagaagctatcggcgtacgatggtctgatggagtacgggttcccggtgggtcttcttcccaagggagccatagggtattcgctcaacagagacagcggcgagttcgcagtgtatttccaaggagcgtgcagcttcgacatagagtcctacacgctcaagtacaaatccaccatcacgggtgttatctccaaagggcaggctctataatctcaaaggtgtcaccgtcaaaatcttgctcctttggctcaacatcgtcgaggtctctcgtcaggggaacgatatttacttctctgtcggaatcgcttccgctgattttggcgtcgagaatttcctcgagagcccncagtgtgggttgtggtttcgattgcanaacactacccttaaacggngacgtttccgtttcctcaatttaaatacac

SEQ ID NO: 223645 - DNA, 450 bp, Glycine max
  unsure (1)..(450): unsure at all n locations
caaccttaaattctccgagcgagcgagaaacagaaacctatttttattttctctctttatatcactgagagtgatagtgagagtggtagcttttgtatccatgatatgaatatgatgattattgatttgattatgcgtncagattttcagttcaggatcactttgacagtttgacttgtccagcaccaatttctggtattactgttgtctgagttctcaagagttctttcacagaaggtagatgggttctagaatcccatctcataagcttagcaatggcctctatgtatcagggcggccggagcagcccaaagaaagaactccaacaatgacatcaacagccgtgccatataccggtggagacataaaaaagtctggagaattggggaaaatgtttgatattcctgttgatggctctaaatctaggaaatctggaccttaacaggtgct

SEQ ID NO: 223646 - DNA, 486 bp, Glycine max
gcaaacacaagaaagattgtattctatttagcatgttagcgtaatgacaatatgctcgtacaagtaagaatttttactgcaccaaacattaacaaaccctagaagaacatcaaaacaaccagaactatacaacaatttaaaggagaaaaataaggcgcgcgcacacacaactttgccatcttaatctatgataatttgtcactatgatattccaccaccactaataatggaggggaaaagaatactatctaagaacaccaattagaagatgctacaagcattctcatagcacatactgttaaactggtatcacatcattcttggatgcatcttcacatcttaaaactataccctcaagactagttggaaaaatgcatttggtccattggcaaccagtagtgattggatctggcggaggaacaatcataagaacattctcattcctctgaacaattcccattacacttactgggcttccttctttga

SEQ ID NO: 223647 - DNA, 571 bp, Glycine max
  unsure (1)..(571): unsure at all n locations
agaagatctatctatggacaactgaatcaagcaacctctgaaatttgaatccgtccatgcctatagatgtctgcgattgcgatcttaccctttctactccacgttctaatggctgcttcagaatcagaaccttttcaagacagtattctccagtgcctctctctctattctgacccctctcttccaaatccaatctctgctgtcacctatttccccaacagcccctcataccctcccatcttagactcctacatcagaaacctcagattcagttcctccacaactccaaaaccatccttcatagtggcaccaacccacgtgtcccacatccaggcctccatcatctgctgcaaaagcttcaaccttgagatcagaatcagaagtgggggccacgactacgatggcctctcctacgtttcagaagccccatttgttattcttgacatgtttatgctcagatcagtcaaagtcaacttggatgatgatgatgacactgcgtgggttgactncgngtcaacgattggtgaactctatcatgcgatcgctgagaggagcaagatccatgctttcc

SEQ ID NO: 223648 - DNA, 494 bp, Glycine max
ggaatttcgatgctcagtcatttcttttaccattctcttctctcttgctcttggaggagagagccatgtccatgcatcgctacctgaggaagattattgggaagctgtttggccaaacactcccattcccactgcactgcgagagcttctaaagcctctccctgcaggtgttgaaatcgatgaactccctaagcaaattgatgatacacagtacccaaaaacattcttctataaagaagaccttcatccaggcaaaacaatgaaagtacaattcaccaagcgtccctatgcacaaccttatggtgtatatacatggttaacggatattaaagacacctctaaagaaggatatagttttgaagagatatgcatcaagaaagaagcgtttgagggagaagagaagttttgtgcaaaatccttgggaacagtaattggttttgccatttcaaagctgggaaagaacattcaagtactttcaagttcctttgtcaata

SEQ ID NO: 223649 - DNA, 513 bp, Glycine max
acgtagaatggtgaagttccaggtcttgcacaacatacacagacacaccataatttattttatatacaatcttatggtgcccaagatgcagatgcatggactaattaaacaacaacgttagtctgataggcagtgtccatagataaattgggtacccataaaatggccttgcttccaaggaaatggcaaacagggttagttccaggatcaactcccatgagttcatgaagcatgtgatgattcattccagaagtatctgagtggcaaacagcaagtgcctgagttttggttccatcaccagccaccaatggaaccatgaaagctgttgtttcacggactttatggcagtaaaatactgcagttctgaaatttagcccatgacacatcactgctttgtctccaagattctgcactccttccacagtgtattgctcttgcttattgacaaaggaacttgaaagtacttgaatggtcttttccagctttgaaatggcaaaaccaattactgttccc

SEQ ID NO: 223650 - DNA, 389 bp, Glycine max
atgcctcccaatctccgattcttcggcttgaggcgcgaggcatcaggttcagggatggctgcttatctaaaacggtaccactcccacctgcctcgccgacctcactccgtcggagtctatgccgcgctatctagcaatggacgccctaccaaatcgttcgactacgattcgatgataataggcgcctgcattggccgtcacggcgcctcgcttcatgccgccgagaagggttcgaaaacagccactgctgaaagagatgtcgagggagggacatgtgtgaacagaggctgagttccttccaaagctctattaaccgtgagtggtcgtatgcgagaactaaggagcgatcatcacttgaagtcctatggctaacatgttactgctgctgg

SEQ ID NO: 223651 - DNA, 546 bp, Glycine max
ggcagccaccgcttccttacaccgtctttctcgtcttcgattcatcgccaaaccccaacgggtcctatctcctcattcaacaccatcccatttttctctcacccccaaaaccaagaaaccgaatcgattccgattccgattcctctcaatggctgcggaacccaaggaatcgccttccaacaaccccggtcttcacactacccctgacgaagccaccaagggttacatcatgcaacaaactatgttcagaatcaaggaccccaaagtgagccttgatttttattctcgcgtcttgggcatgtctttgcttaagagattggattttccggagatgaagttcagcctgtacttcatgggctatgaggatacaacagaagctccaagtaatccaattgataaagtggtttggaccttttctcagaaggctacaattgaactgacacataattggggtactgaaagtgatcctgagttcaaaggctaccacaatggcaaatctgaacctcgtggctttgacacattggtataactgtggatgacacatat

SEQ ID NO: 223652 - DNA, 510 bp, Glycine max
accatagaaagtgaggacactggttaggattctcctctcacatattattactgctgtaaagtttttagaagtactcattcgtatcacacatccaatggaagagtagaatcaagtcactagttccaatatgggctaggttttttaaattaaaagaacaaaaatgtataagattcacaacacaatccttcttattcgttctggtttgactacaaattatgcattcaagggaatctcgaaaaaacctacacactccatgtacgagcaaagacccaattaaatcagaggagatcagaacgtatcacagaagagccggacctgaaggtgttatcttaagcctaagcgggagcttgtgttacatttcctattgtttttcgatcaaagatttcaatccagtatccatcaggatctttaataaatgctatacctttcattttcccatcatctggcttcttaacaaactcaactcccagattctgaaatctttcacatgccttatatgtgtcatcaaca

SEQ ID NO: 223653 - DNA, 450 bp, Glycine max
  unsure (1)..(450): unsure at all n locations
ggtaaacaaagatggcagggtgcgataaggaagactatttctctgccccgaatgctgagacaacatccgagggaaagtacggtaggcttgccccaaagaagaagcctttgatatcgaaagataatgaaagagcattctttgattcggcagactgggcattatgcaagcaaggtgctggagtgaatcaacaatctacagcaacagtggagacactgcgaccaaaactacagagaactccacatcagcagcttcctccaagacgacctgcatgcacatctggttgagataatttcgtgaattactataatgtggagagtagacttaataaacggaacaaggatttgctcagccaaatttactattacaaaactcatgatgttcctgatctgatgtatattacaatttacttcatgctntgtgttattagcagttcaataaaaattccatttc

SEQ ID NO: 223654 - DNA, 412 bp, Glycine max
gaaatggaatttttattgaactgctaataacacaaagcgtgaaggaaattgtaatatacatcagatcaggaacatcatgagttttgtaatagtaaatttggctgagcaaatccttgttccgtttattaagtctactctccacattatagtaattcacgaaattatctcaaccagatgtgcatgcaggtcgtcttggaagaagctgctgatgtggagttctctgtagttttggtcgcagtgtctccactgttgctgtagattgttgattcactccagcaccttgcttgcataatgcccagtctgccgaatcaaagaatgctctttcattatctttcgatatcaaagggcttttttttggggcaagcctaccgtactttccctcggatgttgtcttagcattcggggcagaaaa

SEQ ID NO: 223655 - DNA, 447 bp, Glycine max
acagatgattacgagcattacatagctattgacacgaatgacaatgtcatatttaacatttaaactacaccttttaaacaaggagctatagtggaaaaccaagatacttgtttgtcacctaggaccagaaagctccatggcttcaactacgagtgaagattcctctattaaatctgaatatctttgaggctcacaagaccgaaaccttggtgtttcaatcctctgtgaggcctcccatctctcagctaagccatccccttctaacatcttcaatacttctgacatcttggggcggtgcgaaggattgaattgtgtacacaagagtgcaacctgaaccatttcttctagttcaatcagatcgaagttgccctttagatctttgtctaccatttgactcaatcttccatcctggtggagcttcttaacccaatcaagcattacaccttt

SEQ ID NO: 223656 - DNA, 395 bp, Glycine max
agagaaaaatcaatttagattctagcttcgcaatcaaattattactagtctgtacagagactaagtgtatgggaaaagtcctaaacacacgttttcccaatagcaagaattgattggttgcttctggagcattgaactcaagcttttcaatttcaacgggatatagaaacacaagctaagtcgaccaatctccctttttttccgttattgttgcttctcgtgtgaacacgtacactttgcatgacaatctgaaagtgtctgaacttgcttttgaaggtctttgatgtaatccacagccaagtccaacatatcagctgtgttagtttgcttgtccatgtttgggacaagatcctgaagtttcctcatacgctcactaattttagttcttttaaccc

SEQ ID NO: 223657 - DNA, 450 bp, Glycine max
atggcagaaaatcctttattatagagatttgattatgtatggaaaataaaaaaagaaaagaaagcagcaaacagggctagctaggcatggatggagaatactaggaaggaagaggccttggcggaggagggagtagctgatggaggttgggaggagtctgattatggttgggcagcggtggagcaatgaaggggtgttcgaggagcctggaagcagaccagcggcgagagggatcgcgctgcaaacagcggaggatgaaatccttgaagtgaggtgaagcagaaggaggagcctctggaggctgagacatacaaatggcgcacattagactggcccaatcgccctgcctccctacagcgaaagggaaccttcccatgtagaactccagtatgctaaccccaaagctccatatgtcccccgcgtaagcgtcgtattgcccgtcgtttatgt

SEQ ID NO: 223658 - DNA, 410 bp, Glycine max
ctgaatcgttaattgtgctatctttcttttctcatggggcagcaatcgttgattaacaggttggtggcgcgcggtaacatgatcctggcgcaccacactgatttcaggggaaactttactgaggtgggtttacacttcctgcagatgcttccagactgcgacaacaaattcacctacatacgccgatggacacaccttcaactaccttagctataatggattcacttactgcgatgaggcagtaaagtattgtggtcgccaacttgaaatggcctatcttgaacgcatcatggaggatttttacaagagatatggtggatgaaaagctacatcaggcgctggtaaaagctcaaacaaagaatttggatccttgttgaaggaacatatgcagcattgtgaggaacacccac

SEQ ID NO: 223659 - DNA, 472 bp, Glycine max
agaaaatatttttttttgtagtgttgtgatgtcaatcaaataaacagatttataatgtttatattatacaactatatttattaaattacaaaaaaggggtcgagttgtaacaattctaggtgaccaataagacaattattaaaatgatggcaatcacgatggcaagtactattaactttatcttcatgttttgataccacatctttctccttatctggtctccccgctccctgaaaacccccgcctgattgcgaaggtcctcagtttgacccactaaaacgtcaatcttcacttgacgatcaagaacctgatcaatgtttgccctcataacttgttggacttctgaaacctgagctttcacttttgcaagtttgctaacctcttctgggtgttccacacaatactgcatatgttccttcaacttggatccaaattctttgtttaagcttttagcagtggctgttgtagcttt

SEQ ID NO: 223660 - DNA, 547 bp, Glycine max
  unsure (1)..(547): unsure at all n locations
gggaagtatccggtgctctgccaactacgtttctctcactccaatcagcttcttggaccgcgccgccgtcgtttaccgcgacagactttctcttgtctccggtgacgttacctacacgtggacccagacacaccaacgctgcatcaaacttgcttcttccatttctcaacttggtgtcggtctttctcccctcgatgtggttgctgtattggcccctaatgttccagctatgtatgagctgcattttgctgttcccatgtcaggggctgttctctgcacgctaaatacacgtcatgattctgcaatggtttccttgttgctaaaacattctgaggccaaacttgtttttgttgattatcaattacttgatattgctaaaggagcacttcaaatcctgtcaaaaatcaccaccaagcttccccatttggtcttaattttggagtctggacatncatcacctccccatgctaaaggaaccttgacatacgaggatcttatagctaaagggagccttcaatttgaggtgaagaggccaaaggatgagtgg

SEQ ID NO: 223661 - DNA, 490 bp, Glycine max
cttgttacaactattcataattgtctattcatacaaatggacagattttattttataaataaacgaaaataaaaaccttaaagcacataacatcaacaaacattccattaaaatttcagaataaatgtgccttataaccggctagcgttcttcttagtcaagcttcccatggcctttgctttctccctaagaacaaatttctgagtcttaccagttgatgtctttggcagatcagtaaacaccacagttcgaggggccataaaacgaggcaaacgattctgacaaaattggattatctcatctgatgtggcactgcatccctccttgagcttcacaaatgcacaaggggtctctccccaataatcataaggtttcccaacaacaagtgcctcaaaaactgctggatgactaaaaatgactccttccaaccaaattggctaatattttcttcaccagagatgatgatgtccttcgagcgatccttaagctc

SEQ ID NO: 223662 - DNA, 524 bp, Glycine max
gccaccctaacctactgcattattattttcttccccttaatttctatctccaatccctgagcagaacgcagcaaatgggtcggcttaatctcctacttgtgtggtcactctcattaacactgtccctttattatctacacccaatctctgctcagctcagtccaaaccactatgctaaaacatgccccaatcttgaaagcatcgttagacaggccgttgccaagaagttccaacaaacctttgtcaccgtcccggccacccttcgtctcttctttcatgattgctttgtgcagggttgtgatgcttctgttttgattgcatccaccggaaacaaccaagcagagaaggatcacccagacaacctgtctttggcgggtgatgggtttgacacagtgatcaaagcaaaggctgcagtagatgccatccctcagtgcagaaacaaagtctcatgtgctgatattctggcctttggccacccgtgatgttattgcactgtctggtggaccttcatacacggttgaatt

SEQ ID NO: 223663 - DNA, 512 bp, Glycine max
agaaaatcctcaattttctgagcagcttaacactctctctctgtctctcgaaaattctgagtttgcagagaaaatctgaatcatgtcgtggcaagcgtatgtcgacgatcaccttctgtgtgacatcgaaggggacccacctcactcacgctgctatcatcggccaagacggcagcgtttgggctcagagtaccgacttccctcagttcaaacctgaggagataactgccatcatgaatgactttaatgagcctggatcacttgctccaactggattgtatctcggtggcaccaaatatatggtcatccagggtgaacccggcgctgtcattcgagggaagaagggtcctggtggtgttactgtgaagaagaccggtgcggccttgatcattggcatttatgatgaaccaatgactccaggtcaatgcaacatggtagttgaaaggcttggtgattatctcattgaacagggtctctaatctttgcttaatgtcttgttatcgcgcatattt

SEQ ID NO: 223664 - DNA, 398 bp, Glycine max
aattatgccaaccattataccatagcgttaaaaatggaaaaccagtgtaatgtatacaggtaccccactaaaaaagtacaaagatagagattatagtcatcatttctcaagcattaaacacttttttcgcaacacgcagatcccgtgacttttcatactcacaagattattacactgcaatcaaagcattccagtccaggtcgatgcaaaaacttgtacagaagccaatgaaatatgcgcgataacaagacattaagcaaagattagagaccctgttcaatgagataatcaccaagcctttcaactaccatgttgcattgacctggagtcattggttcatcataaatgccaatgatcaaggccgcaccggtcttctttacagtaacaccaccaggacc

SEQ ID NO: 223665 - DNA, 528 bp, Glycine max
  unsure (1)..(528): unsure at all n locations
tttctttctctgtgtgtcgtaatggctctcccagactcttcttcccgtcgcaactccctgatcccctccttcatctactcctcttcctccaaaacgctccctctccaccacatgctcaacaccgcctncgctgccgccgncgccgctccctccccgccgccggccaatctcgacgccggatcgcgtggcctcatgattccctctcccagcgagtcacgcaagatcgagttgtactcccccgccttctacgccgcctgcaccgccggtggaatcctcagctgtggcctcactcacatgaccgtcactcctcttgacctagtcaagtgtaatatgcagattgaccctgctaagtacaagagcatctcgtctggttttggagttttgcttaaggagcagggattcaggggcttttttcgtggctgggtgcctaccttgcttggttatagtgctcagggtgcttgcaaatttggattttacgagttctttaagaagtactattctgatattgctggcccagagtatgcaagc

SEQ ID NO: 223666 - DNA, 285 bp, Glycine max
gggttggggggcaatttaggcattgcatatgggtgggggcttatgcccaaacaaaaaaacaaatgtgttcccgtttgacaattggcctgtaaagaacctaacatgcaaaattttttcattcctacctacaaagttttcagcaagggggagggtgagagcaaaaccctcccccccaaaattcaaaattcttaaattttaaaaaaatggaaacaatgcttgaactttaaaagaattttattcaaccaagcttgagttccacttaagcaactctattgaggagtcctt

SEQ ID NO: 223667 - DNA, 503 bp, Glycine max
cagatgatctgttgctgtaacatgatttatgccactacccccaagtactctaaggctaggtatgatgaaatcgtgaaggaagtctcttcttacttgaagaaggttggttacaacccagacaagattccctttgttcccatctctggttttgagggtgacaacatgattgagaggtccaccaaccttgactggtacaagggaccaactctccttgaggctcttgaccaaatcaatgagcccaagaggccctccgacaagcctctaaggcttccattgcaggatgtctacaagattggtggtattggtactgtgccagtgggacgtgtagagactggggttgtgaagcctggtatggtggtgacttttggtcccactgggctgacaactgaggttaagtctgttgagatgcaccatgaggctctcacagaggctcttccaggtgacaatgttggatttaatgtgaagattgttgcagtcaaggatctcaagcgtggttttgttgc

SEQ ID NO: 223668 - DNA, 449 bp, Glycine max
cttatgaattaaatgcaagtggaagacatgccttcttatcatcaaaggaaacggacaaacaccctatggctgtttgtgaattcgaaaatctcagactgttaccatcaaaacaaaaaacagtactcatcaaaaacatacagcaacgaaaatgttaccgccgatcaagaacccagtttagaaggctacggctacatgaaatcggtcggcacttcaaaatatatactggtaaaacaaacacctaagactctgcaaagataaactactggaaaggaacaagtttttttgcaaccacgttgctgatcacatgtgctagcaaaattgccaaaatgcaatcacttcttcttggcggcggcctatgtgaccttggctccgggggggtctttcttctcaacactcttgatgacttcaacaactacggtttgacccatgtccctcacagcaaaacgacc

SEQ ID NO: 223669 - DNA, 432 bp, Glycine max
gtttgatgaacttgggatgcgccacaggacaccctagttttgtgatgtcctggtgcttcaccaaccaggtcattgctcagcttgagttgtggaaggagaagagtaccggcaagtacgagaagaaagtttacgttttgcccaagcaccttgatgagaaggtggctgcacttcaccttggcaaacttggagctaagctcaccaagcttagcccggcccaggctgattacatcagtgtgcctgttgagggtccatacaagcctgctcattacaggtactaagtaattgagattatcaacggaaagtgagggaaagacaaaatcggttttatgaaatcggattgattgcttaattttcctttttttgaatttttgttgctagacttttcagatttgaggtagaagaagtttagctttttttattttttatttccgg

SEQ ID NO: 223670 - DNA, 576 bp, Glycine max
  unsure (1)..(576): unsure at all n locations
ctcaacttcaaaaggtggaaactagcctgcagatcaaggcttctgctgaacagttctatgatgttttttgcaacaagccacacactattgccaacatttcaccagaaaatattcagtcagttgaagttcataaaggtgaatggggcaaagagggatcaatcgtctcctggaactatttacatgagggaacagtttgtgtagccaagcaagtgcttgaaggcatagacaaggaaaataacaaaatgacaatgaaggtcatagagggtgacgtgctgggactctacaagagcttcaagtctaatttgcaagttactccaaaaggaaagggcagcgtagtgctttgggcaatggaatacgagaaacaagaggaccacattcctgacgctcataccttgttgcaactggctgttgtggttagcaaaaaaattgatgcttaccttactcaggggcacaactaaatcatcaaattaagctcatgttntactctactaatgctatctaagaaataaaaattgatgtattatggggcttaattgacccttaattccatcatttcatatgttaaaagctgaataa

SEQ ID NO: 223671 - DNA, 522 bp, Glycine max
cttgctggttgccacactacttcgatatttccaccaaacccgtttgcgttgttggttgcgaataaatggcgactaagaggagcgtgggaacgttgaaggagggtgatttgaaggggaagagggtattcgtgagggtcgatctgaacgtgcctttggatgacaaccttaacatcaccgatgacactagagtccgtgctgctgttcccaccatcaagtacttgactggttatggtgctaaagtgatcctttctagccatttgggacgtccaaaaggtgtaacacctaaatacagtttgaagcctcttgtgccaaggctgtctcaacttcttggaattgaggttacgatggccaatgactctattggggaggaagttgaaaagttggttacacaacttccagaaggtggtgttttgcttctagagaatgtgaagttctacaaggaggaagagaagaatgatcctgaatttcaaagaagttggcttctctagctgatctttatgtgaatgatgcatttggcactgc

SEQ ID NO: 223672 - DNA, 493 bp, Glycine max
aaccaacaaagtaaactcatttggaaatgaacattgttcaagaacaattagatcaaagctcaatgcaacaccaaggatgccacaaaaccctcttattttgaaacctatcctatattaagcctctacaggagcaagagctcgcagctctcattgtaccttaatccactgttggctgaaacccaaccataataataatataaagcacaaacttcaaaggaacgaatgatttttgctcaagcatcatcaagagcaaggacaccagggagttgctttccctcaagaagctctaagctggcaccaccaccagtggagatgtggctcatcttgtctgcaagtccaaccttctccacagcggcaacggagtcacctcctccaatgatggttgtcactcccttcccactcagctctgccagtttcttggctatagcctctgttcctgtggcaaacttatcaaactcaaaaacacccattggtccattccaaataatggtct

SEQ ID NO: 223673 - DNA, 541 bp, Glycine max
atcattatcacacacacaaaaaacctctcattttataagagagagagagatttcacagaccaaattgcagaggacgacaaagttcacaacttcaaggaaaatcgaaatggcccaagtgagcagagtgcccaaatcttgcttaaagcactcaaattttcggtcattcttccaatcccaacgaacccaaatcggcgaattcggtttcattgaggccacgcctttggggtccctcgaaatctcgcatcttggtgcacaaaactggaagccttatgggaaattttaatgcggggaagggaaattccggcatgtttaaggtttctgcctccgtcgccgccgccgcagagaagccttcgacggcgccggagatcgtgttggaacctatcaaagacatctcgggtaccatcacattgccagggtctaagtctctgtccaatcgaattttgcttcttgctgctctctctgagggaacaactgttgtagacaacttgctgtacagcgaggatattcattacatgcttggtgcattaaagacccttggact

SEQ ID NO: 223674 - DNA, 455 bp, Glycine max
aaacacaaaaaggtatggtcctatcccaatagaaatgggatcaaatgcaaagatgcaatgtacaccaccacatatgaggaatagagccaagtctgtactggaaattaaattactttgatacaacagaatcaatagctctttccaacaatacaaattatctcaagttcttacaagggaatgttaagaaacaaaagcaagccatgcatatactcactgttttgtgagtatttatctctctctctcttcctactcaatgtacaaaatgcttagtgccttgtgaacctctcaaggacttcaaagtagtcgggaaatgtcttcctggtgcaaccaggatccttgatggttactggaacatccccacaagcagcaagagagaatgccatggccattctgtggtcatcatatgtgtctatagctgtgacattcaatttttaggtggagtaatcacacagtaa

SEQ ID NO: 223675 - DNA, 551 bp, Glycine max
caataaactgctaagctaactgaactctccctctctccttcctcgttcctttcgcctctgactacaaatacacatctcatctcatccgtctctcacttttaatttttctctgcaatctgaaccttccggattttggtttttctttgttccggtagccagccagccagccatggtgctcttcaatgtttcacgcgttgagaccactcccttcgatggacagaagcctggaacctctggtctccgcaagaaggtgaaagtattcgtgcaacctcattacctccataactttgttcagtcaacattcaatgcattaactgtggaaaaagttagaggtgcaacgctagttgtatctggtgatggtcggtatttttcaaaggaagctattcagattataactaaaatgtcagcagcaaatggagtaagacgtgtttggattggtcaaaatggattactttccactcctgcagtatctgctggtatacgtgaaaaacttggagctgatggatccagggcaacaggtgcatttatactgacagcaagtcacaatcccg

SEQ ID NO: 223676 - DNA, 559 bp, Glycine max
tttttcttcttcttctctctcttcaacgctcgcttagtacagcggaataacgaagcctgctcggtcttcttcttccgccctttctctctctagaaccgtacggtcgtttctttctctctcctcaaccggagacaggcgtcggccttcttttctgaatctcgcggtgttgttagttctgcggcggttgtagttccggcggcgatgggacagcaatcgttgatctacagcttcgtcgctcgcggcaccgtgatcctagcggagtacaccgagttcaccggaaacttcaccagcgtggcggcgcagtgcctccagaaactcccttcctccaacaacaagttcacttacaactgcgatggccacaccttcaactacctcgttgataacggattcacttactgtgtggttgctgttgagtctgctggacggcagattccaattgctttcctcgaacgaatcaaggaggattttaccaagaagtatgctggaggaaaagctgcaacagcggctgctcatagccctcacagagagtttggacctaaagtgaggaggagatgcagta

SEQ ID NO: 223677 - DNA, 531 bp, Glycine max
aataaaaagctcaactacgtaatggttgatttcttaatatgtaagcataattaaaaaacataatcctcacaccaaatgctgaaactcccacctaaactatagagaatgacagattagcattatgctatggagacaagatgataaaggctaaataattcacactatacaagcaatgccatataatattcatcatcggagaagtcggaagaatgtaaatcccaaaaagtcaaaagcactatgttgacagtagaggcaatggcaatctgctagcaacaatcttatcaagtgaggagacaaataccacagttgaagccaggatgtgggaagactcatttaccacagttgaagccaccacaaacggaaagaacaataatgagaatcaaggcaattatgatacccagaacaattagctttatcttcatgttttggaaccacatctttctcctaatcttggttccctgctgcctgaaatcttgagcctgagagcgaaggttctctggtttatccaccaaaagctcaattttctcccca

SEQ ID NO: 223678 - DNA, 278 bp, Glycine max
gagatgtatcagatctggagcaggagaatagtgttgggagcgttcgcgtttgttctggggttgctatcggcctcagcagacgacgtcgttgtgctctctgaagataacttctagaaggaagttggtcaggacagaggagctctcgttgagttctatgctccttgggtgtggacactgcaaaaagcttgcttcagaatatgaaaagcttggtagcagcttcaagaaagccaaatctgttttaatcggcaagggtgactgtgataagcccaaaagtttgg

SEQ ID NO: 223679 - DNA, 430 bp, Glycine max
gggataaagacaaaagctatcgtctcccaaaattttaaaccgctcaggtagactacaatggggagaagaatcgtaagttcggaatttttaaccccaaaagcgccatgcaagataaggtcaatagtacagactcaaattaagcactacaagtatccacgttgaatatctcccagcattttcgatatcaaagtcaaacaatcatcaggagctgcgattgatcacgagcttccatgagagatggttaatgatgcaccaaaaagtcaagccgcatatgtcgacaagatatttttctttagagttaactcgtcggccttggcaggactaatggacttgtcaagtatgcgctgtaggcgctggatttcgttcttagcataatcagaacctttttccaagtaattcttggcagctttcaagtaaatctttccgtgcc

SEQ ID NO: 223680 - DNA, 537 bp, Glycine max
  unsure (1)..(537): unsure at all n locations
gttgttgttttatttcattccattcgattcgattcgattcgatgtagcacagtctacctttcaattctgtggcgtctcattgattggtattatgaatctcgaatttgcaggttcaaatataccaattcgtgtatgaggaaaccgagattgatgacctttgataaaaatgctttcgattttcccctgtttctgcactgggatttagttgtttaggagttgaagtccggtaagggtttcagaaaggttgacccagatcgatgggaatttgcaaatgaaggatttttaagaggtgaaaaacaacttttaaaaagtatcagtaggcggaaatctgctcatgtaaatggtagtcaacaaccatctcaagtgcataaatcagctgttagagcatgtgttgaagtggggaaatttgggtttgaggaagaggtggaaagactgaaaagggataagaatgttcttatgcangaacttgntaggttgagacagaaacagcaagggactgataaccatttgaaaatgttggcaacgtgtgcagtcaat

SEQ ID NO: 223681 - DNA, 433 bp, Glycine max
tctctctccttctcgctctttcttctttgacttttgttggaaactaaggcctagtgaaaggggtgaagttcacagctgaagagctacgtcgtattatggactataagcataatatccgtaatatgtctgtcattgctcatgttgatcacggaaaatcaaccctcactgattctcttgtggctgctgctggtattattgctcaagaagttgccggtgatgtccgtatgactgatacccgtgcagatgaagctgagcgtggtattaccatcaagtctacaggtatctcactctactatgaaatgactgatgaagctctcaagagttttaagggagagcgcaatgggaatgagtatcttatcaatctcattgactcccctgggcacgttgacttttcatctgagggtactgctgcactccgtattactgatggagc

SEQ ID NO: 223682 - DNA, 500 bp, Glycine max
aaatctaacagaaattaaatctaaagtagcattgttcacaagagaaaataaattcgactaagttcaaagtaaaataattcatgaaacaaatttaaagcttgtcttcaaactcggagagaggagtcatctgttccttcaagcccttcctcttgcgaatgtcagtgacaagctgtgcagcttgtgatccagcctccaatgggtcagaagacatcatgtcccagtgatcaaacacacattgtgggaaggcctggcctgatgttgcagccctcaatgtgctcgagaaaccaaaggactcgatgacagggaggtatgccttgatgttgtatagtggggtacctggcctctgcatttcctcgaacacgtgtccacgcttctggttaagaacactgtagattccaccaagagcttgttcaggagcctgtatttcaaccaggtagacaggctcaagaagcctgggtttggcagtaatctgggaagcatagaagactctcctggcagta

SEQ ID NO: 223683 - DNA, 539 bp, Glycine max
ttatcctaagtctttgggaatattgctgcaatggcttcaagtcaggaggaggtgacccttttgggagctactggaagcccatttgtgtgcagggttcatattgccctcaagttgaagggagttgaatacaaatatgtcgaagaaaatttgaggaacaagagtgaactgcttctcaaatccaacccagttcacaagaaggttccagtgtttattcacaatgagaagcccatagcagagtctcttgtgattgttgaatacattgatgagacatggaagaacaaccccatcttgccttctgatccttaccaaagagccttggctcgtttctggtccaaattcattgatgataaggtttttggtgctgcatggaaatccgttttcacagctgatgagaaagagcgtgagaagaatgttgaggaagcaattgaggctctgcagtttcttgagaatgagataaaggacaagaagttctttggaggagaggagattgggttggtagatattgctgctgtctacatagcattttgggtccctatggt

SEQ ID NO: 223684 - DNA, 468 bp, Glycine max
ggaaaaatagaaagaagctttatttttattttttgaaataccaaatgtcaaaaacaacctaggatttcaaagggcgaaatcctagattccaacttaaaagccttatttcgaaacaaaaccctaattaacaccgatatagttcaatggcaaacaaaacaaggtgtccacaccacacacaattttccccaaagattctgagtctcacacacatgaatctattttaaaacactgaggttttcattgaaccctttaacaaacacctaatcttaagaaatactatgtctcaccccccattataaaatttattttgaaccaaaaaggctttcatagaaacccttcaaaaagggaaaaaccggatctttagggggcagactttctttgccaatgggatggtccaaaaaatcttggctccaattggggagtctaggaaatatcccacttgtgaaaaaccccaaccctgtaattttt

SEQ ID NO: 223685 - DNA, 521 bp, Glycine max
ggaaattaataatactaaatctctaagcctatctctgcatcatgattacccctgtcgttcgacgcatttcagaatgcttcgtcaaaccacatggtttaaccgaaatgtcaaaccaaacatgtcatttaacccaatgggatattgctatgttgtctatgcactatatccagaagggtctactctttaagaaacccaccccacttgttgatccacatgatttcattgggaatctgttgggaaagctcaaacactctctttctctcaccctctcccatttctatccattagccggtcgccttgtcacccaccaaacccaaaaccctccctcttacactgtttccgttgattgcaaaaatagtgatggagccagattcatctatgcaactctggatatgaccatatctgatatcctctccccagttgacatcccactcgttgttcagtcattgtttgaccaccacaaagcactcaaccatgatggccacaccatgcccctgttgtccatccaagtcactgagcta

SEQ ID NO: 223686 - DNA, 471 bp, Glycine max
caatccttaaaaaactattttataaaacatatatttctttcatttgacaaaaactcaacaatcattgcgcaagggagcctagatatttctccgtgggaggagccaaaaatctattgcttagaagataaatgcatcacttcactaataaagatttaacagcgtttaaaatgacagaaataatcatatttgagctgttgaactgccaaatactgcgaacattttaacaaacgagcatcagagattggaaaccgaaacagcattcataaactccctgtctgattcaagagcgctcattatatgtggtaaaaggcccacttccaaatcgatgcttccccctccttcacgacctgggtatgatgtcacttttccatcaaatttgttcgcatattcacttcttgccgccactggttttcccattccaaactcattcccatacatgttgaacctgggtgagctatttattaacacaac

SEQ ID NO: 223687 - DNA, 389 bp, Glycine max
ctagcacctagctaggactcttttctttggttacttaatagtagttcctttttgactatctttcttcaatggctgactcatcctcagcctcagcctcttcttccagaatgtggtgctccatccccgaaaggtttcagctgcatgcggccatgttggccctgcagtttggctatgccggcttccatgttgtctcaagagctgcccttaacatgggcattagcaaacttgttttcccagtctaccgcaacattatcgcttttctcttgctcgttccttttgcctacttcttggaaaagaaggagagacctgccattacattaaacttcctcttacagttctttcttctggctcttgccgggattacagcgaaccaaggtttctacttgctt

SEQ ID NO: 223688 - DNA, 466 bp, Glycine max
gaattattaatttgtaattttttgcatgggtaatttcaaccactttcactctagttaacaaatgtgagtacacggtgtggccgggaattctttccaatgctggtgttcctcctctttccaccacaggcttcgttctccaaaccggcgcgtccactacaatcgccgcacccgcgtcttggggtggccgtttctggggcagaacattatgctcccaggactcaaccagcggcaagttctcctgcgtcaccggcgactgcggctccggcaagctcgagtgctccggaaacggcgccgcgccggctgccaccctggccgagttcaccctggacggcgccggaggactcgatttcttcgatgtaagccttgtcgacggctacaacgtgccgatgctggtggtgccgcaaggggggctccggtggggaagtgcaaacgcgacggggtgcgttgggggacctgaaccgagcgt

SEQ ID NO: 223689 - DNA, 423 bp, Glycine max
ctcgagccgaatcggctcgatgtgatttcagtgagtgatcggtgttcacttgatctcatgataatcgtcagcgtcaattgaagaagatgccgatcagaaacatcgccgtcggaaggcctgaagaggcgactcaccccgacacgttgaaggcggctttggctgagttcatctcaaccttcatcttcgtgttcgccggctcaggctccggcatcgcctacaacaagctcaccgacaacggcgctgccacccctgccggcctcatctccgcctccatcgcccatgcattcgccctcttcgtcgccgtctccgtcggcgccaacatctccggcgggcacgtcaaccccgccgtcaccttcggcgccttcgtcggcggcaacatcaccttcctccgcggcatcgtttacgtcatcgcccagctcctcg

SEQ ID NO: 223690 - DNA, 442 bp, Glycine max
ccccccctctagtagtcagtggtgggaagctgctcgtgggtgtggctgataaagacaacctcgtaaacaaggccagcgattccaccaccgatgagaggcccggcccagtagatccagtggttggtccaggtccagctcacgacagcaggcccaaatgtcacagcggggttcatggccgctccagagaaggccccacccaacaaaatgttagcgccgacaatgaaaccaatggcgatgggagcaataattcccaaattacccttcttggggtcaatggcagttgcgtagaccgtgtacaccagaccgaaggtcatcacgatctccaacaccaaggcgttgccaactccaactccagcggagagtccgaatgctggaacagtggaggcggtgacgaaggccatgaggagggaggcgacgatggagccgaggagctgggcgatga

SEQ ID NO: 223691 - DNA, 550 bp, Glycine max
tgaccctgaacgaaacaggggagcaattctacatttgctccgttggatcacactgttccgctggccagaaactggcaattaacgttaacagagcttcttctaccggtccttcccctgcacctcaacccagaggaagtggttctccaccaagggctagccctgtccccacacaagcaccacaagccagtagccccactcctccaccaaggtctgcaccagcacctgcttttggtccatcctctgaaccagctactttcattgttggagaaaccgctggctggattgttcctggcaacgcttccttttacacagcttgggcctctggcaaaaacttcagggttggagacgtccttgtgttcaactacgcatcaaatacacacaacgtagaggaggttacaaaggccaacttcgatgcttgcagctcaacctctcctattgccactttcaccactccacctgcgagagtgaccctcaacaaatctggtcaacatttcttcatctgtggaattccagggcactgtttgggaggtcaaaagccttgccattaacg

SEQ ID NO: 223692 - DNA, 508 bp, Glycine max
ctcgagccgattcggctcgagaaaagactctcttttctctctctgaactctgaagcaaaacaacattaccagagtggttctagtaattcagtgctgctagaagatggaaactagtgaatggcatatcgagccgaagatctagcttcggctctgaatcccccttagcaagagaggcaggaaatgtgcctgaaactgggtcactctctattgtggtgcttggtgcttctggtgatcttgctaagaagaagacatttcctgcacttttccacctatacctgcagggattcttaccaccagatgaagttcatatttttggctatgcaaggacaaaaatctctgatgatgaattgagaaaccggttgcgcggctatctttgttcaagaaaggtgcttccccccaacagttggggatgtagagaagtttttacagctgatcaaatatgtaagccggctcttatgattctgaggatggcttccgcctgttggataaagagatttcagagcatgaa

SEQ ID NO: 223693 - DNA, 410 bp, Glycine max
actagtaaatggacttcattttccatttattgtgcatttaaaggcaaatcagttacacaaaccgtgccaaacactcttagtctcttatattgttccaaatgcttgatacacatccgtgggagtgcttcaaagggaagaagcctcacaagcttattgtgtattcattagcagctaaaaattcctcatcttattacattagatcactctacaaggtaggagggatccatatgtagccgtgtgtttgaacatagccagctttttcaagtaactgatctgcttctgcaggacctctgcttcctggtttgtaggggagtggcttgaattccccttcatcaattctgtgcagaagtggggtgaagatctgccaggatgccttcaactcatctctgcgaacaaaatgttgctgatca

SEQ ID NO: 223694 - DNA, 393 bp, Glycine max
ggaaaaaaaattatcaatttaaatagtaattgtataataaaagtgaatctaaaattcttacatcatcatatgaatgataatgttgaaataaatatatgtatttgaactgtctaaatgaagaatatattaaaaatctaaagaattactgcatggcaagcttgcggctagtagctggacctacaaaatctggtcaatgccaaagcttcatgcagaaccccgctggcacaactgatgttctcttgctggacaaacattccgagaaggtgtccacaagttgctctgcaagagatgcaggatcttcaagaaatgtatcaatgtatattttcacaatcctaacttcttgaggggtggctcttaagctgtaccaagtcagaaatttctgcctgaagttct

SEQ ID NO: 223695 - DNA, 521 bp, Glycine max
ctctcctattagctccctcagaaaatctctcaagcaatttaattcttagttctatgtatgttatctgagcaaaaccattttctcgcttcataagatcagaagagataactatggcaaagtcatctgagctggccattgaagagctgaagaagcttctcagagacaaggaggaatttgatgccgtggcggctgcaaaagttgaggagcttatagctgagttgcagggatgtggcccgcgtccatatgagcctgctgtgcaaagaatcgtagacggatttactcacttcaagatcaacaatttcgacaagaactcggatctgtacagccaacttgctaatggccaaagccccaagtatctggtgttttcttgttctgactctcgagtgagtgccactactatcctcaacttccaacctggagaagctttcatggtacgcaacattgctaacatggtccctccattaatcagctaaagtacagcggagttggtgcagccattgagtatgctatcacggctctta

SEQ ID NO: 223696 - DNA, 552 bp, Glycine max
aaaatatacttaacataaaatagaagtcatatattatgggtgttctgctagactataacatatctatctaaaactagaattctcatcatcgtttgtttgactcaaatacaaatgacctggcatttgacttaagcacgtacagaaatgcactgagatctagtagggataattcttaaaatacattatttttggaatctcaaaagtagatgctatttatttaggatgtaaaagcacacacatagtacatcacaactttttagtaagaacttgataagctggtagtgagtggcgccaagtttgagtcgcccattactaatgggtacagagaggaatggaaatgggttcagtgatgtgagactcatacttccaaagcttgaattctcctatcacaaaatgatagtaacccccccaacagggctatgtgcttgttccttattcccttttcaacatatggatatggcctcaggttcactagtgagttattcactgactccttttacagaaatcgcatggatctttgaatcctagtcttcgtattctttaaggaccttg

SEQ ID NO: 223697 - DNA, 463 bp, Glycine max
gagaagaaggaaaccccaacccaataatcatactcgtacttgggatgatattggatcatctcaacctcaattttctacaatattaaataaacaatcaccttcattttttttttctcctcttcatttctgatctcatccccatggatccctttgatttaatacgcgaagggtttggttgaggctgactggacatgcgctgttactacttttaaagtctgtttatgctgtagttattttgtccatattttagttaataatgaacttatccaagaaaggacccctaagggatgcaaagctattaagcccaaacaaggcaacaactctgaatccaaatgcagcagagtttgttccttttgccctcagatcatcgtcattatctggaactaccagctcggtagatgcaacagcaaagctttctgctgctggagctcttgggaaagcagtttttgatagatcagaatca

SEQ ID NO: 223698 - DNA, 557 bp, Glycine max
  unsure (1)..(557): unsure at all n locations
gttcttcgggcatatacagatactttaataactaaaatgtccgtgttggtggactttatactgtgtcaaaaaacttgtacacattcttggctggttcaatatatcacaacacgtagtaggcctggctgagtttccatgaagtcaatgccctcttcaagaagaaaacgctgtacagttattggaagtctcgcaggagtgcgagaacccctggtatgatgacctgtccccacaagaatataaacctgcaaacgctgctcggcagctatggcagtgcttttcagcacactcaactcatgtttcagcacatgaatggcttcacttgcgtgcaacccatgtaggtctactatcctctcatttcctcttccattgccctgcacctctggagcaactggatttctctggcgngaaatggattcttgagcttttccatgagcagccttcatatgcatgttgtgcagttgccctttaacacttagttcctttgctagggctttatcaccaattagataggcttgctgtgcctgctcaaaaatgcattacgtaagcatgcatgatcg

SEQ ID NO: 223699 - DNA, 469 bp, Glycine max
ctttcaagaagcatctgagtgtttactattttgtactatatttatatatagtcagtcaagcttctaggatttctgcctgctgcatcaaaatgggaagcaacttgaggtttttgagtctttgcctcttggcattgatttgcatcaactcatgctcaacttcagcttggtttttatgctaacagttgcccaaaagcagagcaaattgttttgaaatttgttcatgaccatatccacaatgctccatcactagcagctgcattaataagaatgcactttcatgactgttttgtaagggggatgtgatgcatcagtccttctgaactcaacaaccaatcaggctgagaagaatgctcctccaaatctcacagtaagaggctttgacttcattgacagaataaagagccttgttgaagctgaatgccctggtgtggtctcttgtgctgatatcctcactttggctgccagagac

SEQ ID NO: 223700 - DNA, 474 bp, Glycine max
gggagcacaaaaaattctgggttttattacaagagcatgatctaccagcaaagttggaaatatgaataacaatagagcccacttattccaacacacattcaacaaccataccataaaggatcacacgtatgtagacagagaccacatggcatagcataactaatcaaaaaacatggcatagcataaataatcaaaccccaaaaaataaatgatacaagattcatccatgaacaagacaagatttttagctatttataaatgcacaaggcttcctgatctctccttctgtccctggcttcacattaattcttcccattttctcgatggagggtgcaaactcagcaaagaaatttttaactgacccttcaagcaattggatgatttgtgcctttgtaactgagttagtcaataatgcagcatctgactcaaatagaccccttctcttaataacgtgactatagtagctaagaacaa

SEQ ID NO: 223701 - DNA, 487 bp, Glycine max
atctccagtgggttcttcttcttctattacaacaacgtcgtccaagaccatgaccatgggcatggccacgatcctgctcctgttcacggtcttcgcgggttcatcggccctagacatgtcgataatctcgtacgacaacgcccacgccgccacgtcgcgcagcgacgaggagctgatgtccatgtacgagcagtggctagtaaagcacggcaaggtgtacaacgcgctcggagagaaggagaagaggttccagatcttcaaggacaacctgcgattcatcgacgaccacaactcccaagaggaccgaacctacaagctcggactgaaccggttcgcggatctcaccaacgaggagtacagggccaagtacttgggaaccaagatcgatcccaaccggaggcttcggaagaccccgagcaaccgatacgcgccacgtgtcggcgacaaactacctgaatcggttgattggaggaaggaaggtgctgtt

SEQ ID NO: 223702 - DNA, 448 bp, Glycine max
ccacattataagcaaatgaaatggccggaatatcgggcaaatccaaataatgctgcattgtcacatagtctacataacctgggaaactaacagcaatcaaaatttgttcgccatttggaattggaatttgaatacaaatacagggcatcaataatataaccctatgtacacagccaatatctgactgaaatttgatacagaatagtatcaatttgtatcataataaaatggcacagagaaatttatgtgaaggtaaaggggaagtgtatcagctggtgttttaattcttcgcctttcatttacttaatcattggctccttcctgcacgttcacatttcctttatctgcttaagcactgctgaccttgttcttacgcccaaaggtccaatggggtttagccggagtacgcctcaatgccttcactccgaatgggttgttcttgcttttg

SEQ ID NO: 223703 - DNA, 562 bp, Glycine max
  unsure (1)..(562): unsure at all n locations
atgaagagcggtcaagaaatctcaaaatcaccatcctcttctaagagaacactaagccagggttcagttgatatatatgctgctcagtgcaaaaattgtttgaaatggagagagattgatacacaggaagagtttgaagagattagaagtaaagtgactgaggaaccttttctttgcagcagaaaggctaatagttcctgtgatgaacctggtgatattgaatatgattccactcggacgtgggtcattgacaagcctaacctcccgaagactccacaaggttttaagaggagcttggtgcttagaaaagactactccaaattggacgcttactacatcacacctgcaggcaaaaaactgagaacccgcaatgagattgctgcgtttctaaaagataatccacaattcaaaggtgtgtctgcttcggattntgatttttcttccccaaagataatgcaagacaccatcccagagattattgagcagaaggattctgctaacaagaaagttaagatagccaaagatgaggtttgagaaataccatctctagtttgcatgctgc

SEQ ID NO: 223704 - DNA, 572 bp, Glycine max
ctacaacctcagcaccgaggtgctctgcaccaagatctcgctctgcgacgccctcatcgtgcgcagcggcaccaaggtctcgcgcgaggtcttcgagtcctctgccggcaggttgaaggtcgtcggaagagccggcgtcggaatcgataatgtggatctggctgccgccaccgagcacggctgcttggtcgtcaatgcgcccaccgccaacaccgtcgccgccgctgagcacggaatcgcgctccttgcagccatggccaggaacgtcgctcaggccgatgcgtccgtcaaagccgggaaatggcagaggaataaatatgttggagtttccttggttgggaaaacacttgcggtgttgggatttgggaaggttggttctgaagttgctcgtcgtgccaagggacttggtatgaatgtcattgcgcatgacccgtatgctcctgcagaccgtgctagggccattggtgtggagcttgtgaactttgacgaggccattgccactgcggatttcatctctctacatatgcctcttacggctgctacatcaaagatactcaatgacgagacatttg

SEQ ID NO: 223705 - DNA, 461 bp, Glycine max
gaacaagcaacaactcaataaaccaggcacattattccttttattatccccccaaattactgctacacgttggatgataatgcatcaaaaccgggcacatctggcaaccatgcccaatccaaattacaaaacaaaagggaaaaaaaataatatgagcaaccatttcatcttacaatttaaggaaaacgaactcttccacagcaggaatgtctccaatcttcttcaaagattccttgctaggttgttcgtccactccaattgccataacagcttgcttgcgtggagcgatccttcccacactcatgaagctgacattcacgttctcctcacccaaaacgctcccaacctttccgatcatgcctggttgatctacctgcctacacagtatgatactaccttccaaactcacatcaacattaaaagacccaacctttgttagatgggggatgccatctttcacc

SEQ ID NO: 223706 - DNA, 544 bp, Glycine max
  unsure (1)..(544): unsure at all n locations
ctagaaacttcaaagccgaatgtcttttgggtgagggaggctttggcagagtatacaaggggcgtttggaaaatattaatcagattgtcgcaattaaacaacttgaccgaaatggactacaagggaataaaaaaattccttgttgaagtgttgatgttaagtcttcttcaccaccctaaccttgtcaacctgattggttattgtgctgatggggatcaaaggcttctagtttatgaatttatgtctttaggatccttggaagaccacttacatgatatttctcctggcaagaaagaacttgactggaacacaaggatgaaaatagctgctggggctgcaagaggattggaatatttgcatgacaaagctaatcctcctgtcatataccgagatttaaagtgctccaacattttgcttggtgaaggatatcatccaaagttatctgattttggtctggccaaacttggtccagtggnggaaaacacccatgtatcaacaagggttatgggaacctatggatattgtgcttcagagtatgcaatga

SEQ ID NO: 223707 - DNA, 521 bp, Glycine max
  unsure (1)..(521): unsure at all n locations
caaacactcacactctctctttctttcttcctgctgctacaatatggagcctctctcttccaccaaacacaacaacaatctctccaagccttcctccctccacacggaggctccgccgccggaggccagtcccctccggaagatcatggtggtggcctccatcgccgccggggtgcaattcgggtgggccctacagctctctctacttaccccttacgtccaactgctggggattccccacacttgggccgccttcatctggctctgcggcccaatctccggcatgctcgtccagcccatcgtgggataccacagcgaccgctgcacctcccgcttcggccgccgccgccccttcatcgccgccggctccctcgccgtcgccatcgccgtcttccttatcggctacgccgccgacctcggccacatgttcggcgactccctagccaaaaaaacccgcccccgcgccatcgncatcttngttgtcggcttctggatcctcgacgtcgcaacaacatgctaca

SEQ ID NO: 223708 - DNA, 519 bp, Glycine max
gccaccgcacccaccacgaactctggcaagttaccacctccaaatagagcatccgatggtccacttatcacagacaccaccatctgtggtatgacaattgcaagattgagcactcccagagacaaaccttggcctgcccctgaggtgctggagaatattgatgctagagcaaagggtatgctgtaagtaatcgcgagtgggattccgaggagagagaagagagccaacgcgccggctttgacggcggcgggaggaggcaggggttcctggtgggcgttggggagtagggtgtattgtcgagaatgttgggccatcttagtaaccaaaaccgtcatggccaaacaaaccgcgagcaagaagttaacaatcccccacagccttttgacgccctcaaccccacgcgccagcactttcactcccaacgacgtcgcaccaagcacaacagagttcaacatcagccccaacgcacccgcacggacacccctatcgtacgccttcctttccctactgtcccttcgt

SEQ ID NO: 223709 - DNA, 506 bp, Glycine max
gcaaaagagcgtcgtagtcgcaaccctaatcagaagaagcgcagcttcaagcgagtgacagccaccagccatgggtcgtatgcacagccgcggtaagggtatatcctcttctgctttgccctacaaaaagacaccctcctagctggctcaagatctcttcgcaagatgtcgaagaaaatatctgcaagtttgcgaagaaaggtttgaccccgtctcagattggtgtcattctcagagattctcacggtattgctcaggtcaatagcgtcactggcagcaaaatccttcgcatcctcaaagctcacggacttgcgcctgaaattccagaggacctgtaccatttgattaagaaggcagtttcaattaggaagcatcttgagaggaacaggaaggacaaggactccaagttcaggttgattcttgttgagagcagaatccaccgacttgctcgctattacaagaagactaagaagctcccaccagtctggaagtacgaatcaacaact

SEQ ID NO: 223710 - DNA, 419 bp, Glycine max
gtgcctaatcagaagcatgagatcgcagtcgcagcgtgtggtgcaggaacaagaagaagcagagtgtgtcggcgacagcatgcgacagagttgttgggccaacatgccccaagagcttctccgagagggtcctttttataatcgaggcctccgaggacgcgtggccgccgcggaagagcgttgtcgcctgcgccggcgtttgccgcagctggagacaaatcaccatagacattgtcaaaacacccgaactctccttcaagatcaccttccccatttctgttaaacagcctggcccaagggagaatctcctacgatgctttataaagcgcaaccgttccagccaaacatactatttgtatctcagtttaaccaatacactagctgaagatgggaaagtttcttcttgctgcacgcaaatg

SEQ ID NO: 223711 - DNA, 493 bp, Glycine max
ccattttcaagctctcaacgccatcttcagctgcttccttatcagaagcgcttcgccccagagattctcgcttcctctccttcaatccttcttccaacgctattaattacaaaattaacctctccgcttcccttccgatccattcactccctccctcttaaaacctccttgcggatcaaatgctcccaaacagatgggaatggaagtcctgcaaagaggacagtgcttcatgatctttatgagaaagaagggcagagtccatggtatgataatctctgcagacctgttacagaccttcttcctcttatagcaagtggtgtcagaggcgtcactagcaaccctgcgatttttcagaaagctatctcatcatcgaatgcttacaatgatcagttcagggaacttgtgcaagcagggaaagacattgaaagtgcatattgggaacttgtagtgaaggatattcaagatgcttgcaaattatttgaaccaatctatg

SEQ ID NO: 223712 - DNA, 457 bp, Glycine max
cactactctgtcttttggctaactacctcacatggctctcctccacaagctcgcgccttggacctctctctacaccaataccccccattccccaccaccccgccgccacgtcatcatctccttctccgtctcacccttcaccgagaagcactccacagagcgctaccagagggaccaatgggtctaccagagcaccactcaagagggtcaacctcaaacgacgccgtttcctcctctcccgtgcgattcagcgtccttaagagacgacgacatagcgttgcagctgccagagctgaagaagctgcttcaggttctgagggagaagagggagtgtatcaatggagagggttgtgagccggggaatgtgttcttggtgggaacgggacctggggaccctgagcttctcactctcaaggctgtgagagtcatcaagagcgctgatcttttgctctatgac

SEQ ID NO: 223713 - DNA, 453 bp, Glycine max
aacaaataaatatttaatcatttgcattaaacaattaatacgtaacttaagttcatacaccaataggaatatacaccataaataacactttcaaggcactcaacaagaaattcacaaagacgcatgtcccaacttatataattcatgtcaatctttatttatttcgctttcttgtctgagtgttccttttccattttttcaaagaggcttccatcataaacagctcgaatagtctctttgtgcagtaaaccatccttgtctttgccaagaacatataggatcttccactccgtgtagctagcaagccatccagcgtaatccttaggaactctatttgccacaagcatccccatcaattcatcagatgttaaagaatttgggtgtgttcgagcatgcttgctgaaaatttcttcaaattttgaaagaacaaaccttccttcactatcgtagaca

SEQ ID NO: 223714 - DNA, 501 bp, Glycine max
ctcgagccgattcggctcgagtcttgttgttggaaagaaaccctagcaagcggaacaatggcagacgttgaggtcgatgtggcggctgcagcagcagcagggcagccgaagaagagaacgttcaagaagttcagtttcaggggcgtggatctcgatgcgcttctggacatgtccaccgatgaactcgtgaagatgttcagtgctcgcgcacgtagaaggttccagagaggcctcaccagaaagcccatggccttgatcaagaagcttcgcaaagcgaaaagagaagctccaccaggtgagaagccagaacctgtccgcacccacctccgcaacatgattattgtgcctgagatgattggtagcattattggagtgtacaatggcaagacctttaatcaggttgaaatcaaacctgagatgattgggcattatctggcagagttttctattttatacaaacccgttaagcacgggagacctggtattggggctactcactca

SEQ ID NO: 223715 - DNA, 423 bp, Glycine max
gaacgaaattccattctatccattaacacgttcaaatagcatggagaatcggcctttgattccatcaagtcccaaattcgtttaaataccatttcaacaaaataaaactaacttcaaaagattaaacagaaaaatcttgatactatggaattaagtcatgataaaccatacgtccaaaatcatagataggcaactcaaaatcaaatgcgcaacaacaaacaaaatctcttataggagttgaaattttcttcagaaccactacaaactaaaatgtagcttcccagtaacagttttcacttaagaggaataaacctggatgagtgagtagcaccaataccaggtctcccgtgcttaacgggtttgtatgaaatagaaaactctgccagataatgcccaatcatctcaagtttgatttcaacctga

SEQ ID NO: 223716 - DNA, 546 bp, Glycine max
  unsure (1)..(546): unsure at all n locations
agaaaacagaacaaaacaaaatggaagacacactttctgcgttgaggtctttgatggttgctcactctccgccgctggatgccttagtggtgccctctgaagattatcacctgagcgaatatgtgtctgcacgagacaagcgccgcgaattcgtttccggcttcactggaagtgccggcttggcacttataacaaagaaagaagcactgctgtggacggatggacggtattttttgcaggctgagaaagaacttagtgctgggtggaagctaatgcgaattggtgaagatcctgctgtagatatctggatggccgataatttgccaaaagaagcatccgttggggttgatccctggtgcatttcaattgatactgctcaaagatgggagcgtgcttttgccgaaaaacagcagaagctggttccaacctcaaaaaatttggtggatgaagtttggataaatcgcccaccggcagagataaatgcttgtattgtacatcctgtgaaatttgcaggtcgctctgntgcagataaagtgaaagatttga

SEQ ID NO: 223717 - DNA, 451 bp, Glycine max
atgatgcagcagaatattgatatattatatatgctgtgcatagtaatttgaaggaataaccattcccaatgatatctaaaatctagattacagtattatggatacggaagacactaaaattacgctgaaccatctttaagttatttaacttttcaactccaaacacagctcatgcacctacaggttcagtggctttcttcagccatgcattttcaacttcatccaaatatggcgccagaatattcctacatgtggcgtgataggagttcagccaatttatctcctcgggacttagaaggttcaggtcaatcaacttcgtctgatatggtgcccaggtaatgtgttcaaaagataagtaacctctatcaccaaaattgaaagttgtatcagcctccttgacaataagcacattctccaatcttatcccaaactctccatcctcatagtaacc

SEQ ID NO: 223718 - DNA, 586 bp, Glycine max
ctcgatcaaacacaaaatggaaaagattgtggggattctcgccattgacatctacttgcgtcccgcttgcgttcagcaggaagcattggagactcatgatggtgccagtaaagggaagtataccattggacttgggccaagactgcatgtcattctgtaccgaagtagaagatgtcatctcaatgagtttgacagtggttacttctcttcttgagaagtatgggattgatcctaaacaaatcggtcgtctggaagttggaagcgagaccgtgatagacaaaagcaaatccatcaagacattcctgatgcagatcttcgagaaatatggaaatactgacattgagggtgttgattcaactaatgcatgctatggaggaactgctgctctgtttaattgtgtcaattgggtggagagcaattcatgggatggacgctatggacttgttgtctgcactgacagtgcagtctatgctgaaggacctgcccgacctactggaggagctgctgctattgccatgctaaatggtcctgatgctcccatttcttttgaaaagcaaatgagaagaagtcatatgtctcatgttta

SEQ ID NO: 223719 - DNA, 495 bp, Glycine max
gtgtgtacaagacttttactagagtaactagctacatcttaaaagagtacaataaaatgtttgaatcgataacacttgccaccccagaaacaatttaccaacagaacttcgcaaataacaatacccttcctcattctaggcgaagttgactgctgattgtacatgctcaacatcagtggccattagcaacgccattagcaatcacaccgttctcagcgtgagtcaaactgctttctttagttttctttgaatagaatctccgatacatggagtcaacttcagtgagatagaatgtgcccggagataaaaggctactgtccttgcttgtcacaaattccttcgcaccatatctatgctccattaacttcaagttttcaacaaactcctccgggggaaactcatgtcttgacttcaattttccatcgacattcatcactctagccatgtttgacaagctaaacggatgttgactgtctcgtaattgcaaagaaaaca

SEQ ID NO: 223720 - DNA, 509 bp, Glycine max
tagtaattaacctcactcaaactcgggttcacagaaaccaacaacagttcttgcactgaggtttcacgatgttgctggaacttgcacttggtttgtttgtgttagctttgtttctgcacttgcgtcccacaccaagtgcaaaatcaaaagcacttcgccacctcccaaaccctccaagcccaaagcctcgtcttcccttcattggccaccttcacctcttaaaagataaacttctccactatgcactcatcgatctctccaaaaagcatggccccttattctctctctccttcggctccatgccaaccgtcgttgcctccacccctgagttgttcaagctcttcctcaaacccacgaggcaacttccttcaacacaaggttccaaacctctgccataagacgcctcacttacgacaactctgtggccatggttccattccgaccttactggaagttcgtgaggaagctcatcatgaacgaccttctcaacgccaccaccgtcaacaagc

SEQ ID NO: 223721 - DNA, 460 bp, Glycine max
gtgcatgtatgtaaccttaattacttgattaagtaccagtcacaccttattgaaatgatgattatgaatacataaaaagcaactgcgatggcaagacactactattgtatatgatgattatcttaattaagaaaggagtttagatgcaacgccgatccttgcaagtggaacacaaacgagactatgtgcccttggaactgtgaggccagctctctcttccatgctaactttggcatcatcacctttcaatatttgtccttgagggcccagcacttgcaggtcaaagcattggataagagatgcaagaagtgttgccattcctgaagtagccaaattgacaccagggcacattctccttccagacccaaatgggaggagttggaaatgctggcccctacgatcaagaggccctgctttcccttcagcacagtttctaagaacctttcgggacggaattctg

SEQ ID NO: 223722 - DNA, 565 bp, Glycine max
  unsure (1)..(565): unsure at all n locations
cagtttcttcctcgcttttctgcaaaatcatctaaatccgtttctgatcctgaatcatcagtttttcccttgaaagatgggaggtggcaaggacaaacacaatgaagaagagaaaggagttttctcacatcttggctcatggagtagctcaagctgctcatggttaccctccaggggcataccctccacctcctggggcataccctccttaccaagggtacccacctgctcatggctaccctccacaaggtggctatcctccggctggttatccccctgctggctatcctcctgctgctggtggttacccccctgctggttaccctccacatggttatcctggatcatctgctccacatggatctcatgcgcctgggcacggcggtatgggggcattgcttgctggtggtgctgctgcggcagcagctgcgtatggggctcaccatgtttcccatggccaccatggatatggtgcatatggaggatattgacacatgcnccatgggaaattcaaacatcatggcaagttcaagcatggaaagttcgcaagcatgggaaatttaag

SEQ ID NO: 223723 - DNA, 388 bp, Glycine max
caaacaaagtagagtttattataaaagcaatgtgcagcagcatccaaaatcgcggtttgtatgtacagaaaattaatataatatcatcacttccacttcttgaacatacccttgccaaacttcccatgcttaaatttcccatgcttgccgaactttccatgcttgaacttgccatgatgtttgaatttcccatggggcatgtgtccatatcctccatatgcaccatatccatggtggccatgggaaacatggtgagccccatacgcagctgctgccgcagcagcaccaccagcaagcaatgcccccataccgccgtgcccaggcgcatgagatccatgtggggcagatgatccaggataaccatgtggagggtaaccagcaggggggt

SEQ ID NO: 223724 - DNA, 571 bp, Glycine max
  unsure (1)..(571): unsure at all n locations
ctcctcctccctctctcttccaaacacacatcctcaaccatggcagcaccatcttcagagacaaagtcaccatcatcctcgaacacgcagcttccgctgaaaccaatcccaggcagctacggaatgccggtttttgggagcaataagcgacagacacaactacttctaccaccaaggacgcgacaagttcttcgcgacgaggattgaaaaacacaactccaccgtgatccgaaccaacatgcctccggggcccttcatctcctcggaccctcgtgtcgtcgcgttgttggacggtgcctccttcccgatcctcttcgacaacgacaaggtcgagaagctcaacgttctcgacggcaccttcatgccttccaccaagttcaccggcgggttccgcgtctgcgcctacctcgacaccaccgaacccaaccacgcactcatcaaacagttcttccttaacgtcctcgccaagcgaaaagactcttttgtccctctgttccgaaactgccntcaggagtcgttcgcggagattgaggaccagttgagtaaaaacaccaaagcggacttcaacact

SEQ ID NO: 223725 - DNA, 751 bp, Glycine max
  unsure (1)..(751): unsure at all n locations
natggcatgtacttgnagtctgtcntcaggaaacagccccacggagattaanttttcccgcggtacagacngacggcgntcagcgtacgtncgcgcngagcnccgcnccctttnntttnnttttatatctcttnctattatgtttatactttatttttgttatatatttatactatctttgtttattagatgcgtatattttggatggataatgtctttatattgctaaacatccatagcgattgtcctacacacaactctctgctgtgattattagaaaacccctattcctctattattacaggcgctgctaacaaggaagcaatgagctacgcagcttctcattgtaccttaatccactgttggctgaaacccaaccataataataatataaagcacaaacttcaaaggaacgaatgatttttgctcaagcatcatcaagagcaaggacaccagggagttgctttccctcaagaagctctaagctggcaccaccaccagtggagatgtggctcatcttgtctgcaagtccaaccttctccacaacggcaacggagtcacctcctaccatgatgggtgtcactcccttcccactcagctctggcagtgtcttggctatagcctatggtcctgtggcaaacctataaaacttaaaaacacccattggtccattccaaataaatggctgagccgtatccaatgcttcaccaaatgtcttgattgaatcaggaccaatatccaaccccatcca

SEQ ID NO: 223726 - DNA, 327 bp, Glycine max
atgttttttttttttttttttttaaacagtataatcttgattttatagaatcaagtcatgataagctcatgtttagaacatatatagacaactcgatccaatgcgcaacaacaaacaaaatctctgattggagtcgaagggtttttttataacccttacaaattaagatgtagctttcccaaaaacagttttcacttaagaggaataaacctggatgagagagttgcaccaattccagcgctcctgagcttaacgggtttgtttgaaatttaatactcagcatgataatgcccaattattacaggtttgattctaacctgattaaag

SEQ ID NO: 223727 - DNA, 477 bp, Glycine max
aaaatatctctctctcgaaaagctagtttccccaattattgtgtcaactacataagctggttatgagtgctactattactactactactaccttaaactagaacaatgaacaggggaattgaagttctttcttcagcctcatacctccgaagttccaattggctgttccaagaaagcttggggaccaggtggactccacaggagaacaagctctttgagaatgctttggctgtgtttgacaaggacactccggaccggtggctgaaggtggcggacttgattcccggcaagacggtcggcgatgtgatcaaacagtatagggaacttgaagaagatgtgagtgtcattgaatcagggtttattacactttcaaggtacactgctgctgatttctttacattggagtgggtcaacaatcaatgatttgatgggctcaggcaagtttattggggtactggcaaaaggggtgctttcact

SEQ ID NO: 223728 - DNA, 547 bp, Glycine max
gcagtccaaaattcattgtggaaattgcattaagtcaaatgttaattggcacagtctatatatgtggtttttcacatgcacacatacatattcacaatcaaatacaaaaagagcagggaccagaaaactacaatacaaacaattattgttggcccttgtataacaatgatatatatttttttggagcataattgaatgaaccgtgtgtggcaatcacatcaaatctgttgattttcatttagatgccttgtggccctgtcctttgatctgactagcggctggagacatcacacgcaagcggagagcaatttcggtgaatgatggcctgactgctggattgggtgcccaacactgctccattagtgttttccagtcaagatcacaataactggggattgttggccttaatgtgttatatacaatgcctcctatgaatgcaccataatgcatattagcatatggctcatcaccagtaagaatcttccataagacaatgccaaaagagaacacattcaccttttctgagaccttattgctactaccattt

SEQ ID NO: 223729 - DNA, 523 bp, Glycine max
  unsure (1)..(523): unsure at all n locations
ctttccctttcgacttcgaaacgatcctataatactacaaagcaaagcaaccagctaaaaagcaatcacgcccgaaaacgaaagcatctccctctcccctaagcaaacaactgcccttaaccctcaaaaacaagccacccaaacccatccacttcaacccccccccccaaaatcacctccctctctcaccggcattgattctccatggacgaatcagagcaatacccaaaggagtattaccctaacgaccaaaccctccccagaagagtctcctcatcctcgtcctcttccacgacgagcgtccacgtgacagccctagacggcctggtgaacgtgaactccctcttcacgatcgccgtcttcgtgggtctctccctcaccaccccgggccagcgcagcctcgagaaccgctcctcctgcgacgccgacgttgacgtagccaagaagctcctcgtcttcgaagtggtgtccgttagcttctttctcttctcgtcgctggtagcgcangggctgaagctggcgc

SEQ ID NO: 223730 - DNA, 564 bp, Glycine max
caactctgcactgcaaacctcgtcacgttcctctctctctgagctcgatctatcgggctcttcgaattcggttcccgatttccgacccataaaagctagcaagttccttcacttcaatcttcagaaatgccttttcagactcgaaatcaagcgaaagcttgcccaaagatcagagagagtaaagtctgtggatctacatccaacagaaccatggattctagcaagtttgtactctggaactgtctgtatctggaactaccaatctcagaccatggccaagtcttttgaggttactgagttaccagttaggtcagccaagtttattgcacgcaaacagtgggttgttgcaggggcagatgatatgtttattcgtgtatataattacaacacaatggataaagttaaagtatttgaggcacatacagattacattaggtgtgtggcagttcatcctaccctttcatatgtgttgtcatcatctgatgatatgctcataaagccttgggattgggaaaagggctggatctgtacccagatatttgagggacattctcattatgtcat

SEQ ID NO: 223731 - DNA, 463 bp, Glycine max
gctgaggcttacctaggctccacagtgaagaatgctgttgtcaccgtccctgcttacttcaatgattctcagcgtcaagctaccaaagacgctggtgtcattgctggtctaaatgtgatgcgaattatcaatgagcctactgcagctgccattgcatatggtcttgataagaaggccacgagtgttggtgagaagaatgtgttgatttttgaccttggtggtgggacatttgatgtgtctttactcaccattgaggagggtatctttgaggtgaaagccactgctggtgacacccatcttggaggtgaagattttgataacaggatggtgaaccactttgttcaagagttcaagagaaagaacaagaaggacattagtggaaaccccagagcacttataaggttgaggactgcttgtgagagggccaagagaacactttcatcgactgctcagaccaccattg

SEQ ID NO: 223732 - DNA, 427 bp, Glycine max
agaagggaaaaatagtttgaatcccatccaacaaaaatcatgcgattaaaatccaattaaaaaagcataaagtaaaataagtttttaaaacaggtttttggaggaaagcaactacatttagtccacttcctcaatcttggggccagcaccacttccaccagaagggggagcagcatactcatcctctggtggaccagcaccacccacgtttggaccagcaccaccttggtacatcttggcaatgattggattgcagatgctttccaattccttcattttgtcctcaaactcatctgcttttgcaagctggttgctgtctaaccactggattgcttgctcaattgcatcctcaatcttcttcttgtcagccgggtcaagtttctcaccaatcttgtcatccttcacggtgttcctcatgttgtatgca

SEQ ID NO: 223733 - DNA, 474 bp, Glycine max
cctgatttggtggctcttttgtttttttcatatatacaagagcattttgaagttgattagtgtcatctagaaaaggactctcatgttactcaaatgcttagcagcaatcagcagcagctacaccaccacggtcaatttcgcttatagagtgtgcttcctgttccctctccagtcctgccaaaaccaagttcctgccctcactttctagattttctgtcaagcgtttctggttcctttcccaaactcgttcgcacatttccgtgaacaagccctccatgaacctgttgaacagactcgggtttggcagcgcaagagcaccagagaacatggattcatccattcctcagggtgcagatgatgacataccagcaccacgccagcagtttgccgagtctggtgctggctgcttttggggtgttgaagtggcctttcagagggtgcctggtgtgaccaagacagagggtggctacaccc

SEQ ID NO: 223734 - DNA, 504 bp, Glycine max
acaactctacaactgattttatggctatgtccatcttcaacctcaaatacagtgtgcacaagctttgttgatatattaacaaatacaaacaaaactatggactttcaatatctgaagaaccggttgcattgatctttgatggcaattcatttatggcagttaaccatagcaccgaattggatcattgcagcctttagaagcagattgcttgaaaccagatcggccacctttctcaaggtactgctgatggtactcctctgccctgtagaacttcttggcaggaaggatctcagtaacaatcttactgttcaactgcttctgctgttgctccaatgactccttggccgccttctcttgatccggtgtgtagtagtatattccagatctgtactgtgttcccacatcattcccctgtctattcagagtggtgggatcatgtctagcccagaacacgtcaagcagagtcttatagctacaaatttttggatcatattgaacccttac

SEQ ID NO: 223735 - DNA, 540 bp, Glycine max
cacaaactgaacttgttgctttctagtttcgcttcacacttcacacttaacacttaacacttaacgtatccgccaaatctaggggcatattttaccaccacttctctgcaaaagagacccttttgcttctttttcagataatattgggcttagtctgcagcagaagtcgtcgttttcgtgaagctgatgctgaagaaaatgctcaggatgcagaaattgaaagaagaatcgagttagaaacaaaggctgaaaagcatattcagaaacttttactactaggtgctggagagtctgggaagtctacaatatttaagcagataaaacttttgtttcaaactggctttgatgaggctgagctaaaaagctacataccagtcgttcatgctaatgtgtatcagacaataaaagtatgcaatacttgaaaggggtgtgttgattatttttctcttaaaaaagcagagttaaagtgtccactgttcatagtttgaaaaaatgttttatgtgagttgagttccgagagctacccgagaaaactgtaat

SEQ ID NO: 223736 - DNA, 466 bp, Glycine max
aaaggatatgaaatatatcattagtgactttcaatcagggaaaaagataatcacaaagcataatgtcatctctgaaaatttgagcgcaactaattttccttctaaagatggatgtggtgatcaagtaggtattcagaaaggctttccctatccacccaggatttacttgacataaaatcaacaaatcgattttatattggtggatacctgacctctaatatacccaacaaaatcagatgaccttttaatttctcaatggaaaaatatcatatccctcttaaacatacatactgttgcatggtcataataagccagcttcaaagagattcctccgtctcaaagtctcatcaacaagcttgaaagtcttcttcacaagcttttgatcaagggcagccgcctgatagatcttgaacacgcgatctacacagtcaggagcagtgctctggaaatacaattcctcaaactt

SEQ ID NO: 223737 - DNA, 428 bp, Glycine max
  unsure (1)..(428): unsure at all n locations
ctttcgagattntgaaagaaacgaatcctgttgcgtgtcactcccactctcactcaatcagggggccggtggtcttcaattttagggttttctcacagactaaaatccttattcttgggcaccaaagttacgagaccctcccatgctgggtcttggggcaccggctatcctaaccggttttcaacggagctcgaagggtgggtgccatcgtgtggtttgaccaaatctcccgatgagcggtgagtgatagcaccacatgctggttattgctattcatgaagagctgctgcttatgccttcagcaacattgatccatcaaacattacacgtgcgttcctgcgctgtcctcctgaccactattacactccaaaatgtgctctttcgactgcaactgcctacacgacacccataacgcacctgcctattga

SEQ ID NO: 223738 - DNA, 570 bp, Glycine max
  unsure (1)..(570): unsure at all n locations
aaagacanagcgatatttgatagtgagaatgatctataaacatcgaacataatatccaattgttcaaacttcaaagcttaaacataaatagtcaatttagaggaaatgaaattgctgaatgccccataaatgaagaccttcaactggagcttgaatcatcagtttttgctgctgcagatgcataactaacactactatccctgttacttttgcactgactggattgctcatagcgaagaaatttgatttttatctttgttgagcagttccttagcatatgaagaaaaacactaattggatggcgtccacagattgtattgtcatactccaacagatattgcttgaatgaatctggatctcctgtttctatgatatccatgcccatcttgtctaaggcctcaatagattcgtatataggcccatgtttcttgtcatagtgcatgtaattgaatcgagatccccagtgacaaaagtctgatgaaatagagaaaaaagtattggaatcatcaacatatttggcaagaatctgcccatacatagctttattttagcactaacagaccaactaaa

SEQ ID NO: 223739 - DNA, 586 bp, Glycine max
tattattctcctcattcctttatttttatatacctagctccatctccctccactcagcatagcatggcatcagaagcaaatgctgccaacaccaacttctgtgtaaatgttagcaacaatggctacattagtgctaatgaccccttgaactggggtgcggctgcggaggctatggctgggagccacctcgacgaggtcaagcgcatgctagaggagtaccggaggcccgtcgtcaagctcggtggagagaccctgaccatctcgcaggtcgcggcgatcgcggcccacgaccagggggtgaaggtggagctggcggagtcctccagggccggtgttaaggccagcagtgactgggtgatggagagcatgaacaagggcactgacagctacggcgtcaccaccgggttcggtgctacctcccaccggagaaccaaacagggcgctgccttgcagaaggagctaattaggtttttgaatgctggaatatttggcaatggtacagagtccaattgcaccctaccccacacagcaaccagagcagctatgctagtgagaatcaacacactcctccaagctactcaggaat

SEQ ID NO: 223740 - DNA, 530 bp, Glycine max
agcataaagaaacttataagtattatttaagagaaaacatccttcacatggaaggccatgtattgatatttgcacgcaaagctacggcaaacaaatggaattctattacattatgaattacaagttccttgcatggcatacatcaaggaaaactgggaagttgttgtatgtggattgatttgccacagccttatatagacaaaccaaatgcttaatatcaacacaaacacgtgtacagaaaagaaaccactcttcaagaaaacagaaaataagaaaaactaacatattggaagaggtgccccattccactccccaaggcattccaaaagtggatcaatgatcttcccttggcacaaagcagtgaacactttgtcacactcttcacccggtgagataaccctttcaccagttagcaatgctgtccccaactcctctctcacaaacttgtacaaggggtaagacctgcattccttgatcttgtttggaattgcacattggtcattctcatatgcaactcttgcacctttcac

SEQ ID NO: 223741 - DNA, 550 bp, Glycine max
gctaacactcattaattgcattaatgtttcttcgttgcttggtgatgtccctgggtggtggcttcactcttggtcttgcgagagaaagccatgccagagacgaagatttttggcatgctgtttggccaaacactcccattccaagttcattgcgagatcttctaaagcctggccctgcaagtgttgaaatcgatgatcaccctatgcaaattgaagaaacacagtacccgaaaaccttcttctataaagaagaccttcatccaggcaaaacaatgaaagtacaattcagcaagcctccctttcaacaaccatggggtgttggtacatggttaaaggaaattaaagacactactaaagaaggatatagttttgaagagctatgcatcaagaaagaagccattgagggagaagagaagttttgtgcaaaatccttgggaacagtaattggttttgccatttcaaagctgggaaagaacattcaagtactttcaagttcctttgcaataagcaagaccaatacactgtggaaggagtgcagaatcttggagac

SEQ ID NO: 223742 - DNA, 489 bp, Glycine max
cacgagataattattttttaccatatatatatagagagagagagggcgaatttcactgatcacaggatgatgctctctttaagtagggaagcagatcttatcagtacacataggtaggttgaaattctagctctagcaatctagctagagaaggtagtacttgcacaacacacagcacatgataatttattttatacacaatctcattctcatggtgctcaagatgcatggactaattaagcaacaatgttggtctgataggcagtgtccacagataaattgggtacccataaaatggccttgcttccaaggaaatggcaaacagggttagttccaggatcaactcccataagttgatgaagcatttgatgattcattccagaagtatttgagtggcaaatagcaagtgcctgagttttggttccatcaccagccaccaatggaaccatgaaagctgttgtttcacggacttcatggcagtaaaatact

SEQ ID NO: 223743 - DNA, 548 bp, Glycine max
gtactgcgtttcggaagcagacacagtttgctcgtacgaagcaaaccgctcgtaagtccacaggaggaaaggctcctaggaagcagcttgcaaccaaggctgcacgtaagtctgcaccaactactggtggtgtgaagaagccacaccgttatcgtcctggtaccgttgctcttcgtgaaattaggaaataccagaagagtaccgagcttttgatccggaagctcccctttcagaggctggttcgtgaaattgctcaggacttcaagactgatctgcgtttccagagccacgccgtgcttgcattgcaagaagctgctgaggcataccttgttgggctctttgaggacactaacctgtgtgccattcacgccaagcgtgtaaccattatgcccaatgatattcagctggcaagaaggattcctggtgagcgtgcttgagttggtggttggaaagatgaaatgattggtggctgcggctggtgtttttgtttttcagattcctttttttattcaatagatggcgttgttagggagggtaggttttctgct

SEQ ID NO: 223744 - DNA, 551 bp, Glycine max
cgattaacgctcttttcttttatgtaggtaatccataaataatgtacggtgaacaagtaaataagaaacccagtaaccaaactgggatggaaatcccgagtaagaacgaggcaacccaacaaactaacttaaacgagattagatggcaactgaatgttgtccaatacagtttctaaagtggctgcaacatcccgcaggtaaaaactaaaacagaagcattctaacacatacatatgtccaaaaatcaattacaagccaattttcttaaaggaagaaaacacagtcacggacactcggcagtatttgcctatatcccaattaatgctactaccagcagaaaacctaccctccctaacaaccccatctattgaataaaaaaaggaatctgaaaaacaaaaacaccaaccgcagccaccaatcatcttcatctttccaaccaccaacttaagcacgctcaccacgaatccttcttgccagctgaatatccttgggcataatggttacacgcttggcgtgaatggcacacagtgtagtgtcctcaaagagccaac

SEQ ID NO: 223745 - DNA, 556 bp, Glycine max
ctaatccctcactcttgttcttcagtcttcttctattatccgccaccgtagccgccgcggaacggatcgacgatgaagacgaccttctgatccgtcaagtggtgccggatgcggaggaccaccacctgctcaacgcggagcaccacttctccgccttcaagacaaagttcggcaagacctacgccacgcaggaggagcacgaccaccgcttccgtatcttcaagaacaacttgctccgcgccaagtcacaccagaaattggatccctccgccgtccacggcgtcaccaggttctccgatctcactccggcggagtttcgccgccagttcctcggcctgaagccgctccgccttccctctgacgctcagaaggctccgatcctaccgaccaacgacctccctaccgatttcgattggcgcgaacatggagccgttactggagtaaaaaatcagggttcgtgcggatcgtgttggtcctttagcgccgttggagcgttggaaggtgctcattttctttctacaggtgagcttgtgagccttagcgagcaacaacttgt

SEQ ID NO: 223746 - DNA, 507 bp, Glycine max
aagaaagaaaaaaaaaacagcgccctatatttgctcttctttgcttcggaagaaagagaaaaacaaataacaatggcgttcgcttctttcctcggcagagttctcttcgcttccgtcttcatactctctggttacccaagaattaaacgaatttggagttgatgggggacctgcagcaaaagcactcagacctaagtttgatgcctttacacatcgagtgcattctcaagttggctttcaacttcctgagattgatctgaaatttttaattgctggggctattgctctgaagggccttggaggggttcttttcatatttggcagctcttttggagctttgcttctgctcctgcaccagctgattgctaccccaatccattatgatttttacaattatgacagtgaggacaaagaatttactcaactgttcatcaaatttacacagaacatggctcttttcggggctctattgtttttcattggcatgaaaaactccatccctagaag

SEQ ID NO: 223747 - DNA, 422 bp, Glycine max
atgcgcaaaggcttctcatccttttgttttcctttttgaaagacaagtttagcaattgaaagatagtttctaacgccatgataacagatcatacaaaaataataatagccaataatttaatccaagtgaagccaaaactaccaagctcaaagggaggaagattgattctgaaccagagagtactcaaccaaaatcctggcagattggagaggatatgatgaagaaccaggaaacaacagcccccaatgaaaggggtccaatgctgcaaaaactaataggtttttgtctttggagccttcttgggtacccttctagggatggagtttttcatgccaatgaaaaacaatagagccccgaaaagagccatgttctgtgtaaatttgatgaacagttgagtaaattctttgtcctcactgtcataa

SEQ ID NO: 223748 - DNA, 523 bp, Glycine max
tctccttctcgctctttcagctttgacttttgttggaaactaaggcctaatcaaaatggtgaagttcacagctgaagagctacgtcgtattatggactataagcataatatccgtaatatgtctgcattgctcatgttgatcacggaaaatcaaccctcactgattctcttgtggctgctgctggtattattgctcaagaagttgccggtgatgtccgtatgactgatacccgtgcagatgaagctgagcgtggtattaccatcaagtctacaggtatctcactctactatgaaatgactgatgaagctctcaagagttttaagggagagcgcaatgggaatgagtatcttatcaatctcattgactcccctgggcacgttgacttctcatccgaggttactgctgcactccgtattactgatggagctctagttgtggtcgattgtgtggaaggagtttgtgtccaaactgaaactgtgctaagacaagcccttggagaaaggattacgccttgtctgactg

SEQ ID NO: 223749 - DNA, 554 bp, Glycine max
cctattagagcaataatacatcgatgcaaggaccaaataacagcattacaacattcacgggcaaaaccacaaacaaaactaacagaaattaaatctaaagtagcattgttcacaagagaaaataaattcgactaagttcaaagtaaaataattcatgaaacaaatttaaagcttgtcttcaaactcggagagaggagtcatctgttccttcaagcccttcctcttgcgaatgtcagtggaaagctgtgcagcttgtgatccagcctccaatgggtcagaagacatcatgtcccagtgatcaaacacacattgtgggaaggcctggcctgatgttgcagccctcaatgtgctcgagaaaccaaaggactcgatgacagggaggtatgccttgatgttgtatagtggggtacctggcctctgcatttcctcgaacacgtgtccacgcttctggttaagaacactgtagattccaccaagagcttgttcaggagcctgtattttaaccaggtagacaggctcaagaagcctgggtttggcagtaatctgagaagcat

SEQ ID NO: 223750 - DNA, 459 bp, Glycine max
tttcactggaaggagaacaagattaattaaccgacacaaagatctagtcctagctagagtcaaacaggggcgatctcaccttcaagaacacatcgccatggcaaggaacttgcttcttgtgctttttgcagtagccaccctccttcatggctcagcagcccaaaccagacacatggtcggtgatgccacgggctggatcatccctgctggcggcgctgccacctacaccgcctgggcttccaacaaaaccttcaccgtaaacgacactctcgtgttcaacttcgccaccggccaacacaacgtggccaaggtaacgaaatcggctttcgacgcgtgcaacggcgggagcgccgttttcaccctgacctccggtccagcgaccgtgaccctgaacgaaacaggggagcaatactacatttgctccgttggatcacacttgttcgctggccagaaactggc

SEQ ID NO: 223751 - DNA, 527 bp, Glycine max
ttatcctaagtctttgggaatagtgcttcaatggcttcaagtcaggaggaggtgacccttttgggagctactggaagcccatttgtgtgcagggttcatattgccctcaagttgaagggagttgaatacaaatatgtcgaagaaaatttgaggaacaagagtgaactgcttctcaaatccaacccagttcacaagaaggttccagtgtttattcacaatgagaagcccatagcagagtctcttgtgattgttgaatacattgatgagacatggaagaacaaccccatcttgccttctgatccttaccaaagagccttggctcgtttctggtccaaattcattgatgataaggtttttggtgctgcatggaaatccgttttcacagctgatgagaaagagcgtgagaagaatgttgaggaagcaattgaggctctgcagtttcttgagaatgagatacaggacaagatgttctttggaggagaggagattgcgttggtagatattgctgctgtctacattagcatttg

SEQ ID NO: 223752 - DNA, 449 bp, Glycine max
gaaaaatggaaagatgctatatatttattctttgaaaaaccaaatgtcaaaaacaaccttggatttcaaagggagaaatcctagattacaacttataagcctttttttgaaacaaaatcctaattaacagcgatttagctcaatgacaaacaaaacaagttgtcccccccacacccaattttccccaaagattttgggtctcacatacctgaatctattttgaagccggggggcttttatagaagcctttaacaaacacataatttttaaaaatacttagtctcaccccacattatcaaattttttttgaaccaaaaaggcttttttagagacccttgaaaaagggaaaaacaggatctttagggggcagactttttttgacaattggatgggtcaaaaattcttggctccaattggggagcttaagaaatttttcacttgggaaaaac

SEQ ID NO: 223753 - DNA, 468 bp, Glycine max
agaacggaaaaatatgatattattttcttgaaataaacgttgtaaggtgtccaaacgagggtcatcccactaaagtgaagtgtgatcaacccttggtttttaccagcacgactcaaattgatgtgaaatttctttctaatctggatagatatattggcattgcattagttattggtaatttacaagggggtaccctaaaataaactccccatctactgaatgcctcataatttacgacgatgggctaccaatggatgggatccactcatttccttgattgaagttctgcactgaatacgttcacacgtgttcagcagggatcttgctactacagggcactctttgatacagatcagagctagtaccttcgatctaaaactcacaataatgaagagttttgtgagcaaagccaccgcttcttggcatacaaccttggggggtcacaaggacctcctcgaactaaatgat

SEQ ID NO: 223754 - DNA, 497 bp, Glycine max
gcagaagaaggcaaagatagtggcagatctccaagctgtgaagcacaacagtggcaagtgctacaatcagttagcggaggagactggactcaccaacgtctatgttgctcagcttctcaggagacaggctcagcttcaatccccaaactgcccctctacttcgggcagcgctgcccgacctgccccaagaccttgtttctgagatgatgagaccccctttgaggtcttatgaccctaatctcatccaagaccccactgtctataggttgaatgaagctgttatgcattttggggagagcatcaaagaaataatcaatgaggagtttggtgatgggatcatgtcagcaatagatttctactgctcggttgataaaattaaaggagtagatgggaaggatcgtgtggtattgacatttgatgggaaatatttgccacattcagaacagaaatctgagcacatggtttcaagaaccaggccactgggaaaacagtgagta

SEQ ID NO: 223755 - DNA, 554 bp, Glycine max
ggataaaatgaatattattatgtttatttgacttgctcaaccaagcgcgaatacaagcttctccatcttataattaactggcattaaaatacatggtgcaagtgtcatgaaatatccaaagccataaaacattgtataaatatgcatggccaactactttttattatttataaatcttaaacacttttatttttctcttccaatgtttttctatagacaacacaaaatagcactgatcaaatacaacttgtggttgttacagatcaatgataattcatgtgcaggtagactggtgttgaagattgcgtagttggtcctccaatgaagatactcactgttttcccagtggccttgttcttgaaaccatgtgctcagatttctgatctgaatgtggcaaatatttcccatcaaatgtcaataccacacgaaccttcccatctacttctttaattttatcaaccgagcagtaaaaatctattgctgacatgaacccatcaacaaactcctcattgaatatttctttgagctcttcccaaaatgcataacagcttcat

SEQ ID NO: 223756 - DNA, 440 bp, Glycine max
gtttccaaactcctctgcccttaaatggtgcctgtgatcggaatgggatctggccctgacttcacatgcaagaaagacactaaagaggctattattgaggccgtgaaacagggttacagacacttcaacaccgctgctgcctatggctctgaacaggctctcggtgaagctctcaaggaagctatccaccttggcctagtcacccggcaagacctctttgtcacttccaagctttgggtcaccgaaaatcattctcatcttgtcgttccagctttgcgcaaatcacttaaaactcttcaacttgagtacttggacttatatctcatccactggcccctcagttcttaggcagggaagatctccctttcctattgagggagaagatcttttgcctttcatgtgaagggggtgtgggaatccatggaagagtgccagaaact

SEQ ID NO: 223757 - DNA, 424 bp, Glycine max
aaaataagaagtggtatcaattatttaaacctcaaatcaaacaagtggacgaaggcaaagaaaagaaagaaattaacatacatggattataaaatagagcacgaggcacattagtttatatttcatcatcccagagatcagtgacttggggcttggtgggtccgctgatcaaacggctctgatatatttcatctattttgtgatgatcttcttctgtcaatgcccagtcaaagatctgcagattctggttcatcctctccttatcgtagctctttggcacaaatgtcacaccttgttcgtacaaccatctcagactcacctgggctatggatttcccatgagcctctgcaatctttttcagcacatcattctccatcacttcatttgggcccttgctcgcacctttcctcagtggagagaacgc

SEQ ID NO: 223758 - DNA, 513 bp, Glycine max
gcatctctcacctttcccttggcgacgccgtgagaaacgaaaagcgaacaaaaaaaaaacagagtggggtgggaggcacacgcacaaacgcagagtcagaatctccaatcttcaatcggagacaaagctagctcgaacgaacgaagtagagtagtgtgctacgaaaaatgtggcggtgcatcgcacgtggtctccgtggacctgcttccaccagatccacctccaatcactcacttggatctcaactttctagattcttctctagtggggcgaactcctcgtacaccgtggtggatcatacttatgatgctgttgtcgtaggagctggtggcgcgggattgagagctgctattggactttcagaacacgggttcaatactgcttgtattaccaagctcttcccaactcgttcacacactgttgcagctcagggtggtataaatgctgctttgggaaatatgactgaagatgactggaggtggcacatgtatgacactgtcaagggggagtgat

SEQ ID NO: 223759 - DNA, 513 bp, Glycine max
acaaacgtgcatatgataaataggcaaaatcttgtcaaaatacaaacagttaatgaaactgtgttgctgggttgctattattctctgctgcaaatacagagtgttatttgaggatgccaggaatatcaatcagcattgatgatgaatgcaacaattatcatcaaaaatcaaaatcacccatctaggaccttttattgcatttttttcctgtcatttaacattgagacaagtctaatccatccattagcaagtatattaatacacccgagccttgggagggaatgattcaacctcatcatccaatacattcaaatgcaccggcctgtagtccaaccggactttctcgttctcccagaatcccacagtgtgtttcatccagctctcatcatctctaaccttgaagtcttcacgggcatgagctcctctactctctttcctagcttcagcagagtacattgtgatgcatgcatttatcaaaagattttccaattcaatagtctcaatcaaagtcga

SEQ ID NO: 223760 - DNA, 451 bp, Glycine max
aataaaaataaatatttattttatttttacgagaaaaaaaacttgatatatacaagcaagaataaggggagggagagttggatcagtagggaacctaaattaaacttttttttatctcaagtgaaattgtcaacaaattctactaatatgtgaaaaaatttggagaggatggtgagggttggaaaaaggggaaagaaaacctatgatgatataatacaatagagagaggcagaaccaatgatgggatttccacatcaatagttggtgatataagaatagcctaagcaagaaatgctatacagagagagagctttacatgaaatagctcagagatctcatttttcttgatcctccttctccatagaggtcattccattggagtagctcattcatatttgttgactctgatgacacgcttgcacacacctgctcatgtgcatatctaaaatca

SEQ ID NO: 223761 - DNA, 526 bp, Glycine max
aggataatgaaatttatacagattatttatcattagggtagctccgctgaatttagttggtaaacgtgtaaattatttgttttgccgtacaaatggcacactcttacacaaaatataaatgaatatgccagagtgaggttaccttttaactatcttcgatcgagacagtccaacgttaaaaaagctacataacctaccccatcttttaaaaattacataaatgtttattttctgtttttattattttttattttcagaaaacaaattttatttttaaaattttaagatttaaaaaatatgtattgaaaacaaaaaaaaatcttaaaatactactgcatttttacttattcaaacaattcaatccaaacaccaccttattttgtcattggtggaagacagtggtcagacacactttgataagctaaatcaataataacgatatcaacatcaaatcaaacatttacataacattatattaccataaaaaatgaaatgaaattaatctggtcatactctgttctggatc

SEQ ID NO: 223762 - DNA, 511 bp, Glycine max
  unsure (1)..(511): unsure at all n locations
aagggctcaaagcagcagccacagcaatcacaggaggtggtaccaaacttcctcagcctcccccaacagcaacaagggaataccaacaacaacaacatgggagagaacaaacctgcagaggtgaaggatttccagatagtggtagctgagaacaaggaagagagcaagaaacagcagcaacagttggcaccaaagaggagttccaacaaggacaggcacaccaaggttgaaggcaggggaaggaggataaggatgcctgctctctgcgcagccagaatcttccagttgaccagggaattgggtcacaaatctgatggggaaaccatccagtggctcctccagcaggctgagccatccatcatagctgccactgggactggcacaataccagcatctgctcttgctgctgctggaaactcactctcaccacaagctgcttctctttcatcattcttgcaccaacatcaacaaaagattgatgaattgggtgggtcagggnggagtagtagta

SEQ ID NO: 223763 - DNA, 492 bp, Glycine max
gaggatcttatagctaaagggatcctttaatttgaggtgaggaggccaaaggatgagtgggatccaatctcccttaattacacttctggaactacatcaaaccccaagggtgtgatctatagccacagaagtgcctatcttaattctctggctacggttcttcttaacgagatgaggtctatgccggtatatttatggtgtgttcccatgtttcactgcaatggttggtgcctcccttgggccattgctgctcagggtggcactaacgtctgccaaagaagtgtcaccgctgaagggatatttcacaatatttttaggcacaaggttactcacatggggggtgcaccgacagttttaaacatgataatcaattcaccacccaaagtccggaagccgcttccgggaaaggtcgaagtgatgacaggtggtgcaccaccgcctccggatgtgattatcaggatgggagaactgggattcaatgtgactcattca

SEQ ID NO: 223764 - DNA, 448 bp, Glycine max
ctgggtacaagtatgcataattgtctattcatacaaatggacagattttattttataaataaacgaaaataaaaaccttaaagcacataacatcaacaaacattccattaaaatttcagaataaatgtgccttataaccggctagcgttctttttagtcaagcttcccatggcctttgctttctccctaagaacaaatttctgagtcttaccagatgatgtctttggcagatcattaaacaccacagttcgaggggccataaaacgaagcaaacgattctgacaaaattggattatcttatctgaagtggcactgcatccctccttgagcttaacaaatgcacaaaggtgtttttccccaataattattaggttttccaacaacagttgcctcaaaaactgttggatgactaaaaatgactcctttcaactcaattgagctaatattt

SEQ ID NO: 223765 - DNA, 536 bp, Glycine max
aaatagttattgtataataaaagtaaatctaaaattcttacatcatcatatgaatgataatgttgaaataaatatatgtatttgaactgtctaaatgaagaatatattaaaaatctaaagaattactgcatggcaagcttgcggctagtagctggacctacaaaatctggtcaatgccaaagcttcatgcagaaccccgctggcacaactgatgttctcttgctggacaaacattccgagaaggtgtccacaagttgctctgcaagagatgcaggatcttcaagaaatgtatcaatgtatattttcacaatcctaacttcttgaggggtggctcttaagctgtaccaagtcagaaatttctgcctgaagttcttttctatgtgaccttcacactctaaccacctaatcaccttcacataatactcaaaatcacgatccgaaaagccatttgcaacacgggcctcctcttgcctttctccacttttcttcttggatgtgcttacatcttggggaccctcccttttcccggatacatt

SEQ ID NO: 223766 - DNA, 436 bp, Glycine max
  unsure (1)..(436): unsure at all n locations
tatcacacacatagttctcttatctggtgcaagtgcaacaatcaagtactcatcaccatgggaatgttgttgttgttgtcttactctctccttttcctggttctgttccttacactgaaatcccttttccaaagcaagaaaattgagaaacctaccgccaggtcctcctcctcttcccataataggtaaccttaacctcctcgaacaaccaattcaccgtttcttccaacgcatgtccaaagaatatggaaacatcgtttcactctggttcggttcacgtctcgccgttgtcatttcctcaccaacagcataccaagaatgcttcaccaaacacgacgttgccttggccaaccggctaccttctctctcgggaaaatacatattctacaacaacaccaccgtagggtcctgctcccacngncagcactggcggaac

SEQ ID NO: 223767 - DNA, 521 bp, Glycine max
aaaaagtaaaaaatttatttgagaagttggggatgcatacaatattaatatatcctaatgcacaccaattctacaactggccttgtaaacatacaaacaaatactattatgtttaacatgtataaccaccacatgcacactgaaattataagtattagatgttgacccaactttaccaaataaaaatactattaataattaaactccaattttagtggcgagtggacgagccttgcacatggcttccaatggaattaaccttgacaaggtaatccaattattctcggtcatatcaagcttttcctcacttactcgtttccagtcaaaacattgaatcaataatcccaaagtaaagctgacactttgcatagccatgggttctcctgggcaagcccttcttcccattccaaatgctaccaactttttctcctctccttccacatcaaacctctcaggtttaaagcatgtggcatcattccacaaatgaagatctttttgcatgccccaaccattaatgatca

SEQ ID NO: 223768 - DNA, 470 bp, Glycine max
gctatgtgcaatttcctcagaggtttgttggcattgacttgcacgatcgatatgccaatggcaatattgtgttctttgatatcaacatgaaaggtcaggatggtgttcagggcccagtctatgtgggaacctgggtgttgtttcaataggcaggctttgtatggttatgatcctgttttgactgaggaagatttggaacctaacattattgtaaagagttgttggggttctagaaagaagggaaagggtggcaataagaagtacagtgacaagaagaaagcgatgggcagaactgaatccactgtacccatatttaatatggaagacatagaggagggtgttgaaggttatgatgatgaaaggacactacttatgtctcaaaagagcttggagaagcgttttggtcagtctccagtttttattgctgccactttcatggagcagggtggcattccaccttcaacaaaccc

SEQ ID NO: 223769 - DNA, 450 bp, Glycine max
ttttttttttttttttttttttttttttttttttttcttttttttttttttttttttttttggggtttttttggttttttttttttttcaaaaaaaacaaacccccggcccctgggggttttaattaaaattccccaaaaaaaaaattttttcccgggggaaaaaaaataacccaccccctcaccattattggttttttttgggggggccccgggaataaaaacatataaaaaattcaaccgggggggggccccttccctcttttttgggggggataacccccccaacccccctggttgggtgaaaatttttgttttttccccaccaccccccctgtttttaacttttccaaaaaactaacggggtgccccccctggcccattggttaatctttccgggcccagggggggggggattctttccccccccccgcgggggtattattttaat

SEQ ID NO: 223770 - DNA, 603 bp, Glycine max
aagcattcctacctatcctaacgggggcttcaatgcctacctccaaacttctgtcatgggggctaatttccatgaattggtggagattgtattccaaaattgggaggattctgtgcagtcatggcacattgacggctattccttctttgttgtagggtatggtagcgggcagtggacagcagacagtagagtacaatacaatctgagagacacagttgctagatgcaccactcaggtgtatccaaggtcatggactgcaatctacatggctcttgacaacgtgggaatgtggaacataaggtccgagaattggggaaggcagtacttaggacaacaattgtatctgagggtgtatacaccttccaaatcatggagggatgaatatccggtgccaaagaatgcgcttctatgtggcagagcaagtggtcgtcgcacaaggcctttctaatttaatttaggtagcaattagcattgcaattgcatcatgtcacgagagggtggcatattcatattgcgactgcttttatttttctagctacgtgccagcaattttacttttttaatcattgggattatttttaacggatggggagatgagatgag

SEQ ID NO: 223771 - DNA, 423 bp, Glycine max
  unsure (1)..(423): unsure at all n locations
agggattagttaatgtaccatctgnagaccgttacgacgcatcatgctcactagccggcggtcggcattcggctctagaactttgactgagggtggtttgcacagattatcattctatctaaaaattggcgatggacagtgactgatacatttctctcacctgatcaacgctctctaatctatgccagtatctcacctattgtacacatagtgaatgcccgatctcattgaactgactccatggttaatgttacacacacacatggaggtttggattactcatcaaacgactatttgaagatactccttctgaatcttgtgcgtgccacgctcaatcgatgggaacctctaatttgccggaagtaatggtgattctatatatgcctaccatcttgtagcacataagctataacttagaatttt

SEQ ID NO: 223772 - DNA, 420 bp, Glycine max
attcttctcactcttcagatttctctcctttccttccatcccaaccacaagggtgctgagaggacataaaaaatggtgaagatttgctgcattggagctggctatgttggtggcccaaccatggctgtaattgccttgaagtgtcctgagatcgaggtggtcgtggtggacattgctgcaccgtgaatcaacgcgtggaacagcgaccacctcccgatatatgagcctggccttgatgatgtggtgaagcagtgcagggggaagaatctcttcttcatcactgatgtcgagaagcatgttgccgaggctgacattgtctttgtctcggtgaacaccccaactaatactcaaggtcttggagccggcaaggcagttgatcttacatattgtgagagtgctgccaggatgattgctgatgta

SEQ ID NO: 223773 - DNA, 463 bp, Glycine max
attcattttaatcctaaatctgcactttttgatcattcgatttttctcctcgagatgcagatgttcgtaaaaactttgaccggcaagaccatcacccttgaggcggaatcctccgacaccattgacaacgtaaaagctaatattcaagacacggaagggatcccacctgaccagcagagacttatctttgcaggtaaacaacttgaggatggtcgcacccttgccgattacaacatccaagaggaatcaaccctccatctcgtgcttcgcctcaggggtggcatgcaaatctatgttaagactttgaccggtaagaccatcaccctcgaggtggaatcctacgacaccattgattattgtgaggccaagatccaggacacagagggcatacacacagatcaagataggctgatacttgccggtaaacaacttgaggatggaagaacccttgctgattacaaca

SEQ ID NO: 223774 - DNA, 585 bp, Glycine max
ttctcatcctggttgtgagccagcttatcgtgtctcccaagtgtgttaaaaagtgtgtaagtggagaccaagttgggaagaagtcaaagcactatagcgttagtgcatacagagtcaactctgatccccatgatatcatggcggaagtttacaagaatgggccagttgaagttgcatttaccgtttatgaggattttgcttactacaaatcaggagtttacaaacacatcactggttatgaactaggtggtcatgcagtaaagctaattgggtggggaacaactgatgatggggaggactattggcttcttgcaaatcagtggaacagagaatggggagatgatggttacttcaagatccgaagagggacaaacgaatgtgggattgaagaggatgtaacagctggtttgccttccaccaaaaacctcgtcagagaggtgactgatatggatgctgacgctgctgtttaattctgaatgtaaaatattgcctttccaatcatattctgtatgggtattgtaattgaaaaataacactagatgttgcctgtagtctgaacctctggttaaggggacaattcttaat

SEQ ID NO: 223775 - DNA, 606 bp, Glycine max
atgaatctcaatggaacctcttctcttcaacgactccacattctcttcagctaacccttctttgtctgagattgggccctctcatttcccctccgatcacactcccaggaagaggcacctctccccctcgagtgattctgccagcaataaacatatcaagttatcagcaccagaatcccaggatcaaaacggtgcgttgaaggttggtgaagtagacgcgacttccgtggccggtaacaagctacctcaacaaaccccgaaacctagttcttcggagcaggcacctaagcaagactatatacacgtgcgagccagaagaggccaagccaccgataaccacagtctggctgagagagctagaagggaaaaaatcagtgagaggatgaaaattcttcaggatttaatccccgggtgcaacaaggtaattggtaaagcatttgtgctggatgagataattaattatgtccagtcactgcaacgtcaggttgagttcctttcaatgaagcttgaggcagttagttcgagattgagcatgaagcctactcttgaatgttttccttcaaaagaagttcgcactcaagccggaataattattggatcacaacc

SEQ ID NO: 223776 - DNA, 580 bp, Glycine max
caagggctcaagatggaatcttgaagtacattctgaagattatggaggtttgtaaggcccaaggttttgtctatggcattattccagagaagggaacgccagtgactggagcatctgataatcttcgtgaatggtggaaggacaaagtccggtttgatcgaaatggtcctgctgccataaccaagtatcaagctgataacgctattccggggaagaatgatggatgcaatccgatcggtccaacaccacacaccttgtaagagctgcaagacacaaccttgggttctctcttgtcagcactcatgcagcactgtgatcctcctcagaggcgttatccattggagaagggcgttcctccaccatggtggcctaatggtaatgaagagtggtggccccaaataggtttgcctaaagatcaaggttctccaccttacaagaaacctcatgacctgaagaaggcatggaaagttggtgttctgactgcagttatcaagcacatgtctcctgatatcgcaaaaattcgcaagctcgtgaggcaatccatatgccttcaaaataagatgacagccaatgaaagtgc

SEQ ID NO: 223777 - DNA, 327 bp, Glycine max
ataacccctatctcctttttccctctataaaaaaaaaaaaaggggctaaataatgaaaattctatggccaaaataactctctcaaaaaaataataaccccttacatctccaaaaaaacaaaaaaaaaaaaagtgcccaaaaaaaaaaaacctaacaccatacccccttttaaaaaaaagtggaaaaaaaaaaattaccttatacacataaattattggaacacaaaatttttattcccaaatttatggaattgaaaatttcctaaaaaatctcaaaaaacaagtgggaaaaaaaaataatcttcacaaggcgctaaataattttttc

SEQ ID NO: 223778 - DNA, 540 bp, Glycine max
ctttcatactgcttctccttttattatcaacgtcaaatacccacaggctgacctacttgacccagcagtgaagggaactcttaacgttcttaaatcatgtgtaaaatcgccatctgtgaaacgagtcatcttaacatcttctgtggctgcagttgcatataataaaaggcctaaaagtcctgaagttgtagatgatgaaacctggtgggctgatccagattactgtagggaattaaagctgtggtatttactttcaaagactttggctgaagatgctgcctggaaatttgccaaagaaaacgaccttgacttggttgttgttaaacccagcaatggttgtagggcctcttttgcaagcagagcttaacactagtgctgctattattttaaacctaataaatggttcacaaactttttcaaatgatacatatggatggatcaatgtgaaagaagttgcaaacgcccatattcatgcatttgaaattgcttcactagtgggagatattgtttagttgagagagtggcacactacttctgact

SEQ ID NO: 223779 - DNA, 577 bp, Glycine max
aaatcatcaaccttctacctagtgatgatactgattccaatggagaagccaacccacatagtgattgttccaagtcctggcttcagccatttactttcactcattgaattttccaaaaggctaatccaccactccaatggcttgcaagtcacatgcatgattcccacacttgactcaccctctgaaccctccaaagccatacttcaaactctcccttcaaccattcactccatttttcttccctcaatccacttcaacaaagagacacagactccaatagcagtccaagttcaactcgcagtgactcactctcttcccattatccgtgaggctttgaaaaccataagtttaagctcaaggctagttgccatgtttgctgatatgttcgcaagtgatgctcttatttgtgctaaggaactcaacttgttgtcatttgtttactttccatcatcggccatgacactctctttctgtttttatctaccgaagttggatcaaacatttccttctgaattcaaagaccttacagaacctatagaaattcctggctgtgttccaatatatgggaaggatttac

SEQ ID NO: 223780 - DNA, 479 bp, Glycine max
caagaagtagtaaagttgattcagaaaactcaaagagtgaaagaaaccttggcggaggtccttaaccgcatcgcctccgccattctcttcccggaacctgcctactccggatccctacttcgccggatcaaactctccgtcgccgaccacgctccttttcttcccgaagcttccaaaaactccgcccgcgacgttctcctctggactcgccgcggcactcccttccgcccgctcttcgtcatctccgttgggacggttacttttggtgctttgacagcactgcttgtatttatgcttttctttctagctgcaaccataaatgccattgtcatatcgctgctgatatctttggcagctgcaggaggattcctggctcttttctttgcttttgttacagctatatacattggagcattagcaattgccatatttgctatttcagttaccacattttggtcaattggggctattctgataat

SEQ ID NO: 223781 - DNA, 576 bp, Glycine max
gagaagtagtagcagtagctttaggaagaggatgatcggcgtcggaaagatcaagcagtacagtaacgtcctcgacaagcccctcaccaagggcaagcaagaggttagtttgagcgcattcgcgttcttgttctcggagcttgttcagtacaaccaaacgcaggtcgacaatattggcgagcttgaacgaagactggaggatgctggatatgcggttggggctcgagttcttgagctgctttgccacagagataagggaaacagaagggagacacggctgttgggtattctttcttttgtacacagtacagtatggaaagtattatttggaaaggttgctgattcactggagaaaggaactgaacatgaagatgaatacatgatcagtgaaaaggagctcctcgtaaacaaattcatttctatcccaaaggacatgggaacgtttaactgtggagcatttgttgctggaatagtacggggcgctttggatggtgctgggtttccagctgttgtaacagcttaatttgttgcccatggaaggtcaacaacgaccgcggacaaaattttgataaaatt

SEQ ID NO: 223782 - DNA, 259 bp, Glycine max
ctcttccttacccattggtagaaaggaattgataagctcagtcataactatcacccttctgtggtatgttgctctcgcgcgagagagccatggccatgcataggttcctgaggaagaatattgggacgttgtttgggcacacgctctcatcaccactgcgctgggagagcttatagggcctcttgatgcaagagttgaagacgatgaacttgctaaggaggttgatgatactgagccgccatggccttattttatgaag

SEQ ID NO: 223783 - DNA, 736 bp, Glycine max
  unsure (1)..(736): unsure at all n locations
aaaaaaagaagaagagaagaaaaaaaaaaaagaaaaagaaggataaaaataaagaaagagaaaaaaaaaaaaaaagagtagaaataaaagctataanattaaaaaannnaaaggaatagctaatcggaaancnaagnnanatnaggnnaaagagannaagagagagaggaaaaaagaaaaaaaaaaaaaaaaaaaaaaagaaaatagaaagaaaaaanaangaaaaaaaggggaaaggggggaaaaaaaaaaaaaaaaaaaagaagnaaaaaaaaggaaaaaaaagaaaaaaagagaaaggagagaaatgaaaaagagttgaaaaaaaaaaaagaggggaaaaagaaaaaggaaaaaaaatgaaaaaaaaaataaaaagatagaggaaaagaaaaaataaaagaaaaaaaaggagaanactattaaaaaaaaaaaggagaaaggaaagaataaaaaaaggagaaaagggcgtagtggaaaagaggaaaaaaaaaaaaaaaaagaataggataataagaaaaaaaaaaaggaggaaggaagaaagagaaaaaaaaaaaaaagaaaaaaaaaagtaaaacgaaaaaaaagtaagaaaataaagacgaagagaaaagagtaagaagaaagagaaaagaaagtagaaaggagagaaaaaaaaagggaggaaaagaaggagaaaaaaaggaagaaaagtaaaaagaaggaaagaaggaaggaaaaaaaaacaagaggggag

SEQ ID NO: 223784 - DNA, 574 bp, Glycine max
cgcagaactttgtttcccaatttccattgccttcgcttccacctcgcaaccatgatcatcccggagaagaaccggaaggagatctgcaaatacctcttccaagagggagtttgcttcgcgaagaaagacttcaatttggccaagcaccctgagatcgacgtgccgaatctgcaggtgattaagctgatgcagagtttcaagtctcgcgagtacgtgagagaaacttttgcttggatgcactattactggttcctcaccaacgatggcatcgagtttctcagaacttaccttaaccttccttccgaaattgtccctgctactttgaagaagcaagccaagccacctggcaggccctttggaggcccatccggtgatcgccctagaggtccaccacgctttgaaggggagcgtaggtttggtggtgatcgtgatggataccgtggaggtccccgaggaggacctggtggtgactttggaggagacaagggaggagctcctgctgactacaggccctcttttgggggtcctggcgagaagccccgctttggtcgtggatctggtggttttggagcgc

SEQ ID NO: 223785 - DNA, 485 bp, Glycine max
ttttctttcttctttttttttttttttttttttttttttttaaaatttaaatcctcaaatgggcgtggggaaaatttaaaaatccaaccccaaatacacattgtatcatacacaaatcccattaactaagtaaaatgatccacagacccacattttctactcaaattgatcatcatcctcatcaggaagggtcttacttacacctgcaagaacctcaacctcttgctgttgttgtccaactaaatcaattttaacttttggtggacccaatgcaggaaattttacaaaatgcaagttaacattgcctgcaagttttctggccaattacaaaaatggctttttaaaattggagttgcttttagcacatatcttatagttctgcaaattcttctttctgtggaaaagtaaacctatttgcctttacttgcctattcttgacatcaaccttgtttccgaaaaaaacaattgggatgttttcacagacc

SEQ ID NO: 223786 - DNA, 563 bp, Glycine max
  unsure (1)..(563): unsure at all n locations
gaaaattttgactgagcgtggttattccttcaccacctcagccgagcgggaaattgtaagggatgtgaaagaaaagctgtcttacattgcccttgactacgagcaagaactggagacagccaggaccagctcatccgtcgagaagagctacgagttgcctgatgggcaggtcatcactattggcgatgagcgtttcagatgtccagaggttctgttccaaccatccatgatcggaatggaagcttcaggcattcatgagacaacatacaactccataatgaagtgcgatgttgatatcaggaaggacctttatggtaacattgttctttcaggaggaacaaccatgttccctggtattgctgacagaatgagcaaggaaatttctgcattggcacccagcagcatgaagatcaaggttgtagcaccacctgagagaaaatacagtgtctggatcggtggttctatcttggcatctcttagcaccttccancagatgtggattgcaaaggcagaatatgacgaatctggtccatcaattgtgcacagaaagtgcttctaaactg

SEQ ID NO: 223787 - DNA, 598 bp, Glycine max
gtgagagaaaagagaagagaagatgacaacacgcttcaagaagaacaggaagaagaggggccacgtcagcgctggccacggtcgaatcggaaagcacaggaagcaccctggaggacgcggtaacgccggaggcatgcaccaccacaggatcctcttcgacaaataccaccctgggttcttcggcaaggtaggaatgcgctattttcacaagcttcgcaacaaattctactctccgatcctcaacatcgacaagctgtggtccctggtcccgcaagaagtgaaggacaaggcctccaaggagaacaaggcgccgctcatcgacgtcacgcagttcgggtactttaaggttctcggaaagggcgttttgccgcagaaccagcccgttgtggtcaaggccaagcttatttccaagatcgctgagaagaagatcaaagaggctggcggcgccgttgttctcaccgcttgaatttgacggtatcacttttttgaacgaattaggtttttgtcctgaatacgtttgttttggattatgttgttgtttagtctctgctatatttcaggataaaattgagggtctattattttaatttgcgcgatt

SEQ ID NO: 223788 - DNA, 541 bp, Glycine max
ttctcgatttccttctctacaacacaacgctctcttctcttgcaaccaaaatacttgttccagtgtctactctactcataaaggatttgggacatcatgtgcagtgattcgaaaagtaaactttcttccccaaccctcgtcgtcatggagaatagtaacattcacaagcagaatctggatggtctctacaactcggttttgcttgaatcgactgcatctgatgattatgaagctttcaaaagagaggtggaggaaaaaggcttaaatgtgaacgaggcaggcttttggtacggtagaagaattgggtcaaagaagatgggatctgaaacgaggacccctctgatgattgcttatttgtttggaagcgctaaggtgctcaattatattcttcttcagaaaggaggaggttgtgatgtgaacacggtctgtggttctgatacggccactgctctacattgtgctgttgctggtggatcctaatcctcacttgagaatgtcaagctcttgcttgatgctggggctgatgcttagtgccttgatg

SEQ ID NO: 223789 - DNA, 396 bp, Glycine max
gatggcttcacgcaggcttttatcttctttgattcgatcctaccttcgtagatctcaatcgaggccctcaattaccggatcgacatctaggctcacgtcatccaaccgtgcctcaccgtacggatacttgctgaaccgcgtcgccgagtacgccaccgccgcgggtgctgctaccgctcctacctctcctccttcttcggagaagaaagagctcggtggcggcgggaagatcaccgatgaattcaccgggaagggcgcgatcgggcaggactgtcaggtgattggtgccggcgtcgatgtcagatacgacgagggtttgcctccgatcatgaccgcgctggaggttctggatcactcggcaaggcttgtgttggaggtggcgcaacatttgggtga

SEQ ID NO: 223790 - DNA, 562 bp, Glycine max
ttcttctcttgcggctagggttttagcgcatcttcttctatatttaaggaagatgggtaaggaaaaggttcacatcagtattgtggtcattggccacgtcgactctgggaaatccactaccactggtcacctgatttacaagcttggaggcattgacaagcgtgttattgagaggtttgagaaggaagctgctgagatgaacaagaggtctttcaagtatgcctgggtgctggacaaacttaaggctgagcgtgaaagaggaatcaccattgatattgctttgtggaagtttgaaacaacaaagtattattgcacagttattgatgcgcctggacatagggatttcattaagaatatgattactgggacatcccaagctgactgtgctgttcttatcattgattcgaccactggtggttttgaagctggtatttccaaggatggacagactcgtgaacatgctctgctttcattcacccttggtgtgaaacagatgatttgctgctgtaacaaaatggatgctactacacccaagtattccaaggccaggtatgatgaaatt

SEQ ID NO: 223791 - DNA, 454 bp, Glycine max
agcattatcaacatacaccaacaaaataaaatccacttccacagcaaaagcaaattaggtcattctcccagctaattactttctccaacacaaaataataacgagtttacagaatttctttttctttttgcatttatttgttggcaggagttgggaggagacaaacttgaactctcacaagcataagcttaaatgcatatttaagtaccgaatcaatactcccattttttcaactccataccttctggagcactgccttccaccttctttgatcccacttctttccaatcagttgatagcactgttccatttgactccaagaaagacttgctcattgctctcctcatgtcctcatctgcattttggtaaatatcacggaacaatttactcaaagcagcatcaccatcaagcttttcttctttctcctcttttttcacttgagcttccaacttat

SEQ ID NO: 223792 - DNA, 445 bp, Glycine max
aaacacgaataatttccttgtgtttatattgacaagccttacaagacaaacaagtctcctcaagaaaacaaaatacacaacacattttatttcttacatcattttacgatatcatccagctactacaaacaaactcttactactaacacatcttaatgactgtacataataataataatgataatgtagagcagaaggatgcacatgcactgcacagaatcaattattaataaattcaaagcgcatgagaagctttacagtgttgtatttatcccccttttggctatgcagtggaattgctcgaatgccacttctaagctcccagataggtaggcatgcttgtccaccaaagtcatctttctcagacatgtcatactcatgaacttctatgcgaagcaacgccaactccggaacagtgagagggaactcgaatacctcattccat

SEQ ID NO: 223793 - DNA, 517 bp, Glycine max
cagacactcagtttctgcctcttatttttttttttcctcactttctctctctactttttctctttatttctaggcttctctgtctatcatagatcttgaactatcctggcaagaactcagagcactaacatcttgcagccacaaaaatgggcttctttctgttaccaaaagcaactccttgcattttggtcttggctctgctgtcttgtacttgctttacttctacagatgcttatgatccactcgacccaaatgggaatatcacaatcaaatgggatattataagttggaccccagatggatatgtggctgttgttacgaggaacaacttccaacaatatcgtcatatcgcttcacctggctggtcaatgggatggacatgggcaaaaaaggaggtaatatggagcatgatgggagggcagaccactgaacaaggggattgttcaaaatttaagggaggcattccacattgctgtaagaaagatccgacggttgtagatttgctacctggaacacc

SEQ ID NO: 223794 - DNA, 561 bp, Glycine max
aaaggagcacgtgggacttttattgattgaatgattgatagaggagtgagtctcggggcatgaaagaagaaagatgggagacgtcacacataaattggcgtatttacaagcgataaccggtttagaagatccggagctctgcacagaaatcctggctgcccacaattgggacctggaactcgctatctctactttcacctgttcctcaaaccctaacaaccctccaccgtctcccgctctggcttggaaactcatcaccctacccgtttccgacatctccgacagtctaggcttaggttccgccgctatcggcttgggcctatgggccgcggggggcgttctcttctattccctcggcctcgtgggcctgggctcgccctcggccccattggtttccgtcacggccgacgcttccgaggcgatggatttcgtggccgctttcgagagggactacggctacggagggcccaatttcgtgggcgagggcttcatggacgctcttcagcgatccaagaactcgttcaagcttcttttcggtgacttgcattcccccgatcaccc

SEQ ID NO: 223795 - DNA, 368 bp, Glycine max
cttgtaagcaaatactgattatttgggattaggctgatttgatcaaggtcagggatgctgggcttgagttcctcacaggaagtgacaagattgatgatgaatctgctttgtcattgtggcaccccaatttgaagctgctccttgtcactcttggggaacatggttccagatactacaccaagagttttaaaggatctgtagatgctatccatgttaatacagctgatgcaactggcgccgcagatatctttggaggggctttattggccaatattgtcgataatcaggccatacttgaagatgaaccatggataaaagaacgtctctagtttgctgaggcgtgtggtgctattacaactacccaaaag

SEQ ID NO: 223796 - DNA, 465 bp, Glycine max
ctcgtaagcaaatactgagcatttgggataaggctgatttgatcaaggtcagtgatgcggggcttgagttcctcacaggaagtgacaagattgatgatgaatctgctttgtcattgtggcaccccaatttgaagttgctccttgtcactcttggggaacatggtttcagatactacaccaagagtttcaaaggatcggtagatgctttccatgtcaatacagatgatacaactggcgccggcgattcctttgttggtgctttattggccaagattgacgatgatcagtccatgcttgaagatgaaccaaggttaagagaagtactgaagtttgcaaatgcatgtggagctattacaactacccagaagggagcaattccggcccttcccaaagaggaggctgcactgaaactgatcagaggggggtcatagaatcttttggcaaaatgccaaagtgctagcgtga

SEQ ID NO: 223797 - DNA, 429 bp, Glycine max
  unsure (1)..(429): unsure at all n locations
naaaaaatacaatactccaagnnncnagtnnggaatannacctaatacccgtaagactccctggcttttcttatttaaaaataacacactccataaattttctataangcattcaacatacgaatttttttaaataaaatctccaaaaacaaaccaaattacaaaccaaaaactctcaataaaaactaccaacctcataaagacaaataaaatcctaaatatttaagtcacactttatttattgaaaaaaatccttttcctaacttcctcaattattaaaagcttaaaacctttacccttgtgaacagaaatccactgctttgataccttgccaatggagaacacatttcccatacaaaatttaaattcatgcccaaaatcatcctaaacatggatagcctcaaaacttccctaaagcttctctctgtt

SEQ ID NO: 223798 - DNA, 591 bp, Glycine max
  unsure (1)..(591): unsure at all n locations
gtccgtgagtccccaccggcgccgtaaccactctccgccgtggcctccaccattaatggaccagatcccctaaacatccttctcccaattccgaatccatggctcgctcttctctccacgcgctctccaccattctcttcctactacgcttgttgttatctccttccacacacgcccttaaactccccttccgagtcaacgatgttctccccgttctcccccacggaatctcctggcccctcctcaacaacctccacagcgccgncgacttgctcccttccttcgtcggcgccgtcacgcccgacaacggttcccttcagtggaagggcgcctgcttttacgataatcaagcctccctcgagttcaccgcccccggcggcgccgtgctccatctcaagacagaagctgcacacagttggacctgcatggatctgtatgtttttgcaacaccttataggattacatgggactactatttctctgcgcgagaacatactttgcagtttgattcatgggaagagcctgcagagttggaatatgtaaagctgcatggggtttctgtgtttctcatgccatctgggatgctgggaa

SEQ ID NO: 223799 - DNA, 460 bp, Glycine max
atgggaagatcatgattagggcatttattttcttaataagcaagagaaaatggacaaaatagaagcacataatactgaacactttatccttattacatgagtcatatgtcaaacaggaaacaacaatccccaaaatagaacacacccatatccttagcaattaaacaacaccacacaagaagaactacacataacttacaaacttttgctccattcaaaactgatcaaccaattgcaccacctcttccaccacagacgtcaacaaagacttcctagcattcaccacattgcacttgccacgaatttcaccttgatttccagtgagcacatccaattgactcaactttatagtagcatccacaaacttctcaaagaacaacgtttggttcaacgcaaatgcattgaccaaccccttagtcctttatcattgagcaagtcctggtcagaggtgaacacccct

SEQ ID NO: 223800 - DNA, 528 bp, Glycine max
  unsure (1)..(528): unsure at all n locations
gctggaaaaactttattattttgcatcacattcttatgtaacagtgtatctgagtacagcacaaaccattcaccattatggctatgataatctttccttagcaaacctattataaaacaagggtgaacatatgtgaattgtggaaggcttgtacaatatagtccttgagaagcaaggtcaacctgtattcttcatccctgcagcaatcccatttatggtgataagcaaagcatctctgatcttacggttgtcatcatcacgtcttaacctcttgagtatctccacctgcaacatgttcaagggattaaggaagggaagtctattctcaattagcctcctcaagctcctattattctgctgaagtttctcgtgcccactaataaccatgacaaactnttcagctgtcatgagctcacttcttagttcatggccaagctcttgcctctcctttgacacaaggacttcatcatagtgcttggctataggaatgtcagctttccccaaaaccatctcaataggtctatggta

SEQ ID NO: 223801 - DNA, 514 bp, Glycine max
gagagaaacactttttcagttctctctctttctctctaatatggccgacgatccaatgcccacgcgctgggctttccaggacttcaaattgtgttatgatgctaagtttggtagaaagaaagtctcggagaacggaaatgatgcttgtcggtaaagcggacagcagtggaaatgtaaattcagtgactgaggccattgcgtgcaatggcaacaaaagggcatacgaaatggctgaacatgatcagtataacaagcgaggcgcaaaatcagattcacacaaatggctttgtgccgacccgttcagattaaaggccgcagaagtctttgcttccaccctttgaatctgcagaaatgcgagctttaatatagagtctacgtagggatatcatttcgggaagttcagatgtgtagcgagaaagcatcaaggggttagagaatgccaaacgtttactgaatgatgctgttgtgatgccggttcattatcccaagtacttaactggtctgttattaccat

SEQ ID NO: 223802 - DNA, 674 bp, Glycine max
  unsure (1)..(674): unsure at all n locations
aaaaaaagaaaaaaactatgtactntagaannctagaagnattncnnaaaggccaaataataaaagantaaaaaaataaaacaaaatttaaaaaattataaaaaaataatcaaaagagtatttaaaatttttaacccaataccccaataaaaaaaaaaaaataaaaaaaaaaaataaaaaaaaaaaaaaaaaataaaaaaaaaaaaataaaaaaaataaaaaataaataaaaaaataaaaaaaaaaaaaaaaaaaaaaaataaaaaaaaaataaaataaaaataaaaaatatatattaaatataaaaaaaaaaataaataaaaaaaaaataaaattaaaaaaaaaaaaatttaaaataataaaataaaaaaaaaaaaaatataaaaataaataaaacaaataataataattaaaaataataaaaaatataataaaaataaagtaaaaaaaaaaataaaattattaattaaaaaaaataataataaaatataaaataaatataaaaaaaataaaaaaaataaaataaactaaaaaaaataaattttaaataaaaaacaaaataaaaaataactaaataaaaataaataaatttaaaaataaataaaaattaaaaaaatacaaataataaataaataataataaaaaacatattattattactatatataaataat

SEQ ID NO: 223803 - DNA, 526 bp, Glycine max
aaaagatatagcaaagattgtgctgaggtagtcatgaaatcattagatctggctgtggatgaaattaagaaatgcatgggtgatcctgaagcggatgtggagaatgaagtgctaaagaatgagcaacaagtccagattggtagaggatcccgcggtgatgtcaccatcttgccaacattggttataaacaacgtacagtatagaggaaaattggagagaactgctgtactcaaggctgtatgttccggatttaaggagactactgaaccttcagtttgtttaagtggagatgtcgagactaatgagtgtcttgaaagaaatggaggatgttggcaagacaaacatgctaacataactgcttgcaaggatactttcaggggaagagtttgtgagtgccctgttgtgaacggtgtccagtataagggtgatggttatactacatgtgaagcttttggacctgcaaggtgttctataaacaatggtggttgttggtcagaaacctaaaaaggattaacttttttagctt

SEQ ID NO: 223804 - DNA, 450 bp, Glycine max
gaagaagatggctttaggtgttcctgctcttccgttgacatacgtggctcacgttctggcagttgttgccagcgtcttggtcgtggtctgggtcgtcaatttcaggggtggcttggcttgggattctgataacaagtccctcatcttcaacattcatccagttcttattgttattggcttactagttcatgggggtgaagctattataagttacaaagcttttcccctaaagaaggaagtgaagaaattgatacaccttgttttccatgccatcgcattaatacttggaatagttggaatttatactgccttcaagtctcacaatgaaagtgggattgccaatctctacagcttgcattcatggcttggaattggggttattgtcctttatggcattcagtggatatatgggtttgtgatctttttctttcctggtgggacttcaaacat

SEQ ID NO: 223805 - DNA, 545 bp, Glycine max
ttagtgagtaagtgaggaagcattgagagttggtggaaattaaggttaagaatcaaactgagcaaggagtattcaggatatcatggacgagaatggaagctcaagcaatgcaccaaagaacaagagaaaccttcctgtctccgttttcttcaaagatgcaagacatgttttcaagatggattccattgctaaggagatacttgggattgcattcccatctgcactggctgttgctgctgacccaattgcttctcttatagacacagcattcataggccatttggggcccgtggagcttgctgctgcaggagtgtccattgctttggtcaaccaagctttaaggattaccatcttccctttggttagcatcacaacttccttcgtagctgaggaaaataccattgaaaaaatcaatacagaaaagaagtttagtgataaggctaacgccacagaacaagtaatgctcgatgatcattcccttcaagacatagagaaagttgcatccaaagagaaccatgagacttggaatgtggaaatggatgatt

SEQ ID NO: 223806 - DNA, 335 bp, Glycine max
acctacctctttatcttctctctcaacaactttaccatctttctcctcgaacatgtctcactttgggggcaagtaccatgatgagctaatcaccaatgctgcgtacattggcactcctggaaagggcattcttgctggtgatgagccaacaaggacaattggctagcgtgtggccagcatcaacggagagatcattgaacaccacaggcgagctcttagggagcatgctcacactgctcctggcgtgcttcaacatctgagtggtgttatcctctgtgaggaaacccttctaccaaatcacaggttgatggcaatcccctttgagaatcgtcttg

SEQ ID NO: 223807 - DNA, 589 bp, Glycine max
caagctcactgatgctgttcttcctcccacgttagactggaggaaagaaggaatagtgagtgatgttaaagatcaaggcagctgcggatcatgctggacattcagcacaactggggctttagaagcagcctatgcacaagcatttgggaagagtatctctctttctgagcagcagctagtggattgtgctggccgtttcaacaactttggctgtaatggtgggttgccatcacaagcctttgagtacatcaaatacaatggaggacttgagacagaggaagcatacccctacactggaaaagatggtgtatgcaaattctcagctgaaaatgttgccgttcaagtcattgactcggtcaatatcaccttgggtgctgagaatgaattaaaacatgcagttgcatttgttcggccggttagtgtggcctttcaggtggtgaatgggttccatttctacgagaatggagtttacactagtgacatttgcgggagcactttccaggatgtgaaccatgcccgtccttgttgtggggtatggagttgaaaatggcggcccatattggctcataaaaaaatcatggggagaaag

SEQ ID NO: 223808 - DNA, 491 bp, Glycine max
agttcttattgtattaaaaactacttactaccaacgaaacatcaaaatttcacaaatcaaacactgcctcaaagaaatgtacaaacatgcaaccagccaatgcatgaccaaaaatgtttgcctaaaaattgttggaatataaaatgcaaagatgtaaatataataaagctactttcagaaaaataattagaacagttttccttcaagaacaagggcattgaagattaaatgcagataccctcttcaaatgcacactaacacaaccctcccttttgtaagcactggggagtagatgcctcctagattcagttatactttaatcctcattttgactttcatccttgataagcttgatcatgtcatcaattcgaaggatagtaatggcagcttcagttgcaaactgaataatttttactttgctcattgcaggctcaataactccagcctccaagttggttctgattttcccttcagaaggtccaaacccatac

SEQ ID NO: 223809 - DNA, 533 bp, Glycine max
gcatgtaataattttatcatagcatatagcatagcaggggcattggatacattgtacttttgaggaccacatgcaccaactcagtcttactacatgattctctttatttagaaaacaaagttttaccaattaaacaaacttatcagctaggctttgcatcttagacaaactgattaaggtactcatccacagtgatgtatttcacatcaggatatagagctgaagcttccactccaaaagaagactcaatttcaaagttagtatgatccccctttacataagaagagtggttaattgacaggatcacattcacgggtggtgcggactcttcaatttgcttcaggagttgttcttctggaacatagattctttcaagagttttaccaatctttccctcccagagagtaacaagctcattaaacgacaaggtattagctggtggtctaatgtagagaattttgtcaaggttcttggatcatccacagaattgattgttaagttccaatatccttttcttgtaaaaacagctttgg

SEQ ID NO: 223810 - DNA, 495 bp, Glycine max
ccaagatgagtttatgtctttggtcagaaaagctataataatgacaggaggatttgaagtggatgacatgtttccttcattgaaaccgttgcatttactgacccgacagaaggccaaagtggagcatgttcaccagcgggcagacaaaatcttagaagacattctcagaaagcatatggaaaaacgaacaagagtaaaagaaggcaacggtagtgaagcggagcaagaagatcttgttgatgttcttttgagactcaaagaaagtggcagcctcgaggttccaatgacgatggagaacatcaaagctgtgatatggaacatatttgctgctggaactgatacctcagcatcaacattggagtgggcaatgtcagaaatgatgaaaaattcaaaagtgaaggagaaggcacaagctgaattaagacaaatattcaaaggaaaggaaataatacgtgaaactgatctaaaaagacttagttaccttgaagtagtgat

SEQ ID NO: 223811 - DNA, 566 bp, Glycine max
gtaatcgagcttcagcaatggtgtacgttaaggctcagaaatcaaaagcctacttcaagagatatcaagtcaagttcaagagaagaagagagggaaaaaccgattaccgtgccaggattcggttgattaatcaggacaagaacaaatataacactccgaaataccgatttgtggttcgctttagcaacaaggacattgttgcacaaataatatctgctagcattgccggcgatttagttcttgctacagcatattcacatgagctgccacgatatggtcttgaagtaggacttacaaattatgcagcagcttattgcactggtctcctgttggcccgaagagtcctcaaaacacttgaaatggatgaggagtatgaaggaaatgttgaggctactggagaggattattcagtggaacctgccgagagcaggaggccattccgtgcactccttgatgttggtcttgttaggactacaacaggaaatcgcgtctttggtgccctttagggagctctggatgggggttttgatatttcttacagcgacaagaggtttgctgggtttgat

SEQ ID NO: 223812 - DNA, 596 bp, Glycine max
tttttgttttacattttgtcacaatctgtgtttgttcgagttatccgaggcccctcttttatatggtcgttaatgaaaatggcttcgacccttttcacaaagatgcttttgggccaacgattgatccatccttattcgttcctcactcaccagccacagattctctcttctctattcagtaaacggctgttttgtatacgagctgtcccagtctcagcctatacattccaaaacatcaaaacaactggttgggctccttgtatggcttcttcctcagttggtagaagggctacatattcaacacaatctgtatcaacaaatgagccagttgtatctgtagattggctttatgataacctgaaggagccagatatcaaggtactagatgcttcgtggtacatgccggatgagcagaggaatccaattcaagaatattaggttgctcacattcctggtgcccttttcttttacgtagatggaatagcagatcggactacaaaattaccacatatgctgccatcagaagaagcttttgctgctgctgtttctgctcttggcattgagaacaaagatgatttgtttgttattgatggaaa

SEQ ID NO: 223813 - DNA, 582 bp, Glycine max
ttgatctatccaaggtagtttttgtggctacagcaaataggttgcaacccattcctccaccacttcgtgatagaatggaagtaattgagcttcctggatatacacctgaggaaaagctccaaattgccatgcggcatttgattccaagagttttagaccagcatggattgagttctgagtttcttcagattcctgaggcaatggtgaagcttgttattcagagatatactagggaagctggtgtgcgaaacttggagaggaatctagctgccttggctcgagctgctgcagtaagagttttagagcaagaacaagtagttccattaaacaaagggatgcaaggacttgctacaccacttgtggaaaacagacttgctgatggaactgaagttgaaatggaagtgataccaatgggtgtcaatagtcgggacatctctaacacgtttaggattgcctctccatttgttgttgatgaaactatgcttgaaaaagtgcttgggcccccaagatttgatggcagagaagctgcagaacgtgtgggtacccctggggtcactggtgggctagtttggactgcttttg

SEQ ID NO: 223814 - DNA, 402 bp, Glycine max
cggttcataacaatttatataaaagtattcttagtaccgggaattgggtctgttaattaacccccatgaccaaataaagtctcacgtttcttcaaacataacatcctcaaaacattctatcgccaaaacacaatattggtccctaattgacaactgctcttttagcgatacttgatgaaaccaatttccttggcattgctacggaagcactgcctgcagcacataaggccatactttctgatcagctcatgtggatttccacacacacggcaagtgcgagaaccaggaccggagttttttgggtgagagttccaaacgtgggactgttccattgctacgccccagaagagagttcgatccaaaaacccattctctgaatcttctatccgaattcctagctta

SEQ ID NO: 223815 - DNA, 394 bp, Glycine max
agggaacttggattcatctatattgcatcatccctcaaaaatagtacttgtaaaactggcattgaagttgttcatgaacagtataaaaatcgtcaaagaaaaattacagggacgtcatatatctacacaacgcaggagggttgatagacttgttgcagcacaaagtaggagatgatatttgtgcaagtgaacagaaattaatagacttcgacattccattgctctgatttcttcaattgcctcttgtactcagtccaatcaatgccatctttggcagccaatgacaccataatgtcatcaatacccttttccattccttttagtccacacatgtacacaaaagtgttatccttcttcagtaattcccacagctcttctgcatattgagccattc

SEQ ID NO: 223816 - DNA, 523 bp, Glycine max
ggcacgttgacatcggactcatccaacggtgcaagattcttcctgcccagagacgaaaccataatccgtagagcattaataaacatttcccatttgtttggttgctccgaaaacagaggaccaaacaagcccttatcacaactctatctaacaaattacataggacaggcccaaaaccaaaaaaagcttctttgtctctcgtgccgattctccaccactattcccttcaccccaatcacactttccggtagttgttgctattagtgtagaagatgagtacgctggatgcaacaagggctgaacttggtcttcttgttttatatttgggcaaggctgaagcaagggacaaaatatgcagggccatacaatatggttccaaatttttgagtaatggggaacctggtactgctcagaatgtagacaaaacaaccagcttggcacgaaaagtctttcgtctctttaagtttgtcaaatgacctacatgctttgataagtccaacaccacaggggacaccccttcccc

SEQ ID NO: 223817 - DNA, 551 bp, Glycine max
ttctgagagtgtttggctgaaagcagcatttatgttttttttcgggcaaaagggtcaaaagataaacgggggtatggtggttatgcagaagaatgtgctggatctcaacaggatcaccagtgttggagggatcgttgaccaatgcttatgcttcatatgcagtgcaggcgatgcacttacttttgcagccaccaaaatctccatccagttgtttagtgctaccaaggctgatggtgggaaaggaaaaattggaaagagtacaaatttcagaggaaagataacattaccaaccttgggagctggcgaacaagcatacgatgttaattttgaatgggacagggacttcggaaatccccgtgcatttttttttaagaacttcatgcaaattgagttctacctcatgttttttaattttcgaagacattccaaaccacggatccattcactttcgatgcaactctggggtttacaatttaaaaaactacacgactgatcgcattttttttgccaccatacctatcttccagccgagacaccaccttccttttgag

SEQ ID NO: 223818 - DNA, 446 bp, Glycine max
ttcttgttcatttgggaattgaacaatatttatgatgggtttacgaaggtgtaatagatggtccttatggtgaatttttcatcgcacaggacaaatctcttcaaaaggagagtctcactcaagattatgaagctaagtattggcaacaacggtacagcctcaaagatggaatctctagtttccttgcaaatattgcaggagcaattttgacaacaggaaaatatctaaatgtcatgagagaatgtgggcatactggtcgggcccctccatcagaaaattcaaaactaacgagcactggctcaaatcatcaatatcttgaatgtattaaggctgctctttactttgcaagcagcgaactcttgaatctcattatggaaaagcatgatcttacaggaaggctgccttctataaaacacatccttcttcttgaacagggtgatttctta

SEQ ID NO: 223819 - DNA, 412 bp, Glycine max
aatcgcgcaaattaaaataataaaaccttcaatggaatcctgaaatatagcagagactaaacaacaacataatccaaaacaaaacgtatcagaacaaaacctaaatcgttcaaaaaagtgataccgtcaaattcaagcggtgagaacaacggcgccgccagcctctttgatcttcttctcagcgatcttggaaataagcttggccttgaccacaacgggctggttctgcggcaaaacgccctttccgagaaccttaaagtacccgaactgcgtgacgtcgatgagcggcgccttgttctccttggaggccttgtccttcacttcttgcgggaccagggaccacagcttgtcgatgttgaggatcggagagtagaatttgttgcgaagcttgtgaaaatagcgcattcctacc

SEQ ID NO: 223820 - DNA, 300 bp, Glycine max
gccggtgcacgttttgccaagtggcgttttttgctgaagattggtcccaacgagccatctgggctggctatccatgagaatgcctatggtttggccagatacgctgctatatgccatgacaatggtctggttcccattgttgagcctgaaatccttgatgatggatttcatgacatacacaattgtgcttccgacacctgagcgtgcccaagttgtatgctatatggctatgaactatcaccacgtccttatctaaggtgccttattgaagtccaaccttgtcccccacgtatttatttc

SEQ ID NO: 223821 - DNA, 582 bp, Glycine max
agaaaagatatccatggctgagtccgacattttgtcaggaggtcacacggggaacgcgagcgggagcaactagttgtccggttgcagggagcaagacaggttcctcccaatagcaaacgtgagcaggatcatgaagaaggcgttgccggcgaacgcgaatgatatcgttggaggctaaagagacggtgcaggagtgcgagtcggagttcatcagtttcataacaggagaggcttccgataagcgccagaaggagaagaggaagacgatcaacggtgacgatcttctctgggccatgactaccctgggctttgaggactacgtggatccttttaagatttacctgcacaagtttagggagatggagggggagaaaaccgctttgatgggaatgccacatgagagggatgagggttttggccatggccatggtcatgcaacttctatgatgacgatgatgatggggcatcagccccagcaccatcaccatgaccagcaccagcaccagcaccagtgacacgtgtatggatctggatcagcatcttttggaagaactatatagcatgtgacatttgtttaagctt

SEQ ID NO: 223822 - DNA, 642 bp, Glycine max
tgcaagcacgatgaatggaatggaacatgcaatcataggttcaaaagacccacctgtatggcaaaagtgaaaggcagacaatatgtgcaacttgtcccagattggggcgcgagacaagagtgtttaacagagtcccattatgccttcacgttgacctttacacaacagagtatttgcccggttgagttccaccaggaagttgcaaagcctgatttgtgatgtcttccaaaacacgcttcaagtctgctttagctgacttaacggagtgctcagtaggaccttcaatgaacaagtagagctggtctgggctgtggtagtggggcagcacagcaatacgtatcattgaggaagtttcctgtggatcgtctccgaaaatgaacgacgcagacgtctcaaagcaaatccagcagatggttcggttcatccgccaggaagctgaagaaaaagccaatgagatctctgtcttcgccgaagaggaattcaatatcgagaagctgcagttagtcgaagccgagaagaagaagaccaggcatgagtacgaacgcaaagaacgccaagtcgaaattcgcaagaagatgagtactaatgcagctgaatgctttcggatcaaagtcttaagctcagatgacgtgtcagttcatg

SEQ ID NO: 223823 - DNA, 546 bp, Glycine max
atcaaaaattctaatttcatatgtcataggtccggtaatacgaaagctaacatttcctcaattttaacaatttcgatagattctaatgtcatcaggctggcatagttaatcgcgcaaattaaaataataaaaccttcaatttaatcctgaaatatagcagagactaaacaacaacataatccaaaacaaaacgtatcagaacaaaacctaaatcgttcaaaaaagtgataccgtcaaattcaagcggtgagaacaacggcgccgccagcctctttgatcttcttctcagcgatcttggaaataagcttggccttgaccacaacgggctggttctgcggcaaaacgccctttccgagaaccttaaagtacccgaactgcgtgacgtcgatgagcggcgccttgttctccttggaggccttgtccttcactttttgcgggaccagggaccacagcttgtcgatgttgatgatcggagagtagaatttgttgcgaagctttgtgaaaatagcgcattcctaccttgtcgaagaacccagggtgggtatt

SEQ ID NO: 223824 - DNA, 418 bp, Glycine max
  unsure (1)..(418): unsure at all n locations
atgatgatgagcagtacgtttgggagtcccaagctggaggttcattcactgtcaccagggatacctctggtgaggttcttggcaggggtactaagatcactctcttcctcaaggaggatcagctagagtaccttgaggagcgccggttgaaggatttgattaagaagcattctgagttcattagctacccaatttctctttgggttgagaagactaccgagaaggagatttctgacgatgaggatgaggaagagaagaaggatgaggagggtaaggtggaggatgntgatgacgagaaagaaaaacgttaaccttacccaaaaatggtgcttcggctaatagtgagcttgtcgacactgggaattataacggaccggcacctgactgtgtgttaggttaacctataaagagtggtaat

SEQ ID NO: 223825 - DNA, 511 bp, Glycine max
  unsure (1)..(511): unsure at all n locations
ctaaaatgtcagcagcaaatggagtaagacgtgtttggattggtcaaaatggattgctttctactcctgcagtatctgctgttatacgtgaaagagttggagctgatggatccagggcaacaggtgcatttatactgacagcaagtcacaatcctggtggccctcatgaggattttggaattaaatataatatggaaaacggtggacctgcaccagagggaattactgacaagatatatgaaaacacaacaacaattaatgagtacttgattgcatcagatctgccagatgtggatatcaccacaacaggtgttacaagctttacaggccctgaaggaccatttgatgttgaggtttttgattcagcaagtgattatataaaattgatgaagtcaatttttgattttgaatctatcacgaaactgctgtcatctcctaaaatcacattcttgtatgatgcactacatggggntggtggagcatatgcaaagagtttatttgtggatgagct

SEQ ID NO: 223826 - DNA, 586 bp, Glycine max
gagatcacatttcctgagttataggctatagccttccataatcttataacagtggaggggaccaccagccaaagcacgtttaccttcatccctagcacaattgagacacctagtccaagcatccctgagatttcatcatcatcacctttccctggcggctctcttgcaagagttgcacaaagttaccctcctggatttcccagaaaggtatttgcggaggttatagggacatttctgttagtgtttgtggggagtggttctgctgggcttagcaagattgatgaaagcatggtgtcaaagcttggagcttcacttgcaggaggactcatagtgacggtcatgatttactcaattggacacatctcaggggcacacatgaacccagctgtttcgcttgcttttaccgccgtgaggcatcttccgtggccacagcttccattttatgtagcagctcaactcactggagccatttttgcttcatacacattgcgagagcttgtacggccatcatatgagattgggggaacttcacctgctggatcacacattcaagccctaaccatggaaatggggagcacatacacca

SEQ ID NO: 223827 - DNA, 559 bp, Glycine max
  unsure (1)..(559): unsure at all n locations
ggcttccacttccatagttccattccagctcttaacaattacatgagacagagaaagggttgacggacagagaacccaccttttgttgtattgcagatccatccgctctgccaccaggtgaatggaaggaagtggcggtggcggtgcttcaccgtctgcaccggtgaagcagtatttgcacgatttctcgaagctgtttcagtactatctggataaatccactccacattccacgtacagatggattgggactttcgtgatagcatccatctacgttttgcgcgttgtttatgtgcagggtttttacattgtctcttatggactcggaatctaccttctgaatctcttgattggttttctctcccctttggttgatcctgagctcgatccctccgactcccctttgcttccaaccaaaggctccgatgagttcaaacccttcattcgccgccttccggagttcaagttctggtattctttcaccaaggctctctgcatagcgnttgtgatgacctttttttccctggttgatgttcctgtcttttggactatattactc

SEQ ID NO: 223828 - DNA, 559 bp, Glycine max
tgaagattaacccagactcagctaaaggcttctaaatacgaggaatgtcaagggctatgttgggactatgggaagaagcagcaagtgaccttcacgtggcttcaaagttagattacgatgaagagattagtatggcacttaaaaaggttgaacctaatgcccttaaaatcgaggagcataggagaaaatatgaacgcttaagaaagcaaaagcaacagaaaagagctcctatcaagactgaagctcctattaagaaggagcaagaaactgaagcccaagtacaagcagcattatctgctttaaaagatgggcaagtcatgggtattcactctagtggtgaattggaaaagaagttaagtgctgcatcaaagacatcacgcttggcgatcctgtattttactgcaacatggtgtggcccttgtcgcttcatttcccctatttatacaagcttggctgaaaaagacccaaaagtgggttttttgaaagttgacatatatgaggccagggacgttgctgcaggttggaatattagcagtgttccgacatttttctttgttaa

SEQ ID NO: 223829 - DNA, 526 bp, Glycine max
gccttacttagctatttcttatcattatcctcagctatggcaacaatttcagtgttggtttgccccagcaagctgcttatggatcgagctttcaccattccaagcttcatcctcctctttgggacaatcacttgctttttctcatcattgttttcagcatcatttcccaaagggtactcttcatgagtgacacgacttgtagtactagactttgttgtttgtttttcgaataaattctcggattgaggcacaatattgatattgttctttggtgcaacacttgttgtgccaatggacttgtttctcacacttgtcatgcttctcaaccttcctttccctaagtgatgctcgcaaagagagtaacccaccaaggtttgttggcaacacctccatcctctcccatttacacgactgcaccttgaaccttccattagtgcaccaccccttaccctcttcttaccaacgttttcttgttcgggttttgtgctcttgttgccacctcttcctcgtctctcttacctcttct

SEQ ID NO: 223830 - DNA, 551 bp, Glycine max
ctcgagccgaatcggctcgagcacgtaccttaatttcgccaaatcaaccaaagacaaaaaaagaatccaaaggaacagaagagaaagcttgaagctatggggaacaccatgggaaggagtaaaaaggccaaggtgatgaaggtggatggagagacgttgaaactgaaaacaccagcgagagcaaacgacgtcgtaaaggactacccgggccacgtgcttctggactccgaagcggtgaaacatttcgggcttcgggccaaacctcttgagccgtaccaggaactgaagcccacaaagatttactttctcgttgagttacccaagattcagcccgaagaggaaaaaacggcgctaccgaggagggtgcgatccagtgggatacgcggcatgaacgcctccgataggctccagcttctcatgctctccaaacgctccgtttcggaccttccgctcttcaagcagagccccaatctgggctctgatgggcccatcaaggttaagatgaggctccccaaggcccatctggataagttgatggaggagagcaccga

SEQ ID NO: 223831 - DNA, 592 bp, Glycine max
  unsure (1)..(592): unsure at all n locations
gcctctttcaagaagcatctgagtgtttattattcgtaatatatagtcactcaagcttctaggatttctgccagctacatgaaaatgggaagcaacttgaggtttttgagtctttgcctcttggcattgattgcatcaactcatgcccaacttcagcttggtttttatgcccagagctgcccaaaagctgagaaaatcattttgaaatttgttcatgagcatatccacaatgctccatcactagcagctgcattgataagaatgcatttccatgattgttttgtaaggggatgtgatggatcagtccttctgaactcaacaaccaatcaggctgagaagaatgctcctccaaatctcacagtaagaggctttgacttcattgacagaataaagagccttgttgaagctgaatgccctggtgtggtctcttgtgctgatatcctcactttggctgccagagacactattgtagccacaggtggaccctattggaaagttccaacaggtcgaagggatggngtcatctctatcttggtggaagccagaaataacattcctgctccatttgacaacatcactacgctacagacac

SEQ ID NO: 223832 - DNA, 583 bp, Glycine max
tggatatggacttcactggtgttagtgatcacggaattgctggattgctttcttcagcttctttggttctatcaaaggtgaagctccaggcattgactgtttcagatctctctctagctggtattgggcattatggcaagtcagttactgatcttgtccttaattgcctcccaaatgtcagcgagagggggttctgggtcatgggtaatggtaatggattgcagaagctaaaatcacttacagttgcatcttgcaaaggagtaacagatattgggcttgaagctgtaggaaagggttgtccaaatctgaaaattgcacacctccacaagtgtgcatttctgtcagacaatgggttgatgtcattcgccaaggctgcttcatcacttgaaagcctacgattggaagagtgccacagaattacccaacttgggttttttggtgtcctttttaactgtggtgcaaaattgaaggctatctctttggtgagctgctatgggatcaaagatctgaacttggtgttgccaacagaatctccatgtgaatcacttcggtcgttgctatcagtaactgttctggattggca

SEQ ID NO: 223833 - DNA, 352 bp, Glycine max
gaaactgctattctgcccttcgtggaaaactggttcccaaacgggatgtgaagaacatagttcaaccacatgacacatttggctaacaaagactgatacataggtgcaggtggctgtaaaaactaataaatactatgactcacacggtgacaaaaccgatgcaatagacgagctaataacattaggtgccaacaccagtgacaaagattgctaactccaaaacccgttagatatgttcttagatatgcagccacataaaaggtggctatggttgccaaaaagaacagatcttctgttgaaggaacctgcaaaaatgagagttaaatgactgcacacttcggttaaaaggaac

SEQ ID NO: 223834 - DNA, 503 bp, Glycine max
  unsure (1)..(503): unsure at all n locations
ccggaaagtactccattgagatgtcttcatccgtctacaagaattgggttttcactgaccaagcattaccagctgatctcgtcaagagaggattggcaattgaagatccctctgcaccccatggccttcgccttgtgatagaggactacccttatgctgttgatggacttgaaatatgggatgctattaagacatgggttcatgaatatgtctccttgtattacccaacagatgcagcagttcaacaagatactgaactacaagcatggtggaaggaagctgtggagaagggtcatggtgacttaaaagaaaagccttggtggcctaaaatgcagacaactgaagatctcattcaatcatgctctattatcgtttggacagcttcggctctccatgctgctgtntaatttggacaatatccttatgggggcttaatcctgaaccgtccaactctagccagaatgtttatcccagctgaaggaaccncagagtatgatgagatg

SEQ ID NO: 223835 - DNA, 564 bp, Glycine max
  unsure (1)..(564): unsure at all n locations
gagaaagagaagagaataataatttttccgggaaaattcaagttccaatcggaatcggaatcggaatctgaaatgagtagtagggtttggtttctactattccttctgctgatctcgaaatgccatcaagtgtggggctcctacgcgggttccgctagctccatcgtcaacccttccaaggtcaaacagatttcctggaagccaagagctttcgtttatgaaggtttcctcacggatttggaatgcgaccacttgatctctttagccaaatcggagcttaagagatctgccgtagcggataatctctctggagagagccagttaagtgatgttcgaacaagctctgtgaatgttcattttcaagaccaaggatcctattatttctggtattgaggacaagatttcgtcatggacctttcttccaaagaaaatgnggaagatatacaagtactgaggtatgagcatggccagaaatatgacccgcattatgattacttcactgataaagttaacattgctcggngtggacatcgcattgcgactgttctcatgtatctcactaat

SEQ ID NO: 223836 - DNA, 347 bp, Glycine max
aataaaaaattaatttgtatttgttatatcgttttatacataggaaataaccataaccattataataatgcagaattactttacagtccaagaaaaaataatcaagaactagttgaaatttgaaacccgcggcagagataacatgtagtatcttgggaagcattcagtaaaatttctaacacgacttgcagcttttcctacaatagccaggaacgtctgaagatccaatcatatactcaggatttttagtgcattctccaagtgaagcccatctgtcacagcttacatgatgatcagaacaatcacctccagcttccacagtcttatcaaacgagtctacatgaatc

SEQ ID NO: 223837 - DNA, 544 bp, Glycine max
  unsure (1)..(544): unsure at all n locations
ggaatcagtgctgaggtcattaatttgcgttcaatccggccgcttgatcgatccacaatcaatgcttctgtcaggaaaaccaacaggctggtgacagttgaagaagggtttcctcagcatggcgttggcgctgaaatctgcacatctgtcattgaagaaagttttggttatcttgatgcacccgttgagagaattgctggggctgatgttcccatgccttatgcagcaaatctggaaagaatggctgtcccacaggttgaagatattgttcgtgctgcaaagagagcatgctacagatctgtgcctttggctgcatctgcttgaatgttctggaaaattttcatgtcctggttagttctttgcagaaacaaaattttccctattttccgccacaaaacagcaggaagaaattgcaaccaaagaatgctgattntaactcattattatgttaggctttggtttaaagattctgttgtatgcataatactgtcctaattttcaggactcacagatgctatacattttttccccttctcagcatatc

SEQ ID NO: 223838 - DNA, 401 bp, Glycine max
attcaaaaagttgatttttagttattgccaagcagaaaccaaaaacgcagaaaacttcctgctgcctttgtgtcattggtgtacaagttatttaacattaacttcctcccagatatgctgagaaggggaaaaaatgtatagcatctgtgagtcctgaaaattaggacagtattatgcatacaacagaatcttttaaaccaaagcctaacataataaatgagttaaaatcagcattctttggtgtgcaatatcttcctgctgctttgtggcggaaaatagggaaaattttgtttctgcaagaactaaccaggacatgaaaattttccagaacattcaagcagatgcagccaaaggcacagatctgtagcatgctctctttgcagcacgaacaatatcttcaa

SEQ ID NO: 223839 - DNA, 522 bp, Glycine max
  unsure (1)..(522): unsure at all n locations
ggaccttgcaacaccggcgtctccctccttcctctcctctctctgcctttacctttgattgtaggtttttcattatttggcggcgaaacagggttgaatatttttgttttagcgtctgagctttgaattacagagcaaagtgaagcgtgaacatggtgatgcatctaaacgggacaccgtgcgctctcggattccacatgcctgcggagtgggaaacccacgcgcagtgctggatgggttggcctgaacgtgccgataactggcgtgacggcgccgttcacgcccaacgcgtgtttgcgagggtagcgtcagcaatctcaagattcgagtctgtaacagtttgtgttagttctgcacagtgggagaacgcgcggagtcagctaccggagcatatcagggtcgttgagatgaacatgaacgattcttggttccgtgatattggaacctactttgttgtgagaagaagcaccacgccggaatctggtgatgcagtgagcaggattgcanggattgactggaatt

SEQ ID NO: 223840 - DNA, 535 bp, Glycine max
ggaaaagagagggtttggtgagttatccaagagaaaggatgaagagagagcgccaggagcttggttccaacgcaggaacctcaagctgcggttattcaagcggaaaatcgaatctttgggaggaagaaggaggcatggacgagcttcttgcagtggtgggttacaaggtgaggtcatcggacatggcggaagtggcgcagaagctggagcgtcttgaggaagccatgggaaatgtccaagatgacctgacggacctttcaaacgacgccgttcattacaacccttccgacatctccaactggctccaaaccatgctttccaattttgaccctctcccctacgaggagcccgagaaggactccgcctcgtcggactacgatctcaaggctattccggggaaagcaatctatggaggtggtagtgacgcgctaccaaaccctatgcgcgtgagaaccgacgagtcaacgcgcgcggtggtggtcgttgacttgcaggagaacgggatccgcctcgtgcacagcctcatggcgtgcgc

SEQ ID NO: 223841 - DNA, 519 bp, Glycine max
ctcgagccgattcggctcgagctgctctccattgtgctgttgctggtggctccgaatcctcacttgagattgtcaagctcttgcttgatgctggggctgatgctgagtgccttgatgcgagtggcaacaagccggttaatctgattgctcctgcctttgattctttgtccaaatcgcgaaggaaggctttggagatgttcctcaggggtggtggggaaagagatgaactcatgagccaggagatggagctacagatgttttctgttccagagaaaaaagaaggaagtgataataagaaagaataccctgttgatatatcgctgcctgacatcaacaacggtgtatatggaacagatgagtttaggatgtacaacttcaaggtgaagccttgctcaagggcttactcccatgactggactgagtgtccattcgttcatccaggggagaatgcgaggaggagagacccacggaaatacccttacagctgtgttccttgccctgagtttcgcacagggacct

SEQ ID NO: 223842 - DNA, 513 bp, Glycine max
aaaaaacaaccaaacaaaacactcaattctcttctcttctcttctgggtttttgctttttcctcattctctcattctcaaacaccacaaaaaaatgggccttgtttcccaggatgccctcaaccaactccaagctctcatggatcaagtgctacttgaggaggagccactgcagagaacgtttcagaatgttcatcaaggatgtgtcaccgaaaccttaacacggtttctaaaagcaagggagtggaatgctaccaaggcccataaaatgatagtcgattgtttgaagtggagagtgcaaaatgagattgacaacatattatctaaaccaataatccctactgatttatacagaggcattcgcgattcacaacttataggattgtcagggtactccagagagggtctgccagtctttgcaattggtgttgggcttagcacgtttgacaaagcatctgtccattattatgtgcagtctcacattcaaattaatgaatatcgtgatcgtgtaatc

SEQ ID NO: 223843 - DNA, 564 bp, Glycine max
  unsure (1)..(564): unsure at all n locations
ctcgagccgcgaaaattagggtttgtagtgtagcaggaacaagcagcaatggcgccgaaggtaacacgcaaggttagcagaaaccccgaattgataaggggaattggaaagtactcgaggtcgcagatgtaccacaagaggggcatttgggctatcaaggccaaaaatggtggcgttttacctcgccacgaccctaaacccaaacctgaaacacccgctgaaaaaccacccaaattttaccctgctgatgatatcaagaagccccttgtcaacaagcacaaacccaaacccgctaagctcagggctagcattactccgggaacagtgttgattcttcttgctggtagatttaagggaaagaggngtagtctttttgaagcagcttccttctggattgctttcttgtaactggtccttcaaggttaatggagttccttgagacgtgtgaatcagcctatgttattggcacataaccaaagtagatatctctgctgttaatgttgacagctttggcgacaaatactttgcgaaggagcccagaagaagaagaagaaaggagaggcg

SEQ ID NO: 223844 - DNA, 432 bp, Glycine max
ctgttgccaatttttttttcatttggcatgctaaaggtccacacaatgtttaaaattcacacaatcaacaaaatgtaaagagcacgcgtcacaatttgactaacaaaattttaggttcttcatttggctgctaacaagaatgttataagagggcaactataagaaccagcatcaataaacaaacacgatatcaaaaacaagagtgacacccctctttcctctagaagactagctcatgtggattcaccccggccttcagagaaaacctggcacccaaataggacttcaagcctggcacactctcaatggcttttaacactgcagcggccacaggtttctggtgatatttgttctgctggggcaacacactcttttcctctttgtctgccgtaaagaactcgccttctgccttcgtattcttcttctgggctt

SEQ ID NO: 223845 - DNA, 560 bp, Glycine max
ggtcaattacaaacagttgttacttgaacatctcttttaattctttttagagagttcaaaattgaggcagattcatcgtacgaatggtgcagcctacattgcttaaacaatgttaagcagctgtcaaaaaaagaagaagcaatgttaagtaatacaagtgcatttaatcttatattttttgtctcttatttggtgtgcatttagaccaaacatgaaccagaccattcctattgactgtatagacctcattgcgctcttcatcacagaagagagcatctcctggaaagccgtcgctcgcttttattttggcaagacacttgccagttaaaatgttgctgacattaatggaacctgctgcataaaagaaacataaaccatcagtaatgtaccttgaaagatagacactccttatcaaaagattgatatgtgatcacagacacattttaaactactatttatttcatatcatttgctatcatgttttacattttaacatatcaagtaaaaatgttaaacatttagctaaatcaactcttagtaggtcttatgatcaaacttca

SEQ ID NO: 223846 - DNA, 501 bp, Glycine max
  unsure (1)..(501): unsure at all n locations
cgcaagcaaaaagaaagaatcccaggcgaggagaaagatggaggggaaggagcaggatgtgtcgttgggagcgaacaagttccccgagagacagccaattgggacggcggcgcagagccaagacgacggcaaggactaccaggagccggcgccggcgccgctggttgacccgacggagtttacgtcatggtcgttttacagagcagggatagcagagtttgtggccacttttctgtttctctacatcactgtcttaaccgttatgggagtcgccggggctaagtctaagtgtagtaccgttgggattcaaggaatcgcttgggccttcggtggcatgatcttcgccctcgtttactgcaccgctggcatctcagggggacacataaacccgggcgtgacatttgngctgtttttggcgggaagttgtcttgcccagggcgattttctacatcgtgatgcaatgcttgggtgctatttgtggcgctggcgtggtgaaaggtt

SEQ ID NO: 223847 - DNA, 482 bp, Glycine max
atgactctggtgttatttgtgattttgcaaattaaatgacacaatcacagccgtacatcacacatgagttgggcctcttccaacttaaaagcagaggataacattggcccatgacgcgacacatgcaccacctaataatcataattttacatctttacatacaaaatacaaagactttaaattttaaaaagaagaaaagagataaacagatcatcttaatgaaatgaaaccaaaacccacaaacattggcttgatttttgctgatgttgatgttcccaacttgattaagcatgaaccgtttgattgaatcacttggacttgaagggaatggccctgattacgacctggtggtagagtgctgcaagagctgcaccgatgaatggtcccacccagaagatccagtgtttatcccaaccaaggtccttgtttgagatgatagcagcaccaagactacgagcatggttgataccagttccggagat

SEQ ID NO: 223848 - DNA, 542 bp, Glycine max
atcttattacacctcagttttcctggctcccagaactttctttcatactctctgttgccttgtgccattcatcaatagttaaggtcttaaggacactaaatcttatggaggtgaccaaccttgtagtcttgccagcagttttggcattctttgtcctttgtctatatttcatcactaaagttgttagactcgggaaacatccaaaccttaatcttcctcctggaagattaggatggcctattgttggagaaacctttgactttatgcgtacaatgaatgagggaaacgtgttaaggttcatacaagagagagtggagaaatatgacgccagggtgttcaagacttcaatgtttggagatcctgttgttgtgttttgcgggccagctgggaacaagttcctatttagcaatgagaacaagaatgttcaagtgtggtggcctagttcggaaggaagatgttaaagttgtctctggttataaggttggtgatgaggcaagaatgtgagaaggttgctcatgagcttttttaatgcagaaacactc

SEQ ID NO: 223849 - DNA, 468 bp, Glycine max
atgttgtacataacagaataatcaaagttttattgaaatgaatacatcataaaactcatgaaagcagttacaaaaaagctgctaaccgatgtagcaaaaagttttattaaaatactaatataacaatataagatgactacttagaaagcttctaatcaatgtattatgcgtataatgaaggtattaaactagaaatgggaaggatggagtcgaattgcaagtccttctactggttctagcatggggtcatacttaaacttctcatcaggaatcaccaaatcccacttgaaccgtttcacgatattatgcatgaacacaagtgtctctagtctagcaaactcttgccccaaacacattcgggggccaccaccaaatggaacatatgataatggtgtaggccctgctcctttaaaccttgaagcatcaaaagtttcgggattcgagaagagtgctggatccttgtgtgat

SEQ ID NO: 223850 - DNA, 610 bp, Glycine max
  unsure (1)..(610): unsure at all n locations
gcagcttcaaagtacctccacattgtctcctactcttactgttctcttctcttctcatcatttttattttttccaatcaaaccaaacaaaacataagcaccgctcttttctctccgaaatccccatctcccttcacttctgagctctggacgagatcccagatctcaccatctttcacgcactcttccatcagattcaccctttcgtttaacgcaaactcataacttgaaggttaatggctgctccaccggcaagggctcgtgccgattacgattatctcataaagcttctcttgatcggtgacagcggtgttgggaaaagttgcctccttctgcgtttctccgatggttctttcaccactagtttcatcacaactataggcattgattttaagataagaaccattgagcttgatggcaaacggatcaagctccaaatttgggatactgcagggcaggagcggttttcgaccaatacaactgcttactaccgtggtgctatgggcatatngctagtctatgatgttacagatgaagcatcanttaacaatatcagggaatggattcgcaatattgagcaacatgcttcagacaatgttaacaaaatactg

SEQ ID NO: 223851 - DNA, 553 bp, Glycine max
  unsure (1)..(553): unsure at all n locations
ttcttctcactcttcagatctctctcccttccttccatcccaaccacaaggttgctgagaagacataaaaaatggtgaagatttgctgcattggagctggctatgttggtggcccaaccatggctgtaattgccttgaagtgtcctgagatcgaggtggtcgtggtggacattgctgcaccgcgaatcaacgcgtggaacagcgaccacctcccgatatatgagcctggccttgatgatgtggtgaagcagtgcagggggaagaatctcttcttcagcactgatgtagagaagcatgttgccgaggctgacattgtctttgtctcggtgaacaccccaacgaagactcagggtcttggagccggcaagggcagctgatctcacatattnggnagagtgctgccaggatgattgctgatgtatcgaaatcagacaagatcgtggtcgaaaatcgactgtgcctgtgaaaacagctgaggcaattgagagaaatctgacccatatagggaaggcatcaatttcacaattctgtcaaaccctgagtttcttgctga

SEQ ID NO: 223852 - DNA, 322 bp, Glycine max
ataagaatagcatgataatcatcatatataagaggagggggggggcattctctttgaaagaccaacagcaaattcaacatccctaaaggaagctccagattgtgctttttccctttaagccactgcaggcatgtccttgagccatgaatctagaggtttgccaatggagtaaacaatgaaacccatttccctcagcttgttaacattcacgacgtcgcggccatcgaaaattaatgcaggcttaccgcatgcatgccataaaccttttggtaatccacgttcttaaacgtctaccactcagtcattatgcacatgccatgtg

SEQ ID NO: 223853 - DNA, 526 bp, Glycine max
gtagttttggacagtctcataaaactcttgttacgttgcattaatatctatagttaggcacaacacttcattagttttcaatatgttttcaacggctactgcagacggtgttccgacgccgtacaattctacggtggcgacgatgctggggcggcggcggattccgatacacacgacgttctactgggggcacaaggtggacatactgttccggtgctggcccggggacagcgccgccatgtacgcggtggcgctgctcctcgtgttcttcatggcggtgctggtggagtggctctcgttcaccaacatagtgaagctcaagcccgggggctcaaacgacgtcgttggggggctcctcaagacggggctatacggcgtgcgttccgggctctcttatatggtgatgctggccgtcatgtcgtttaatggaggggtgtttgttcgtgcaatttgcggccacgtcatcgggttcttgattttcgggacgcgggctataaggaagaaatcggatgggttggactcatcg

SEQ ID NO: 223854 - DNA, 416 bp, Glycine max
  unsure (1)..(416): unsure at all n locations
atgcgtatgctactganaccaagagaataatgcccgcgccgacccgtctactcgtcgttggccgccctttttttttgtgcatttttatatgactttagatccgacgtacgaacaatccacggccggtgcctctcttaagaaaaccagacaggcgcttaaaacctgtactgcggactcctcaacatggccttggcgctgaactctgtgcatcagtcattgaagaaagttttggttttatcactccacccttttacagaactgtcgtggcgcgcattcttaagctatcctcaacagaccacaaaagagcggctgtctcacaggttgaagatattggttgtgctgcaaagagagcatgctacagaccattgcctaggcatacacacgctcgaatgaactggaaaatttacatgatctgg

SEQ ID NO: 223855 - DNA, 427 bp, Glycine max
  unsure (1)..(427): unsure at all n locations
aattaatcaaacatggctagggttagtgctttgtttcactctttgctcttgatttcttcccttgtattggcttctcaaatccatgtttcctctgggaaactagtccctggactatcatggaattactattntgttgacatgtcccaagcttgagaggattataaggaagcatcttgaggatgtcttcgagaaggacagtggagtagctcctggcatacttcgactcttcttccatgactgctttcctaatggatgcgatgcgtctatattgttgaatggagacggtgacgagaagcaacaccgtgctaactttggtttaaggcaagaggccattgacgccattgaaaaccttcgggttctcatttacaagcagtgtctaccaagttgtctcatgctcagacatccttgttatcgcagcacgtgaagc

SEQ ID NO: 223856 - DNA, 492 bp, Glycine max
  unsure (1)..(492): unsure at all n locations
aataatctgagagagaaacaaaaacaatgaaggtttccattgccaagttccactcccttcccctatgttttttccttctcttggccttcaacacaaaacccctcctagcagcagaaccagagccagtggttgataagcaagggaaccctttggagccaggagtagggtactacgtgtggccactttgggctgatgaaggaggcctcacactaggccaaacaaggaacaagacatgccctctttatgttatccgtgacccttcattcattggcaccccagtttcattcttagcaccaggccttgaccatgttccaacactcactgatctaaccattgatttccctggtgggaccagtgtgtaaccagccaacagtgtggaggctcacaaggtagggtcagggttctggtttgtgagcacagtggtgaccctaatgatatcactagcaagttcaagattgagaggcttgaggnggatcatgctatgagatctac

SEQ ID NO: 223857 - DNA, 507 bp, Glycine max
tgaaccaaatcatcacacacacatactaagaagcaacaattcttctacaatggatctcctccttctggaaaagaccctcataggtctcttcctcgctgcggtggtcgccatcgccgtctccaccctccgcggccggaaattcaagctcccaccgggcccactccccgtcccaatcttcggcaactggctccaagtcggcgacgacctcaaccaccgcaacctcaccgatttggccaaaaaattcggtgacatcttcctcctccgcatggggcagcgcaacctcgtcgtggtttcttcccctgagctcgccaaagaggttctccacacgcagggcgtggagttcggctcccgcacccgcaacgtcgtcttcgacatcttcaccggaaagggccaagacatggtcttcaccgtctacggcgagcactggcgcaaaatgcgccgcatcatgaccgtccccttcttcaccaacagggttgtgcaacaataccgccatggatgggaaatcga

SEQ ID NO: 223858 - DNA, 402 bp, Glycine max
attacaaaaccttctaaaaaccgtgcatcactccaaggtcagagatgtactatacccattagcaggccaaatatatatgacatttttggaacaaccccatttttaagcattgatacaatacagagtaaagaaaagggaaaagaaaaaagaaaaaattaaggggattgatcatatgatcatgatcatgtggcggagtctaaaatgaccttggctttgccacaatggaggaatgcatgagtatgtgcaagctaaattgccctcctttctcactagtgttaatctgtgactggccagggggagggaagagcataaagttttggaccaaacgtgctcaaagtgatgccaacaaatggcaatgcaagaatgattgcagggcagcttcttgtgtctacaccaaaggga

SEQ ID NO: 223859 - DNA, 415 bp, Glycine max
  unsure (1)..(415): unsure at all n locations
gtgagcaaagaaagatagtgagtgaagtaactgaagagaagaaaaaatgccgtgcctcaacctcagcaccaacgtgtccctcgaaggcgtcgacacctcttccatcctcgccgaagccacctcctccgtcgccagcataatcggcaaacccgaagcctatgtgatgattgtactgaaaggatcagtacccatagcttttggtgggaatgagcagccagcagcttatggagaattggtttccattggtggtcttaaccctagtgtaaacaaggaacttagtgctgcaattgcttcaattctggaaaccaaattgtcagtgccgaagtcgcggttcttcttgaaattctatgacaccaangggttccaacttcggatggaatggatctacattctgaaatccgaattccatgttaca

SEQ ID NO: 223860 - DNA, 488 bp, Glycine max
ctctctcctctttcggaggataggaacaggcacaggaccagtgcaccaaatatagggagagagtgaaggaggcagcaggttggtggggttttggtttatttgggtggttctgaattctgatccaatttcacatataaaaatggctggttctcttcaaaaccaacgacaacaacttcttggaattatcaaagaagaagaacaagagaaattgcagaaacagaaagaagagactgaggggaacaacaacaataataacaataacaagagtgacatggctcctacggcagggaattcgatccacaggtcgggttcgaggccgcaacttgatgtgagcaaagctgagattcaagggaatgtggaggagaagtatcccaccattttgttgcctaatcaatctgatgatttgtctcatcttgctcttgacattggaggatctctgataagttggtgtacttttcagacatgaagatcaatcatggatgataaag

SEQ ID NO: 223861 - DNA, 546 bp, Glycine max
  unsure (1)..(546): unsure at all n locations
tgcacttgcaaaattttggttgcagaggcatagagaggaggcaacgccacaccgcaccactctcactctgcaacacccgaatctcgtttcacctaaacgacctcgtttttgcgttcttttcccttttcttcttctgatttaggtttcagagagaagaagaaggagcagcaatggactctcgcacgtataatcctcgcaccgtcgaagaggtttttagggatttcaagggccgaagagctggtctcatcaaagccctaaccaccgatgttgaagatttctacaaccaatgtgatcctgagaaggagaatttgtgcttgtatggctttcccagtgagcagtgggaagtaaatttacctgctgaagaagtaccaccagagcttcctgagcccgtactgggcattaactttgctagggatggcatgcaaagaaaagactggctatctttagttgctgtncatagtgatgcatggttgcttgctattgcattctattttggagcccgatttgggtttgataaagctgacaggaaacggctttttcacatga

SEQ ID NO: 223862 - DNA, 469 bp, Glycine max
  unsure (1)..(469): unsure at all n locations
aacaacttctgctacttcctactccaaccgcacttctgttccgcaattatcatgggcaaggtcaagatcggaatcaacggatttggaagaattggccgtttggtagccagagtggctctgcagagagacgatgttgaactcgttgccgttaacgaccctttcatcaccaccgattacatgacatacatgtttaaatacgacagtgttcatggacactggaagcatcacgatgtcaccgttaaggacgagaagacccttctcttcggtgacaagccagtcactatttttggacacagaaaccctgaagagatcccatgggggtcaactggagctgacatcattgttgagtccaccggagttttcaccgataaggacaaggccgccgcacatttgaagggtggtgcaaagaagtgatattatttctgcctccagtaaggatgcccccatgttngttgttggtgtcaacgag

SEQ ID NO: 223863 - DNA, 352 bp, Glycine max
aaggacggtcaaatatctactataacaatcaataacaggggcattagcaagtattcaagccaagtacatcagcgagtatataaaaatccaaaaactcgatccccctccacaagagaaaacatcaaaagtgcaaaaaagagctaatgctcctccaacaagtaacaccactggtttcagaaaccgatttattcagacctctcattttttgctcgagcaagacactaaatcgcagctaaacataaacatacggtaataatgcgaagacaagctactttgaagtaacaccttaaagagactccttggcaacgaatacaagaagatcaatgacccgtgagctgtatacccactcgtt

SEQ ID NO: 223864 - DNA, 495 bp, Glycine max
aaaaaatgaaccatgttgagcatatcgcttatgacatggtcatgatcactctatccatatctctcatcgttcttgccatcatcctcttccttgcttgcaagaagaagcccgttgaatccgaagaaacacttcccgtgaagctttgtgctcgtgcataccccttgatggaaatcgatgctgccacagatggcttcaaccacaggagaatcattggccagggtcgcttaggaaccgtgtatgcagggacactagagcaagaagaacaacaacttgtagccgtgaagcgtattcacccctttcttgtgttgagcaatgcagggtttggtttctcatccgtgttgaagtggctctccttggctcaacaccccaacgtggttccaatcacagggttctcagaagcacccggtagagagttgttttgtggagtttgtgcacatggcaagcttggacttctacttgcaccaaaaccaagatggggcttcgctcttggattgg

SEQ ID NO: 223865 - DNA, 539 bp, Glycine max
  unsure (1)..(539): unsure at all n locations
tttccacctttatttcaactttaagactccacagaaagaagcatattcctgagtcaaatagttctgtccatatagaatttgtgaagtgagagtccaacctttcattttcaattttcaaagatgcctcgtggaacacttgaagttgttctgatcagcgccaaaggaatcgatgacaatgattttctctccagcatagatccttatgtgattctcacatacagggcacaggagaaaaagagcactgtgcaagaagatgctggatccaagccacaatggaatgagagctttcttttcactgtctctgacagtgcttctgaacttaatctgaagataatggataaagacaactttagtcaagatgattgtcttggcgaggcaaccattcatttagatccagtgtttgaagccggtagcattcccgaaactgcttacagggttgtgaaggacgaagatattgtggtgagataaggtggctctcatntcactgctgagagaatgaggacanggttatgatgcacctgagagactatgtggatgga

SEQ ID NO: 223866 - DNA, 572 bp, Glycine max
  unsure (1)..(572): unsure at all n locations
gcgagctcgaacgaacgaagtagagtagtgtgctacggaaaatgtggcggtgcattgctcgtggactccgtggacctgcttccaccagatccacctccaatcactcacttggatctcacttttatagattcttctctagtggggcgaactcttcgtacaccgtggtggatcatacttatgatgctgttgtcgttggtgctggtggcgcgggattgagagctgctattggactttcagaacatgggttcaatactgcttgtattaccaagctcttcccaactcgttcacacactgttgcagctcagggcggtataaatgctgctttgggaaatatgactgaagatgatgngaggtggcacatgtatgacactgtcaggngaagtgattggctaggagaccaggatgccatccatatatgtgtaggggagcacctaagcagtcattgagctagagattacggattaccattttcccgaacagaggatggaaaataatcaacgtgctttggtggtaaagcttaactatggaaaggggtcagcttaccgtggctgtgctgtgatcgactgacatgc

SEQ ID NO: 223867 - DNA, 381 bp, Glycine max
aaaaaaactgggttgctattatttggtggggcaaatacagagtgttatttgaggatgccaggaatattaattaacattgatgatgaatgcaacaattttcataaaaagtggaaatcactcatttcggacattttattgaattttttccctgtgatttaacattgagactacaaggctaatccatccgctggcatgtattttaatacacccgggccttgggagggaatgattcaaccttattatccaattcattcaaaagcacccgcctgtaatgcaaccggaccttttggttctgccaaaatcccacaaggtgtttgatggaggtcccattatttctaaccttgaagtatttaaggggctgagccaccctactttttttcc

SEQ ID NO: 223868 - DNA, 365 bp, Glycine max
ggtagagagctcttcctccctttctcacagcaatggccgccgcagcacgccctctcgtcaccgtgcaggccctcgacggtgacatggcaaccgatgcctccgccaccgttcccatccctgacgtcatgaaggcctctatccgccccgacatcgtcaatttcgtacactcgaacatctccaagaacagccgccagccatacgccgtcagtcgtcgcgctggtcaccagacctccgccgaatcctggggtaccggccgagccgtctcccgtatcccccgtgttcccggcggcggaacccaccgcgccggccaaggagcctttggaaacatgtgccgcggcggacgcatgttcgccccgacaagatct

SEQ ID NO: 223869 - DNA, 417 bp, Glycine max
aaaataagaaccagaatttgcactaaaatccaacaaacaaaatttccacattgtctgcataattatgatgacaaccttaacccgcaaaacaaaaaaaccaaagataaggatattcagttctgatgagcataaaaaacaaaattctaatacgaaaaaataaatcatgaagtttactgtgaaacacccaaccacttagaaaagttgtcgaattctgtataatcagaatctgacaccatagtgtgataccatgctttcccagcagccttgatggcagacgcttcctccttagagacaggcttcctgttcttgtcgagcttctacttcttgaccttaacccgctgtgcctcagcgagaagggccatcctcttagcagtcttggcattaggattcagcttcagcattgagtggagattctta

SEQ ID NO: 223870 - DNA, 538 bp, Glycine max
gaagaagacttcgacatccccggcggcgaggaaatggatctcggcgaagacgaggtcggcgaggagagggagatcggctctggcggcctcaagaagaagctcctcaaggaaggtcaaggctgggaaacccccgaagtcggtgacgaagtccaagttcattacacggggactttgctcgacgggactaagttcgattcgagccgcgacagggattctcccttcagcttcacgctcggacaagggcaagtaattaaaggatgggatgaaggtattaaaaccatgaagaaaggtgaaaatgctattttcaccatccctcccgagctagcttatggtgaatctggttcccctcctactattcctcctaatgctacactccaatttgatgttgagctgctgtcatggactaagtgtaaggacatatgcaaggatggcggtatatttaagaagataattactgagggggagaaatgggagaacccaaggatcctgatgaagtattggttaagtatgaagttcatctagaaaatggaaagctttt

SEQ ID NO: 223871 - DNA, 567 bp, Glycine max
accagcagcttcaagtttctcttgagtgttcagatcccaggactccttctctttctcaaatgacactagctcaacttcaaaatacacggctgagttaggaggaactacagccaactcctgttgggactctgatgtaccgaaagcataatcaggtgcaatggtcaacaacgcaacctcacccttcttcatagtcaatacagctctatcaagtccatcaacaacttgttcctcatctgttttgaattcaaacagcttctcttcttcatcatggccctttttcaaaaaagcggtaccatcttgtagcttaccaattagtttcactttaacaatggccccctcatttggacgctcatatccttccccttccttgaggatcttctttatgaccttcttgtcatcagttacttctgaaacagttttgcatgaaactaattcaagagtaatctgcaatgttgcatttggtggaactgcaccttcatccccttgttctggctttcccttctcaccaaatccatattgtggcttaactgtcaaaagcactttctctcccctcttcatgggtttaac

SEQ ID NO: 223872 - DNA, 404 bp, Glycine max
gtatgcctatgcttgtttatcattttcttactttcctctcacgctctgccacaaaactccgtctccgcaataacggaataaaaaaacaagtttaattactattatggcgccgagggatcataagacaagcaacgctaaggctaacggtaacggtaacagcggggtgaaggaggtgcattttcgtggagtgagaaagaggccgtgggggagatacgccgcggagatcagagatcccggcaagaagagccgcgtctggctcggaaccttcgacacggcggaggaggcagcgcgtgcctacgacgccgcagcacgagagtttcgcggccctaaggccaagacaaacttccctctccctttggaaaatgttaagaactcgagccccagccagagcagcaccgttcgag

SEQ ID NO: 223873 - DNA, 473 bp, Glycine max
aaggcataccttgaagacttctatagattttgtcagaaacttggtggtgccacagctgagataatgtctgaccttctagcttttgaggccgatagaagggctgtgaatattaccataaatagcattggtactgagcttaccagagatgaccgtagaaaattgtactctaattttggtttgctatacccatatggtcatgaggaacttgctgtctgcgaggacattgatcaggttcgtgctgttatggaaaaatatcccccctatcaatctatttttgctaagctatcatatggagagagccagatgcttgacaaggcattctacgaggaggaggtgaaaaggctttgcttggcttttgagcaacagtttcattatgctgtgttcttcgcatatatgaggttaagggaacaggagatcaggacttaatgtggattcagaatgtgttgctcagatcagaagtcagagtcatgaca

SEQ ID NO: 223874 - DNA, 446 bp, Glycine max
gatacgtaaatccagctagcaagtttattccatagaaatatttactgcaaaagtcacaacatacaaattgaatcttaacatctttaaaactgaacatatttcaatcaaatttgactaaaaaaatcttcctttcatattacagaagatcttatcagcataagattaatcatttttatctcaatcttctgaacagtgtctgtctagtgtctaccaatcaacaactcagatggagaatgcagaaagtatacaaattgtcccaacgaacatacaaactataacgagccatccaactaaaatatgaagacaacactgtcatgaactctggacttctgattctgagcaacacattctgaaatccacattaagttcctgatctcctgttcccttaacctcatatatgcgaagaacacagcataatgaaactgttgctcaaaagccaagcaaag

SEQ ID NO: 223875 - DNA, 403 bp, Glycine max
tacacaaacacaaacacaaacacacgtgtcgagtgaattcaaatcaatttaggcagaaaatgaggtgttttggtttcatagtgataggtctagtggctgtgcttggagggttacccttctcctcaaatgcaaaattagaaccctgtttttacaagaagacttgtccccaggtgcattttattgtatttaaagtcgtagagaaagtttcaagaacggatccacgtatgcctgccagtctcgttaggcttttcttccatgactgttttgttcaagggtgtgatgcatcaattttgttgaacaacactgccaccatagtgagtgagcaacaagctctgccaaacaacaactcaataagaggtttggatgttgtaaaccagatcaagacagagttggaaaaagcttg

SEQ ID NO: 223876 - DNA, 420 bp, Glycine max
tttcttttttctttctctttttctttttttttttttgtaaagagagaagttggttgcgaatacaacatgattcaaaaaacaataaagatctcacacgtgcacaataaaacatagcttgctgggggcacttatacaataaaacatggcttgctgggggcacttatacggataaggggcctatatatagcttgtttattgggaaccttcaatcacatgattccctagtgtatataaaactcttcctaattcattcatatggaggtaaccagaccctgttttgattcggatgccacactacctatattaagttccgaagaattgttgataacaaagtgacaatgatctctgaattctgcttttttcccagttggcacaccaatatttcccattttaatcaaggaagcccaaacgcttttaaag

SEQ ID NO: 223877 - DNA, 581 bp, Glycine max
  unsure (1)..(581): unsure at all n locations
attgaacattcggacttccggatgcaagattcaaaagattattatggccttgctcctgggaaatctgtgatactcagatatgcatttcctataaagtgcactgaagttattctagctgatgataatgagactattcttgaaattcgagccgagtatgatccttcaaagaagaccaagcctaagggggttctccattgggttgctcaaccttctcctggagttgatccattaaaggtggaagtcagattgtttgagaggctattcctatcagagaatcccgctgaacttgacaactggcttggcgatttgaacccaaattccaaagtgataattcccgatgcatatggtgtgtcttccatacagaatgcaaaagttggggacaatttccaatttgaaagattaggctattttgtggttgaccgggactcgacatcagaaaaacttgtttgtaataggactcaccttaaagggcagctatagcaaaggtggaaagtanggtccctgaatattgattagaagtacaaggtgggacaggcaggtctgcgggtaatactntgttaaatagctacttataatgcata

SEQ ID NO: 223878 - DNA, 547 bp, Glycine max
  unsure (1)..(547): unsure at all n locations
cgctgtaatagcatggacaccaagttctgctattataataattacaatgtcaaccaaccccgccacttctgcaagaattgccagagatactggactgctggggggaccatgaggaacgttcctgtaggtgctggtcgcaggaagaacaagagcgtggcttctcactatcgccagattactgtttctgaagcagcccttcagaatcctagaacggacttgccaaatggagcatatcatccttccttgaagtgcaatggtacggtccttacatttggaactgatacacccttgtgtgagtcaatggcatctgttttgaaccttgctgataaaaccatgcacaattacacaagaaatggatttcataaacctgaggaactaagaattcctgtttcccatgccagtggagaaaaaggggatgatcaatctaataaatctttggttacctccacaacatctgtgaaggtgcaagcaccaatagacccaagaacaggttatgcagaattgtcagagctttccgtcacaagttccctactttnctgggacccct

SEQ ID NO: 223879 - DNA, 438 bp, Glycine max
ctttctcttccaatctttaattatattagatttgattttccttaatccttcgcctgctttttcattccggatttttctgcatcagtctatttgtagggtgtattcccttgattttgtgtgggtttgagtgagggtgcgtgtgaatgaaaaggaaatttgctggaggtgatgcatttgcatagatgaagacagaaaaagtttggcgtttaggcggcatgggtgatatgcagatactgcctgggtctcgccaccgtcctcccatgaagaagccgaagtggattattggcttggtgttgtttgtctgtgtctttctaatctgtgcttatatctacccaccgcagagcagttcgacctgttatgtcttctcttcaaagggtgcaagggttttgttgattggcttccacctatgcctgcaagagaatacaccgacgaggagat

SEQ ID NO: 223880 - DNA, 404 bp, Glycine max
ccttgctcctgcttcctactatatcggtttttcactttttctttaggttgattctttgaactgttgttggccatggatggcctaagtcgcttttggggttgcttgcttgaaagcaacagtgggagctattctgcagctcctcctctgatgctcctgaacaagttctccagcaaaccagccaagtttctcgaagttactctgctccccaattctctttcctccaaacagtactgactctacattctcctgcttcaacatctcttctgctattcctactagcatcttcacattgccgggacttgaatctgtatccacattgggtccacatcgccccatacttgacccatttgcctgaatgcggacataattggtgctgcggcactgaccaaaggccatggcgatgg

SEQ ID NO: 223881 - DNA, 384 bp, Glycine max
cttagtcccaattttctagggttttattcattttccgatggcttctgcagatgttgagtaccgttgctttgtcggtgggctcgcttgggccactgacgaccatgccctcgagagagccttctctcagtacggcgaaatcgttgaaacgaagattatcaacgatcgtgagactggcagatccaggggttggatttgtgaccttcgcctcggagcagtccatgaaagatgcgatcggagcgatgaatggacagaacttggacggccgtaacatcactgtcaatgaagctcagtcccgcggtggcggcggcggcggcggaggaggaggatacaatcgtggtggcggtggatatggtggtcgtagtggccggggcggtggtggatacc

SEQ ID NO: 223882 - DNA, 538 bp, Glycine max
  unsure (1)..(538): unsure at all n locations
gcctctcacagctgtcattttggagattgccctccttgttcaatgcccatagcaaaagaatgtattggtggacatgtagttcttaggaacataccttgtggttcgaaggatattaaatgcaataaactctgtgggaagaccagacagtgtggtttacatgcatgtggcagaacatgtcacctccccccttgtgataatctgtcagctgtgccaggtatccgagcctcttgtgggcaaacatgtggtgctcctaggagagactgccggcatacatgtacagctccttgtcacccttcaactccatgtccagatacaagatgcaaattccctgtcacaattacttgttcttgtggccgaataacagaaaatngtccttgtgatgctggtggcangttgtgctaattatgatgctgatactgtacatgaagcttccattattcaaaagtgcctgtgcttcttcaacccgtggctgcaaatggcaaaaaagtccccctcngacaaagaanactgatgtgtaatgatgactgtgctaagttag

SEQ ID NO: 223883 - DNA, 435 bp, Glycine max
attgctagaatggaatttcgatgctcagtcatctcttttaccattctcttctctcttgctcttgcaggagagagccatgtccatgcatcgctacctgaggaagattattgggaagctgtttggccaaacactcccattcccactgcactgcgagagcttctaaagcctctccctgcaggtgttgaaatcgatgaactccctaagcaaattgatgatacacagtacccaaaaacattcttctataaagaagaccttcatccaggcaaaacaatgaaagtacaattcaccaagcgtccctatgcacaaccttatggtgtatatacatggttaacggatattaaagacacctctaaagaaggatatagttttgaagagatatgcatcaagaaagaagcgtttgagggagaagagaagttttgtgcaaaatccttggga

SEQ ID NO: 223884 - DNA, 413 bp, Glycine max
agacttaaaaaagcacactgcatattcatcaaagcatcatcaaagcacactgcatcctaacagcacacgtacgtagaaaggggaagttccaggtcttgcacaacatacacaacacaccataatttattttatatacaatcttatggtgcccaagatgcagatgcatggactaattaaacaacaacgttagtctgataggcagtgtccatagataaattgggtacccataaaatggccttgcttccaaggaaatggcaaacagggttagtttcaggatcaactcccatgagttcatgaagcatgtgatgattcattccaaaagtatctgagtggaaaacagcaagtgcctgagttttggttccatcaccagccaccaatggaaccataaaagctgttgtttcacggactttatg

SEQ ID NO: 223885 - DNA, 501 bp, Glycine max
cacgatggaaggtgttatcttcaccaccctgacgggatagcaaatctttcatgaaattgagaattgctgctgctaatagacaagcttccattaagatgggggagttcaccgggagtggtgagtatgtgactcacggtgaattaccttcctccaggccaaatcattcaaggaaagttacagttcttcctcttgtgtttctcatcttctatgaggtttcaggggggcctttcggggtggaggatactgtgcacgcagcaggtcctctgttagccctcattggattcttgcttttcccattgagtatggagtgttcctgaagctttgatcactgctgagatgggtaccatgttccctgaaacagtggttatgtggtttgggtttcgtctgctttgggtccctattgggggattcaacaaggttggatgaaatggctgagtggggtgatagacaatgcattatacccagttctatttcttgactatctgaagtcaggaaatccct

SEQ ID NO: 223886 - DNA, 356 bp, Glycine max
  unsure (1)..(356): unsure at all n locations
cacgatggaaggtgttatcttcaccaccctgacgggatagcaaatctttcatgaaattgagaattgctgctgctaatagacaagcttccattaagatgggggagttcaccgggagtggtgagtatgtgactcacggtgaattaccttcctccaggccaaatcattcaaggaaagttacagttcttcctcttgtgtttctcatcttctatgaggtttcaggggggcctttcggggtggaggatactgtgcacgcagcaggtcctctgttagccctcattggattcttgcttttcccattgantatggagtgttcctgaagcttttgatcactgctgagatgggtaccatgttccctg

SEQ ID NO: 223887 - DNA, 455 bp, Glycine max
ctcgagccgattcggctcgagggctgtttccccttttgttttctcaagagttttctgtgagcacaatctccaagctgttcaggaaccgggtttggattggttttctgtgtcaaattcccataggaatgtctctggtgaggaagagtctgacttcaagagtggagaatgttgaggaaagccttgacatgtcagtgttggacttgcctgagttggccttggattgcattcttgagaggcttcccccctcttcgctgcgtcgaatcgccgccgcgtgccgcaccttgagggagaggtgtgtgagtgatcacctttgtgagaagcacatgaggaagaagtggggtagagttattggccctgctgcttatagggagtgggaatggcatgctgcttacaaaggaatgttgtgggtctaaacatggcatgcatcagggtttgatgagatgtatgtctcttca

SEQ ID NO: 223888 - DNA, 548 bp, Glycine max
  unsure (1)..(548): unsure at all n locations
ctcattttcctcttgtgtaagaggaggtaacatttctgcgtgttagggacaagatgaagcagagcattcttccttcagtttttcttggaattttggcttgttggggtgttctcccggttactggcagaagaccgatatcagtacttcacatgggaaattactaatggaacaatttatcccctaggtgttcctcaacagggaattcttatcaatggtcaattcccgggccctacagttgaagccatcaccaatgacaatatcctcgtgaatgtcattaacaagctagacgaaaaattcctcattaccatggagtggtatcaaacaaagaaggacatcatggcaagatggagttttaggaaccaactgtccaatccctcccaaaagcaactggacatacaagttccaagtaaaagatcaaattggaacttacacttatttcccatcaaccaaaatccataaagctgctggtggatttggnggaatcaatgttgcccaaagatctgtgatatccatcccatatcctgctcctgatggagaattcaccctac

SEQ ID NO: 223889 - DNA, 453 bp, Glycine max
gcgttcgtgcttcctgcggcggagtttcttttcagcatacaactcacgccttgaatacggtacggttgttgttgctatatgcccgaccagggagctgacgattcacacccacgccgcagcgaatgagctttttgatgaatcactctgagacgcttgatgtgtcgatcgaccgttccgctaactctgccaaccaacaccgaatcccttaaggtttctttcgcggcaaaggagcttgacgtggcggaatggaaaggggaccttctcgccgttggcgtaacggagaaggacgtcgcgagaaacgtggaatcgagattcgagaacgcgattctgagcgcgttggactccaagctgggcgggttgttgggccacgtctcgtccgaagaggacttcagcggcaaacttgtgcagtccacggatctaagaatcgctttcggactcggattcatgcgcgtc

SEQ ID NO: 223890 - DNA, 539 bp, Glycine max
  unsure (1)..(539): unsure at all n locations
cccaatcctaacactttcttctctctgttttccttcttcctcgcatcaatggagttggacggcgttctcctcggcatgtgcaaccctctcctcgacatctctgccgtcgtcgacgacgctttcttggaaaaatacggtatcaagttgaacgatgcgattctcgccgaggataaacacaaacctatgtatgaagaattggctaacaatcctaatgtggagtacattgctggaggtgctactcagaattcaatcagggttgctcagtggatgcttcaagcaccaggtgccacaagttatataggttgcataggaaaggacaaatttggagaggagatgaagaagaaatgtacactagatggtgtaaaggttaactattatgaaatcgacactacacctacaggaacttgtgctgtttgtgtggttggtagggaaaggtcccttgttgccaacttatcagctgcanattgctacaagtctgagcatttgacgagaccggannaatgggcattagttgaaaaagccaaagattactacatttc

SEQ ID NO: 223891 - DNA, 439 bp, Glycine max
  unsure (1)..(439): unsure at all n locations
ctttctcttctcacattgcttccttcctttcttttcttcaaatggaaaaaaaggtccttttttttgtctccattctcttattcattgctctgctatttcatggaggaaaggttttagctttcaagagccaagacggatcagaggaatggggatacgttcaagtcagacccaaagcgcacatgttttggtggcattataaaagtccatatagagtggaagatccttctaagccgtggccaattgttctatggttgcaaggaggacctggtgcttcatgagttgggattggaaattttgaggaggttgggcctttagacacaagcttgaagccaaggaactccacatggttgaaaaaagctgatctcttgtttgtggacaatacagttggaaccgggtacagttttgtggaggataaaaaactctntgtcaaaacagatga

SEQ ID NO: 223892 - DNA, 484 bp, Glycine max
  unsure (1)..(484): unsure at all n locations
aacacgggcccaggaactggtccctcatcagcaagtccatcccgggccgctccggcaagtcctgcaggctccgctggtgcaaccagctgtccccccaggtggagcaccgggccttcacccacgaagaggacgacaccattatccgggcccatgcccgcttcggcaacaagtgggccaccatagcccgcctcctccacggcagaactgacaacgccatcaaaaaccactggaactccaccttgaagcgcaagtgcacttcaaccatgattgacgacgacaacactcccccgctcaaaagatccctcagtgccggcgctgctattccagtctccactggactctacatgaaccctcccactcctggtagccctctggatagatgtgaagtgagncagcgtactggttgcatcctctcacatgttttccgnacccgtgcctagaacagccgcggttctaccacccgtagaaacaacaacactttgtc

SEQ ID NO: 223893 - DNA, 493 bp, Glycine max
gcgcgtttaaaacacaagaactcgatggactctagcttggagaaaactcctttcgccttcgtcttcctccatagcgttagggttttcagagtctcttttcttttccccctcaacactcacttgccgttggccacgtgttgcacacctccaagaccaaaacgacgcgtttttgaaaccgctctttgactctatcccacggttccacataacatcgcagttccgttccgtcgaatcgcgaattcgaaggatatcgatattatcgtgctacacgagattttgaaaagaaaagaaaatgtctatggttgatgagccgctatatccaatagcagtgctcatagatgagctgaaaaatgatgacatccagctgcggttgaactcaattagaaagctctcgacaattgcgagggccctcggggaggagcgaacacgaagggaattgatacccattttgggtgaaaataacgacgatgatgatgaggtacttcttgcgatg

SEQ ID NO: 223894 - DNA, 483 bp, Glycine max
ggagggaaaatgtctgatatcagaatcaataaagcccgagtgcatgtgctagtatataagaatccaaaaaactccatcccctacacagaagaggcaacagaaaagagcttaatgctcgtaacagggtaacaacactggttccggaaaccgatttattcatacttctcaatttttgcacgagcaagacactaaatcgcatcttgaccagcacataatgttagaaccaccttaattaaaaagacttcttggcaacgattacaagcaggtcaatgacacgtgaactgtatccccactcgttgtcataccaagagacaagcttcacaaaatttttattcaatgcagattcagtctttgcatcaaaaatacttgatctgttatcaccaacaaagtcggtggagaccacattatctttagtgtaaccaagaattcccttcaacttgccctctgattcctccttgatagcatttgtaatttcatcatatg

SEQ ID NO: 223895 - DNA, 373 bp, Glycine max
cgctgctgccattgcttacggtcttgacaagaaggccaccagtgtgggtgagaagaacgtgttgatttttgacttgggtggcggtacctttgatgtctctcttctcaccattgaggagggtatttttgaggtcaaggccactgccggagatactcatcttggaggagaagattttgataacaggatggttaaccattttgttcaggaattcaagaggaagcacaagaaggacatcaatggaaaccctagggctcttaggaggttgaggactgcctgtgaaagggcgaagaggaccctatcatctactgcacaaaccacaattgagatagattctcttatgagggtgttgacttctacaccacaatcacccgtg

SEQ ID NO: 223896 - DNA, 434 bp, Glycine max
aaccaaccaaagtaccaaacaagaccagaaggctttgtatatctacctatctgtctaagccattcatcaaagctcaactggaccagatgatgtaggctcttagatccgagtgatgaaagttggatatttgatatcagtatcacaaaattattcagtgtgaagcaatatggggaacacgtgtgttggtcctagcatttcaaaaaatggttttgttcaatcagtttctgcggcgatttggcggtcccaattgcctgaaggttcagtgtctaatagagaatctgtaaaagaggaagcaactagtgtgcccgaatcgcccttgcctgtccaaaacaagcctcctgagcagataactatgccgaaacaagaagccaaacaagagggaaaatcagaaatagaaccggaaaggaacaggataagaagaaacagaagaaacg

SEQ ID NO: 223897 - DNA, 427 bp, Glycine max
ttgagaaatggcacaagaaacctttctattcacatctgaatctgtaaacgagggtcagccccgacaagctgtgcgaccagatctctgatgcagtgcttgatgcgtgccttgaacaggaccctgacagcaaggttgcctgtgagacatgcaccaagaccaacatggtcatggtctttggagagatcacaaccaaggccaacgtatactatgagaagattgtccgtgacacatgccgcgaaattggattcatctctgatgatgttggtcttgatgctgacaaatgcaaggtgttggacaacattgagcagcagagccctgatatcgccaatgtgtgcacggtcactataccaagcgcccacaggaggttggtgcttgagaccatggtcacatgtttggctatgccactgatgaaacccctgagtacatg

SEQ ID NO: 223898 - DNA, 506 bp, Glycine max
  unsure (1)..(506): unsure at all n locations
cgggaacgcgtcttccacttctcccgcgaagcaattcagaaactcaagcaaagagccaacaacaccgtcaacaacgaactaacggaagttatgggaaaacaagtaaacgacggttggaaaatcgttaaacggtaacggaaaaattaacggtaacggaagaaacgagatctcgtcgtttcagtcgttatcagctcagctctggcgagcggtgacacgtgcgaggaaattcaacgacccagcaaaaacgtcgacgtttcggatggcggtgaattgccgccaccgtctagagccaaagatggacgcgttgtacttcggcaatgcgatccagagcatcccgacggtggctaccgtcggagaaatcctctcgcgcgatctgggctttgcgcaaatcttttgcacgtancgtcgtcgcgcacgatgacgtacggtgcgccgcggatagaggattgggagagcgcgccaggcttgttcccctcggaacttcgacgcgcgatgataccatggga

SEQ ID NO: 223899 - DNA, 507 bp, Glycine max
  unsure (1)..(507): unsure at all n locations
ctcgagccgtccgtttctctatataaatttctcacgcgtcttcattcctctcattccctctgaattgttctcacccttcagatctctctctctcactccctctcccttccttccatcccaaccacaaggggtgctgagaagacataaaaaatggtaaagatttgctgcattggagctggctatgttggtggcccaaccatggctgtgattgccttgaagtgtcctgagatcgaggtggtcgtggtggacattgctgctccacgaatcaacgcgtggaacagtgaccacctcccgatatacgagcccggccttgatgatgtggtgaagcagtgtagggggaagaatctcttcttcagcactgatgtggagaagcatgttgctgaggctgacattgtctttgtctcggtgaacacaccgacaaagactcanggtcttggagccggtaaggcggctgatctcacatattgggagagtggctgccaggatgatgctgatgtatcaaaatcg

SEQ ID NO: 223900 - DNA, 539 bp, Glycine max
  unsure (1)..(539): unsure at all n locations
gcaactagcacttcaaattcgctgtctcagtccctcgtatccaactattttgcttaggattttccttcttcatcacaacctcgtaataaattcgttaagttcctccttgtttggtcccaaacaatctgagaaccctctttcaattcctcttcctcaactccatcgttcatcgccgtccactattattagcaattggtatttagtaattaattaattactaacattagttaataataatggaccctgcagagctgaagcgcgttttccaattgttcgaccgcaacggtgacgggagaatctcattgaaggagctgagcgattcgttggagaatctaggcatcttgatcccggacaaggaccttgctcagatgatcgagagaatcgacatgaacggagacggttgctangacgtggacgagtttggggacttgtatgagtccatcatggaggagcctgatgaggaggaggacatganggaggcctttaacgtctttgaccagaaccgcgacggtttcatcaccgtcgaggaactagggaca

SEQ ID NO: 223901 - DNA, 433 bp, Glycine max
aatcaatgaaatctcctagatggccgaacttatttacaagatgtgaattgaattaaattgaaaatttgatacattttgtaatggcaagcatgcttttgcattaaacgtagggctaactaaggacagtgaagcctcctccctttatcatttgcctgaactccttgtaattaaccatgccatttccatcaacgtcgactttcatgatcatcttcttgcactcggaaaggggcctcccttgtttgaggccgagggaggccagcactgtccctagttcctcgacggggatgaaaccggcgcggttctggtcaaagacgttaaaggcctgccttatgtcctactactcatcaggctcctccatgatggactcatacaagtccccaaactcgtgcacgtgtatgcaaccgattccgttcatgtcgattctctcgatcat

SEQ ID NO: 223902 - DNA, 452 bp, Glycine max
gagtgagagggagcgaagagaagaaacaaagatggagactcctcctccccaacaaggcgtcgtgaagaagaaggagacaaggggccgaaaacccaaaccaaaggacgaacacgggaagggtttgaatgaaggtaggaaaacacatcatcaacatcaacaacaacaacaacatcatcatcagcagcagcaacagcaacaagatcaaccttcggtggacgagaaatacacgcagtggaagtcccttgttcctgtcctatacgactggctcgccaaccacaacctcgtctggccctctctctcttgcaggtggggcccccagcttgaacaagccacttacaagaatcgccagagactctacctttctgagcagactgatggtagtgtgccgatactctggtgattgcgattgcgaggttgtgaacttacggtgctgctgctgagcacattcgcag

SEQ ID NO: 223903 - DNA, 460 bp, Glycine max
caaacagaaattagaattgtatcaattaagtaacactaaccgggaatcatcgtgagatctacgttaatctaggttttccctactccagccccatacatgaatggttttaaaatgccaagaaacatccaccgcaaatgttaaattaaatacaacagcattaataatataactcatttttgcctacgacgtatgtcatttttcagtctttgaagcacacgccacaacatgagatttgaattgctccagcttggccaaaacctcattttttggtctgtagatcaaatcactcatgcgccatatttgcaccgttccccctcctccattactttcacagtcatcagacacactaacaatcgtccatggatcatatgcattccaatggaagtcaacacctttatccctatgacctggatgttgaaaaaacaaccctggaggagaacttattgattttccagatcgc

SEQ ID NO: 223904 - DNA, 522 bp, Glycine max
  unsure (1)..(522): unsure at all n locations
gtagttgatactgcaactgccatcctttcccggaacgtctccttcaagttgatcagtgctacctccactgatgcaaagggaaatgggaaagttggaaaggaaacttatctggagaagcatcttccgacgttaccaaccttgggagataggagagatgcatacggtattcattttgaatgggatgctaactttggaattccaggagcaatttacatcagaaactatacgtatgatgagttcttccttgtcagtgtcactcttgaggacattccaaatcaaggaaccattcactttgtttgtaactcatgggtttacaactttaaagactacgacaaaaaggatcgcattttctttgccaataagacatatcttccaagtgcaacaccaggtccattagttaagtacagggaagaagagttggagattttaagaggaaatggaaccggagagctgcaggaacatganaggatctatgattatgatgtctataatgatttgggtaacccagataaagatgtaaag

SEQ ID NO: 223905 - DNA, 428 bp, Glycine max
gatattgaaagtattattattattattatctccaaattaagaggaccaccaaattccaaatatgcattggtacaaaaacacacagaacatattgacacataaattgacaagcatcatttgtgttattagaaagtacgtagattgatccaaaaggtaaccacatactccttagatagagatactgttgggaattcctctgaaagtcaacccttcctcacttgtaggaaggagcaatgtgtatggtagctgaacaggtccatatcggtttttcttgtaggaatcattgttcctcggtgtgatttttccctcaatatttgacagcttggttccaaactttttgaaggattctaatgcctttgaatgagatgtccaatttggattgtctctctcccaaggtagatctcatcagaagcatgccgtgacaatat

SEQ ID NO: 223906 - DNA, 437 bp, Glycine max
cggctcgagcccaaacccaaacccaaacctaaacgaagaaacagagaaaaaaaatgaacaaacaaattggggtttgaaaagaagccggtgctgtctccttgttctccatcgtaagatataactaattatttttatatcttcatcaagatgcgccgagggagaaccgccgccgccgctgccgccgttgtggatcccacgccggaccaggccaaggagacgacgcggttccgtggcgtgaggaagcggccgtgggggcgattcgcggcggagattcgagatccgtggaagaagcagcgcgtttggctggggaccttcgattccgccgaggatgccgcgcgggcctacgacaaggctgcccgatccttccgcgggcccaaggccaaaaccaatttcccccccttcccccgcccggcagaggcggaccaccactcgcagat

SEQ ID NO: 223907 - DNA, 526 bp, Glycine max
  unsure (1)..(526): unsure at all n locations
cagtccccaacgactggttctgttttttctctgctgcttcgattcattcacacaaccgggactagccttactaatggcgatgctggctccctcaacaaggtccccacgatcaagttcaccaagctcttcattaatggagacttcgttgactctctgtcaggaaagacatttgagacaatagatccaagaacaggagatgttatagcgaggataagcgagggagataaagaagacattgacattgctgttaaagcagcacgtcatgcatttgacaacggtccatggcctcgccttcccggctctgagagagcaagaatattgctgaaatgggcagaaataattgaggaaaacgcagaagaacttgcagcactagatgcgattgatgcggngaagttgtaccatatgtgtaggaatgtggaagttccagcagcggcaaacactcttcgttactatgctggtgcagccgataagattcatggagaggtgttgaaaatgtctcgagagttccatgcctatacattacttg

SEQ ID NO: 223908 - DNA, 449 bp, Glycine max
aaaaaaaaaaaaaaaaaaaaaaaaaaaaaaaaaaaaaaaaaaaaaaaaaaaaaaaaaaaaaagaaaaaaaaaaaaaaaaaaaaaaaaaaaaaaaaaaaaaaaaaaaaaaaataatagggggcggcccccctttatgggcctcttccccccggaatttatttccggcccggtccttggggggttcccatttttcctttttgggggtcgttttaaacctgggcgaaaccttggccatagttgtcccctggggaaaatggttttcccttcccatttccccccaacttacggcccggaaccttaaagtttaaaccccggggtccctaatgggggacccacccccctttttttgggtggcccccaccgcccgttttcacttcggaaaccctgtcggcccattttttttattaaatcgccccccccccggggaggggcgttttgctttttggccc

SEQ ID NO: 223909 - DNA, 493 bp, Glycine max
  unsure (1)..(493): unsure at all n locations
ctcgagccgctttgtctcttctcttgcttccttcttcaattcatctccgaaccgcgtttctctttttgactcttcccctctctctttctctctactcagtaagaatgtatactaatattggtatgccacccgggggtacctcagcatcatcctcaacctccaatgagctcgcaacctaatctgttcgggaatgcatttaattcttctggttcaggactcattcgaggtggattgggtgcgtatggagaaaaaatattaggatcaagctctgagtacgtccaaagcaatataagccggtatttctctgatccccaatactactttcaagtgaatgaccactatgttaagaacaagttaaaggtcgtgctgttcccattcttgcaccggngtcattggactaggattactgaaccagtgggaggtaggctctcttataaacctccaatttatgacataaatgctcctgacttgtacattccattaatggcatttg

SEQ ID NO: 223910 - DNA, 583 bp, Glycine max
  unsure (1)..(583): unsure at all n locations
attccatcttccactctttcacactcacctatggctccaatctcaaaactcattcctttcctattcttaacaacccttttagtttccctccaagttaatgccagagacagccaattcttcagcaaagtcacccctctcaacaacaacatcaaagagactgagactcccaaaaatgaaggccaagtaaacaagccagaacaacaaccaacattcattcctgaaactgaaaacagttatggcctatatggtcatgagactggtctgcaccctcccaccactacaacaactaatgctgcaccctacaccaccacttacaagccatacaaaactaccacagctgaagaggacactgccaagtactccaacaacaacaacttctacagcttcaagaaggatggctacnaacaccaaccaaatgagnttgagtgaaacaacaagactcacaggcacttcttacaccaacaacaacaactacttctacagcggtaaggatgctnttgctaagcagaatgagttgagtgatacanagtacactgaaggtggatacaacacggaaaatcagaacagncacaacaacaactac

SEQ ID NO: 223911 - DNA, 430 bp, Glycine max
cattggatacctgcatctaaaaccccaaacctccctcatttcttcttttccccaaccaacaactccactcttttgtgttcttgtaattcttttggctaaaatttcagcttccagaattgaaaaaaaaatgatcaaacaagttcttcttcttgttctgctcttcttggcctctggattggccctctcagtctcagagtctgagtctgtttctcttctgcctcacgccgctgattccttcaatgttagctatatccagatgaagaacgctgggacttgctcttactcggtggttataactactagctgttcgtctcctaggtatacaagggatcagatcagtatttcttttggggatgcttatggcaaccagatatatgcgccaagactggatgatccagcttcaggtacattcgagagctgttcttcagat

SEQ ID NO: 223912 - DNA, 511 bp, Glycine max
cacatcatatcttcaagtttgagattatttagtgctaaatttttccaacaattgtcagaagaacagcgataaatcaattcttactctgatagcttccattcaaattaaagttcatttcaattttactccctctgatgaaacataaagcaagccaagtaataaactaacttttgacaagggttttacacatccggtgtctctacttctgcaaatggtgctaagtttcatggctacaaggtatatgaaatataacatgaaagttgcataaacttacaaccaacagctaagaacaaatcctagaaccataaatataagccatttctgcatagatacctggtatgaagaagaagaagaagcaccgttgcacaaattaaatccataccacgtatctctggggatatatgtgttgtaatagaaagtaacaggcctgccgttataaccatttattttcacactttcaggcttccagccatctaatccagatctatataggtacacataacatatctga

SEQ ID NO: 223913 - DNA, 529 bp, Glycine max
agcaaaaaaaaccataacttaaacttttctatcaaaaaaaaagaaaaatacattacttaattttcaaattaaaaacaaataattctcgagactgctaaattttcttagcagaacagaagtgctttttttaaaaaattgaactttaatttcctatagaggtaactcttcttccttccttattctgatgttctcttttctcacttcacaatggtccacgccacgtcattctcgaagatccagtggcacacctaaatccgacctggacccgaccctaacgagatgaatgctccatgggtcgggctccaatcggaggtgtgcaagtgacagatggcaacaccacggctaatcttgacctttgttttcgggtcgagaagatccgcttcgtagacccgaaccttaggaaccgcgtggcagtagtaaagcagataagggaacaggctctggtggcacgacacggattgggtgactttaccaccgttgtatccccctaacgggccccaccaccacactcttttttgacccgttcacg

SEQ ID NO: 223914 - DNA, 544 bp, Glycine max
  unsure (1)..(544): unsure at all n locations
gtaagtagtaagtagtaagccactatcgtttctctctaacagcaaaaaagttctaacctcaccaaacccacactaccatgggtaatgagaatcgcgagcttcacgtattattcttccccttcccagctaatgggcacataataccaagcattgacttagccagagtctttgcttcaagaggaatcaaaaccaccgtagtcaccactcccctcaacgttccactcatttcaagaaccataggaaaagccaacatcaaaatcaaaacaatcaagtttccttctcatgaggaaactgggttgcccgaaggttgtgaaaattccgattctgccctctcctctgacttgatcatgacgttcctgaaggccaccgtgctcctgcgggacccactggagaatctgatgcaacaagaacatcctgactgtgtaattgccgacatgttctacccctgggcgacagactttgccgccaaattcggcattccgagggtcgtgttccatgggatggggttctatccgacatgcgtgtcngcgtgcgtgcggacata

SEQ ID NO: 223915 - DNA, 433 bp, Glycine max
cttctctctccaccaaaccattctcatcaaccgacgctctctccgccttcgcttctctcaatcccgatctccgatccttctccctcggctacctccgtctctcactccgtcctcgtcttcccaagagacttcagatacgggctgctgggagtatctatggaaatcactttcgtgtttcaacatatggagaatcacatggaggaggtgttggttgtattattgatggatgtcctcctcaccttcctctctccgaagctgatatgcaattggatcttgacagaaggaggccaggtcagagccgaattacaactcctagaaaggagactgatacatgtaaaatattttcaggagtgtctgaaggacttactactggaactccaattcatgtatttgtacccaatactgatcaaagaggacatgactatactgagat

SEQ ID NO: 223916 - DNA, 490 bp, Glycine max
  unsure (1)..(490): unsure at all n locations
aagagattagagaaacaactatggaaggagaaaatggaaagaagctgaaaatattgtgcctccatggattcagaacaagtgggagttttcttaaaaagcaaatcagccaatgggatccttctatattcactcaatttgatatggttttcccagatggtaaataccctgcaggagggaagtctgacatagaaggcatctatccttcaccttactttgagtggtttcaattcgaaaaggactctacagtgtactctaacttggaagaatgcatctcatacttatgcgaatatattacaggccatggaccctttgatggctatcttggcttctcacagggcgcaactactttagcacatttgttggttaccatgcacaggtgaagttactaaaggagcatccaccactgaaagttctcatatcaatatcaggatgcgaattcagaaatcccagcatatgcgatgttgcctacaaagacaccatcanagctaaa

SEQ ID NO: 223917 - DNA, 543 bp, Glycine max
gtcaatctgcattttccatttctattattttttaacaaacacatttgtattacactgggtgaatcacgctactttgtacattgcagggaacaaaaattgaacccctttgcatttgttttatgtcatgacctctagtgcctctcttgtttgtccaagtagattgaaaactgttgctgctatgtgagatggtgtaagaccagctgcactcaattggtcaaccggtgatccatggtcaatgtaacaatcaggaagaacaattggcctccactttaatttcccatcaagaaggccatcaagggccatgaactgaacaacatgagatccgaatcctcctattgacccttctttcacagtgatcaaaacctcgtgcgattgggcaaggctgcgaataagggaacggtccaatggcttgcagaaacgtgcatccgccactgttgcgcgcaagccatgatgttccaacaaggaagcagcagccaaacagctttgaacagctgattcatagcccaacaaggccactctttcttcttcaattagtatcctacc

SEQ ID NO: 223918 - DNA, 574 bp, Glycine max
  unsure (1)..(574): unsure at all n locations
agggcccatcgaatangcaantccactgaatgaactcgcacgaaagcacctgagtgtgtctggccatcctattttaccttttctttcctaaccctcaacgtttcgccactgtcacttttttcaccagggggcaccaatagctataataagaatcatctctcacttctccattaaaattaaacatccaatctaatctgggtttccctttctcccatcagaggacagagcttccaactttgcgggattcgtatttgttgtttcagtgctgtgatggggaaggtcgcggagggagctgcggttgtctgcgccgccgccgtatgcgctacggcggcactggtggtgcgccaccgcatgattagttcccggaagtggagtcgcgccatggcgatactgaaggagtttgaggacaagtgtgggaccccaattgtgaagcttagacaagtggctgatgccatggatgttgagatgcacgcaggtctcgcatatgaaggtggtcgcaagctcaatatgtagatcagttttgtcgataatctcccaactggggatgaggaaggactctattatgcactggatc

SEQ ID NO: 223919 - DNA, 590 bp, Glycine max
ctgtatctgaatctgcgtgtgttagtgaattgttgttgagatctgaatcaaaatcagaaacgaggatggctacaccggaccacctcttcaacctccgcaacaacttctacctgggcgcttaccaagccgccatcaacagcagcgacgttgccaacctctcccaagaagataccctcgagcgcgacaccctcgtccaccgctgctacatcgccctcggccagctccagttcgtcatctccgagatccacgacgatgctcccacaccactccaagccgtcaaactcctcgccctctatttctcctctcccgacaccaaggattccgccatcgcgagtctcaaggagaggctcgccgatcccgctataggaaacaacgccacgctgaggctcgtcgccggtctcgtcttcctccacgagaatgatttcaatgaagccctcaaacacaccaacgccgagggaaccatggaactgcacgcgttgaatattcagatctttattaagatgcataggtcggattacgcaaagaggcagctgcggatcatgcagcagattgatgaggatcacactctcacttcaactcgccaatgcttg

SEQ ID NO: 223920 - DNA, 599 bp, Glycine max
  unsure (1)..(599): unsure at all n locations
gggccgactgcatcantctgccaatgcttctacgaagctccgtgcgtctgtctgtcccattctcatttcacctctctttcctaacccccaacgccacgccactgtcactttctccaccaatgtgcaccgatagcaataatccgaatcatctctcacttctccattaaaattaaaatccaatctaatctgggtttccctttctcccatcagaggacaaagcttccaactgtgcgggattcgtatttgatgacccagcgctgtgatggggaaggtcgcggtgggagctgcggttgtctgcgccgccgccgtctgcgctactgcggcactggtggtgcgccaccgcatgattagttcccggaagtggagtcgcgccatggcgatactgaaggagtttgaggacaagtgtgggaccccaattgtgaagcttagacaagtggctgatgccatggatgttgagatgcacgcaggtcttgcatatgaaggtggtagcaagctcaatatgttgatcagatttgtccataatctacccactggggatgaggaacgactctattatgcactggatcttggaagcacaaacttccgtgtccttcgtgtac

SEQ ID NO: 223921 - DNA, 474 bp, Glycine max
ctcgagccgaatcggctcgagctcaattgaaagcagctaaatactatgtaatatggccaacagctttcactcattgctcccatatctaaaagttgattgattcttagaatcttatcttttacatgaggaatatatactgtgcccacttgcgatgatgaatggaactcgtgattctgttcaatctcccttctccaaccctccattaaataatagcctgcaacctgctttgtttcttagaaagatctaatcattttggctttcctcttctacaattctaaaatcacgcaaatggcatccaagagaatactgaaggagctcaaggacttacagagagatccaccaacttcatgcagggcaagacctgtgggtgaggacatgttccatcggcaagcaaccatcattggtccatatgacagtccctatgctggtggtgctttccttgtgaccatccatttccctcccgattatcccttc

SEQ ID NO: 223922 - DNA, 396 bp, Glycine max
gaaaagctctaaatgaaagtagcatttattcatggagagcgggctcgaatcacaaaggtaaagcctttgagaacaagtgtgatatgtatgcaagttgaacaataatatgcccaaacttcatggtcctatctacatattaatatataatacgatgaaggggcaggtttgtgtagagcaccgagagaccattgcaaaacgtattgtaggggacaagagggcaaatatccagttttatatcccaggcctacttatgggtccagcttgtaacagtggactcatacttgactttgtcgtgcgtgatcctatgaacatatgcgcggaccaaagggccatcgggagttggatccgtgggcaaggaacacttagccagtcacaccgatgatattgagagagcag

SEQ ID NO: 223923 - DNA, 465 bp, Glycine max
gcattttcagaggaaaatggcgggtacggtttcgacttgtttcttcttcgagtgtcttctttctctccttcttccttttcagatctccgctgaggaatcctcggagaaggagttcgtactcacattggatcactctaactttcacgacactgtcagcaagctcgatttcatcgtcgtcgagttctacgccccatggtgtggtcactgtaagaagcttgctccggagtatgagaaagctgcttctatcttgagtaggcatgaatcctcctattggtttggctaatggtgatgcctatgaggagaagaacaaagaccttgcttcacaatttgatgttaagggattcccaacaattaattttctgagaaatgggggaaagaaatgttcagaatacaaaggtccccgtgaagcacttggatcggtgactattttaagaaacaaagggggcctgcttcaactgaattaaa

SEQ ID NO: 223924 - DNA, 597 bp, Glycine max
  unsure (1)..(597): unsure at all n locations
cttgctccctcagaagcgaagaagaagccacagagaactagtctcctactctcacccgcaagaaaaaaatggcatctcacatcgttggatacccccgtatgggtcccaagagagagctcaagttcgctctcgagtctttctgggatggcaagagcagcgccgaggatttgcagaaggtgtcttctgatctcagggcatccatctggaagcagatggctgatgctgggatcaagtacatccccagcaacactttctctcactatgaccaggttctcgacgccaccgccaccctcggtgccgttccaccaaggtacggctggaccggcggcgagattgggtttgatacctacttctccatggccagaggtaatgctaccgtgccagctatggagatgaccaagtggttcgacaccaactaccactttattgtccctgaattgggccctgatgtgaacttcacctatgcttctcacaaggctgttgatgaatacaaggaggccaaggcgcttggagtggatanccgtccggtcctcgttggccatgttacatacctgttgctcttcaagcctgccaagggagttgagaaatccttttctc

SEQ ID NO: 223925 - DNA, 391 bp, Glycine max
atcaaggacaagctcattttgcccttcttggagttggacatcaagtattatgacttaggccttccttaccgtgatgagaccgatgataaagttacaattgaaagtgcggaagcaactctcaagtataatgtggcaattaagtgcgcaactattactccagatgaagctcgtgtgaaggagtttggtctgaagtcaatgtggaagagtccaaatgggacaattaggaacattttgaatggaactgtcttcagagaaccaattctttgcaaaaacattccccgccttgttcctggttggacaaaggcaatatgcattggaagacatgcgtttggtgatcaatatcgggcgactgacacagtaattaaaggagctggaaagctgaagctggtgt

SEQ ID NO: 223926 - DNA, 485 bp, Glycine max
  unsure (1)..(485): unsure at all n locations
ccaattctttccttttnctgtactncnaggncacagggtaanagattcccggaccgacactctcacttagtcggcggcccgcccttttttttttttttttttttttttttcatttaaaaatccattataaattgggagggggaggggatcaataaaaaattacaaaggacaaatcatttcacaaccaattttatggagaataaacagccaacccttgcatttccaaccaacaaacaattgaaggaaacggggctaaggaccaaagcttatttgccctttcttatttcttctgagaataaaagagtggcagacccacgcacgctccttgtggctaacgtcattttttcgcttgtcttgaatcaactttatgcagaaagcctcgcactaagctcgggtgccacggcatacataaattcctttgcgaagaaataatgctcccttgacatcttggatccactaaaaataagtgccaaatacttggaaat

SEQ ID NO: 223927 - DNA, 603 bp, Glycine max
  unsure (1)..(603): unsure at all n locations
ctcacggctagcaatcatgtcttctcgcttatatgagtgcttgttggaggtggatgggtacggtgatggcgatggaaaggcgaaacccaaattcctgataaggaatctcagcagagtttcggaggatggggttcccatcctcaaaggcataaatcttgagatcccagagggtgtgatcgtgggagtgataggccccagtggtagcggcaagtcaacgttcttgagggcccttaaccgcctctgggagccaccctccgcctccgtcttcctcgacgcccaagacatctgccatctcgatgtcctctctctccgccgtaacgttgccatgctctttcagctcccggccctctttgaaggcagcgttgcggacaatgtgaggtacggaccacaactcagagggaaaaagctaagcgatgatgaggtgcgcaagttgcttctaatggccgacctggatgcttctttcatggataagtccggtgctgaactctctgtcggtcaagctcaaagagttgcacttgctaggactntagctaattcaccccaggttttgttgctggatgagccaactagtgccttagatccaatatcgacagaaaacataga

SEQ ID NO: 223928 - DNA, 395 bp, Glycine max
aattcactcattcatttcccctttcttctctttctcaatttcgctttgtattgtctacaatacagtggaccgcaccaattccgatggcggcgtcgcggcggctccgggacctccaatcccaaccggcgaacaagatctgcgtcgactgttcccagaagaacccgcattgggcctcggtatcctacggcgtctacatgtgcctggagtgctgcggcaagcaccgtggcctcggcgtgcacatctccttcgtgcgatccgtgacgatggattcgcggtctgaaatccagatcaagaagatggaagccggaggcaacgacatactcaacgcgtatctcttgcagtacggcatccccaaggaaaccgatatcgatgacaagtataactccaacgctgcc

SEQ ID NO: 223929 - DNA, 578 bp, Glycine max
  unsure (1)..(578): unsure at all n locations
aggcagaacttacacgagtgcgtggatataannnctgcgtcaactagctactagtctgaggccgnccttttttttttttttttttcttttttttttttttttcacaaccagacaacccaaattttggggcaaaaatcattaataagtatatcaaagtgaccaaaatacgacctttactatatttatatttatattacatacaaactcatgccattcattagttttttttttccgataaactcacggttgaaataacatgataaaaggcctcgaaaaatggtgctattttccacagttgaacccacgacacacagatgggactattatcaggataagtgctttcaatattcccaatacaatcagctttattttcatgttttgcagccacatttttcgacggattttggttccaaaagtcctgaaattttgggcctggatatgaaggttctcagtcttgtccaccaaaagttctatcttgttacccctgtccagaacctttttaatattctccatcatgacacccttaactttagaaacctgagctttcacctttgcaagtttgcttatctcttcaggat

SEQ ID NO: 223930 - DNA, 518 bp, Glycine max
ggtaaaagaaagtaaagagaaagagagagagagagagagagagagagagtcataatcataagtcatacctgatttccattctctctgagagacagtgcgagattggcataatggcgaaaaaagccgttttgatcggaataaactacccgggaacaaaggcggagctgaaaggatgcataaacgacgtgtggaggatgcaccgctgcctcatcgatcgatacggtttctccgaagacgacatcaccgttttgatcgacacggacgaatcctacacggagcccacggggaaaaacattcggtcagcgctgaccagactcatacgatcggcgaggccgggggacgtgctgttcgtgcattacagcggacatggcacgcgcctccccgcggaaaccggagaggatgatgacactggctttgatgaatgcattgttccttctgatatgaacctcatcactgatgatgacttcagagaatttgtagatggagtccctagagaatgtaagctcacaatagtatca

SEQ ID NO: 223931 - DNA, 445 bp, Glycine max
aaagaaaatattgcttttgagcaagcattaattgtccaaaacaagtaatacacaagcatatatcatcatacacaacacaaataactctgattttgtgcgccagatgacagaactcatcactcatcagcccacaaaaggaccatcaacatggtcatcactgcagtagagacctggacgacgtttgaaacctcccctgttcagcttctcccttgccttcaaaacaatctcttgatttgtgacagcaccatcactctcctcaatcacagcctgtattgcattgctaaaagctccataagcactggcagaggtacctgctggacttgcgtcagcagaagtttggtctgtgtgacaaccactcatcagaattccgccgtctggaaggctcggattggctgaacttgttccaacatatgccttatatatgctttcaacctttgtctccatg

SEQ ID NO: 223932 - DNA, 471 bp, Glycine max
ggaactcgatcaaagaattccatcaattattattaatacaataatgaatgattaaatataacttatacaaactcaaccaactagatcggcctaatgatgaaagttttggatggttcatacaagattttaggttcacaccttattctcgccgttaaaaaaaacaaaaaaattcgtacaaattctaaataggaatgatgataacacattggtacttttctagttgggcctggtgcaatcaaacctaatttcaccttgatttccagttttaacaccaacccttcccaacttagtaacagcatcaacaaaagctttctgaaaagctccttcatttgatgcaaataagttgactgtggcctttgaccttgcatctgtaaacagcacctgatcagaagtgaagagacccttaccttgctgcagattcttgaagtattggttgtcaaacttttgaggcgggacagggtccatgtttat

SEQ ID NO: 223933 - DNA, 361 bp, Glycine max
gctgggtggactgaaatcggtggagaacgcgcacgatgattccgtgtgggcggtcacctgggtacccgcaaccgccaaccgaccaccgctcctcctaaccggttccctcgacgagaccgtcaggctctggcgctccgacgacctcgttttggaccgcaccaacaccggccactgcctcggcgtcgcctccgtcgccgcccaccccctcggctctgtcgccgcctcctcctccctcgacagcttcgtccgcgtcttcgatgtcgattccaacgccaccatcgccaccctcgaggctcctccctctgaagtttggcaaatgcgcttcgatcccaagggtgccattctagcagttgctggcgga

SEQ ID NO: 223934 - DNA, 592 bp, Glycine max
  unsure (1)..(592): unsure at all n locations
aaggccttttgggatggtatcatggaatctgtggaggtggaccatcccaactatgaccgaattgttcaacttatgggagaggttagggatgaaatttgtgagatggctccaaaaagctggaaggaggatatttttgctgcaatcgatttagaaattcttttgcaggtgctgaaatcaggtaacctggacattgattaccttgcaaaaattctcgagttttcactcgtcagtttgcagaagctctcagctccagcgaatgaggagatgatgaaggccgctcacaagaaactatttcatgaattgagtgaaatttgtcattcaagggatgagtcaaacaattcatgtgttgtagccttggtgaagggcttgcaatttgtcttcggacagattcagattcttaagaaagagataagcaaagcacgaataagattaatggagtctttggtgaaggggtctgctggtctggactaccttaggaatgcctttgctacanatatggatctccatctgatgccaatacctctctgccttcaacattgagatggatttcatctgtttggaattgcaaagatcaggaatgggaagaacatgt

SEQ ID NO: 223935 - DNA, 591 bp, Glycine max
ctcttagccgcagatctctcagggcttgcatcttctcagttgtgaagatgtacacatcaaggaagaaaatccacaaggataaggatgctgaaccaactgagtttgaagagtcagttggacaggcattgtttgatctggaaaataccaaccaggagcttaaaagtgatctgaaggatttatacataaactcagctgtgcaagttgatgtttctgggaaccgcaaggctgttgttattcatgtcccttacagattaaggaaaggtttccgtaagattcatgtcaggcttgtcagggagcttgagaaaaagtttagtggcaaggatgtaatcttggttgccacccgaaggattttgaggccaccaaagaagggttctgctgctcagcgtcctcgtagtcgcactcttactgctgttcatgaagcaatgctggaggatgttgtattgcctgctgagattgttgggaagcgtgtgaggttccgaattgatggatccaagattatgaaggtttacttggacccaaaggagcgaaacaacactgagtacaagttggagacttttgctgagtgtacaggaagctatctggaaaagatgt

SEQ ID NO: 223936 - DNA, 535 bp, Glycine max
  unsure (1)..(535): unsure at all n locations
agataccgacctgactcnagncaagataacagttgacgggacaagacacacctgacgtagggctcgccgtctcgtacctggactaattcttgaggataaactggaattcttctttgtttctttagactaataaagtcttcatagctagggttggggcttacaaaaatcaaaaaacgacttccaaattgaaagtcaatttgacaccaaaattttaaccggcatactccatatgcaattctccgaacaaattcaaaaagctaacaaaagtgaaactaagcctctgagacaggatactcgaacacaacatcttttccagatagctttctgtacactgcagcaaaagtctccaacttgtactcagagttgtttctctcctttgggtccaagtaaaccttcataatcttggatccatcaattgggaaccttacacgcttcccaacaattttagcaggcaatacaacatcctccagcattgcttcatgaacagcagtaagagtgcgactactaagaccctgagcagcaaaacccttttttg

SEQ ID NO: 223937 - DNA, 589 bp, Glycine max
cttttgttattcttcgtgtcttgttgtgtttttcatctgagatgtgtggaggagctatcatctctgatttcattccggcggcggcgatcgccgggtctcgccgcctgaccgccgattacctgtggccggatttgaagaagcggaagtctgacttggacgttgacttcgaggctgatttcagggattttaaagacgattctgatatcgacgacgacgacgacgatcaccaagtcaagccctttgctttcgccgcctcttctcgtctgtctacggcagcgaaatctgtggcattccaaggtcgggctgagatatctgcaaatagaaagaggaagaatcagtataggggaatccgtcaacgcccttggggaaaatgggcagctgagattcgggatccaagaaagggggttcgtgtctggcttggaaccttcaacactgctgaagaagctgcaagagcttatgatgctgaagcacggaggattcgtggcaagaaagccaaggtgaattttcctgaggcaccaggtacttcttctgtaaacgttccaggtaaatccacaggaaaatcttagactgttcagcccaatctgggtca

SEQ ID NO: 223938 - DNA, 548 bp, Glycine max
atcagcagccaagattgtttcacagatcatatataatcaccctcgaacaacaatcgagatttccccaaaactaaggcctttgacaaggcaaaggacacctaaataactatatagccccatactttagatacaagagatgcttgagcgagttaattgttttaactccatcttcaacacggatgacaaccattccagaaagcaacaaaaatggaaattacattttttttttcagacacatggggggatgtgtccaacaagagaacaacaaatgcaacaaaaatcaaaaacagagaaaaacaacttgtagctttatttacacacagggagaccaaagaaaaagcggttcagaaaactccaccagccatggaaggaatgtcatcaaagcaccaaaggttcatgaggtttccaccatcctgagttgtgtcaccagatagcaaggattccaatgaagtatcgccccagctcccttcaagataaggcatctgaaagaacttcaactcagattcaatatccacaagctccttagagagtgtctttgcagaatcatc

SEQ ID NO: 223939 - DNA, 384 bp, Glycine max
  unsure (1)..(384): unsure at all n locations
atcagaggacaagctcattttgcccttcttgtttttggacatcaagtattatgacttatgccttgcgtaccgtgatganaccaatgataaagttacaaatgaaagtgcggaagcaactctcaagtataatgtggcaattaagtgcgcaactattactccagatgaaactttgagataattagatatggactaaagtcaatttttaaaagtccaaatggtacaattatgaacattttgaatggaactgtcttcagagaaccaatttttttgaaaaaacatttcccgccttgtttctggatggaaaaagtgcaatattcattggaagacattctttttgtgatcaatatctggcgactgacacaatttttaaaggagctttaaagc

SEQ ID NO: 223940 - DNA, 576 bp, Glycine max
  unsure (1)..(576): unsure at all n locations
gcaatcctaaagtaactgatatcatgggatttagtttctccatggacagcaaggtccgtcaatatcctgccaataaccggagccatcttgaagccgtgaccagaaaagccggctccaagaaccacatccttcccaaagtccccacccaagaaatcaatgaggaaatcctcatctggcgtcatggagtagatgcaagactgtttgatgacgggctcagtggattcaaccatccccttgaacgtaaactccacccattctttgagtttttccatcatcaccgctgctccccacggcctcttatccgggtcgcacggctcccccccgtgcacaccaaccttaatcagccccggaaactccaacgttggcgtgccgtagacgtaaatatctttctggaagctcgcgaatgtcgggaacccgctccctatcgcgaatttcccttcctgcccctccttcacccttcagtaacaaacgtgcgtctncagtggctcgatcggcagttccaccccgctaacggctttaactaatttcttcgcccacgccccctacagtaccacgcattttctaccgcggaatttt

SEQ ID NO: 223941 - DNA, 461 bp, Glycine max
accaataaagatgtcgtgctaaagcacagtgagattcagggagaacactgactgtatttatatattaaacaatggaagcgccatcacaccttgttatcagagaaagtgaaagtgtctgagagtgtgtgtgtgacttatggagtccaattcagagttcgacgtgattatcatcggagctggcgttatgggcagctccaccgtctaccacgccaccaaacgcggccttaaaacccttctcctggaacagttcgacttcctccaccactgtggctcctcccacggcgaatcccgcaccatccgcctcacctatccccaccactactactaccctttagtcatggactcttaccgcctctggcaagaggcgcaggcccaagtcggctaccagatctacttcaaggcccatcacatggacatggcccatcacaacgagcccgccatgcgcgccctcatcgactact

SEQ ID NO: 223942 - DNA, 582 bp, Glycine max
  unsure (1)..(582): unsure at all n locations
caaaaaccctaggtagagagctcttcctccctttctcacagcaatggccgccgcagcacgccctctcgtcaccgtgcaggccctcgacggtgacatggcaaccgatgcctccgccaccgttcccatccctgacgtcatgaaggcctctatccgccccgacatcgtcaatttcgtacactcgaacatctccaagaacagccgccagccatacgccgtcagtcgtcgcgctggtcaccagacctccgccgaatcctggggtaccggccgagccgtctcccgtatcccccgtgttcccggcggcggaacccaccgcgccggccaaggagcctttggaaacatgtgccgcggcggacgcatgttcgccccgaccaagatctggcgccgctggcataggaagatcaacgtgaaccagaagcgctacgccgtcgtctccgccattgctgcctacgccattccttccctcgtcctcgcccgcggccaccgcatcgagtctgtcccagagctccnccttgtcgtcagcgactccgccgaaagagtcgagaagacaaaagaagcgatcaaagtcctcaagcagatcggagc

SEQ ID NO: 223943 - DNA, 324 bp, Glycine max
ttgtgatttttatttttttgaaacatgacattttcatatatcattagggagctacacaggcagcgtgttcttttttcaatactgataataaccattaaatcattgacaatgaaccaatactgagaactagggaaaggaacataataaaacgatgaacaacccttgccagttggttgcaccaaccaactaggtagcacccttggaacgaatccaaaggtataaaaagagacagaccaagtcctactaggaaaagtatggctgttccttaccatacaaagggagaagacgctcatgttctgctaatggctttcacagagtggttgg

SEQ ID NO: 223944 - DNA, 515 bp, Glycine max
acttcaaactcttgtttattttgtcttatgttgggttaggttcccacatccactgtgtgggacctctaaagcacattccatttcgagaaacataacaaccatcacctaaattatctaatataacttggaagacgcccgagcttatgcttattccatgtcttgcaaagcctatttcatattgctaagaatttatcactctgcagtttttcctaatctccccatcagtcccagtcttaatatttatattccccatcttgatcatagaattggcaaagtccccaaagaagagtccactatcgttgctataactttgaactaaaggtttagtggttgaattagcttcatcactagaaaatagaatctggtcagaactgagaagcccctttccactgagcaagttctcgaaatagtgattgtcaaatagatccgatgagttccgatcaaggactgtagtaacgtttccatcttcattttgaggacacaaactttgcaggtcagagagcatgtcagtgtct

SEQ ID NO: 223945 - DNA, 585 bp, Glycine max
gttaaaatatcaaagcataaatatagacacacgcttttcatatgcaagggcagtatgaactacgtatcccgagctgattacttgctcacaccacaaataaaatggagatctctaaacgttaagaaaattcttgagagcaataatttaatctagatatataggttgtaataaaaatatttctgatacatgtaatgaaatttaattgcacttgaaatccggaccataccaaggagtggaagatgaaatccccttaaacatgtaaattaccatgagcagcagccactacttgatgcatcagacagtgggggtttctgcttgaagatgttctttttcacaccagatgagccctcagccaagaggcttggtgtctccaaaatcttcatcacaagctcatcaaaacactgtgtaacattgactctggtttttgcactgcattcagtatacagacaaccatattccctagcaaagtctattccttcctttttgctgacaaccctttcactttccttatcaactttgttttcaacaagcatcttgatgcaatcttgatttgttgagtataagtcaatttctttagcccatata

SEQ ID NO: 223946 - DNA, 436 bp, Glycine max
atcattcgggtaatggacacatcacttgtgtttactgtgaggaggagtgaggcagagctgatatctccggcgaagcccacccctcgagaagcgaagctactctcagacatagatgaccaagatgggttacgtgtacaaattccggcgatacagaggatatcggcacgacccatcaatggcagggaaagaccctgtcgatgtgatatgaaaggctggggccaaaacgcttgcgttttactatccttttgcaagtaggcttatggaaggacttggtcggaaactggtggcggattgaactggggaaggtgttatgctcattgaggctgatgcagatgtcactcttaagcattttggtgatgctcttcaacctccctttccgtgctgggaggaacttctttatgatgtaccctggtctcaaggagtgcttatcactccc

SEQ ID NO: 223947 - DNA, 705 bp, Glycine max
  unsure (1)..(705): unsure at all n locations
aggccgtgggctacccgattccgatancgaagaacagatttgacggatcaagcaccctaccgtacgctcggcattctgctttagggcacgtggtgatgaagcttttggattacagtcttcatcacttttgcattttctctgagggcattattgcaacttctgttgtggtcaattcaactgcaatgaattgtaaaaatcccaatatgattgttttccaccttgtcactgacgaaataaactatgctgcaatgaaggcatggtttgccatgaatgatttccgtggggtgactgtggaagttcagaagtttgaagactttacttggttaaatgcttcatacgttccagtgctcaagcaacttcaagactcataaatacagagctactacttttctggcaacagtgatgagggcaggacacctatcaagttccgtaaccctaaatatttatccatgcttaatcacctgaggttttacatccctgaagtttttcctgcacttaagaaggtggagttcctggatgatgatgttgtggatcagaaggatctttctggtcttttttccattgatttgaatgagaattgtaatggagctgttgaaacatgcatggagacatttcacagataccataaatatttgaactactcccatcctcttatacgtgcacatttngacctcgatgcttgtggattggcatttgggatgaatg

SEQ ID NO: 223948 - DNA, 551 bp, Glycine max
gttggaagcagaagccatggaaaccaacactttcccaaaccagcagacaccaaaaaccaaaaggcgggatcttcatactctcaggtcaaagcaacatggccggtcgtggcggggttatcagggacgctaacaaccgtaagcggtgggacggcgtggttccgccggagagccgctccgatccatccatcctccgcctctccgccaccctccaatgggaacccgcgaacgagcccctccacgtcgacattgactccagaaaggcttgcggcgtgggccccggcatggtcttcgcgaacgcgctgctgcggcggcgcgtggtggtgggcgagctgggtctggacccctgcgccgtgggcggcaccgacatgaaggagtgggcgcgtggggaggaactgtacgagaacatggtgaagagggccaaggaaagcgtgaaggagcgcgagaatagcagcgagatcaaagcggtgctgtggttccaaggcgaaagcgacgcgatcaacgaggaagacgctgcagcttacaaggtcaacatggagaccctcatccacaat

SEQ ID NO: 223949 - DNA, 456 bp, Glycine max
aaaggggaagggggaagttttctaccaattccacatggttcaaaaaacaattaagatctcccccctccccaaaaaacattgtttggtgggggcccttttacgggaaatgggcctttatatagcttttttattgggaaccttcaatcacatgatttcctaggggatataaaactcttcctaattcattcatattgggctaacccaacccttttttgattcgggtgccccacttcctttatcaagttccccaaattttttgttaacaaaataaccttggtttctgatttccccttttttcccagggagcacaccaatttttcccattttaatcatgggagccgaaaagcttttaaagaaagctttttggccactactgaatttgttgacaatgctgatgggttcagcccccgggtgtgagaacaacttttgtttccttttaaacaaaccctttttaac

SEQ ID NO: 223950 - DNA, 163 bp, Glycine max
cttcctcttcctcagtagtgcgattttcgattctcttctctgcaactatgcctaaccctaagggcgtcttcgacatgaccatcggaggtcaacctgccggccgcatcgcaaaggagctctatgccgacgggactaccagcaccgccgagaactgccgtgcgct

SEQ ID NO: 223951 - DNA, 376 bp, Glycine max
caaattttctggctcctctgcgtgctcgttgtatccatcctaagagacttgcttgctgaaagcgacacgaggtcggtagaaactaagattgggggaagagaatgaagaaacataaacattttaatgatttgggcttatccgagtcattggtggaagcttgcgaaaaattgggttggaaaaatccattaaagatacagacagaagcgtttcctcttgcattggaaggaaaagatgtgataggacttgcccaaactgggtccggtaagactggaacttttgctctttccatattgaatgccttattaaatacaccacgcccaaaagatttctttgcttgggggattgtcttccacaagagaacctttcctattaaaat

SEQ ID NO: 223952 - DNA, 398 bp, Glycine max
ctgcattccgttgtatccattttttttcgcggggcctggaccctatggaaccatcacggggggttaacattaatgcgtccaacgcgcgcacccagaaaaagcaaggatatacttgcttttggcctttaaccgttattgactccccagcttaaacaaagggggggagtgtgctgatactttgacctatggtgaatgaacagatggactcaattggatggccggggattcacctgccacgtttcaatcccgaagaacaagaggccttcactgtaagtccccatcaagaaggccatcatgggccatgaactgaacaacatgagatgcgaatccttctaatgacccttgttgcacagtgatcaaaacctcgtgcgattgggcaaggctgctaataatggaac

SEQ ID NO: 223953 - DNA, 344 bp, Glycine max
agatgactctgttgctattattgattaacgcaacacaaatgacacagtctggggggatcatcatacatgagtcggggctgggccaacttaaaagcccaggatgacattggcccatgacgcgacacatgcacgcacctaatgatcgtacttgtacatctttacatacaagatgctatgactttaggttttagaccgactaaaagagatagacagatcatcttaatgaaatgaaaccaacacccacgaacatcggctggacttttgttgaagttgccgtccccaacttgattaaggatgaaccgcttgacagaatcacatgcacttgcagggaatggccctgatta

SEQ ID NO: 223954 - DNA, 473 bp, Glycine max
aatggagttagttctaaacagcacaacaattggagttggagttgtttctctgatcctcctcttgtacttgtttttgcgtggtggttcatggaagagtggggaagagggtcctccaacagtggcaggtgcatggccaataattggtcacctcccattgtcgcttgattcaaagacacctcattaaacattgcgtgacttggctgacaagcatggacccatattctcgatcaagattggtgccaaaaacgcagtggttgttagcaactgggaaatggctaaagaatgctacaccacatacgacatgcggcgttcctccctccccgatcttatctacgctaacctcttgtgctacaaccgatccatgataaccgtagcaccctacggtccctattggcgccaacttcgacagatttcaatgcctgaggtcctatctccttcccgagtagagcaactacaccatgttcgcgtttctg

SEQ ID NO: 223955 - DNA, 574 bp, Glycine max
acaccatcaatctcttgctttatgtgtattcaaatgagattaagcaacaaggtacatagttttggaatagcttacaaggcaaaccaggcttattttaaaacagattacatattgtttaaaaataaaaaatacagacagcaggttcacacaactaacacataattaaatattagatactttcataacaactaggagatagacgtggtttaataagaatctcaagtggagtggctttagtgttggttgctctaaagacttcagtcatatcaagaggctcagttgatggatttaagatttcaaaggaatgcaaaaaactagcaagtgtcaaacgaactgtttgaaggcctaagtttattccaggacaaatcctcctaccaccttcaaatggtaatagctgaaaatgttgacccttcatgtctatatctttatcagacggaaggaacctttctgggttaaactctaatggatttgaccaaacgttttgatctgtgtggatttttggaaagaattgtaattagacgagtttcctttttgacagtgtagccacctatagtgcaattctttttaaactcac

SEQ ID NO: 223956 - DNA, 580 bp, Glycine max
  unsure (1)..(580): unsure at all n locations
gtcgttgcagagctgcgcgtcgatctagaaaatggcgaggataaaggtttacgagcttaggaacaagacgaaggcggagctgctgaaccagctgaaggatctcaaggcggagcttgccctgctccgcgtcgccaaggtcaccggcggcgcccccaacaagctctccaaaatcaaggtggtgaggctttcgatagcgcaggttttgacggttatttcccaaaagcagaaagcggcgctgagagaggcttacaagaagaagaagtatttgccccttgacctacgtcccaaaaagacccgcgccattcggagacgccttaccaaacaccaggcgtctttgaagacggaacgtgagaaaaagaaggagctgtactttccactaagaaagtatgcgatcaaagtttaggttagaattggtttcaagttgcattttttagggcagttacttgtattgaaattttaaggttttgatggcagccactgtggcagcattccaattnttagtaccagagttgtttccatacctgcattcagtttccaaggtctatctatatgttaaaaccagagttgttcgagaaatatg

SEQ ID NO: 223957 - DNA, 493 bp, Glycine max
aagcaaaaaagccgacagcaaccataatttctcgaaacaactctgggtttaacatatagatagaccttggaaactgaatgcaggtatggaaacaactctggtactaaaaattggaatgctgccacagtggctgccatcaaaaccttaaaatttcaatacaagtaactgccctaaaaaatgcaacttgaaaccaattctaacctaaactttgatcgcatactttcttagtggaaagtacagctccttctttttctcacgttccgtcttcaaagacgcctggtgtttggtaaggcgtctccgaatggcgcgggtctttttgggacgtaggtcaaggggcaaatacttcttcttcttgtaagcctctctcagcgccgctttctgcttttgggaaataaccgacaaaacctgcgctatcgaaagcctcaccaccttgattttggagagcttgttgggggcgctcccggtgaccttggcgacgcggagcagggcaagc

SEQ ID NO: 223958 - DNA, 310 bp, Glycine max
ctttgcaaaaggtttgatgggaagaagagggaggacacctaccatagtttttgtgtggtcaggcctcatagcaatcacaatttctctcctctgggtggctatcaacccccctgctggtactgaccaaattgggggttcattccagttcccttgacaggtcattcttttttgtcagatgaatgaatctgtcagctatttttttatttaaaattagtttcttttttctcttgattctacatattggtggttctactaatgaatggacttaaattatgttgtctattgtgcttatgaattttgtttagtactt

SEQ ID NO: 223959 - DNA, 310 bp, Glycine max
aagtactaaacataattcataagcacaatagacaacatgatttaggtccattcattagtagaaccaccaatatgtagaatcaagagaaaaaagaaactaattttaaataaaaaaatagctgacagattcattcatctgacaaaaaagaatgacctgtcaagggaactggaatgaacccccaatttggtcagtaccagcaggggggttgatagccacccagaggagagaaattgtgattgctatgaggcctgaccacacaaaaactatggtaggtgtcctccctcttcttcccatcaaaccttttgcaaag

SEQ ID NO: 223960 - DNA, 481 bp, Glycine max
aaattaaagctaactttattgtcatcctcaaaaaaataagaaaaaaactgaattcatgaaacacaatcaaagagcgatgatgatgactcgcaagctcctgactagaataatctcgtggagtatctaatagaaaaaagtggcggcaactgaaagcagggtggcaaatactccaacaactccaagagatgcagcaccagagttctgtgggggaggagtgacagcaccggctggagaagggctaaaaggagtggtggggggggccccggcggaaggtggggtggcggtgctgctgccggtgacgttgatggcaagcttttgacctcccaaacagtgccctggaattccacagatgaagaaatgttgaccagatttgttgagggtcactctcgcaggtggagtggtgaaagtggcaataggagaggctgagctgcaagcatcgaagttggcctttgtaacctcctctacgttgtgtgtatttgat

SEQ ID NO: 223961 - DNA, 430 bp, Glycine max
gagtaattggtggattccagcaatggccgaggttcatggcagttgggtcaagcttgatcaaagaggagaagggcaaggagcgagaagctcacatgctatagccatagtagcacagaaggagtatgcattaggtggcgaattcgtgccacgtgtccccgttgataacaaacttcacgtgttcgacctagagactttgactatggccgtggctgatgcatcaggggatgccccaccgccacgtgtcgggtgcacaatggccagagtgggagtaaccttatatgtcttttggggaagagatggtgaacacaaagagctcaatgagctctattcttttgacacaagggccaacaaaggggccttgatttcaagtggcgatatagggccttctgaccggagctaccactccatgaccgcagatgaccaacacgtg

SEQ ID NO: 223962 - DNA, 472 bp, Glycine max
cggctcgaggttagcatagggaggactgagtagcctcttcatcatagtcttaaacattaaaccttagcaaaactcaacaatgctagacatcaaaagctacctcgtactcttcttcctatggttcatatcaaccattctgatacgttccatcttcaagaaaccacagcgtctaagactcccaccgggtcctccgatttcaatacccttgctggaacacgcgccatatctacgttcactggtccaccaatccttggacaagctatcactgcgctatggacccttgatccacgtcatgatcgggttcaaagcacttaggtgagaggcgtcatctggaggaaacggccatgcagatcctcataacctcggaggaggctttcctgaaccgtccctttatgattgggaagcgagagcctaacctacggcgctggggactacttcttcatcccctacagcacatactggcggtttctga

SEQ ID NO: 223963 - DNA, 408 bp, Glycine max
aactaccaagccaccacttatttccatgataatatacccctgccaccaagtttacagaagcaacgctacttcccaaaacaaatacttgtgccacaaagtaagcaaaaataagggaaaaatatagagtaggtaaagcacacacaactagagaaaccattccattcacagtctttaggcagagaacggagtgaaacgcggaacaggctcgcacttgagtggtttggccaaaaacacaggcaccctccctttctcagacatgtgaacatgatggtttttaccatcattaacgatccagtcgaagcactggatcaaactcgctagcgttggttgcatgacaagcaacgctagcgaggctccggggcaggttgttcttccgctcccaaggggcatgagctgttagtactgccc

SEQ ID NO: 223964 - DNA, 663 bp, Glycine max
  unsure (1)..(663): unsure at all n locations
cggccagtcctgaagctagtannnntnnngggnaannccnnnnngnnnnnnnnnnnncnnnnnnnntcttcgtgtcttggtgtgtttttcatctgagatgtgtggaggagctatcatctgtgatttcattccggcggcggcgatcgccgggtctcgccgcctgaccgccgattacctgtggccggatttgaagaagcggaagtctgacttggacgttgacttcgaggctgatttcagggattttaaagacgattctgatatcgacgacgacgacgacgatcaccaagtcaagccctttgctttcgccgcctcttctcgtctgtctacggcagcgaaatctgtggcattccaaggtcgggctgagatatctgcaaatagaaagaggaagaatcagtataggggaatccgtcaacgcccttggggaaaatgggcagctgagattcgggatccaagaaagggggttcgtgtctggcttggaaccttcaacactgctgaagaagctgcaagagcttatgatgctgaagcacggaggattcgtggcaagaaagccaaggtgaattttcctgaggcaccaggtacttcttctgtaaaacgttccaggtaaatccacaggaaaatcttaagactgttcagcccaatctgggtcacaagttcagtgctggc

SEQ ID NO: 223965 - DNA, 485 bp, Glycine max
aaaccataaacagtttataaaacttcgttataaattaaatgcagcttaaaacatccctcagcagcaaaggaaatggactaaaaccctatagctgcttgtgaaattcgaaatatctcagactcttcttaccatcaaaacaaaaaacagtactcatcaaaaacaaacagcaatgaaaattgaccaccgccgatcaagaacctagttttgaaagttacggctacatgaaatcggcagaaacttaaaaatataacttaaacaaaacacctaagactctgcaaggataaaactactataaaggagtaaccacgatgatgatcacatgtgctagcaaaattgcccaaatgcaatcacttcttcttggcagcggccttggtgaccttggctccggtggggtctttcttctaacactcttgatgactccgacagccacagtttgacgcatgtccctcacagcaaaacgaccaaggggaggatactcagagaaa

SEQ ID NO: 223966 - DNA, 525 bp, Glycine max
  unsure (1)..(525): unsure at all n locations
ctacaatagattgacttggtgggagcaggtagacaatggaaagcagcttactcggaacaggaagtttctcacagttgttcctttggtgctgtacttgatagcctcacacacaacagactatcagaatccaatgttcttattcaacactgttgcagtgattgtgctggttgttgcaaagttcccccacatgcacaaggtcaggatatttggaatcaatgctgataagtgaaatgttgctgtggccatgacacttggttaccactccttacctgctcaagagcctcttgtccttttgttctggaaaaaaaggtcacacctttgtatagaaggcagaactggaaggatactcaagtaatgttttgttgccaactgctttttaagctgcttctaaaagtattattaaacaaataaatatgttgagttatttctgtacagtagagaagtatatgtatcagattatatcggagcttttaaaatgtacctttcttttctagnaatttttcctttatttgatgctttagaact

SEQ ID NO: 223967 - DNA, 555 bp, Glycine max
atcaaaaaggactattatttccaaaagaaaaagttaataccaacggaaaggatcatccttgtatatctcagttctaaagcatcaaataaaggaaaaaatactagaaaagaaaggtacattttaaaagcaccgatataatctgatacatatacttctctactgtacagaaataactcaacatatttatttgtttaataatacttttagaagcagcttaaaaagcagttggcaacaaaacattacttgagtatccttccagttctgccttctatacaaaggtgtgacctttttttccagaacaaaaggacaagaggctcttgagcaggtaaggagtggtaaccaagtgtcatggccacagcaacatttcacttatcagcattgattccaaatatcctgaccttgtgcatgtgggggaactttgcaacaaccagcacaatcactgcaacagtgttgaataagaacattggattctgatagtctgttgtgtgtgaggctatcaagtacagcaccaaaggaacaactgtgagaaacttcctgttccgagtaagctgtttt

SEQ ID NO: 223968 - DNA, 451 bp, Glycine max
gagagatcgaaaatggcgttggctttcgacgagttcggaaggcctttcataatcctgaaggaacaggagcagaagagcagacttcgaggtttggacgctcagaaagccaacatctccgccggcaaagccgtcgctcgcatcctccgaacctccctcggccccaaaggcatggacaagatgctccagagccccgacggcgacgtcactatcacgaacgacggtgccacgatccttgaccagatggacgtggacaaccaaatcgcgaagctgatggtggagctctcgcggagtcaggactacgaaatcggcgacggaaccaccggcgtcgtcgtcatggccggcgcgcttctcgagaaggccgagcgcctcctcgagcggggaattcaccccatcaggatcggcgagggttacgaaatggcgtccaggatcgccgtcgagcatctcgagcgcg

SEQ ID NO: 223969 - DNA, 418 bp, Glycine max
aaaaatcaaaagcgttggaattgctttaaacaaaacagaaacattctcccaacgacgatacaaaccggcccaaaatcttgctttgtaagggaaccttcggactttttcttctgcctgacctattgaaacaaaatgaaatcaccaatgaaggattttggcctaaaccatgactggatttaaaaaaataattccttccatggggcgaagacatgagaaatttttattatcattttgccaacttgagcatcgagtctgatctggtggtgttttcctggcaaaattacaaagacatttggctcaccctggtcctttgagcccacaccctttcaagaaatgcccaccagagggtcattcacctttatttggcggaccttaaccacagagagaggttcaattgggtgcaggccaacttttttag

SEQ ID NO: 223970 - DNA, 530 bp, Glycine max
tgaagtctttccatctcacagtgacagctttgtgctgtgtagtggttgtgcttggagtgcttccactctccctagatgcacaactagatccctccttttacagagacacttgtcccagggttcactccattgttcgtgaagtcgtcaggaacgtttcaaagaaagatccccgtatgcttgctagtctcattagacttcactttcatgactgctttgttcaaggatgtgatgcatcagttttgttgaacaacactgccaccatagagagcgagcaacaagctctgccaaacaacaactcactaagacgtttggatgttgtgaacgacattaagacagcagtggaaaaggcttgtcccggcgtggtttcttgtgctgatattcttacccttgcatccgaaatatcttctgttctgggtggtggtcctgattggaaagttccattgggaagaagagatagtttaacagcaaaccgaaaccttgcaaatcaaaaccttccagctccattcttcaacctatctcgacttaaagct

SEQ ID NO: 223971 - DNA, 485 bp, Glycine max
tgggcgtcctttttttgctttgttggcggacacatggcatgaatgtgcctatagcttctttatttgtgggctctgatcacaccattataagagaaaactatacattctaatccatgtagattgaaggaaccataccctctgtggatgaatcttctgaggcctcactagcaatatcgacatcaacagatttctagataacaaagacacaagggtttctgatatctccttttttcacagcgagcacactaatgttccccattttaatcattgaagcctcaatggcgtcaaaggaaactttgtgggcactgctgaacctgttgacaatggggatgggatccgcaccaggaggggagaacaggtcttgatcactgtgaatcgagcctttgttaacctgaagattggagaagtagaccctgtcaattatatcacgagtgacacggccaaaagttacaaggttggtaggtccaccattggggcatatttgg

SEQ ID NO: 223972 - DNA, 464 bp, Glycine max
cttgtagtcttggaaggtaccctctatgtttgctttgttgcgtccaatcaaaacgataaccgctgattcaccaaagtgctgaacaagggtgatgtgtttgtgttccctattgggctcattcacttccagcaaaacattggttaatgatatgctttggccattgctggttttagtagccaaaaccctggagttatcaccattgcaaatgctgtgttaggatctaaaccttctatctctgatgaagttcttgccaaagcttttcaagtgggcaaaaacgtaatctactacctttagaagcaattctggtacaacaatagctaggtgggaacataatagaatcgctataccgttcatcttgctctggcctatgttggataaatgattttctcaattctgcttcatgcaataggcaattactatatactattataaataaatggaacgcatgtggctattatatgtgc

SEQ ID NO: 223973 - DNA, 514 bp, Glycine max
gtcacatgaagtacaaattcaaaatgcattcttgttttaaaatttcacaaagcagttgcaaatgttccagatacaaatttatttaagagactggacaaaagtaccagcatgtaatttagagactggacaaaagtaccagcagcatgtaatgaaagaagcagatagagatggctgaaataacatcaccatacatcaggacgcaactcaccacttgctgggggcacccatctcccagagtgatacacactttcaccaactttccaaccaggcacatccttcatcacttctgcctcatactcgagatatttatgccactctttaacaaatctctcatcctcttcagcctgtagcacaggcagtatggatcggcgggcagcatacttttcttccttcagtgcccttcggatcttgttgccctggccgacctggtacatgccccaagagaaagcgccgaatgcagtgaggaagatggcaacggcgctggggcccttgttggggatgcgccgggcgaacc

SEQ ID NO: 223974 - DNA, 500 bp, Glycine max
aataagaaatttaagtaagaatcattatccaactcattaaatgggcccaaacatgactttattccatgacaccacgtgcccccatgaaaagaggaaacttaaatagaaacaaagtgacaaacatcaaagtcgtgacagcacatcaatgtgaaaaaaagaaatgaaaaaaaaacacattaaacattcatcaatggtaaatatacacgtcgaactgaaccgtgttattcctcgtttggggatcaaaactgagagtcctggactcaatatacccagtggcaaatttgaagaccccacttccaccaacaatgggcaactccctcaccttctccgagagggggctcctcccaaagaacgtgatggtgctgccgttgcacttcccttgcgtcaatgcgaagttgaaaatcagcaaaagatccaactgcgttagcgacgtggaggcaaacaagccctcggcttttccgacaaccttggagtaaacctcgggtcccacagttaaagcg

SEQ ID NO: 223975 - DNA, 517 bp, Glycine max
  unsure (1)..(517): unsure at all n locations
aaataaaaaactaaacataaattaactcagctgtgggtagcacaagaaattctgcttcttattacaagatctaccagcaaagttggaaattataagaataacaatggaacccacttattccatcgcacatacaacaaccataccatacgggatcactcatatgtagacagacaccacatggcatagcataactaataaaaaaacatggcatagcataaataaccaaacccaaaaaataaatgatacaagattcatccatgaacaagacaagattcttagctatttacaaatgcacaatgcttcctgatctctccttctgtccctgtctttacattaattcttcccattttctccatggaggttgcaaactcagcaaagaaattttcaactgacccttcaagcaattcaatgatttgagcctttgtaactgagttngtcaacaatgcagcatctgacttanatagaccccttctcttaatcacatgactatagtagctaagatcaaatgtcttgcgac

SEQ ID NO: 223976 - DNA, 445 bp, Glycine max
aaaacaaataattgtgttttaccttcacatgctaaaacaattaggaatagcgagtttgttagagaacaatatcttaatattctaaacagcattataatggaaatttcagtgtcattatgaaaataggcagttcagaaacgcgtactaatggaaggacaaactaaaatagcccagtacatccacaattcataacgaagaacatgaatgcccaaaatctcagtaacaccgagattagcattcaacaccttctccctttgaaaacattacacaagggaagttcaatcactaattagaagtatggtatgtttaattttgttccccgtcacctttgggtgcggcttctttaatttcatctgcaccatcatcctgcatgtcagaggtccagagggtaaggttatcacgaagaagttgcatgatcaaagtgctatccttgtatgattcctct

SEQ ID NO: 223977 - DNA, 285 bp, Glycine max
agcaaatatggcatactctcaacttcaaaaggtggaaactagcctgcagatcaaggcttctgctgaacagttctatgatgttttttgcaacaagccacacactattgccaacatttcaccagaaaatattcaatcagttgaagttcataaaggtgaatggggcaaagagggatcaatcgtctcctggaactatttacatgagggaacagtttgtggagcccagcaagtgcttgaaggcatagacaaaggaaaattacaaaattgacaatgaaggtcattagatgg

SEQ ID NO: 223978 - DNA, 456 bp, Glycine max
cacattcattattcctggttccgtttcttcccaccaaacgaacaacgatgacgacggcgtttgagcgtcacgcgcttcctctgtttctgtttctgtttctgactccgattatcaatgcctccattcacgactactccaacgaacccttcactcatcgctccgacgccttcttcttccacggcggcagcgaggccctcttcgccaaatccttcatcaggttcgaaacggtgacgtttgcgcgtcctcgcgagtccgcgagcgtgcatggtaggatgcagtcgaacacgggtttggtggaggcgataatccttgaggttcgggatcggaaccggatcggaggctcgtacctgaaatccgatctgatttgctgcgatccgaagctgccaaagaccgcaactgcaacctcggggaggtcatcatccagaagaaccccgacaaccatgaactccccaaacg

SEQ ID NO: 223979 - DNA, 446 bp, Glycine max
ggtgaggtgaactcacacgtgtggagggtgttaggtagaaggaactaggaagagaggcagcgcacgaggtggtagcactacatgtttcttttcattcattgttgaacttcaacttcaacttcaacttgaacttgttgcatttggatctcatggcagaagaagcactactgcaaaacaagcaggttctattcaaagggtacatagatggtgttcctaaagaaaccgatatggaactcaaggtcgactcacatattgcgctcaagcctcccccacaaggctcatcagctattctcgttaagaacctttatctctcttgcgatccatacatgcgcggtcgcatgcgtgatttccacggatcttatatcccttcttttctttcagcccaggcactagaaggatttggagagtctaaagttatacactctgataatccaatatacaagcct

SEQ ID NO: 223980 - DNA, 557 bp, Glycine max
tgtgtctgtctgtcccatttcatttcacctctctttcctaacccccaacgccacgccactgtcactttctccaccaatgtgcaccaatagcaataataagaatcatctctcacttctccattaaaattaaaatccaatctaatctgggtttccctttctcccatcagaggacaaagcttccaactttgcgggattcgtatttgttgtttcagtgctgtgatggggaaggtcgcggtgggagctgcggttgtctgcgccgccgccgtctgcgctacggcggcactggtggtgcgccaccgcatgattagttcccggaagtggagtcgcgccatggcgatactgaaggagtttgaggacaagtgtgggaccccaattgtgaagcttagacaagtggctgatgccatggatgttgagatgcacgcaggtctcgcatctgaaggtggtagcaagctcaatatgttgatcagttttgtcgataatctcccaactggggatgaggaaggactctattatgcactggatcttggaggcacaaacttccgtgtccttcgtgtaca

SEQ ID NO: 223981 - DNA, 511 bp, Glycine max
gcaggttacactggctatacaagtggacttgtcaatggaagacaaacttatatacccttctatagaatcaccgagagacaaaaccacgtagtgataactgatagaatgtgggctaggcctttatcttcaacaaatcaacccagctttttggattccaagggtgacaatgaagagaagaaggaagaagaagcagcattgaatcagttaccggatggacattgttccaaagacacttctttggctaacaaagaaatcaacagcatttatcccacaacttgctagttgttattattgtcattattacgtgatatatccttttatcatgcgttatacgtagtacataggagctgtcttttttgcccttgtatgtcaataatatggctgtggaacactcagccttacacaatgatgttagtcaatatgttgtgctatgatttgtaagctttccaatgagactggtttatctggaaatgaactttattagtttgaatcaattaattaattatccatg

SEQ ID NO: 223982 - DNA, 485 bp, Glycine max
catggataattaattaattgattcaaactaataaagttcatttccagataaaccagtctcattggaaagcttacaaatcatagcacaacatattgactaacatcattgtgtaaggctgagtgttccacagccatattattgacatacaagggcaaaaaagacagctcctatgtactacgtataacgcatgataaaaggatatatcacgtaataatgacaataataacaactagcaagttgtgggataaatgctgttgatttctttgttagccaaagaagtgtctttggaacaatgtccatccggtaactgattcaatgctgcttcttcttccttcttctcttcattgccacccttggaatccaaaaagctgggttgatttgttgaagataaaggcctaccccacattctatcagttatcactacgtggttttgtctctcggtgattctatagaagggtatataagtttgtcttccattgacaagt

SEQ ID NO: 223983 - DNA, 513 bp, Glycine max
  unsure (1)..(513): unsure at all n locations
gcaggcaccgctgactatgcaagagtgcttgtcattggaatggatacatgcttaccggtggatggaatcaccgagagacaaaaccacgtagtgataactgatagaatgtgggctaggcctttatcttcaacaaatcaacccagctttttggattccaagggtgacaatgaagagaagaaggaagaagaagcagcattgaatcagttaccggatggacattgttccaaagacacttctttggctaacaaagaaatcaacagcatttatcccacaacttgctagttgttattattgtcattattacgtgatatatccttttatcatgcgttatacgtagtacataggagctgtcttttttgcccttgtatgtcaataatatggctgtggaacactcagccttacacaatgatgttagtcaatatgttgtgctatgatttgtaagctttccaatgagactggtttatctggaaatgaactntattagtttgaatcaattaattaattatccatgag

SEQ ID NO: 223984 - DNA, 502 bp, Glycine max
aaaagatagatcattcaatcactttcaagaatttatgtatgcggactttagaaatgcttccttttctaatttagattactgtcacaacatttatagcgaaacacaaattttcaagctaccttttggtccaagtaccacttcactaccaccaccgtcctaacctactaacccacccaatacaaataacttacaaaaaacataacaggaacataaagaaggtaaaaaattaaaaaattgacaatgaaatgatatcatgataaatgaaaaagaaaaaagcgcctatttattattatcacttttcatcggtagcttctgtaggctggggtatacatacagctctctgcaaacttcactaaatctttaggttgaggaaggcgagtggccaagccaagttcataagccttagcagcaacattggcagctatgtgtgctgaaatctttctgatgttggtgaatggtgggtatatgagtcccttatcaaagttctcttggctcacttgtg

SEQ ID NO: 223985 - DNA, 428 bp, Glycine max
aaagagatctttatgatcatcaaccatccaaggatttaagacgaagggaacaagtacaaccctcgaaagtgaattaggaagaaaacacaaggaaggaaaaccatacacagaagaagattccagagaaattcaataatacacaatttttttttttttattttcatttccccccctctagtagtcagtggtgggaagctgctcgtgggtgtggctgataaagacaacctcgtaaacaaggccagcgattccaccaccgatgagaggcccggcccagtagatccagtggttggtccaggtccagctcacgacagcaggcccaaatgtcacagcggggttcatggccgctccagagaaggccccacccaacaaaatgttagcgccgacaatgaaaccaatggcgatgggagcaataattcccaaattaccct

SEQ ID NO: 223986 - DNA, 517 bp, Glycine max
tctgcatcttcttcttcttcctttccaaattgtgtgtgtgatttagaattggcaagatcagatctgctctgagagaattgcagatcagaaatggagaagtcatgcactctggtggtccacttcgacaagggaacgccagcgctggcgaacgagatcaaggaggccctagaaggaaacgacgtcgctgcgaagatcgacgcgcttaagaaggccatcatgatcctcctgaacggcgagaccattccgcagctcttcatcaccatcatccgctacgttctcccctccgaggaccacaccatccagaagctcctcctcctctacctcgagatcatcgacaagactgattctcgcggcaaggtcctccctgagatgatcctcatctgccagaatctccgcaacaacctccagcatcccaacgagtacatccgcggcgtcaccctccgattcctctgccgactcaacgagtccgagatcatcgagcctctcattccctccattctcttcaacctcgaacacc

SEQ ID NO: 223987 - DNA, 407 bp, Glycine max
caaaacttatcaaaatctcatatactgattcagttctatacataaccatcgagatttattatcgagccaaaaattctcaaaatctcttcacctctgtgatgaccatggaatacagaaccttagaactcaacatcatatccgcaaaggacatcaagaacgttaacctcttctccaagatggacgtatacgccgtcgttacgctctccggcgaccctctccaccctcagggcgccaccacccacgtccacaaagacgccggcagcaaccccacgtggaactaccccgtgaaattctccgtcaacgaatcgctggccaaggagaatcgtttgtctcttgagatcaagctcgactccgaccgcacccttggggacaccgttaacggtaccgtgcatgtttctctcagggaa

SEQ ID NO: 223988 - DNA, 571 bp, Glycine max
ctttaccttcttaacgcaccaagcgaagcgaaaagcgctttctaacttaagtgatggcgaacgcagctgaagtttcagccttgaaccgcatcaaactgcatcttttgggtgaactctctccactggccactcccctaaactattttgatgaatcaaaccctagcccctctgaatcttccaattcccaatcttcttctgtttctcttaaccactacttcactgacctcttcgaattcgactccaaaccccaaataatcgacctccaaactcccaaaacactaacttcagctcagaagaaacctcaattgaatcggaaaccgtcgctgctaatcgctgttccaaagaagaccgagtggatccagttcgggagcccggatccgaacccggtgatggctgcgccggagaacctgccgcagaagaatcactacagaggtgtccggcagcggccctggggcaaattcgccgccgagatccgcgacccgaacaagcgcggctctagggtttggctcggaaccttcgacaccgccgtcgaagccgccaaggcctacgaccgagccgccttcagactccg

SEQ ID NO: 223989 - DNA, 508 bp, Glycine max
aaaagtgaataaaagattgttgaattaacaaattcggcaaatgtacactgtactcatccccatacaggacgctgtaacttaaacacgaaaaaacgcagtgctaaattagaaatttcacaccgccacgagcggtgaaaatccaaaaggagataacggcgacaacggcggaacgttgaaaatgtccttgacgtcactgtcccagaacccggtccacatagacggcgttaacggcatctccctaaaacaactcacatcctgttccggtatcttttccttcttcaccaccggctttacttcctccaccaccaccttctcttcctcgcggcggcgctttctctcgacgttgccttcggcggcggcgacggagacggtctccgccacggcgctaacttcgagggggaagttgaggatggccttggagccgcggagtctgaaagcggctcggtcgtaggccttggcggcttcgacggcggtgtcgaaggtttcgagccaaaccctaaaaccgcgc

SEQ ID NO: 223990 - DNA, 585 bp, Glycine max
ggcaaactcccctttctagtttctacataaacccaagtaccttcaatggatctggagggaatggctaaaatctccatcttgttggtggggctttggctactagttaactggtcagggttgttggatgcaaaaaacatgaagtacaagaaccctaaacactcaactgatactcgggttgaggatcttgttagcaggatgactcttgaggagaaaattggccaaatgttgcaggttgagcgcaagtatgtatctgctgatttacttaagaagtattttattggggctgtattgagtgagggagggagtattccagctccacaggcttctgctgaaacctggattgacatggtgaatgaatttcagaagggtgccttatcaacccggctcggaattccaatgttttatgggattgatgccgttcatggccacaacacggttcacaacgcaactatttttcctcacaatattggccttggagctaccagggaccctgaactagttaagagaaatggagctgcaactgcccttgagttagagcaacaggaattcaatatgtttattcaccttgtatagcagtctgtagag

SEQ ID NO: 223991 - DNA, 528 bp, Glycine max
  unsure (1)..(528): unsure at all n locations
gataaaaatttattgttgaaatgttgcaaagataatataattaaggtaaatttgtaatattttatcacatgttagtaaataaatcctaccctcttttattgtttatagttttacataaaaaaatatacatcaagaggaataaagggccttagaaggtttggtagaaaggccaaacccaaatgggaagaggggatcatagtgaggatctccaacattcattggcagttgatcaacagttttgaaccatgtccttggaagctttccagtgaaaccatagccgccatataaaacatcagccacaccttggccttcgctacctgggagccatgcagcaacaagtgcatctattaaaccaacatatggttcaataactacaggacgaccagaaataatgataaccacgcattttattgctccacagacatttgntatgatcttaggaccaggttctgggattgtcaagttcatgctgtcaccatacatttcagcataagggtgctcccctactataactatggcataggaaaa

SEQ ID NO: 223992 - DNA, 505 bp, Glycine max
agcacaagaaattctgtttcttattgcaagagcatgatctaccaacgaagttgaaggtaagaattacaatggatcccacttattccaacacacatactacaaccataccatatgggatcactcatatgcagccagacaccacatggcatagcataactattcaaaaaacatggcatcggataaataaccaaacccaaaaaataaatgatacaagattcatccatgaacaagacaagattcttagctattaacaaatgcacaatgctttctgatctctccctctgtccctgtcttcaccttaattcttcccattttctctatggaggttgcaaactcagcaaagaatttttcaactgacccttcaagcaattcaatgatttgagcctttgtaactgaattagtcaacaatgcagcatctgactcaaatagaccccttctcttaataacgtgactatagtagctaagatcaaatgtcttgcgacttccaaggtccatctcaattttg

SEQ ID NO: 223993 - DNA, 523 bp, Glycine max
attcggagctccgaatctcagattctagggttagggttcccaatttctccaccgatcagaaaatgagttcaactggtggttctaccaagggcggaaggggcaagcccaaagcctccaaatccgtttcaagatcgcagaatgctggtctccaattccccgttggaagaatcgctcgattccttaaggctgggaaatacgccgagcgtgttggtgctggtgctcctgtgtacctctctgcagtgctcgaatatctcgctgctgaggttttggaattggctgggaatgctgctagggataacaagaagaatcgtattgttcctaggcacattcagcttgctgtgaggaacgatgaggaactgagcaagcttttggggtctgttaccattgccaacggaggtgtcttgccgaacattcaccagactctgctttccaagaaggctggaaaggggaaaggcgaaattggatctgcctctcaagagttttagggtttttgttttacccatttggactatagttttgattt

SEQ ID NO: 223994 - DNA, 473 bp, Glycine max
  unsure (1)..(473): unsure at all n locations
aggcctcgtcgcgatangcgatatccgctatatgcatgcgggcgcagctgctaactcggctggggtcgccctttttctttttacagtgacacctatgagctgtgtagcgcttgagactcgcagtgctttcagtctcgctaaaagcacatctagatccttacactgacagacacacttgttctaagggacaatctgttgaacgtgacctcgacatgtacgtttcaaacacagatccccgtatgctagctaccctaaggggacaacactatcctgactgctttggtgagggatgtgcagcatcagccttgccgtacaccactgtcaccataaagagcgagcgacaagctctgccaaacaacacctcactaagacgggtggcagacccgaacaacatgaacacagccttggaaaaggctacggccggctgggtgtcttgtgctcaattcttaccctcgcgtacgaaatatcttctg

SEQ ID NO: 223995 - DNA, 534 bp, Glycine max
aagctcctcacgctcacactcactcatttgcaaagaaagagagagaaatggcactgagggcagccgtgctccgccacgttcgtgtgccactccaagccgctccaaaactgcagccatggcgtgccatgtcatcacacggcgacgatcatctctccaaagaggaggtcgtcgaaagagtcctcgccgtcgtcaaagatttccccaaagtcgatccttccagggtgagtccagatgtacatttccagaaagatttgggtttggatagctgggacaatgtggaaattgtaatggcactagaagaggagttcaagctagagatcccatacaatgaagctgataaaattgactcttgtcatcttgctattgagtacatttctaaccatcccatgggtgggtaactaatgtgtcctttttcctattaggcttcatggtgaacttaaacacagtgcaaccttgaaccttccccttactttcactggatgtttctggaatctgggggtgtagggatagtttcctttttccattaaattgaga

SEQ ID NO: 223996 - DNA, 512 bp, Glycine max
ccagaaacccagtttttcattgacaaactcttctctgaacaattcacattattctaaacaaccagcccctttactcaatttaaatggaaaaaggaaaacataccaacaacaccagattccagaaacatccagtgaaagtaaggggaaggttcaaggttgcactgtgtttaagttcaacatgaagccaaataggaaaaaggacacattagttaaccagccatgggatggttagaaatgtactcaatagcaagatgacaagagtcaattttatcagcttcattgtctgggatctctagcttgaactcctcttctagtgccattacaatttccacattgtccaagctatccaaacccaaatccttctggaaatgtacatctggactcaccctggaaggatcgactttggggaaatctttgacgacggcgaggactctttcgacgacctcctctttggagagatgatcgtcgccgtgtgatgacaaggcacgccatggcttgcagtttggagcggt

SEQ ID NO: 223997 - DNA, 534 bp, Glycine max
gactaaaattcatgtttacattcttatacatgcgaatcagggatgtggcgagtttacaattgagcctgatttcttgtccaccgttggtgatgctgctcatcttgatcatggacttgacgaaggccctttcaaattccttttgcgaatcaacaaagttggaaaccaaagctttagtggtgggatgagtgagcagagcttgatcagaggagaataagctcttttcttggaggagtagcttgttataagcattgtcaaacaaggtggaactagaatccaatgagcttcctgcatttttaacctttgtgtgagaggggcatattgccttggaggcttcttgctaatgaaggggtcagagatgggtcaatctctagtttttggctgaaccttatggattctgttttggaaagattaacaatgagccaaccctcaggtgggaccttctgagagggctacataatcttccaaggaaaggccctctttgggagaagcttttttgcaattgggaaatgttgaatgtgggagccgcaattgtct

SEQ ID NO: 223998 - DNA, 371 bp, Glycine max
ctttgacttttgttggaaactaaggcctaatcaaaatggtgaagttcacagctgaagagctacgtcgtattatggactataagcataatatccgtaatatgtctgtcattgctcatgttgatcacggaaaatcaaccctcactgattctattgtggctgctgctggtattattgctcaagaaggtgccggtgatgtccgtatgactgatacccgtgcagatgaagctgatcgtgggattaccatcaagtctacaggtttctcactctactatgaaatgactgatgaaactctcaagaggtttaatggagagcgcaatgggaatgagtatcttatcaatctcattgactcccctgggcacgttgacttctca

SEQ ID NO: 223999 - DNA, 553 bp, Glycine max
cctttctccctgatgaactcgttgttgaaattctctcgaggctcccagtgaagtctctgttgcagttcaggtgcgtttgcaagtcatggatgtcccttatttatgatccttacttcatgaaaaagcaccttcacctgtcgtctcgaagcacccacttcacccatcacaggatcatattgagtgccacaaccgctgagtttcacctcaaatcatgttctctgagttccttgttcaacaacctttcaaccgtttgtgatgaacttaactaccctgtgaagaacaagtttcgccacgatgggattgttggctcttgtaatgggttgttatgttttgccataaagggtgattgtgtgcttctttggaacccctccatcagggtctccaaaaaatcaccacctttggggaataattggaggccagggtgtttcactgcctttggccttggctatgatcatgttaatgaggattacaaggtggtggctgtgttttgtgaccctagtgagtattttattgagtgtaaagtgaaggtgtatagcatggccaccaattcatg

SEQ ID NO: 224000 - DNA, 541 bp, Glycine max
aattcactcattcatttcccctttcttctctttctcaatttcgctttgtattgtcttcaattcagtaaaccgcaccaattccgatggcggcgtcgcggcggctccgggacctccaatcccaaccggcgaacaagatctgcgtcgactgttcccagaagaacccgcaatgggcctcggtttcctacggcgtcttcatgtgcctggagtgctccggcaagcaccgcggcctcggcgtgcacatctccttcgtgcgatccgtgacgatggattcgtggtctgaaatccagatcaagaagatggaagccggaggcaacgacaaactcaacgcgtttctcttgcagtacggcatccccaaggaaaccgatatcgtcgccaagtataactccaacgctgcctccgtctaccgcgaccgcatccaggccctcgccgacggccgcccctggcgggaatcccccgtcgtcaaggaagccgtccgttcctcctccgctgcattcaagggcaagccgccgctcttcgctagcagcaacaacaacggcggatg

SEQ ID NO: 224001 - DNA, 587 bp, Glycine max
  unsure (1)..(587): unsure at all n locations
cggctcgaggtgagtctacgtgtttgagagaaaggttgagctatagcctaaagggagagacacataaatagtttctactttctattcatagatagatggctggcccaattatgagacctcagattgtgctatttggctcctccataattcaaatgagcttcgacaatggtggttggggtgctattctagctaacttgtacgctaggaaggcggacatcatcttaagaggatactctggttggaattcaaggcgggctttggaggttttggatgaaattttccccaaggatgcttatgtgcaaccatcattggtaattgtgtattttggtggcaatgattctattgatcctcacccatctggccttggtcctcatgtaccccttgaagaatatgttgaaaacatgaggaaaattgctaatcatcttaagagcctctcggaccatattcgcattatatttctcacttctcctccgatcaatgaagaactaatccgcanaaagctcagtgcaacgcaatcaggaagaaccaatgaatcctgtggagagtatgcagatgggttaatggagctttgtgaggagatgaatatc

SEQ ID NO: 224002 - DNA, 452 bp, Glycine max
gaggggaatttttatttattaacacaaatttaagtacgtgtggggaatgaatactagaatagaataattaaagcgcccccaaaacgtatggggtagggaaaatatcacttttccaagagctccactccacacaacataattgagcctcttatatggtacgcaatataaattcataaagtactatatattccactgcaaacaccttcgggagataatatgagacacatttatggttgttgttccatcaggacttggaggataatatggtgaatcttctgcatattcaggtggcattggcatacaatgcagactaggtttccaatctacttctcttagaacctttaatatttgcttcaccactaccttgcttgcctttgcagatagatgaactccatccgggaagctaacgtataaccaatcctcttttgtctgaattgcagatcacagattaa

SEQ ID NO: 224003 - DNA, 450 bp, Glycine max
  unsure (1)..(450): unsure at all n locations
ggcagattgtgatcatgtgacgttggcattttttggagatgggacttgtaataatgggcagttctatgaatgcctgaacatggcagctctgtggaaattgccaattgtgtttgtggtggagaataatttgtgggctattgggatgtcgcatctcagggcaacttcagatcctcagatatggaagaaagggccggcatttggaatgccaggggttcatgtagatgggatggatattttgaaggtcagagaggtggcaaaggaggcagttgaaagggctagaagaggagatggaccaactctagtggaatgtgagacctatagatttagagggcattcattggctgatcccgatgagcttcgtgaccctgctgagaaggaacactatgctggtagggaccccatcactgcattgaagcaataccttattgagaacaatntagccaatgagca

SEQ ID NO: 224004 - DNA, 538 bp, Glycine max
gaacagggtaatattacaggaatggtttgaccgcgttgactcggagaaaagtggaagcataacagcggtacagctgaagactgctcttgctgtgggcaacctggaatttccgctctcagttgttcagcaaatgatcaggatgtacgatttcgacaggaatggtactatgagctttcaagaatttgttgcactcaacaacttccttcttaaggttcaacatgcattttctgatctagagaggggtcgtggttttcttgtacctgatgatgtatttgaggctttgggaaaaattggtttcatgctggattctcctgctttttactctgtctgcgagagctttgatcaaagtaaaaatgggaggtttcggctggatgacttaatatcaatctgtatattcttacaatcagcacggaacctatttaattcatttgatacagctaaacaaggcagagttactctcgatctgaatcaattagtctattgtactgccaattgccagatatgattcaactatatgacgggttgagaagatgattca

SEQ ID NO: 224005 - DNA, 513 bp, Glycine max
catatccaccggccaccgccatttagatcgccggcactctcagccgcgatcaccattccaatccctacttcaccactgaggcgtaacacaacagagccattgaatcttagccatgaggagaactggctttcacaggaggcaaagcggaggaggctcaggattcaaaggaatgattgtgaagttgccggttgctgctgtggtgctcttgatctgcacgctctcattgttcttctactcaacaggaacttcttccaatcttcaatccaactatcgctcccagatccgtttagaagagctttggagcaacgcagattccggcgagaggcggccttcgtctgctccgagaactcattggccccctcctccgaatgagagcaacggctatttgcgtgttcgatgtaacggtggcctgaatcagcagcgtagtgcgatctctaatgctgggcttgctgcgcgaatcatgaatgctacacttgtgctacctgagttggatgcaaactctttgtggcacga

SEQ ID NO: 224006 - DNA, 517 bp, Glycine max
  unsure (1)..(517): unsure at all n locations
cttgatgagaaccgtaacaacaaggaccgcgagaattccatgattggtcatctcctcaaactgcaagagacacagcctgactattataccgaccaaatcatcaaaggccttgctttggctatgctctttggtggaacagactcgtcaactggaactttagagtgggcattatctaatttagtgaatgacccagaggtgctgcagaaggcaagagatgagttggacgctcaagtaggaccagatcggctgttaaatgagtcagaccttccaaaacttccttatctcaggaagatagttcttgaaacacttaggttgtaccctccggctccaattctaataccacacgtggcttcagaagacatcaatatcgaaggattcaatgttccacgagacacaattgtgattattaatggttgggccatgcaaagagatcctaagatatggaaagatgcgacaagctntaaacctgagaggtttgatgaagagggagaggagaagaaattggagcatttgtatg

SEQ ID NO: 224007 - DNA, 374 bp, Glycine max
catcccctaacagtattttgttgaatccagaacctttaggaaagagaactagtgaagaatttttaccaaagaaaggagagttagatccttggatcagaaaaagcttgggcattaacacttaaaaaaatgctaaaaaaaaataattaggggcggcgggaaacatatgggcatactcatatttccggggaaaaattcacataaagggtggtataaaacatttttaagcgggggctgtttgttttctgcttggccttctaaatggggggcttaagctgttttttttctgtgagaatttttagaaggttaaacaaaagggggatgtggttgtggttcctccgaaaattttctgttctccattttttgaattttttttt

SEQ ID NO: 224008 - DNA, 521 bp, Glycine max
ggctgaaatggctttatatggatgtgacggaaagattgcaagctaatgatttttcaacattgcctgaggctcatgcatgcactgctggattgaaatccttgactactacagcaactgctgatggaattgaagaatgccgtaaactatgtggtggtcatggttacctttgtagcagtggtctccctgagttatttgctgtttatgttcctgcctgcacgtatgaaggagacaatgttgtgcttctgttacaggtggcaaggcatctcatgaagactgtttctcagctgggctctggaaataagcccgttggtactacagcttatatggctcgagtggaacaactgatgcaatatcactctgatgttgaaaaggctgaggattggttgaagcctaatgtagtgttggaagcatttgaagctagggcttctaggatgtcagttgcttgtgctcaaaatcttagcaagtttgctaaccctgaagagggttttcaagaactagctgctgatttagttgatgccgcg

SEQ ID NO: 224009 - DNA, 458 bp, Glycine max
ggctgaaatggctttatatggatgtgacggaaagattgcaagctaatgatttttcaacattgcctgaggctcatgcatgcactgctggattgaaatccttgactactacagcaactgctgatggaattgaagaatgccgtaaactatgtggtggtcatggttacctttgtagcagtggtctccctgagttatttgctgtttatgttcctgcctgcacgtatgaaggagacaatgttgtgcttctgttacaggtggcaaggcatctcatgaagactgtttctcagctgggctctggaaataagcccgttggtactacagcttatatggctcgagtggaacaactgatgcaatatcactctgatgttgaaaaggctgaggattggttgaagcctaatgtagtgttggaagcatttgaagctagggcttctaggatgtcagttgcttgtgctcaaaatctt

SEQ ID NO: 224010 - DNA, 542 bp, Glycine max
cttccattcacaaccttaaacctttctttcttgtaaactttattgattgattctgagaatagaactaagagggtatagacatggctagcgcaattgcagcttcttttttggttctgcttctggctttccccactgtatttggagctgaccatgaagttggtgacactagtggatgggccctcggagttaattacaacacctgggcctctgggaaaactttcacagttggcgacactttggtgttcaagtatgactccactcatcaagttgatgaggttgatgagagtggatacaacagctgcagctcaagcaacagcatcaagaactaccaagatggaaactccaagattgaattgacttcaccaggcaaaaggtacttgttgtgccccatttcaggccactgtgctggaggcatgaagctgcaaattaatgtggctgctgctaggaggacccccccaacaaccccaagtggcaccccaccaaccaccccatgaaacccttctccttctcctgcctctgagtcaggatccaccaacaccact

SEQ ID NO: 224011 - DNA, 540 bp, Glycine max
atgacattgagtttgtaggttcaagaaccaccaatccaaccaccacttgtaatggttcaggcacctctcaaatctttgacatcatagggcattttgctcagctcaatcccagtgcagtcttgccaaagacaccaattgtttgcaagccatcagaaaatgccattgaactggccctcaatatacccaatcttaacccacagagaactttgttcttcgaggacagtacccgcaacatacaagctggaaaacgtgtggggcttcacactgtgctggttgggacatcacaaagatgtaaaggtgcatattatgctttggaaagcattcacaaccttagggaggctgtgcctgaactatgggaggctgatataaaatcagaagctgcataccctggaaagcttgctgtggagacatcagtcacagcttgagattattattatgtgcatgaaattaattaagccccttcatattgttcatttaatcaaaattgaaaacccgaccaccaacaaaaaaaaaagagagagagagaagaagcccacggga

SEQ ID NO: 224012 - DNA, 530 bp, Glycine max
aaagtttcttcctttctctgctctttgtcttctctgacacatttggggccttgttgagtgtgtttttgcaagagggtatggcgaaggacgttgaggttgctgagcgtggctccttctctgggaaggactaccaggaccctccaccagcaccactcattgatgctgaggagctcacaaagtggtccttttacagggctcttattgctgagttcattgccactttgctcttcctctacattactgtgctcacagttatagggtacaagcaccagacggatcatgctgatgcgtgtggtggggttggcattcttggcattgcatgggcctttggtggcatgatcttcatccttgtctactgcactgctgggatttcaggaggtcacattaacccagcagtgacatttgggctgtttttggctcgcaaggtgtctttgatccgagccatcatgtacatggtggctcagtgcttgggtgctatctgtggagttggtttagttaaggctttccaaagtcttacttcaacaagtatg

SEQ ID NO: 224013 - DNA, 521 bp, Glycine max
  unsure (1)..(521): unsure at all n locations
tcttgatccttctttttctccttgaactcaaacatggcagatgaggtggttctgctagatttctggccaagtccatttgggatgagggtcaggattgcacttgctgaaaagggtatcaaatatgagtacaaagaagaggacttgaggaacaagagtcctcttctcctccaaatgaacccggttcacaagaagattccggttctcatccacaatggcaaacccatttgtgaatccctcattgctgttcagtacattgaggaggtttggaatgacagaaatcccttgttgccttctgacccttaccagagagctcaagctagattctgggctgattatgttgataagaagatatatgatcttggaaggaagatttggacatcaaaaggagaagaaaaagaagctgccaagaaggagttcatagaagcccttaaattgttggaggaacagctgggagacaagacttattttggaggagacaatctangttttgtggatatagcgcttgttccattctacacttg

SEQ ID NO: 224014 - DNA, 399 bp, Glycine max
cattcggaaaaggaaaaattacattgcgggatgaaactctctcactcactctcacactctccttttgcatgatgatcaattgaaatgttgctgctccaaccaaggccaaaggccagattgatcatcaatggcacagaacatgttgcttaggctctcttctttgaccatgtgatcaatcttttggcactgaatctctggccttggagtggtttggaaaagctgagccactcctgttggtctagcagaagatggaaagagtgttccgttgttgttgttctgctgagtggatagaggactatcaatagctggggttcttgagatatccaacttaatctctgagctggtctcacttctattgctgctggatccctcagtttctttgttgaggttgatggattc

SEQ ID NO: 224015 - DNA, 539 bp, Glycine max
ccaaaaccatttgcgttgtcgcagtcgcagtcaaaggccaaggcaaaaccctaaattgtctcacactttcgtcggaatccgattttggctttttccgtgacaagatgccggcgaaggacgacggctccgacaaggagaagtgccttgatctctttctgaaaatcggcttagacgagcgcaccgctaaaaacaccgtcgcaaacaacaaagtcaccgccaatcttactgcagtcatctacgaggccggtgttattgatggatgcagccgagcggttggaaatcttctttacacggttgcaacgaagtaccctgcaaatgccttgccacatcgcccaacattgctacagtacattgtctcgttaaaggtgaaaacaactgcacagttagatgcagcattatcatttcttgctatcacgggctccgagaatcttgatttgaacaagtttgaagaagcttgtggtgttggtgttgaggtttcaacagaagatatcaaacaagctgttaatgaagttgtggaagagaacaaggctacaattttg

SEQ ID NO: 224016 - DNA, 554 bp, Glycine max
attatgtaaagggaaagattcttcaatactaatggtacactcacaaaaatcgtaggaaaataacagcaatgttgctactacttcattgagagtatacaaatataaccttcaaactacaaaaccaaccaaacaaaagttaatcaaataactggggaactattgagtaatcccttgagaaaatgtacatggctaagtggccagtaaatgtgtttgtacataacccccccaccccctcaaagaaaaaactatgcattataagtagccatttaaacaagtattaaccccagacctgcctgtcccccaccttgttatttctaagcaatattcaggaaccctattttccacctttgctatagctgtcctttaaggtgacagtcctattaaaaacaagtttttttgatgtcgagtcctggtcgaccacaaaatagcctaatctttcaaattggaaattgtccccaacttttgcattctgtatggaagacacaccatatgcattgggaattatcactttggattttgggtttaaatcgccaagcccgttgtcaagttcagcg

SEQ ID NO: 224017 - DNA, 533 bp, Glycine max
ttcttcatagcactcaaaaacaactcacctcatcgttattcactttctctcaccacattctaaacagacagtagtagcaccatcatccccaataatggcatcatccccaacctttgctttgagaaccatctcctctttctctgtgaaacctgttaccaccacaagatcatcactcaccacctcatccaccacaaccctcttaccatttacttcaacaaactcatctctccccagaactctcaaactcaacacctcttccccacatcctcacctttcactaccccacaagtctttcacttgtagaagccaggctgagccatcttctgattcagccaaagtccaagaactgagtgtgtatgagatcaatgagagagatcgtggaagccctgcttatcttagattgagccagaaaactgtcaattcccttggtgatctagtccccttcagcaacaagttgtattctggatgtttgcaaaagagggtggggataacagctggaatctgtgtcttgatccaaaacaaagccgagaaga

SEQ ID NO: 224018 - DNA, 494 bp, Glycine max
aatgaaaacttttattatgtaaattgtcgaaataaaactctaattctaaccagaaaacaacacgaagaacacctaagaaactgtatccgagtttcttccttaaaaaagaaacaaaagaaaaatgtcgatcctcattgttcctcagtcagtaaagccagcaataacagcatgtggttcacaggccttggcagatgggctgggctcaatagctgggctgggctcaacaggctgggaaagaagctcctgaggcaagtccttgatgcccttaagataaaatgtggagaatagtttaaaggggaacacaatttgatgcagcttgacctgaccataagccccttcaaagatgccagatccaccagtcacagcaagataagtgtcctcataggtcaggtatgaaccctgcactgaaatgtgaccgcagtccccaaagtagaagctgtagattgcctcatacctatctccctttttctcggctttgttttggatcaagacac

SEQ ID NO: 224019 - DNA, 447 bp, Glycine max
  unsure (1)..(447): unsure at all n locations
cttttgggaaaagattaacaataaaagtgtggagtactgttgatagcaaagatgtttgggatcttcgacaaggggcaaaagataaaggggacagtggtgttgatgccaaagaatgtgttggacttcaacgccataacctccatcggtaaaggtggtgttattgacacagccaccggcatcttaggccaaggcgtcagcttagttggtggagtaattgatactgccacttccttcttaggccgtaatatctccatgcaattgatcagtgctactcanactgatggcagtggaaatgggaaagttggaaaagaagtctatttggaaaaacatcttccgaccttgccaacgttgggagcaagggcagatgcgttcagtattttcttttgatgggatgctagttttggaattcccagagcattttacatcaaagactttatgactgatgag

SEQ ID NO: 224020 - DNA, 480 bp, Glycine max
tcatcatgttcattgtgcagtggtgaattgaagtgtttgagtttggcatcttctgatggtgttttatttataattattgtcatcaagcttcagactcattctggatcactgagctgattctcttaatgtcaagacaaaaaatataaactgtagatgatgcatgtaagcttgagagatgcaaacaacagcacgaaaagcctctagcggagaaagaaaatcggctttgcctcaagatgtggatgccccgaataagaagactaatgcacgaagacaacattcatatagcattgcagagggctttccacagaccttcgagagctacgcctcttcttgcgccttacctccctgcctatataccatcccttatggctgaagtcgcctgtttggaagaagaaattgtaagacttgaagagcacgttgtgcatttcagacaggacttgtgccaggaagctgtctacatgtcatcttctatgaggaaat

SEQ ID NO: 224021 - DNA, 478 bp, Glycine max
caatttcacccttcacacgtggtggtggtgttgttcttcttctcttcccctttctttttcttcttctgagcttgtttaagctctttctatttgattccattaacatatattatcacaatgtgtggtattcttgctgttcttggttgatctgatgactctcgagccaaaagggtccgcgtgcttgagctctctcgcagattgaagcaccgtggccctgactggagtgggctccatcaacatggtgactgctttttagcacatcaacggttagccatagttgatcctgcttctggggatcaacctctctttaacgaggacaaatccgtcattgtcacggtgaatggagagatttacaaccatgaagagctcaggaaacagctgcctaatcacaagttccgtactggatgtgattgtgatgttattgcacacctgtacgaggaacatggagaagactttgtggacatgctggatggtatct

SEQ ID NO: 224022 - DNA, 453 bp, Glycine max
cgattctcgtaacaaaccctacccttttgagtcttccaagttttcaccatcgtaatgggttccgaaggatccagcgtcgtggttcctaggaatttcagattattggaagagcttgagagaggtgagaagggaattggggatggaactgttagctatggaatggatgatgctgatgacatatacatgcaatcttggactgggactatcatcggtccccctagtttgaaattgttttgcagcagggattatccagacaatcctccatctgttagatttcaaacaaggattaacatgacatgtgtcaatcaagaaactggagtggttgagccacatttgtttcctatgcttgctaattggaaacgtgagcgtacaatggaagacattttgattcaattgaagagagaaatgatgtctccccaaaataggaagctaactcagcctcctgaggcaatg

SEQ ID NO: 224023 - DNA, 491 bp, Glycine max
ctctcaatggctgcttctctctccaccaaaccattctcatcaaccgacgctctctccgccttcggttctctcaatcccgatctccgatccttctccctcggctacctgcgtctctcactccgtcctcgtcttcccaagagacttcagatacgggctgctgggagcatctatggaaatcactctcgtgtttcaacatatggagaatcacatggaggaggtgttggccgtatgattgatggatgacctcctcaccttcctctatccgaagctgatatgcaattggatcctgacagaaggaggccaggtcagagccgaattacaactcctagaaaggagactgatacatgtaagatattggcaggaggttctgatggacttactactggaactacaattcatgtatttgtacccaatactgatcaaagaggacatgactatactgagatggcagtagcttataggccttcccatgcagatgctacctatgacat

SEQ ID NO: 224024 - DNA, 545 bp, Glycine max
  unsure (1)..(545): unsure at all n locations
gtttctttcgttagccttggaacaaacaaacataccagtcaaaaatcaaaatctcagagttgtttgaacgagaaattgaaatgtctcagaccaagaaattgacgccgaatctggatcagcagagcacgaaggtgctgaatctcaccgtgctccagcgaatcgatccgtacatcgacgagattctcttcactgccgcgcatgtctccttctacgacttcaacatcgaaagcaaccagtggagtcgcaaggatgttgaaggatctctcttcgttgtcaagaggaattcacaaccacggtttcagtttatcgtaatgaatcgccggaatacagataatctagttgagaatctattggattttgagtatgaacttaaaaagccgtacctgttatatcgaaatgcagctcaagaagttaacggtatatggttttacaatccagatgaatgtgaagaagttgcaaatctctttaacaggatacttaatgcgtacccaaagacaccttcaactacaataccgnctgttaacataagtgagtctgaggaactt

SEQ ID NO: 224025 - DNA, 581 bp, Glycine max
  unsure (1)..(581): unsure at all n locations
agcgaagagaatggctcccaagggtttaatctttttggctgtgttatgcttctcagcactgtcactgagtcgttgtcttgcggaggataatggacttgttatgaacttctacaaggaatcatgccctcaggctgaagacatcatcaaagaacaagtcaagcttctctacaagcgccacaagaacactgctttctcctggctcagaaacatcttccatgactgtgctgttcagagttgtgatgcttcactgttgctggactccacaagaaggagcttgtctgagaaggaaacagatagaagctttgggttgagaaatttcaggtacattgagaccatcaaagaagctttggaaagggaatgcccaggagttgtttcctgtgctgatatcctcgttctctctgccagagatggcattgtttcgctaggaggtccccatatccctcttaaaacaggaagaagggatggtagaaggagcagagccgatgtggtagagcagttcctcccagaccacaatgaatccatttctgcagttcttgacaagtttggtgccatgggaatngacacccccggctagttgcatt

SEQ ID NO: 224026 - DNA, 436 bp, Glycine max
taagtaggtgtctctcactctcgcaccgaatccacattctaaagtaatacgccggagaatgacgtgacactcccactacccacccgacttagacgccgactccgtcacctcctccccacgctccgatcacttgcacgacgcgccgccccgcatccgcttcatgtgcagcttcggcggcaagatcctcccccgcccccacgacaaccagctccgctacgtcggcggcgacacccgcatcgtcgccgtcaaccgctccattactttctccgccctcattctcaaactctccaaactctcaggcatgagcaacataacagccaagtaccagctcccgaacgaggatctggacgcgttgatctcggtcaccacggacagggacgtggagaacatgatggacgagtacagccgcgtcgcacacaatcagaacccgcgatcg

SEQ ID NO: 224027 - DNA, 559 bp, Glycine max
  unsure (1)..(559): unsure at all n locations
aatagagaaccatctttttcgggtcctagctcgcactctctctacgcacgcctcaacatcccttctgtgctccattcattatgtctccgtcgctggatcttccccccaagggtggcttcagttttgatctatgccgaagaaacgcaatgcttcaaaacaagggcctcaaagccccaacctttctcaaaactggcaccactattgtcggtttagttttccaggatggtgtcattcttggggctgatactagggcaactgaaggacctatagtggctgataaaaactgtgagaaaattcattatatggcacccaacatatattgctgtggagcaggcacagctgctgatacagaggctgtaacagacatggttagctcacagctgcaactacatcgctaccatactggtcgggaataagagttgttacggcactgactcttcttagagacacctgttcaattatcaagggcatgtctcagctgctntagttcttggtggggttgatatcactggacctcattagcatactagttatcctcatgggtcaactgacaccctcc

SEQ ID NO: 224028 - DNA, 538 bp, Glycine max
gaaaagttcacccccaagcactaaattcctctaccacttgcaagcaagagacgtttaccctatggatgaaatctctggtactgaacggaaagggatgcaccgtgtttgattcaaatggccaaattgcataccgagttgataactacaactgcaggcatagagatgaagttcatctcatggatcaaaatggcgatattttgttcactatgctgaaaaagcaatataagttgtccaggttttgggagggttatagatttccagttccaggaacaaggaatgaccacaaaggaccatgctttcgagtttcaaaaacttataagatctctagagggggttcaacctatgaagttgaacttggattggacaaaaatcaaccgtatactcataaaatagaacgcatcacttgcaactcagcttgcaaaatatctaacgagcttggagtggtagttgcagagctaaggagaaagaagtcaccttgtggagttgatttaggagatgatgttttcacgatggtagtggagccaaatatacatctttc

SEQ ID NO: 224029 - DNA, 522 bp, Glycine max
  unsure (1)..(522): unsure at all n locations
attttgtcttttttctttatcacagctgcaatcaacaagacttagaatgcgatgagcaaaaatagacctcaattccgaattcagagatagcacgcaccaggagaagccatggctactcaatccccttcacctcagaacctaggtggtgaaattgagcaaacagaaaatgtagatcagcataataggggagaagagcttggtaaacagagttcagacacatcggtgtttgtgaactcagagccattgcgtgaggaacaaattcagaatgctgtgaaatttctgtcgcacccgaaagttagaggttctcctgtcatccacagacgatcgtttctggagaagaagggccttacgaaggaggagattgatgaagcctttcggcgtgtgcctgattcacctncaagtgtgcagacagctggcataaatcaagatggacaattgaagccatcatcaaacattcagcnagcaggccaaccacaggctttgcagctgactgtaccagcttctactggtgttactactacg

SEQ ID NO: 224030 - DNA, 447 bp, Glycine max
  unsure (1)..(447): unsure at all n locations
ctctcccagaccccgcacgcgaaccgggtccagtggaacacctccagttcggcctgcgactcctggttcggcgtccaatgcgactcgaaccgctccttcgtgacttccctccacctccccgccgccggcctcgtgggccccatccctcccaacaccatctcccgcctcacgcgcctccgcgtnctcagcctccgctccaacgcgctcgtgggccccatccccttcgacttcgccaacctcacctccctccgcaacctctacctccagaacaaccacctctcgggcgagttccccacaaccctaactcgcctgactcgcttgactcgcctcgaactctcctccaacaatttcacaggaccaatccctttcttcctcaacaacctcactcgcttaaccggcctcttcctaaaaaacaattccttctcgggtagcctccccagcattacg

SEQ ID NO: 224031 - DNA, 511 bp, Glycine max
tgcaaagttaccttgcgttggccctcatccaaagaatgtcatacttttggcatgtgacgcatttggggtactcccacccgttagcaagctaaacctggcacagaccatgtaccatttcattagtggatatactgctttggtggcgggcacagaagaaggtattaaggagcctcaggcaactttttcagcttgttttggtgcagcattcattatgctacaccctacaaagtatgcagcaatgcttgctgaaaagatgcagaagcatggtgctaccggatggcttgtcaacactggttggtctgctggcagctatggctatggaagtcgcattaaactacaatacacaagaaaaatcattgatgctattcactcaggaagtctgctgaatgcagagtacaagaagactgaaatttttgggcttgagatccccaccgaagtggagggtgtcccttcagaaattctagaccctgtgaacacttggtcaaacaaaaagggctacaaggagacacta

SEQ ID NO: 224032 - DNA, 527 bp, Glycine max
aaagcctagaaaataaacttcatttttttggaggaagaatagaaatgacattatgagcccaaccaaaccaatggtacaatattttattctaaggcaagattttatgtaccatgctaacattaacattcccaaccacacaacatgttacataacattgtctcaaaagattggaccagctgcgagaatctcttctgtcacggtgttgttgcccttgccaatcttgtagttggtgaaggtttgaaaattgttcttgaacaatccaaccaacttgaatagtgtctccttgtagccctttttgatcgaccaagtgttcacagggtctagaatttctgaagggacaccctccacttcggtggggatctcaagcccaaaaattggaggcttcttggactctgcattcagcaaacttcctgagtgaatagcatcaatgatctttcttgtgcattgtagattaatgcgacttccatagccatagatgccagcagaccaaccagtgttgacaaaccatccggtagcccatgcttctg

SEQ ID NO: 224033 - DNA, 524 bp, Glycine max
attatcctaagtctttgggaatagtgctgcaatggcttcaagtcaggaggaggtgacccttttgggagctactggaagcccatttgtgtgcagggttcatattgccctcaagttgaagggagttgaatacaaatatgtcgaagaaaatttgaggaacaagagtgaactgcttctcaaatccaacccagttcacaagaaggttccagtgtttattcacaatgagaagcccatagcagagtctcttgtgattgttgaatacattgatgagacatggaagaacaaccccatcttgccttctgatccttaccaaagagccttggctcgtttctggtccaaattcattgatgataagggcttttggtgctgcatggaaatccgttttcacagctgatgagaaagagcgtgagaagaatgttgaggaagcaattgaggctctgcagtttcttgagaatgagataaaggacaagaagttctttggaggagaggagattgggttggtagatattgctgctgtctacatagca

SEQ ID NO: 224034 - DNA, 549 bp, Glycine max
atccgccattgaattcttcttccatttctcttttttctgcatacccatttcgtttttcttcccaaatggccctttcttgctacaaagttttaagcttttatctctcgcccgttgtgggtggtggtgatgttccgaaaaagctcactttttcttcttttttgggtctttctaatggtgttggtggaagcaagagctctagggtgtgtgctgcttcaaatgcacccagcaccactcgctggtgtcatatctgaaccatttcaagagctcaagaaggatgatcttgctgttccgattgcacacaatgttgacttggctcgtcagaactatgcatatgactatgaatctgcaatcaacgagcagatcaatgtggaatacaacatttgctatgtgtaccacgccttgtttgcgtacttggacagagacaacatagctctcaaaggacttgcaaagttctatcaggaatcaagtgacgaagaacgagagcatgccgagcagcttataaagtatcagaacattcgtggtggacgagccgagcttcacccaatcaca

SEQ ID NO: 224035 - DNA, 379 bp, Glycine max
gctcggaattcggctcgaggctaaaaacacggtcgccaacaacaaagtcactgccaatctcacttccgtcatcgacgaggccggtactactgatggatgcagccgaacggtcggaaattttctttacacggttgcgacgaagtaccctgcaaatgccttgccgcatcgcccaacattactacagtacattgtctcgttaaaggtgaaaacaactgcccagttagatgcagcattatcatttcttgctaccacaggctccgagaatcttgatttggaccggtttgaagaagcttgtggtgttggtgttgaggtttcagaagaagatatcaaacaagctgttagtgaagttgttgaggagaacaaggctacaattttgagc

SEQ ID NO: 224036 - DNA, 536 bp, Glycine max
ttctctcttcacctacactttcctctttcaattcaattcaattcttctttttggttcagaaactctgtacagttaatcaaaccctacctcacctcaccggttttagctgttaatttaatatatagatagaaaaccctaaaccccttccatttcccttccactcactcttctaacatggcgactcagatcctctctcgcatcttccccaaaaccctagcccccttcctctcccgttctctctccaccgccccctctcctccctccctctccgcgctctccttcctccgccgcatctccgttgccggcaacccctccctccaccgcgccctcctccccaactctacctccctgcgcgccctctccacacgcgccactacctgctccctcaacgaccccacccctaactggtccaaccgtcccccgaaagaaaccatcttgctcgacggctgcgatttcgaacactggctcgtcgtcatggagaagcccgagggagaccccacacgcgatgacatcatcgatagctacatcaaaacatt

SEQ ID NO: 224037 - DNA, 513 bp, Glycine max
  unsure (1)..(513): unsure at all n locations
ctcgagccgaatcggctcgagcttccctttttccttcttttctttctttacaatttagaccaaccttgtatctctatcattctgaattattaacgttgtcgtgttttgtgttttgtgttgtgcaggggacaattatctgaagccgtatgtaatttcggaaccggaggtaacggtaactgagcgtagtgaggaggatgagtgtttgatattagggagtgatgggctatgggacacagtgcaaaacgacatcgcatgcaaagtggtgcggatgtgtctgaacgcgcagaagccgccatcgccgccctcgtctccgaggagggagatggcggtggactgctccgacaaggcttgctccaacgcctccattctgctgaccaaattggcgttggttaggcagagttccgacaatgtgagcgtggtggtggttgatttgaggagaacctaaaatgggaactgtgcgtggacacccgatgttgtggaattttgtttttgacanaagnaggggaagaaaat

SEQ ID NO: 224038 - DNA, 514 bp, Glycine max
  unsure (1)..(514): unsure at all n locations
atctctagcttgtttcaattccttccaattttgcaatggccactactctttctgaagcctatagggaccaccctctccaccttcatcatattatccccttagacttttcttcacttaggaccttacctgattcgcatgcatggcctcaatctgaagatggtgatggtgatgatgataatcatggaattggatcacccatacccatcatagacctaatggatcctaatgccatggaactcataggccttgcttgtgagaattggggtgctttccaattgaagaaccatggcatacccttgagtgttgttgaagaggttgaagaagaggcaaagaggctctttgccctccccgccgaccggaaactcaaggcgttgagatcggtcaccggtgccaccgggtacggccgagctcggatatcgccattcttccccaagcacatgtggcatgaaggatttaccatcatggagtctncatgtgatgatgccaaaaagatttggcctaatgactatgcacc

SEQ ID NO: 224039 - DNA, 562 bp, Glycine max
gacggaatgaaatgatattatcaactatttaaaagagagccaaaattggagaaaaatgcacattaattagtttttaagcatactaatcaaagacaatgctccccgaaggttcttggccttaataccaatatactccttcacagtcaaggaacgaaaacgaggcaaggaatcaagaaccaaaggagaaaccacatgatccacagggggaccatagaaataagccactgagtatctttcccttgcactattcaccatgacacgatgcaatgcacatctaaaccttgagttggacaagatgtgaagaatgtcaccagtgtgaacaacaaggctgctagggtgagggtgcacagggacccaccctgcccctttcttgaagatttggaggccattggtttggctttggtggaggattgcgagaagggaagtgtcactgtgaggggctagccccatggcttggtttggctcacgacaacgagggttgaagtttagctgaacagcttcacagaggttgttggttgaaccattaatccaccttttttgcttctcagaaatgccccccaat

SEQ ID NO: 224040 - DNA, 549 bp, Glycine max
ttgagaaatggcacaagaaacctttctattcacatctgaatctgtaaacgagggtcaccccgacaagctgtgcgaccagatctctgatgcagtgcttgatgcgtgccttgaacaggaccctgacagcaaggttgcctgtgagacatgcaccaagaccaacatggtcatggtctttggagagatcacaaccaaggccaacgtagactatgagaagattgtccgtgacacatgccgcgaaattggattcatctctgatgatgttggtcttgatgctgacaaatgcaaggtgttggtcaacattgagcagcagagccctgatatcgcccagggtgtgcacggtcacttcaccaagcgcccagaggaggttggtgctggtgaccagggtcacatgtttggctatgccactgatgaaacccctgagtacatgcccctcagccatgtccttgcaaccaaactcggtgctcgcctcaccgaggttaggaaaaatggtacctgtgcttggctgaggccagatggcaagacacaagtaactggtgagtactacaatga

SEQ ID NO: 224041 - DNA, 464 bp, Glycine max
gggtacaaaagtttgataaaatttccattgcatggaaacggtaacattgcataaccaaaaaataaattgtgagtaaaaggcgaaaaggtaataataaaacaggttacgtcttgatgagaagacattagacctatgaatgaagaagtgtttgttatgaaacacccaaattattcatcctcacctagcaggacatccattgaggggagggattgacttcacaacaatcttaaacttgaggctactgaaacttgaggggcttgacaacttcccaggtgaagacagggtcatcccttccaaagggtccgtaagcagctgtcttgaggaacctatggccacccttcttaagggccaagttaatggggatcatcccaagtctgaagagcgagttcttcttcacaattagaagaatttccttgtgaggaatctttccagttccattagtggccacaaacactgacaagggc

SEQ ID NO: 224042 - DNA, 429 bp, Glycine max
aatgacaaatacaaatacattcagccactccaaaaacatgacttaagcgtacacaactgattaaagaatctggtttcttcaatttaacatttatttaaaaccagagacagtacttaagcatccatatggtccttagatagagagactgaggggaattcctctgaaaagcaatccctactcactagaaggatagagcaaagggtaacgcattttaactggcccatgacggcttatcaagggcatatgtctggtgatcactataaacgcttttgcaatctcttcaagcttctttccaacacctattaaatgcctcttatggaccggcatcagaagtccagaagtcaccaccatctttttgccccatgtagaactcatcagatgcgtgccctgacgagatgtctataactggcaggtcaatgagggtcttct

SEQ ID NO: 224043 - DNA, 576 bp, Glycine max
ggcacgtggtgatgaagcttaaggataacagtcttcatcacttttgcattttctctgataacattattgcaacttctgttgtggtcaattcaactgcaatgaattgtaaaaatcccaatatgattgttttccaccttgtcactgacgaaataaactatgctgcaatgaaggcatggtttgccatgaatgatttccgtggggtgactgtggaagttcagaagtttgaagactttacttggttaaatgcttcatacgttccagtgctcaagcaacttcaagactcagaaatacagagctactacttttctggcaacagtgatgagggcaggacacctatcaagttccgtaaccctaaatatttatccatgcttaatcacctgaggttttacatccctgaagtttttcctgcacttaagaaggtggtgttcctggatgatgatgttgtggttcagaaggatctttctggtcttttttccattgatttgaatgagaatgtaaatggagctgttgaaacatgcatggagacatttcacagataccataaatatttgaactactcccatcctcttatacgtg

SEQ ID NO: 224044 - DNA, 525 bp, Glycine max
  unsure (1)..(525): unsure at all n locations
ctgtcaacagtcttgaccatcattgtttgattgtcttcagtcctgtacaagatgttgctgattcctgccggactggagctgcaaccaatgtcatctttggccttgctctgggatacaagtctgtcattattcctatttttgccattgcaatcagcatttttgtgagttttacttttgctgcaatgtatggcattgctgtggctgcccttgggatgctgagcaccattgcgacagggttggctattgatgcctatgggccaatcagtgacaatgcaggaggtattgctgagatggcaggcatgagccatcgtattcgtgagagaactgatgcccttgatgctgctggcaacactactgctgccataggcaagggatttgctattgagtctgcccgtctggtgtctttggccctatttggggcatttgtgagcagagctggaanttcaactgttgatgtcttgacacccaagtctntattggactcatagntggtgccatgcttccttactgggttttcgctatgac

SEQ ID NO: 224045 - DNA, 478 bp, Glycine max
gcacaagtgagagaggttgaaggcggcgtgagaatgttggacatcaacctattcagagaggagaagggccacaaccctgaactcatacgcgaatcccaacgccgtcgtttcgccagcgtcgaaatcgtcgacgaggtcatcaatctcgacaaagaatggcgaaaacgtcaattcgagttggaaaatctccgcaaggaattcaacaagatcaacaaggaagtctccaaactcaagcgtgctggggaggatgcttctaagttcattactgaatcagaggagaccaaaaaatcgatagcggagaaagaggttgaagtgcgggaaactctgaatctcttgaattccaagttggaaactattggaaacctcgtccacgattccgttccaattagcaacgatgaggccacaattgttgtgttagatcgtgggagagagaagagtggagcctagctgagaatatgtggatctagttgagcttctc

SEQ ID NO: 224046 - DNA, 531 bp, Glycine max
  unsure (1)..(531): unsure at all n locations
cccacaacaaccccaaacccttcactctttcgattttcgaaggtaaaaagatgaatctgaagaacatgaaggttccgaacgttccaggtggcggggggatctctgcgctgctgaagcttgggattgttggtggaattggtttgtatgcagctgctaacagtctctacaatgttgatggaggtcaccgagccattgttttcaaccgtctagttggtgtcaaagacaaggtctatcctgaaggaactcacttcataattccgtggtttgagaggccggttatctatgatgtccgtgcacgaccccatctagttgagagtacatctgggagtcgtgatctacagatggtgaaaattggacttcgagttcttactcgcccgttgcccaaccaattacctacggtttatcggacccttggagagaattataatgaaaggggtttaccttcaatcatacatgaaactntgaaagccgtggttgcccagtacaatgccagccagcttattactcatcgagaggctgttagtcgggaaa

SEQ ID NO: 224047 - DNA, 542 bp, Glycine max
  unsure (1)..(542): unsure at all n locations
ctgttgatgctggtttctccgttttgaaattcccatctgtttggatgcactaatcctgcatccctcgaagcgcgtttgatctaaaaccataaacctctgtctcgtcagatctccttcttccgttcagtaaacctgtccttcgatccgatctgatctattttccgaatccaaaatggcgacgatgacaagcttgatcggtctcatcaataagatccaacgagcctgcaccgttttgggcgatcacggtggcgagggcttgtcgctttgggaggctcttccctccgtcgccgtcgtcggtggacagagctcagggaaatcgtcggtgctagaaagtgtggtcggaagagattttctgcctcgtggatctggtattgttacacggaggccactagtgctgcaacttcacaagacggaagatgggacacaggagtatgctgagtttcttcacataccaagaaggagattcaccgactttgctgctgtgagggaggaaatatcngatgaaacagatcgtataactgggaagacaaagcanatttcta

SEQ ID NO: 224048 - DNA, 524 bp, Glycine max
  unsure (1)..(524): unsure at all n locations
gtgagggcaagatcacagaattggtgtgagagagatgggttcgtccgtgaagctttcaaggagggccttggaaactgagatgcccgttatggttcagatgcaggaattgcaacgaggagctaagaatgccttgtctttggcccagggggtggtttactggcagcctcccaagcaagcgttggaaaaagtgaaagaacttgtatctgagcctttaattagtcgttatggtaacgatgaaggtattcctgaactcagagcagcattagtcaaaaagttgcgtgatgaaaataatttgcacaaatcttcagtaatggttacatcaggtgccaatcaggcatttgtgaatctagttcttactctctgtgatccgggtgattctgtggntatgtttgctccttactacttcaatgcgtacatgtccttccagatgactggcattaccaatattctagttggtcctggtagctcagacacactccatcctgatgcagattggttggaaagaatattatcagaaaataaac

SEQ ID NO: 224049 - DNA, 529 bp, Glycine max
ctctcactttgcttccaaggcctcaccttttcctctcacacccgtttccgttaccgtttccagagctattgtttgcaacaaccccaccaggttcagatcgcaaatgggttctttctccacttcctcttcctcttcctccaaactcttgttccgccagctttttgagaaggaatcttccacctacacttaccttctcgctgatgcctcgcacccagaaaaacctgcacttctgattgacccagttgataggacagtagacagggacttgtcgatcattgagcaactggggttgaagcttgtgtatgccatgaacacacatgtgcatgcggatcatgtcactgggactggccttatcaagagcaaagttccttctgtaaaatctgttatttcaaaagcaagtggtgcaacggcagatctttatgtggagccaggtgataaggtccaaattggtgatctttttctagaggttcgtgcaactcctggtcataccaaggttgtgttacctatgttactggagatgcacctgatc

SEQ ID NO: 224050 - DNA, 479 bp, Glycine max
gaagtataggattaggaagttttaacataaacgatcagatacaacagaaacacagcataatcactggaacctaattctaattatattgggccacaacacaaataccattttatttatttacaatttccatttttctcttcaattcaaagggctataacaatttttcccccttttgcttgcaaggtctttgtgtcaaataacatcagtgtgtgactctcagataaggcttatgaagcctcaacttgctttggattggattggattccgcaaaccatattagctgggacagctatgtcaatcattttaggatatgacaggttaagatttcccatgatgttcttgaaagggacctcatcctttgatatgcgaggattggaatgcagcttctctccaacagtgctcacagtgaatcctttgtagtcatgagcttgatagattaacgtactcttgggcagtgttaaaatttgtgaatggattga

SEQ ID NO: 224051 - DNA, 506 bp, Glycine max
attacagtgcttgaaaccgttcaatcagtgaaatggccaaggaagatgtgtttgagttcctcgggaacgttcctctgctacagaggcttcctggctcgtctgtaaggaagatatctgagcttgtgattctcaaacactatgagccgggagagtatgttgttcgtgagggagaacgtggggatggtctttacttcatctgggagggagaggctgaggttgttggctctgttaatgctgacgatgataatcatccagagtttcaattgaaaagatttgactattttggttttggtttatcaaatgaagttcaccatgctgatgttgtagctttgacaaagctatcatgcttggtgctgccccatgagcactcagcattgctgcagccaaagtctatttggagtgcagaaaaatctcatgatacatgctcacttgtggagcatatattgcatttggaccctatagaggtagacatcttccgaggaaatcactctccagatgctccaaca

SEQ ID NO: 224052 - DNA, 529 bp, Glycine max
cacagttcacactttctttgtttcttattgagtttttggcttctcacttctttttttctttcacactctcaacgaagtgatttataacagtgtttaattgaaattccaaacatggattgggttcgaggagacgctgtcggacgaggaagctttgccaccgttagtttagctattccaacgacgaattacaatcagtttccgtctctaaccgtggttaagtccgctgacgctcaaacctcgtgctggctcagaaacgagaaacacgtgctggatcgcctaggttcgtgtccgaggataattcgctgcttcggagatgactgcagtttcgagaacggcgtcgagtactacaatttgttcctcgaatacgccgccggcgggagtctcgccgacgaattgaggaaccacgatggcaggattcccgagcctgaggctcgggaatacacgagggacatcgtggagggtttgagccacgtgcacaaaaacgggtttgttcactgcgatataaagctgcagaacatcctcgtattcg

SEQ ID NO: 224053 - DNA, 512 bp, Glycine max
ttgagatggaacttgtgcgaaccttttcatgtttctatcaatataagattggtagagtttaagagacagaggaagaaaagatgagcctgaaatgaaggtttattttttatttttttatgcagcttttcggatcttcaaaatccacacggagatcttgatgggaaagcatgtgcagctgttgggcagagtagtctcatggctctgtatgaactcatgtttagtcagcttgatgttacttcatcccaacttcttgtgaatgatgggttttttagggatacagctttcagaaaacaactttcagacaccgtgagctcgttactagatttaagggttattcccattttcaatgaaaatgatgctgatcgtactaggaaggcaccctatgaggattcttctggtatattctgggacaatgacagtttggctggtctattggctctggaacttaaagctgacctacttgttctattgagtgatgttgacggtctttatagtggtcctccatctgatcc

SEQ ID NO: 224054 - DNA, 504 bp, Glycine max
ccacattggatggatatgatcaacttgtagatgaattggagaagatgtttgacataaagggacagcttcaacacaggaataagtgggaaactgtcttcactgatgatgaaggggatatgatgcttgttggtgatgatccatggcctgaattctgcaatatggtgaaaagaatcttcatttgttcaagccaggatgtgcacaaattgagctcagggagcaaactacctatctcttctatgggagagattgtaataagcttaaacacaaccgagacctgaaacttttacattcttgttcttactattttgatggatttttttcttttatttttctgatgcttttattgtgcttattcaaggtaagaatgttagtttgtttttggctaggcaagtttcatgctagttgtgaaacactggctaattgtagctcaatttagagattctagatactaattaggttccaaagactaaattaaatattttaatacattagttttgagaggtg

SEQ ID NO: 224055 - DNA, 560 bp, Glycine max
cctcggggaattccaattccacattttcaagaaataaggaggcaaaaatgttcatatatgaattggaattatttgttttcttattaggcctatcctgaagccaaaggaaatgagatcggaattcctcggggaattccaattccacattttcaagaaataaggaggcaaaaatgttcatatatgaattggaattatttgttttcttattaggcctatcctgaagccaaaggaaatgagatcggaattcctcggggaattccaattccacattttcaagaaataaggaggcaaaaatgttcatatatgaattggaattatttgttttcttattaggcctatcctgaagccaaaggaaatgagatcggaattcctcggggaattccaattccacattttcaagaaataaggaggcaaaaatgttcatatatgaattggaattatttgttttcttattaggcctatcctgaagccaaaggaaatgagatcggaattcctcggggaattccaattccacattttcaagaaataaggaggcaaaaatgctcatatatgaattggga

SEQ ID NO: 224056 - DNA, 445 bp, Glycine max
caggaagctccatgcatggagtaactggaagggaacaaaccttcatagcctcagtggcttcccctatggtccctacagacaccacagcaaatttcgctttggcagtagattctgagcacaaggcaaaaaaccacaagcttttttccttagccaaccctcacatagagaaccatccacgtgtattggatattcttcttcacttgctttgccttgaacttcgaggaggtgccacttgtccccatcattcacgacaaccttaacctcaccaaatgcgacatttggaacaccggcgttgcctctgtctgcggcagcatcttctgcaccctcacaaggggcagcgcattgtgacctacttggaccgcgttacagctgtgccatactcatcatgctctctgcaccaaccgagatctgcacgtattacgggaatgatgctggtggatacata

SEQ ID NO: 224057 - DNA, 505 bp, Glycine max
gccaaacctcgctgaaaattagggtttcgtttcggaggtagacgaagatgttcggaagggcaccgaagaaaagcgacagcaccaggtactacgaaatcctcggcgtttcgaagaacgcttcgccggatgatttaaagaaggcttacaagaaagccgccattaagaaccaccctgacaaaggcggtgatcctgagaagttcaaagagcttgctcaagcctatgaggttctgagtgaccctgagaagcgtgaaatttatgacacatatggagaagatgctcttaaggaaggaatgggtggtggtggcggtggccatgatccatttgatatcttcagttcattctttggtggaagtccgtttgggtcaggtggtagcagtagaggacggaggcagagacgggagaagatgtggttcatcccctgaaggtctctctggaggatctttacctcggaacatctaagaaactctctctttacgaaacgtgctgtgttcaaatgcaatgggag

SEQ ID NO: 224058 - DNA, 394 bp, Glycine max
aatgatgtcactgttatgccttgtggacatacaatccataagagctgcctgaatgaaatgagagaacatttccagtattcgtgccctctctgcttgaaatcagtctgtgacatgtcaaaggtttgggagaaatttgatatagagattgctgctacaccaatgcctgagcaatatcaaaataaaatggtttggatcctgtgcaacgattgtggtaaaacttctcacgttcagttccattttgtggctcaaaagtgtccgaactgcaaatcctacaatacacgacaaacatgaggctgagcaagtggccacgattattcattggtttcgtcaaaagccttcacttgagttctttgatgtctgtgtgattcgtgaaggcagtgaaatgcatgtgtgt

SEQ ID NO: 224059 - DNA, 411 bp, Glycine max
ctctctctttctctctttctagttcgtgttcttcgtcgcaaatccgaagtaggatctctcttgttttttctctaggtttttcgcgatggcgtcgaagcgaattttgaaggagcttaaggatttgcagaaggatcctccaacatcttgcagtgccggtatatttttatttttttgttttgatattcttttcctattttattgttgagaatttggttgtgtttgtttaaacaatttggatttaaattttggtaaggaagaagctgcgcgattctgattttctagcagtaatatttgtatattgtaaaataaaattcctgtttagaattttgtttcttaggttttttgttgagatttatttcaatcggttgtagcggatgtcgtttgatataggtcttggggccgtttgtagat

SEQ ID NO: 224060 - DNA, 482 bp, Glycine max
  unsure (1)..(482): unsure at all n locations
tggaaaacagattgtgcatctaattccaaattcacccataaaaatacttccttttgctcaccagccatatattatgatggagggagatgagaatattcaagcatcatcaaagggaaaatatgttgaaagcttcaactgctcggaggcaccaaggaagaaaagcaagaagatagaaaacaagaggaggtttagtgatgaacagataagatcactagaatgcatatttgagtcagagtcaaagcttgagccaaggaagaagatgcaactggctagagatcttggcctgcagcctcgccaagtggctatatggttccaaaacagaagggcaaggtggaaatcaaaacgaatagagcaagagtaccgaaaactcaaagatgaatatgacaatttagcatcaaggtttgagtccctaaagaaagagagnggactcttgcatttagagaaactaagtgatttngtggaggcatgtcaagatgatggaa

SEQ ID NO: 224061 - DNA, 580 bp, Glycine max
caaattagttcattctctttgcgcagttccctacctctcctttcaagatgcagatcttcgtcaagaccctcaccggaaagaccatcacccttgaggtggaaagctctgacaccatcgacaacgtcaaggccaagatccaggacaaggaaggaattcccccggatcagcaacgtctcatcttcgccggaaagcagctcgaggacggccgtaccctcgccgactacaacatccagaaggagtcaacccttcaccttgtccttcgtctccgtggtggcatgcagatcttcgtcaagactctcactggcaaaaccataaccctagaggtcgaaagctctgacaccattgacaacgtcaaggccaagatccaggacaaggagggaatccccccagaccagcaacgtctcatcttcgccggaaagcaacttgaggacgggcgcaccctcgccgattacaacatccagaaggaatcaacccttcacctcgtcctccgtctccgtggtggcatgcagatcttcgttaagaccctcaccggcaagactataactctagaagtcgagagctccgacaccatcgacaacgt

SEQ ID NO: 224062 - DNA, 548 bp, Glycine max
cgcgcgcgctgtggcggagatacgtgggttggctgtaccagcacaaggaacttgggatttacttggatgtgagtcgggtcgggttcagtgatgagttcgttaaggagatggaaccccgtttccaagcggcgtttcgggcgatggaggagttggagaagggcgcgatcgcgaatcccgatgagagtcgcatggtgggacactattggctgagggaccctaagcgtgcgcccaactcgttccttaaaacgcagattgagaacactctcgacgctgtttgcaagttcgctaacgacgtcgttagtggtaagattaagcctccttcgtctccggagggtcgatttactcaaatattgtctgtgggaattggaggttctgctcttggaccacagtttgttgcagaagcattggcacctgataatcctgcactcaagataagatttgtggacaacacggatcctgctggaattgatcatcagattgcacaacttgtgcctgagctagcttcaacacttgtgattgtgattatcaagagtggaggtactcctgag

SEQ ID NO: 224063 - DNA, 546 bp, Glycine max
gagagaaagagagggagtaagtgggtaaaggaaagaaaactaaagaaacaaacctaacacaacacaaatccttgaaacgacgacggaaatggccgtttcgagctcgcacatgcgtttcacctttgagtgccgctccgatcccgatttctcgccccccccgccgtgcttctacaacctgcgccgacgcaacttccgctcctccgcaggatccggcgcggcgtttcacggcatctgctccctcatactgcgcttccctcccaacttacagcgccagctaagcaccaaggcgcgccgcaactgcagcaacatcggcgtcgcgcagatcgtcgccgcttcgtggtcgaacaacagcgacaactctccggccgccggggcttcggcgccgcccgcggccaccgccacggacgccgctacggtgcctctccccgtcgtcgtcgtcgtcaacgaggacgttcgtgtctacgccgcggcagacgagaacggcgctgtacagttaaacagcagttcttattcttcatttctcgaatccgatgcaagcaaaacgat

SEQ ID NO: 224064 - DNA, 519 bp, Glycine max
ctcgagccgattcggctcgagtggacatatagcattttccccttcccactcagatccagtgatcgttttttgagccaacggtgctgattcgttcgcgcggaatcttgctcggcgtcggcgtgtaagtcatctgtgaattcccttgggcaagatggctttggggaaatatgctagagtagatggtagaagatcgtcgagttggtgttcaacggtgactgttgtcatgtttgtggctctgtgcttggttggggtttggatgatgacatcatcttcagttgttcctgtgcgtaacggagacgaagcccaggagaataagaaccaagtgaaagaacaagcagaggtgaaagaagcagtgagtgaggtcagcaatagcaatacgcggcagtttgaagataatccaggtgatttgcctgaggatgcaaccaagggggacagcaatgtaacctttgaagacaactcaaactcttcagataaacaagagaagttggaggaaaatcctgtagagaggtcttctgatga

SEQ ID NO: 224065 - DNA, 540 bp, Glycine max
  unsure (1)..(540): unsure at all n locations
atcgctctggtcgtactgggcgtgctggaaaacaaggtaatgccattctgctgtacaccagtagccagaggagaacagttagatccctcgaacgtgatgtcggatgcaagtttgaatttgttagtgcaccggctatggaagaggttttggagtcatctgctgagcaggttgttgccacacttggtggagttcatcctgagtctgttcagtttttcaccccaactgcacagagactgatcgaagaacaaggaacaagtgcccttgcagctgcactcgcacaactgagtggattttcccgaccaccatcatcccggtctcttatcacccatgaacagggatggattacattgcaactaactcgagattcagatagtagaagatatttttcagcaagatcaatcactggggtttctttcttgatgtttatcctgcagctgctgatgaagttggaaaaatccaatttattgcagatgaaaaggttcaaggagctgtttttgatcttcctgaggagattgccanagattacttaatagggacata

SEQ ID NO: 224066 - DNA, 529 bp, Glycine max
ctctgtcgttccgtcgttgacgatggcgtttcgggtgcgaagccctgacctccgctctctctttcttctctctctcttgtccatcgcttccgccaatgtcttcttcgaagagcgtttcgatgacgggtgggaaaatcgatgggttaaatcagattggaaaaaagatgagaacgtggctggggagtggaaccacacctctggtcaatggaatggagacgctaatgacaaaggtattcaaaccagtgaggattacagattctatgctatttcagctgagtaccctgaattcagcaacaagggtaagacactagtctttcaattttctgttaagcacgaacagaagcttgactgtggtggtggctacatgaagttgctcagtggggatgttgatcagaagaaatttggcggggatactccttacagtattatgtttggcccagatatctgcggttacagtaccaagaaagttcacgctattcttacctacaataacacataccacttgataaagaggatgttccttgtgaga

SEQ ID NO: 224067 - DNA, 481 bp, Glycine max
gcctgttctaatcagtgaaatagtcaaatgtgattgaagcaaaagctcgggctttcacttgcagttttccacggtctgcttatctagggaaaaataaaaacaaaaaaacactacaactgaaaaagatataactttccggaatataacttccgctcactctttatgcgttttgcaaacttcctagagttcatcatgtacaccctcttccttggtgacttctccagcttccgcctttgattcagcatcggagtcattgccagcttcatcagcatcttcctcttcctcatcagcatcagagtcaactgggacatcctttgattcctcctcttccctcttcttgtcggccttctcaaatgctgccttcatagcatccttgtgcttgccccatgtttcttcaaccagctgcttagcatactcaggatcatcagtaattaagacattgtcaaacaaagtaccagatttcacctgccacaattcaatc

SEQ ID NO: 224068 - DNA, 379 bp, Glycine max; identical to SEQ ID NO: 224035

SEQ ID NO: 224069 - DNA, 392 bp, Glycine max
ataagactctgggggtatttttgattttgcaaattaaattacacaatcacagccgtacattacacatgagttgggccttttccaacttaaaagcagaggataacattggcccatgacgcgacacatgccccacctaataatcataattttacatctttacatacaaaatacaaagacttttaatttttaaaagaagaaaagagattaaccgatctttttaatgaaatgaaaccaaaacccacaaacattggcttgatttttggtggtggtggtgttcccaacttgattaaacatgaaccggttgattgaatcacttggacttgaagggaatggccctgattaccacctggtggtaaagtgctgcaagaactgcaccgatgaatggtcccacc

SEQ ID NO: 224070 - DNA, 428 bp, Glycine max
gctaaaaacacggtcgccaacaacaaagtcactgccaatctcacttccgtcatcgacgaggccggtactactgatggatgcagccgaacggtcggaaattttctttacacggttgcgacgaagtaccctgcaaatgccttgccgcatcgcccaacattactacagtacattgtctcgttaaaggtgaaaacaactgcccagttagatgcagcattatcatttcttgctaccacaggctccgagaatcttgatttggaccggtttgaagaagcttgtggtgttggtgttgaggtttcagaagaagatatcaaacaagctgttagtgaagttgttgaggagaacaaagctacaattttggagctacgttatcgaacaaatgtgggtgagttgctggggcatgtgcgcaagaggctgccatggggtgatgc

SEQ ID NO: 224071 - DNA, 507 bp, Glycine max
aaagcgttcaaaactcgaatttcgaagtcaaaacaccaaatacctatgtcctcaaaatagtattccagaaaatgaagcaaaaataagatgataaccgcagaaattagcggtaacggcggagagacagggtgttgtttctctttcaggttgccctgcgagatggacgtgctttgtggtacagatgtcctctgccacgtaaacccctgttgcttttcccagcagaggtgagcccacgcagctttctgtgcttgtgcactggattggcgagccaattgattctgggatcatttctaatagcagcatgagccacatccaccagaatcacctgaaagtatttataagtggagtcctcattcacccagtaagaattgaggaccctaagtccacccagcttacgtccagctcgctcctagcaactgacctcttgctacgctgaaatttcagttggggaacaccctggtttgtgggctttccataaacaatacctttgggaactgggcttttttg

SEQ ID NO: 224072 - DNA, 591 bp, Glycine max
gggtgaggtagaacccttccacggtggtgactgcgcgatgggtgcctacaagtatgtttcagagctatggcgcaagaagcagtctgatgtcatgcgcttcttgcagcgggtgaggtgctgggagtataggcagcaaccttccattgttcgcttgacaaggtcgacccgccctgacaaggctcgtcgcttgggcttcaaggctaagcagggctatgtgatataccgtgttcgtgttaggaggggtggccgaaagaggccagttcccaaaggtattgtttatgggaagcccacaaaccagggtgttacccaactgaaatttcagcgtagcaagaggtcagttgctgaggagcgagctggacggaagctgggtggacttagggtcctcaattcttactgggtgaatgaggactctacttataaatactttgaggtgattctggtggatgtggctcatgctgctattagaaatgatcccagaatcaattggctcgccaatccagtgcacaagcacagagagctgcgtgggctcacctctgctgggaaaagcaacaggggtttacgtggcaaaggacatctgtaccacaaagcacg

SEQ ID NO: 224073 - DNA, 556 bp, Glycine max
aacaataacaaaactcaaattatatagaaaaagatatgattaaagcgttcaaaactcgaatttcgaagtcaaaacaccaaatacctatgtcctcaaaatagtattccagaaaatgaagcaaaaataagatgataacagcagaaattagcggtaacggcggagagacagggtgttgtttctcttccaggttgccctgcgagatggacgtgctttgtggtacagatgtcctctgccacgtaaacccctgttgcttttcccagcagaggtgagcccacgcagctctctgtgcttgtgcactggattggcgagccaattgattctgggatcatttctaatagcagcatgagccacatccaccagaatcacctcaaagtatttataagtagagtcctcattcacccagtaagaattgaggaccctaagtccacccagcttccgtccagctcgctcctcagcaactgacctcttgctacgctgaaatttcagttgggtaacacccttgtttgtgggcttcccataacaatacctttgggactggctttttcggcacccctct

SEQ ID NO: 224074 - DNA, 561 bp, Glycine max
agaatgtgcagccagccaacgtggaaggaagccaagaaacctaaatcaattcaaaagcgttgaattttccatttttcccccataaaataacaaaaaacaccctcaattctctatttactcgctttgcttcaacgccaccaggcctccttcttttctcattaccctagtttttctccattttcttcacaattgaaccgtttctccccctcgactcgatcccatatgtgttgatagtgaaaggcatcgtcctcatcatcatctatcatggcatggtttagagctggagctagcatagcaaaacatgcaattaggagaactctttctaagggtggatccacacaccttgtgtcaagggcaagggtccttccatcgataccatcatcacatagcagaagcttccacagctcggttttcaaggagcaagctgcacctgttcctcgtgcggttcctctttcaaagctaacagatagtttcttagatggcacaagcagtgtgtatttggaggagcttcaagggcttgggaggctgatcccacagtgttgatgagtcatgggacaattt

SEQ ID NO: 224075 - DNA, 609 bp, Glycine max
  unsure (1)..(609): unsure at all n locations
ccaaacactcccattcccactgcactgcgagagcttctaaagcctctccctgcaggtgttgaaatcgatgaactccctaagcaaattgatgatacacagtacccaaaaacattcttctataaagaagaccttcatccaggcaaaacaatgaaagtacaattcaccaagcgtccctatgcacaaccttatggtgtatatacatggttaacggatattaaagacacctctaaagaaggatatagttttgaagagatatgcatcaagaaagaagcgtttgagggagaagagaagttttgtgcaaaatccttgggaacagtaattggttttgccatttcaaagctgggaaagaacattcaagtactttcaagttcctttgtcaataagcaagagcaatacactgtggaaggagtgcagaatcttggagacaaagcagtgatgtgtcatgggctaaatttcagaactgcagtattttactgccataaagtccgtgaaacaacagctntcatgggttcattggtggctggtgatggaaccaaaactcangcacttgcttgttgccactcagatacttcttggatgaatcatcacatgcttcatgaactcatggga

SEQ ID NO: 224076 - DNA, 458 bp, Glycine max
ggacttaaaaaagcacactggatattcatcaaagcatcatcaaagcacactggatcctaacagcacacgtacgtagaaaggggaagttccaggtcttgcccaacatacacaacacaccataatttattttatatacaatcttatggggcccaagatgcagatgcctggactaattaaacaacaccgttagtctgataggcagggtccataaataaattgggtacccataaaatggccttgcttccaaggaaatggcaaacagggttagttccaggatcaactcccatgagttcatgaagcatgtgatgattcattccagaagtatctgagtggcaaacagcaagtgcctgagttttggttccatcaccagccaccaatggaaccatgaaagctgttgtttcacggactttatggcagtaaaatactgcagttctgaaatttagcccatgacacatcac

SEQ ID NO: 224077 - DNA, 591 bp, Glycine max
  unsure (1)..(591): unsure at all n locations
agttgctccagtagccggcactaaacaacatggcggacaaggcagtcaccatccgaaccaggaagtttatgacaaacaggcttctctccagaaagcagttcgtcgttgatgtccttcatccagggagggctaatgtttccaaggctgaactgaaggagaagctgggaagaatgtatgacgtgaaagacaccaacactgtatttgtcttcaagttccgaactcattttggtggtggcaagtccactggggtttggtttgatctatgattcagtngaagaatgctaagaagtatgagccaaaatacaggcttatcaggaatggacttgataccaaagtagagaaatcaaggaagcaaatgaaggagagaaagaatagagctaagaagattcgtggagttaagaagaccaaggcatctgatgctgcaaaggcgggaaaaaagaaatgagttttcaaacatcctgtcctgattttaaggttcttttgctatcggtattttctaatagcttcctagaatgagatattttgctgaagtgttacgtgttaattgatgttcagttataactagagattgggtactgcatgatcaatttg

SEQ ID NO: 224078 - DNA, 521 bp, Glycine max
gtgacaataatctgctggttcatcccaaatcaagaaacaccagaattcattatcaaaatactaaactatttgaaaacaaagtgttcaactgaattgtcaaaattgatcatgccagtacccaatctctagttataactgaacatcaattaacacgtaacacttacagcaaaatatctcattctaggaagctattagaaaataccgatagcaaaagaaccttaaaatcaggacaggatgtttgaaaactcatttcttttttcccgcctttgcagcatcagatgccttggtcttcttaactccacgaatcttcttagctctattctttctctccttcatttgcttccttgatttctctactttgggatcaagtccattcctgataagcctgtatttaggctcatacttcttagcattcttaactgaatcatagatccaaccaaacccagtggacttgccatcaccaaaatgagttcggaactttgagacaaatacagtgttggtgtctttcacgggatacattc

SEQ ID NO: 224079 - DNA, 539 bp, Glycine max
gccaaagttcatattaagagagaaagagagagagagatagaagggaaaaaagcatcaaagatcatgaaacccaacttttcctttttatctaagcttttgatactgcaatatctatcagttttatgcatttctcaggaatttgatttcttctactttgttcagcagtggccaggagcatactgtgacacaaagcagagctgctgctatcctaagactgggaaacctgctgctgatttcagcattcatggactctggcctaacttcaaggatggctcatggccctcaaactgtgaccctgacagtgtctttgataaatctcagatctcagacctcattagcaacatggagaaggattggccatccctgagctgcccaagtagcaatggcatgaggttctggtcacacgaatgggaaaaacatggtacttgtgcagaatctgagcttgatcagcgtgagtactttgaaacaactctcaaactgaagcaaaaagttaacctccttcggatcctcaagaatgcagggattgagccagatgatga

SEQ ID NO: 224080 - DNA, 572 bp, Glycine max
gatattgaattcttaaacagaactcaaccgctaaattttgtattaagattaatacatgaatgacttaaaaaacttggggctgttccgtcctccaaatgcagtgggaggacattagaaggcctcgttgcgaacatttattactttgaagacaaatgcaatggggaaattacatgtcaattttaccgaactaaattttcttcttaaaatttggggaattgaatttgttcaccacatctgctccttggaagcacagggcactcaatgagatttgacccagaagtgtccacgcacatgtacacttggtaaagttgactattacgagctgaatctctattgcactctatccctggggtaaacccagtgcctttttttatagcttctgtaaccctttctagggtgtaaatttcatcatctggctcaatccctgcattcttgaggatccgaaggaggttaactttttgcttcagtttgagagttgtttcaaagtactcacgctgatcaagctcagattctgcacaagtaccatgtttttcccattcgtgtgaccagaaccttatgccattgcttcttgg

SEQ ID NO: 224081 - DNA, 525 bp, Glycine max
aagaccccttacagggagattttccagaagtgatagaggagtatttggaacatgggtgtatgaaatgtattgcctttaatcgtcgtggtacacttcttgctgctgggtgcaacaacggaagttgcgttatctgggattttgaaacccggggcattgctaaagagctacgagataatgaatgttcatctccaataaccagtgtctgttggtcaaagtgtggtcatcgaattcttgtatctgctgctgacaagtcattgttgctgtgggatgttatgagtggtaagaggataacaagaatagttttacaacaaacccctctacaagctcgtcttcatccgggttcctctaaaccatctctttgcttggcatgccctctctcatgtcctccaatgattgttgacttgaacacaggaaacacaacttcgcttaaagtttctatcttggagatatccaataatggaccaacccctacctcacgtaacaagtgtgccgatggaattacctccttctcaccaactgctgcat

SEQ ID NO: 224082 - DNA, 559 bp, Glycine max
ttcaaaaaccttccctttccactcttccgccgcgattcgatctccgggctgccttcctttccgcgatttcgatctgaaactcgaggttgcggaattcggaaattgacattgaagtgttcaattggcactgtcaatgccattggtgtggtttgtgaagaatttttctgtggttttttgataccggaaaaacacaatgtcttgggcaggccctgaggatatttacctttctacttcacttgccagctattcttgacaagaaacttcttgtattgctgagagatggtagaaagctcatgggaacacttcgctctttagatcaatttgctaatgcagttcttgagggtgcttgtgagagggttattgttggtgatctatactgtgacatccctttaggtctttatgtgatccggggggaaaatgttgttctaattggtgagctggacttggagagggaggaacttcccgaacatatgacacgtgtttctactgcagaaatcaagagggcacagaaagcagaaagggaagcttcagatctgaaagggactatgaggaaaagaat

SEQ ID NO: 224083 - DNA, 534 bp, Glycine max
  unsure (1)..(534): unsure at all n locations
caaaaaagtaacaaaaagtgagcatgggaaattccttggtcttcttattgttcctcatcacattgttgtttgtgggcaatgttcaatgcaacccaaactacagagaagcattggctaaatccttattgtttttccaagggcagaggtcaggaaggcttccttctgaccaacaaatcaaatggagatccaattctggtctctttgatggtcgccttgccaatgtggatttaagtggagggtactatgatgcaggagacaatgtgaaattcaactttccaatggcctacaccaccagcatgctgtcatgggccacaattgaatatgggaagagaatgggaccccaaataaaagaggcaagagctgcaattcgttgggccacagactacctcctaaagtgtgccacatccacacctggtaggctctatgttggtgttggagacccaaatgtggaccacanatgctgggagaggccagaggacatggacactgtcagaactgtctattgngtctctcccataaccctggctctgatgt

SEQ ID NO: 224084 - DNA, 562 bp, Glycine max
agcgtaaagcacagtaaatatattggatactaattacaataagttacatttttgagtgaaagggctagaattataaatgatgcaccactaacttagttgggtgcagataaaatgacatctagacttaaccttgtaatttaggtgaatgaaacattagcggataccggcaaagtatgccaaaggtccaacaaaagcagcattgatgtaagttgcaggctcagaatgactgtaatcactgcggtcatctggaaatccgtcattttggtttggacctccgactatggctccaaccaatatgttaggattaggattcatcgaatggaaaaatgggttgaaacctccatcacaccctatgctttgtggatgagctgctattgaaggcaaggaagatcctctgtggtgaattctcttgggaaagtatggaccatagcctaccatgtaagacattcttattgggtttgcacctaatatgtagtcaacctgtctttagcaatgctccttaaggtgtttgagtgacaagacattgcgcagtaaattgtgcttttagcttgacatatatttg

SEQ ID NO: 224085 - DNA, 596 bp, Glycine max
cccaaaccctcttcactttcattcactccgttgccatctcaaacccgaatccaaatccaaatccaacacgatgtcgtatcgaccttccgccaacgccaggaccgaggttcggcggaaccgctacaaggtcgccgtggacgccgatgaaggtcgccggcgccgagaggataccatggtggagatccgaaagaaccgtagggaagagagtttgctgaagaagagacgcgagggtctccaatcccagcagattccttcgtcacttcactctactgtaattgagaagaagttggaacaccttccagccatggttactggtgttttcaccgatgacaataacatgcagtttgaggccacaactcagtttcggaagttgctttcgattgaacgtagcccacctatcgaggaggttattcaagctggtgtagttccacgctttgttgagttcttgatgagggaagattttccacagctgcagtttgaggcagcttgggctttgacaaatatagcttctggaacttctgaaaacaccaaggtggtaattgatcatggtgctgtcccaaattttgtaaagcttcttgttcacccaatgatgatgt

SEQ ID NO: 224086 - DNA, 595 bp, Glycine max
gggatctgagactgagacaacaactaagggttattaagagagagaaagagatacatagttagagagagagcagagacaccgttcggtgctccgctgaatacggttgtggcccctgcgctccgctgcaattttacactcaaaaggacctcatgtctaacatagaggagaacaaagatctgggacagatggacgtggatgcatctgatgagtcagctaacatgccatcaccccaaaagcaggaggagtctgtaaagagaaagtatggaggaatgctgcccaaaaagccaccactcatatctaaggaccatgaacgtgcttacttcgattctgcggattgggcacttggaaagcaaggcggagagaagcctaagggaccacttgaggctcttcggcctaaattacagccaacgcagcagcaaacacgttaccggaaatctccttatgctccttcaggagaagaagggggaagtgttccagctgaggatgcaccttccaaccagtaagcagcaatcagtcttttgatgatgtgctgactattgttctaatacctgagtgagtaggtatcacttctttgttttcaacaataaggaagctt

SEQ ID NO: 224087 - DNA, 439 bp, Glycine max
aacacaaaaatcataatcccaagtaaatgtctattgcgtaggtgcagatcaaatcatttgtcttgggctaatatgaatacatgacaagcttcctttattgttggaaacaaataagtgattcctactgactcaggtattagaacaatagtcagcacatcatcaaaagactgattgctgcttactggttggaaggcgcatactcagctggaacactttccccttcttttactgaaggagcatagggagatttccggtaacgtgtttgctgctgcgctgtctgttatttaggccgaagagccttaagtgggcccttatgcttctctccagcttgctttacaagggcccaatccgtagaatcgaaggaagcacgttcatgggccttagatatgagcggtggctttttgggcagcattcccccatactttctctttacagactc

SEQ ID NO: 224088 - DNA, 576 bp, Glycine max
gggaggctagaaagaaagaaaaaaagaaagagctagagagagagggtaccctcttcttaatttgcactgtttttgtgtctgttacagcacttttaggagttcttctattctagtaacctctgccaaccaacaaaacaaggaagaaacagtaatgctactgacatgggaaagaaggggagttggttttctgcaatcaaaagagttttcacacaccactccaaagggaagcaggattcagataataacaaaggcacaaaagagaagaagaaaagtctaggaaaactaaagcatggagaggccaattcattcatccccctcttcagagagccaagtagcattgagaaaatctttggggactttgaaagggagcaacaactactggggttaaggcctgccactcctccggagaggcctaaaacgccaccttatgcccctccaagagctccttctcctaggcctccctctccaagggttccttctccaaggcctccatccgcaagggctgcttctccaagggcggcttctccgcgagttacctctcccaaagccacgtcttcccggattgctcatcaccac

SEQ ID NO: 224089 - DNA, 552 bp, Glycine max
gctccagagacgttcgatctctttgatgatatcatcttaatatcggagggtcagatggtttatcagggcccacgtgaccacatcgttgagttctttgaatcttgtggctttagatgtcctgaaagaaagggaaccgctgattttttacaggaggttactttaaggaaagatcaagaacattattgggcaaatagaagcttaccataccggtatattacagtgagcgagtttgcaaatagattcaagcaatttcatgttggaatgcagcttgagaatgagctttctgtgccatatgataaatcaaggggacatagagcagctcttgttttcaagaaatatacagtgcccacaatgggacttcttaaagcatgctgggacaaggaatggctactaataaagaggaatgcttttgtctatgtatttaagacaggtcagatagtcattattggtatcaaagctgcaactgtgttctttatgaccaatatgcatcaaaggaacgaggcttgtgcaacagtttacataagttcaaatttgttaccatgatctgaacat

SEQ ID NO: 224090 - DNA, 511 bp, Glycine max
gagaaaagattattttaatactacactgattagttacattgggaggatcatttaaaatagctataaaaaaaagtatcattaagaatagctgtaaaaatgcacaatgtacattcactagtaaaacttgcaaaaacctaacttcctttttccactaatttattatttttttatctggcttggaagtttactgttctgatggcgaaggcaattaccaaggcaaagaagacaggacaagcgaccaatacagcagccactggccccatgaagtctggtttaaacccataatggtcttgaatataatgcttgatagttttggtactggcaccaagcgcactaatgtctttctctacatctccatattgcgagacaattaacccatatacagggcatgctactggtcaaatcctatagtaccaaacccaccatttatgaatttttggtcctgggataaaaaaaccatagaagagattggagatcccatacaatgccgcttcaaggaatgatgcaattt

SEQ ID NO: 224091 - DNA, 433 bp, Glycine max
aattgccctgaggaagagatggagaggcgacttcttagtaggaaccagggtagagaagatgacaatattgaaacaataaggaagcggtttaaggttttcttggagtctagtcttccggtgattaattattatgatgcaaagggaaaagttcgcaagattgatgctgcaagacctatcgaagaggtatttgagacagtcaaagcaatttttggtccaaagaatgacaaggctgattgagcatgttcatcttgactccatggtggaaatttagaggtcatatcagtattggtggcttgttctattgtgtcacattttgttattatagtatagaaaatcgtagtttatacctgagggttttacctctgtattctaatgttatatcttgttgactcattcattgatattgcaataaagattttcgtgtgggattctt

SEQ ID NO: 224092 - DNA, 433 bp, Glycine max
aagaatcccacacgaaaatctttattgcaatatcaatgaatgagtcaacaagatataacattagaatacagaggtaaaaccctcaggtataaactacgattttctatactataataacaaaatgtgacacaatagaacaagccaccaatactgatatgacctctaaatttccaccatggagtcaagatgaacatgctcaatcagccttgtcattctttggaccaaaaattgctttgactgtctcaaatacctcttcgataggtcttgcagcatcaatcttgcgaacttttccctttgcatcataataattaatcaccggaagactagactccaagaaaaccttaaaccgcttccttattgtttcaatattgtcatcttctctaccctggttcctactaagaagtcgcctctccatctcttcctcagggcaatt

SEQ ID NO: 224093 - DNA, 580 bp, Glycine max
  unsure (1)..(580): unsure at all n locations
ctctgcagtaatagaaaaaaaagaaagaaagaagaagaagaagaagaagaagaagaagatgttgagggttgcagctagaaggctctcttctctctcctcctcctctccgtggcggcccaaccacgccgcttccgcttatgtctctcgaaacgcagtcgttgatgaccgcagatccgatccttcctcccatcccctttttcccttcagaggttttgctactgaatccctgatccacccaatagaaaacagcattattcctgagattcctgcaactgttactgctgttaagaaccctacttctaagattgtctatgatgagcacaaccatgaaagatttcccccaggtgacccaagcaagagggcatttgcctacttcgtccttacaggtggtaggtttgcttatgcctctttggtccgtctccttgtcctcaagtttgtgcttagcatgtctgccagtaaggatgttcttgctctggcttcactagaggttgatctctccagcattgagcctggcactacagtgaccgttaagtggcgtggaaagcccagtgtcatcangcgccgaaccgaggatgatatc

SEQ ID NO: 224094 - DNA, 568 bp, Glycine max
ccaagatacgaactttataagcaaaattttaaaatgtttatacatggggcaaacttcaatattcttgaactcgtcgacaatatgctaactaaaagtcaggcgattattgatataagtctcgccaaagggtaacagttacaatttccaagttacataaaccacttgctaaacatacccaacaagaacttgaaggtaaaagacgtccgaaaggcgcattgtaatccaaataaattttaaaaaaagaaattgtaaactcattccgcttgtatgcagaaccatatttattttcaaccaatcatcaacttgttttcttccaagaaggtgtaagtaggaacctccagattgtatggtgctggccccttcctaattctgcctgaaatatcataatgtgatccatggcaagggcaaaaccatcccccaaagtcaccagcatttggcaatggaatgcaacccaaatgggtgcaaaccccaatcacaatgagccattctgggtccttgactttatcagcatccagctggggatcgcgaagagatccaacatcaacactgtttgccagcttgatatcat

SEQ ID NO: 224095 - DNA, 565 bp, Glycine max
  unsure (1)..(565): unsure at all n locations
aagaccccttacagggagattttccagaagtgatagaggagtatttggaacatgggtgtatgaaatgtattgcctttaatcgtcgtggtacacttcttgctgctgggtgcaacaacggaagttgcgttatctgggattttgaaacccggggcattgctaaagagctacgagataatgaatgttcatctccaataaccagtgtctgttggtcaaagtgtggtcatcgaattcttgtatctgctgctgacaagtcattgttgctgtgggatgttatgagtggtaagaggataacaagaatagttttacaacaaacccctctacaagctcgtcttcatccgggttcctctaaaccatctctttgcttggcatgccctctctcatgtcctccaatgattgttgacttgaacacaggaaacacaacttcgcttaaagtttctatcttggagatatccaataatggaccaacccctacctcacgtaacaagtgtgccgatggaattacctccttctcaccaactgctgcatgttntagtaagtacggaaaccttgtttatgtgggaaactc

SEQ ID NO: 224096 - DNA, 535 bp, Glycine max
  unsure (1)..(535): unsure at all n locations
aagacacagccattgtttgtttactttccattgattgagcgaaagctttgttttttctgcgatcattttccattgggtggaagaaagtctcaacctttagtcgaaagagcaaggatctgagtgagtgagcgatcatgtgtggtggtgcgattatctccgacttcattccagcgggtcccgccggcggggcgcagcgcgtgaccgccgacatcctgtggccgaatttgaggaagcggttctcgaagtcgctgctggacgatgatttcgaggcagggttcagagaattcgaggatgactcggaaatcgaggatgtcgatgatgaggacgatgaagaggaggaggagttgaagaagaagaagccctttgggttctctcgctccaacaacaaggctgcttctaagcctctctctcgtggagcaacaactgtgaaatctgtggaatcaaaggggcaagctgagaagtgtgccaagagaaagaggaagaaccagtatcgcggaatccgccagcgtccatggngaaagtgggctgctgagat

SEQ ID NO: 224097 - DNA, 530 bp, Glycine max
ggtctcaaatcataatcaaattgccataacaatgaaaacaaccaagttaaaaactgtaagtcaagactgtatcccagaccatatataacataattgataatccttatggacatcaaacagaaaatcccctgaaaacgaggtctcttgagtttcacacaaaggataccctataaaaacctatatatagtcctatactgcattagctacaagataaataaactccacatatgctttaagcaggttggttttcttgctgtggattccatcaccaacatcacgatcacaattcttgtagctttatttacataaaaagggatatgaaggtgttcagaagactcctgccatggaaggcaggtcgtcgaagctccaaaggttcatagggtttccagcagcatcctgagatgcatcttcactgagcaaagacgccaatgcagcatcagcccaggcttcatcaagaaaagaaggggtctcaaagaacttcagctgggattcaatgtctgcaagctcctcagaaagagtttttgcagaat

SEQ ID NO: 224098 - DNA, 550 bp, Glycine max
ttttttttttttttttttttttttttttttttttttttttttttttttttttttgtttggttttttttttttttttttttttttttttttttttatttttttttttatttttattttttttcttggtattagaatttgttataattttttaagaatgttaacttattttttttaaaaccccaaaaaatgaaaaataaaataaaagcaatactataaaagagagaggggggaagaaaccatagcaaaaagtggttgagggaacctctctattaatttgtctatgaaagagggggggggataaaaaaaaataaaaaataatcacccctctgaccaaagttttgataggccaaaaaaagaaaacaagcaccatacttctcaaattttttggtgaaaaaagacaaaacgtgctactgccaaaaaaaatgtgtttataaaaaacagtattctggcgcggcccgcaaaaaaaaaaaagaaatttattttgaaacccccaccatcttttttagtttaaaggagggggggggatatattatggaaagagaacttttat

SEQ ID NO: 224099 - DNA, 601 bp, Glycine max
  unsure (1)..(601): unsure at all n locations
cggctcgagttccctcgtatacttcccctcctcaactttgttttgtttttcatgtacgctttttgaatcatcttacgtgctcctaatcatgattccaacacttgtttgtattggcacaacaatattccaaagcaccctctcttcttactcattgtctttcatctctctttttctctccacgtcactcgcccttcttgctatttccctcaactattggcttgtccccggaggttttgcatggaggaaatatcacagtcgttacaaaggccatgcaaaactctctggcccaatgggctggcccatattgggaactttacctgcgatgggccctctagcccacaggaaacttgctgccatggccacttcaccaaaagcaaaaaagctcatgacattgagtctaggaacaaatccagttgttatcagcagtcacccagaaaccgcaagagaaattctttgtgggtcgaacttcgctgaccgacccgttaaagaatcggcccgaatgctcatgtntgagcgtgccattggatttgctccatatgggacttattggcgccacctacgtaaagtggcaatcacccacatgttctcttcgaggaggatt

SEQ ID NO: 224100 - DNA, 456 bp, Glycine max
atcacaacagttacatcgataatgatatcctttattgtgcattaatttatcttgttgagttcaagagcttatggtgttgaacctgcgaatcacttggcatcgtaaaggctttttcatttcgagcgagagctttaggcattctgaaagatccacgggttgcactggaatccatatgaaatggtgaagaagttgtgcaagccatagatgaactgtggctaagcctaatgtttttcctgggcacaccctacgtcctgcaccaaatggtgcaagtcttatgtccgaccccatgatcgacacatcttctttcatgaatctttcgggcttaaaggcccacgggtcctcccaaatggatgagtcatgtgatatagcccacatgttaaccattgcagttgtgccagctggcacgatgaccttgtccacgtggacatcatggattgcgaggcgagcccaggaaag

SEQ ID NO: 224101 - DNA, 583 bp, Glycine max
  unsure (1)..(583): unsure at all n locations
cggctcgagctaattttatctgaaatatctctttcatagaacggagaaagacacgatgcaggaagcgacgaaggtgataataatcggtgccggaacttctggtatcgccaccgccggttgcttaacgaagcaatcaataccttacataatgctcgagagagaagactgtttcgcttcgctgtggcagaaatacacctacgatcgtctccaccttcatttgaggaagcaagtttgcgagttaccgcacttaccgtttcccaagtcttaccctcactacgtgcctcggaagcagttcatagactacttgggaaactacgttaaccactttgagatcaagcctctgtaccagcgtgcagtggagttggtggagtatgatggatggaaagggatttggagagtgaaggctcagaatagaagatctggtgagcttgaggaatacgctggaaagtacctggtcgtggccagtggcgaaaccgccgagcctcgtctgcctcagattcaaggcttggagagtttcaatgganaagtgattcactcaactgcctacanaaacgggaacgagtttaagaaataaacatgtctg

SEQ ID NO: 224102 - DNA, 501 bp, Glycine max
gttggattcatttcttgcaagtgttgatgattctaagaattggcggaagatctatgatgagtacaatgatgaggtagttgagttgacaaaagatgaaatcaaacttgtccgtagactgctaaagaatcgggcaccccattctgactttgatccatatccagatggtgttgactggtttaaatgggaagacgccaaacatccattgtctaatgcacctgaaccaaaaagaaggtttattccatcaaagtgggaagctaaaaaggttgtacagtatgttagagcaatccgccagggattaatcacttttgacaagccaaaagaggaagatggtccatatctcttgtggggagatgattctggttcaacagaaagagcaaatcatttggcttacattcctgccccaaagcagaagttacctggccatgatgagtcatataatcctcctctagagtacattccaacccaagaagaggtcaattcttatcaattgatgtttgagga

SEQ ID NO: 224103 - DNA, 580 bp, Glycine max
aattagttcattctctttgcgcagttccctacctctcctttcaagatgcagatcttcgtcaagaccctcaccggaaagaccatcacccttgaggtggaaagctctgacaccatcgacaacgtcaaggccaagatccaggacaaggaaggaattcccccggatcagcaacgtctcatcttcgccggaaagcagctcgaggacggccgtaccctcgccgactacaacatccagaaggagtcaacccttcaccttgtccttcgtctccgtggtggcatgcagatcttcgtcaagactctcactggcaaaaccataaccctagaggtcgaaagctctgacaccattgacaacgtcaaggccaagatccaggacaaggagggaatccccccagaccagcaacgtctcatcttcgccggaaagcaacttgaggacgggcgcaccctcgccgattacaacatccagaaggaatcaacccttcacctcgtcctccgtctccgtggtggcatgcagatcttcgttaagaccctcaccggcaagactataaccctagaagtcgagagctccgacaccatcgacaacgtca

SEQ ID NO: 224104 - DNA, 540 bp, Glycine max
gataattatatatcagctccacaaattgataacaaacagtagtgacattaatgggacaatagagttcaacacaaaccaaacttattttcaaaggtcattacagacccattacacatcacatttcttcttaaaatgtttgggaaaatccaacatcgaacatcacacagaaatcagctccagcttaaaaccccccacgaagacgcaacaccaagtgcagagttgactccttctggatgttgtagtcagcgagggtccttccatcctctagctgtttgccagcaaaaataagcctctgctggtccggtgggattccttccttgtcctggatcttcgccttcacattgtcaatggtgtcggagctctccacctcgagggtaatagtcttacccgtaagggtcttgacgaagatctgcataccaccacgaagacgcaacaccaagtggagagttgactccttctggatgttgaagtcagcaagggtacgtccgtcctcaagctgtttgccggcgaagatcagcctctgctggtctggggggatac

SEQ ID NO: 224105 - DNA, 481 bp, Glycine max
ctcgagccgaatcggctcgaggctgcaacaaccaactctctctctctctctgtttctgtttctgcaatggcgaagaagaaggagaagaaggtgaacgtctccggaaaacctaagcactctctcgacgtaaaccgcagcaatgacgcgaagaaggagtcgcgctccgccgccaccgtgcgccgcctcaagatgtacaacaccaggcccgtgcgcgaccggaagggaaaagtcgtatcccacgagcttcagtccaaggagcttcccagcacaagaatccaacccgatcgtcgatggttcgggaacacgcgtgttgtgaatcagaaagagcttgagtttttccgagaagagctacagagccgcatgtctagtaattacaatgtaattctgaaggagaagaaacttccgctttcgctactcaacgatcaccagaagcaagctagagttcacctgcttgatagagagccccttccagatgcgtttg

SEQ ID NO: 224106 - DNA, 571 bp, Glycine max
ccatcttgcaggtgtgtctttcattgtatgttctactgctgggtaattggaaggctaaccaggagctgcttcattcctcaattattcttcaaactttctaagaagttcatattcttcagtgttctctagtgtcatcaccaaaatcagggaatgctgaaagatgtgcttgatagttaagaattccttcactgaggctaatgagtccgtgcctccatctgagctagccttgttcaaccttgatgacattggatgtttagtccactgcccatatctattttgtgctcgagcgactgaggtgcccagaaatctcagccattgtacaatttccaaacatgatgtttgtgaagacggttgagctttgaatttcttgagtggcagtttcctgcttctggtcgcgtgattgcctgtactgcattggttttcacaaaaacgtgtttctagaaatggagcaaaaaagaggtgtgcttatgcaacgatatgaactggggagattattaggccaaggaacctttgcgaaggttaccatgctagaaacatcataactggcatgagtgtggccattaagattatt

SEQ ID NO: 224107 - DNA, 305 bp, Glycine max
cagcctaagactcctgcaaatttcttccaacttggagaggaggattgaggctggcttgtcagatgtaaaccgttcatttctcttccaaaaggtctcctcgttcaaaccagacaagtcaatacccccggaataggagatgacgtcaaaagcatttaatttattactcggattggagtattttgccgcgtcaataggatctacatgctcacaagctccaaatactccatcagcaactagaggagccaggctttcatttttattttgagtaatgggcggttgctctaacccctttctgaaccaagaac

SEQ ID NO: 224108 - DNA, 510 bp, Glycine max
atcacacccaacaaaaaaccacagatgtgctctgttgctaagatcttaactgtgaatggtccaatagtattatcaatgttgagagtgaagggagggagcaagccgccgtgggttgggctcggcgccgtcgtgtgggtccagatcgcgtacaagaacaccttaaccttccccctgtactctcactccttgaagtcagttctcggctctaaccagggccatgtgacgctcctcggcgtcgacatcgacatcggagaaaacctcggtctactccctggtgtttcctgcaacaagtagcccccttggcttctgctagtggtaggctccatcgtcgactttctcggctacggcctcctcttcctcgacatctccgaaactcttcactcactgccttacgtactgatatggtttgctgttgatgttgccgctgacagtagtgcgtgggtaaccactgctgttatcgtgaccaacatgagaaactctcctgatagcagaggctctgttgcggagatt

SEQ ID NO: 224109 - DNA, 589 bp, Glycine max
gaaaaagaagaagcaaaagcaaccgaaacacacacagagagagaacaaaacgaagaagaagaagaacacagagagagagagagtgtgtgaaggtgatgacgatggacagagagaaggagagagagatagagctggagagtgcaatgtacacgaattgcttgttgttgggtctggatccggcgattatcggagtcggagcctccaacgcgactcctcgggtcgggcatttccgtcactcgaaccctaaattgggggaacagcttctctacttcatcctttcctctctcagaggtccaattcaatccgcgaaagatttcgataaggtctggccgattttcgattccgcgcagtcgcgtgattttcgtaaggttgtgcaagggattattagcgagcttgagtcgcagggcgcgcttccgaggagcaattcgagggtttcttcacttgctacatgctgtggacctaggtttgttgagcttctatggcaactttctttgcatgctttacgagaggttcatcgacggacatttactgctgacatatcttctaacccattgcctgcgccattgactgatgtagccttttcacatgc

SEQ ID NO: 224110 - DNA, 425 bp, Glycine max
tggtgatgggcagatcaactacgaggagtttgtcaaagtcatgatggccaagtgaggaccaatcaaccataacaaaaacatttgaaagcacatgaacagaaaagggacagggcagataagttttgatgaaaattctattttcattaggacaatcttcatttggggtcattagtttttgttggtcggatttgtgtttgcttttatttattggtattgctcattagtattttctacttgtttgctctgtcccttgttttagtagcttggattagctgtgtctcaccatgcatttgtacttcacttttcatgttttttgggttactactatgaaactggaacaattggttgcaattagtgcttttacatatgggtgacttatactgttaaaaccgtctttatgctattatatgattgtttctgtgatc

SEQ ID NO: 224111 - DNA, 425 bp, Glycine max
gatcacagaaacaatcatataatagcataaagacggttttaacagtataagtcacccatatgtaaaagcactaattgcaaccaattgttccagtttcatagtagtaacccaaaaaacatgaaaagtgaagtacaaatgcatggtgagacacagttaatccaagctactaaaacagggaacagaccaaccaattgaaaattcctatgggccattaccaataaataaaagcaaacacaattccgaccaacaaaaactaatgaccccaaatgaagatggtcctaatgaaaatagaattttcatcaaaacttatctgccctgtcccttttctgttcatgtgctttcaaatgtttttgttatggttgattggtcctcacttggccatcatgactttgacaaactcctcgtagttgatctgcccatcacca

SEQ ID NO: 224112 - DNA, 331 bp, Glycine max
ttatcactatggtttcgccaatctcatgctccgcagatatgtggaagcaattcgtgaatttaacaaaattctcttgtacatctttaagacaaagcagtatcatcagaaatcaccccaatatgagcagatactgaagaaaaatgaacaaatgtatgccttactggcaattagcctttcactctgcccccaaagcaggcttgttgatgaaactgtgaactctcagttacgtgagaagtatggtgaaaagatggttagaatgcagaggtatgatgatgaggcatttgctatctatgatgagctcttctcatatgcatgccccaagttcattacc

SEQ ID NO: 224113 - DNA, 585 bp, Glycine max
ggctgagatggcagcggcaccagcagctaccttcactattggaaccaccggttccctaggccaaagaggaaactcgcttcctcaattaaagtcttctgggttgaaattcaactcccagaatcatttgaagagcttctgcggcctcaaggccatgtcatccgtgagatgtgagtcagaatcgtctttcttggttaacaaaactggtgctgctctgcgggcgtcttttgcatccaaggctcaaaaggaaaacgaccaaaacttcaactacaactcgcagcctcaggcttcgtacaaagttgcagttcttggtgctgctggagggataggtcagccactcgcgcttctcatcaagatgtcgcctctagtttccgacctgcatctctatgatattgcgaatgtcaagggagttgctgctgatatcagtcactgcaacaccccctcacaagtcagggatttcactggagcttctgagttggcgaattgtttgaaggatgtgaatgttgttgtcatacccgccggtgttccaaggaagcctggcatgactcgtgatgaccttttcaacatcaaatgccgcatagtcaggga

SEQ ID NO: 224114 - DNA, 499 bp, Glycine max
  unsure (1)..(499): unsure at all n locations
cagcaaaaaaccaaaaactggtctagttgccatattattcaaaaacaacttttacgttttccaattctacattataatggtgacatctttgaagattttggaccaaaacctaagctctgtatagagaacagaaatggaagctccgtcccgttctactaacaaaactggaagtagaattgttagttgatactatagaaagcttgaatcctaagttctggaagcagtaaagatgctccaacaaatccgcaacctaagttctataacgtagtatttgtgctaaaaataaatccataacccaggagaccacccgttgaaaaaaaattaagcagcatcttcttgcttctgagcaaaagcaagccccttctctatgctggccatgagttctggcttaagagattccaaagccttctgctcatagtcagtcaacccttggaggtcagatggaattaatgcctcaactgctctcctaccaagcttcacccttgaagcanagaatgga

SEQ ID NO: 224115 - DNA, 543 bp, Glycine max
ctctcactccgttagaagcaccaaattctgatggcaccaaaggcagagaagaagccagcggagaagaagcccgcagaggagaagaagtccacggtgggagacaaggctccggcggagaagaagccaaaggccggaaagaagcttccgaaggagggaggcgccggcggcgaagggaagaagaagaagagaaacaagaagagcgtggagacatacaagatctacatcttcaaggttctgaagcaggttcaccctgacattggtatctcaagcaaggccatgggaatcatgaacagcttcatcaacgacatcttcgagaagcttgcccaggaatcttctagacttgcccgctacaacaagaagcccaccatcacttcaagggaaattcagaccgcggtcaggcttgtgctgcccggtgaattggccaagcacgccgtttcggagggtaccaaggccgtcaccaagttcactagctcttgaacaaaatatctttgcctggctcttggttttctttatgtgtttctgttagatctagcgacctatgct

SEQ ID NO: 224116 - DNA, 559 bp, Glycine max
  unsure (1)..(559): unsure at all n locations
ccctctctctcttccttttcttgaaacttccctctttccttaaaggattccctcctaatttggtgggattatcccaagtttcagctgctaccactcatcagcattgccatttcctgtttcactcaccacatggaaaagcttattcgcatgttccctttgcttcttcttcttcttctgttccccacttttgccttcgctggccatgactatggccaagctctgagcaagagccttctcttctttgaagcccagagatctggctaccttccccacaaccagagagtcacatggagagcacattctggtttgcaagatggcaaagcaagcggggtggatctagttggagggtactatgatgcaggggacaatgtgaagttcgggttacccatggcgtttaccgttacgatgatgtcgtggagcatcattgaatacggcaaacaaatggctgctagtggtgaacttggtcacgccatggaagccgttaagtggngtacggactacttcatcaaagctcaccctcaaccaatgttctctacgagaggtgggagacggaacactg

SEQ ID NO: 224117 - DNA, 604 bp, Glycine max
ctcgagccgaatcggctcgagcactccttcctcttcacacattttcttagctctctccaacaatccctctcgttcacactttcagattgtgtgaagatgggggctggtggccgaactgctgttcctcctgccaacaggaagtcagaggctgaccctttgaagcgggtaccatttgaaaaacctcagtttagtctcagccagattaagaaggccattccacctcactgtttccagcgctctgttctccgctcattctcctatgttgtttatgacctcaccatagccttctgcctctattatgttgccacccattacttccacctccttcccggtcctctctctttcgtggcatggccaatctattgggctgtccagggttgcatccttactggtgtttgggtcattgcccatgagtgtggtcaccatgcattcagtgactaccagctgcttgatgatattgttggccttatcctccactccgctctcctagtcccgtacttttcatggaaatacagccatcgccgtcaccactccaacacaggttctcttgagcgagatgaagtatttgtgccaaagcagaagtccagtatcatgtggtactcta

SEQ ID NO: 224118 - DNA, 526 bp, Glycine max
aacagaatatgataacaacttggattcaagaactggaacaagaataagcatccccacaatcttgagaaacttagtcgacatgcactgattgcaaaacatggtgcaataatcaaactgttcagagatgctatatcttattctgcaaacaaaaacgctatgctactttctagatactactaccaacatcagggttcaacaaaattattcccaataagcaagcatgatactaaacagtcacaaaggaaagttcaaaccatcccacctgacggacaagaagcccccggctacattaatcatcacaacttattgttgtaccaaaatacacctttgctctgagtactttgatctggctccacataaatacactctcttgcctctctccacattgccttgacaaatggagtcccatcaaaccgataatactctcccaagatgggctttattgcctttgtcgcctccattgcatgataatgtggcattgtggagaacaagtgatgagctacatgagtgtctgtaatattatgga

SEQ ID NO: 224119 - DNA, 605 bp, Glycine max
ctcgaatacttgtggcaagtccctagtcatcgtaatgcttggagacagattgctaaggaggaggaaaagggtgtctatctgaatttcttaaactttttgattaatgatagtatttatcttcttgatgaaagtctgaacaaaattcttgagctaaaagaattggaggctgagatgtcaaatacagttgagtgggagagacgaccagttcaagagaggcaggagaggacccggttattccattctcaagaaaatattattcggatagatatgaagttggcaaatgaagatgtcagcatgcttgcatttacttcagagcagattactgctccattcctacttcctgagatggttgaaagagtggctagcatgctcaattactttctgctgcaattggtgggtcctcaaagaaaatcgcttagtctgaaggatcctgagaagtatgaatttcgtccaaagcatttgctaaaacagattgtgcacatatatgttcatctagccaggggtgacacgaattccatcttcccagctgccatctcaaaggatggtcgatcatacaatgatcagttgtttagtgctggggctgatgttcttcacagaattggcga

SEQ ID NO: 224120 - DNA, 538 bp, Glycine max
agtattcaatggttgacttctttacattaactgttccaaatatgtttacagccttaaaattctaatgatagcttcaattttttccaaaaatgattgaataagattaagttaaggttcaacatctaactttatgcgcatggcccgaatccatatttcattctacaacttaggaaactcaagatattttcctaatcaatcaacattgtttccccatttgtagtctgaattgtggccttggtgctctgtaggcttaagtgtttcttcatttcctgagacctgacaaactcctcaattcttgcttttagctcatcgtcgggaatcaacatatccgcggtaagatgagaacggttgaatggatcagtactatcactaagaagatgcctctgaatgacaggacgatcaaccgtgatccttgaagaaggcaagataactggatccttcatcaatgtgtattgaattggatcaaggaattcatctggtatctcccctagagtggcttcagtatccatggcctctgaagcagcaactttagcctttg

SEQ ID NO: 224121 - DNA, 603 bp, Glycine max
  unsure (1)..(603): unsure at all n locations
ctctgtgtttgcggctgaggattccgaacgagcgaccttcttcgtttctcgcaaagtttaagtcctcatgggtaaggaaaagactcacatcaacattgtcgtcattggacatgtcgactctgggaagtcaactaccactggtcatttgatctacaagcttggaggtattgacaagcgtgtgattgagaggttcgagaaggaggctgctgagatgaacaagaggtcattcaagtatgcctgggtgcttgacaagctcaaggctgagcgcgaaagaggaattaccattgatattgctttgtggaagtttgaaaccaccaagtactactgcacagtcatcgatgcccccggacatcgtgactttatcaagaacatgattactggtacctcccaggctgattgtgctgtccttatcattgactccaccactggtggttttgaagctggtatttctaaggatggacagactcgtgagcatgctcttcttgctttcacccttggtgtgaagcagatgatctgctgctgtaacaagatggatgccactaccccgaagtactctaaggctaggtatgatgaactngtgaaggaagtctcttcctacttgaa

SEQ ID NO: 224122 - DNA, 456 bp, Glycine max
ataaaacttcgttataaattaaatgcaacttaaaacatccctcagcagcaaaggaaatggactaaaaccctatagctgcttgtgaaattcgaaatatctcagactcttcttaccatcaaaacaaaaaacagttctcatcaaaaacaaacagcaatgaaaattgaccaccgccgatcaagaacctagttttgaaagttacggctacatgaaatcggcagaaacttaaaaatataacttaaacaaaacacctaagactctgcaaggataaaactactataaaggagtaaccacgatgatgatcacatgtgctagcaaaattgcccaaatgcaatcacttcttcttggcagcggccttggggaccttggctccggtggggtcttttttttcaacacttttgaagacttcgacagccaccagtttgaggcatgtccctcacagcaaaacgaccaggggga

SEQ ID NO: 224123 - DNA, 529 bp, Glycine max
ctcgagccgaatcggctcgagcacaaacacacgtgtcgagtgaattcaaatcaatttaggcagaaaatgaggtgttttggtttcatagtgataggtctagtggctgtgcttggagggttacccttctcctcaaatgcaaaattagaaccctgtttttacaagaagacttgtccccaggtgcattttattgtatttaaagtcgtagagaaagtttcaagaacggatccacgtatgcctgccagtctcgttaggcttttcttccatgactgttttgttcaagggtgtgatgcatcaattttgttgaacaacactgccatagtgagtgagcaacaagctctgccaaacaacaactcaataagaggtttggatgttgtaaaccagatcaagacagagttggaaaaagcttgccctggcgtagtttcttgcgctgatattcttacccttgcagctgaagtatcttctgttctggctcatggtccttatttgaaatttccctgggaggagggatagtttaacagcaaatagaacc

SEQ ID NO: 224124 - DNA, 511 bp, Glycine max
gagaagtaaagagagaagttgattacgaatacaacatgattcaaaaaacaataaagatctcacacgtccacaataaaacatagctagctgggggcccttatacaataaaacatagcttgctgggggcacttatacggataatgggcctatatatagcttctttattgggaaccttcaatcacatgatttcctagggtatataaaactcttcctaattcattcatattgagctaaccagacccttttttgattcggatgccacactacctatatcaagttccgcagatttcttgttaacaaagttacattgttttctgatttctcctttcttcccagttagcacaccaatatttcccattttaatcatggaagccgaaaagctcttaaagaaagctatttggtcactactgaatttgttgacaatgctgatggtatcagcaccaggtgttgagaaacactcttgatcactttgaaacaaccctttttaacctgaagattggagtagtagttt

SEQ ID NO: 224125 - DNA, 622 bp, Glycine max
  unsure (1)..(622): unsure at all n locations
ctccggctccgatcaggactcggcgccgcgccgccgcgcgccgcttccgccgtccgggaagatctccaagaggaagtcccgcgcctcgaagcgctcgcagacgacgttcatcacggcggaccccgccaacttccgacagatggtgcagcaggtcaccggcgtgcggttcggcggcgccggccagccaattgcgccggcggcgggggttgtgaagcccgagccgcagcgtgcctcgggccttgccaggttccccgccggcgcggggtgcctgccgacgctcgacacgtcggccttcctgctggaccatcaccagcaggtggtggggccctcctctgttaactctgggcctgccaccgggctttctgggcccggcccgctccccttcgcccaacccctccttgacgcttccttcgcctccgcagggttagattttgacaccttctccagcttccccactctcgagtcgtggaaagtcatgtgataaagaaagaagagaaaaaaaaattttcagagaatctatctcatctcatattctctgaaaattttctttttactttntccttttttgcccctctcgtggttaatgaatctagcaggggaagctagctaggatgatcttatg

SEQ ID NO: 224126 - DNA, 428 bp, Glycine max
aacaagctagctattagttcgattttgtagtaagtgaggtgccaatatggtgaagatagctcttggtactttggatgactcttttagcgctgcctctcttaaggcttatttcgcagagttccacgcaactctgattttcgtgttcgctggtgttggatcagccatcgcttacaacgagcttacaaaagatgcagccttggatccaacggggctggtggcagtagctgtggcacatgcatttgcactgtttgtaggtgtctccgtcgccgccaacatctcaggtggccatttgaacccagctgtcacttttggattggccattggaggcaacatcactctcatcactggtttcttatactggattgcccaattgttgggttctatagtcgcatgcctcctcctcaatttgatcaccgctaagagcattc

SEQ ID NO: 224127 - DNA, 437 bp, Glycine max
aacaaggggaccttccaacaattcatgtatcaagttcgaattataatttacataattattgcaagcgggggataatagataaagtagagtttaaaatgcaagaagccaagaggctcatgacatgaaacggggaacagagatgaaacttgaaggaacacacaagtgaagttgaagctcaagggtaggtttcaaaggctgggacaggggcataggaaccaatgaagacgtttccataaatcaagccagccaaaccttctccaattaatgggccaacccagtagatccagttagcagccaagtttccactgaccacagctgggcccaatgagcgagctgggttcattgaaccgccgctgaatgggcctgctgctaagatgttggcccccacaacgaacccaatagcaatgggtgcaatgatacccaatgacccctttttt

SEQ ID NO: 224128 - DNA, 612 bp, Glycine max
gaagaagaagggtgagctaaagtcaattttccttcctttcctttccactagtcacataatcccgctagtggacatggccagactcttcgccttgcacgacgtcgacgtcaccatcatcaccaccgcacataacgccaccgttttccaaaagtccatcgatttagatgcgagtcgcggtcgccccatcagaacgcacgttgtcaacttccccgccgcacaagtgggtctccccgttgggatcgaagccttcaacgtcgatacgcctcgggaaatgacccccagaatctacatgggcctatcccttctccaacaagtcttcgaaaaactcttccatgacttgcaaccggatttcatcgtcaccgacatgttccacccttggagtgtcgatgctgctgctaaactcggcattccgaggatcatgttccacggcgcaagttatctcgctcgctccgctgcgcactccgttgaacagtacgcaccccacttggaagcaaaattcgacaccgacaagttcgtgttacctgggttacccgataacttggagatgacgcgcttgcagttgccggattggcttaggtctccgatcagacactgaactgatgagggacgata

SEQ ID NO: 224129 - DNA, 540 bp, Glycine max
ggctaggagagcacattgtcttgtgttaccatatccacttcaaggacacatcaatcccatgcttcaattctccaagctattggaacatcaaggggtgagaataacacttgttacaactcgtttcttctataataacttgcaaaaagtgccaccttctattgtacttgaaacaatctctgatggttttgacctaggggggcctaaagaggctggagggtccaaggcatatttagatcgcttttggcaagttgggccagaaacatttgctgagcttcttgagaaacttggtaaatcaaatgaccatgttgattgtgttgtttatgatgcattcttaccttgggcactagatgtggctaagagatttgggatagttggtgctgcttatctcactcaaaatatgactgtgaatagtatatattatcatgtccaattgggaaagcttcaagctccactcatagaacatgatatttcccttcctgctttgcccaagcttcatcttaaggacatgcctactttcttctttgatgaagatccttcttt

SEQ ID NO: 224130 - DNA, 453 bp, Glycine max
aacatagaacttgaatttatttctcgctacgacaaaatgccaaaatagcggtagattgttcactacgccaacatgaaataaatatttttaaatgtaagtgacaattagaccatcactattgaatttctaatttagaacatgatcaagcttatcaatgtaacaaatgattcgtaaattctataatattttcataagaacttccaccttcagcggtagctcttacagctaaagttttccactgaatggcattggttttcatctctttgtctctatccattatctcttttatacaatgttttagagcttctcgccgcacaatatttttctcatcaactggagttcgaatacctattttccaaacatcggcaataagctttgcgtttgttctctgatctgaccaacatggtattgcaattgtggggactcctaagcaccaagtttctaatatggaat

SEQ ID NO: 224131 - DNA, 507 bp, Glycine max
  unsure (1)..(507): unsure at all n locations
ctttttctcatccaccaacaccaattcacttttcttcttcttcttcttcttcttccttcattttcttctctgcatctcacactgatcataccccaaacaacccttttgagatatgtttatggttatggattcagcagaaaggtgcttagattctcaactatggcatgcctgtgccggtgccatggttcagatgccacccctcaacacaaaagtcttctactttccccagggccacgctgaacacgctcatgggaaggtggaatatttcgggaaaaaccatcaaacccgtgttccaccactcatcccttgcagactctctgccatgaaatacatggcagaccctgacaccgacgaggtttatgtcaaaatgagactcacccctttgagggaacatgaattattggattcacaagatgattgtttcttgggaaacacanacagtggaggagttgagaatcaagagaagcctccaacttcttttgctaagactctcacacaatctgatgc

SEQ ID NO: 224132 - DNA, 464 bp, Glycine max
cccacaacaaccccaaacccttcactctttcgattttcgaaggtaaaaagatgaatctgaagaacatgaaggttccgaacgttccaggtggcggggggatctctgcgctgctgaagcttgggattgttggtggaataggtttgtatgcagctgctaacagactctacaatgttgatggaggtgaccgagccatcgttttcaaccgtctagttggtgtcaaagacacggtctatcctgaaggaactcacttactaattccgtggcttgagaggccggttatctatgatgtccgtgcacgaccccatctagttgagagtacatctgggagtcgtgatctacagatggtgaaaattggactttgagttcttactcgcccgttgcccaaccaattacctactgtttatcggacccttggagagaattataatgaaagggttttaccttcaatcatacatgaaactttg

SEQ ID NO: 224133 - DNA, 506 bp, Glycine max
agctgaaattatttcattcatgtaatgtgaagcattagtttggacctcaattaatcctttgcaaaagattcaaagggttaccgttcagtagtctaatcaagacagctatatccgaatttacgaaaacatatcaagaagatgtatcctgaaattgatcgtttactagctaaaaacaaaaagaaacaaacaggctaccaaccactcactttctgcctggctccaaattcatcttttgaagattcaacagcagatcatctgaattcaggtaaaccttgtttgccgcgtttgatatggtatgtgcaatctctcgagcagcttctatcttcctcaatgtgataaaagctggattgttggccatagcctgtccaattagttgggcactttttgcttctccctgtgctctgattacagcacttctcttgttttgctcagctttttgtacaacaaatttagccctttcagcttcttgtgcagctacctgctttgcttcaattgcagaaggaact

SEQ ID NO: 224134 - DNA, 556 bp, Glycine max
  unsure (1)..(556): unsure at all n locations
ctcgagccgaatcggctcgagaaacatgaaagcccggttccactccaaaataacatcacttccatgatcaaatgacggctaagtcatcgtgtatggctactgattcgaatttagaaattgtttgtgacatgtatccgaacgtctgctgatgttgtctatctgcgtcaacatggccatcaagttcaggacggcctatgtgtcaccgaattcaagggtttttgctatgggcgagctcgctatggatcctaagctgattgcaaggcggtatttgagatcagagttcttcctagatcttgtcgctacactgcctcttccccagactgtgattcggtttattatgccagcacttagaagctcccatgctgatcataccaacaatgcactatgtgctcagattatacatgatcctcccattgagctctcagattattaacgccactggtgtggttacacagacagattgggctggagctgcttacaatcttctactatacatgttagctagtcatgtgttgtgtgcatccggatactagctatcactngaaaggcatgctac

SEQ ID NO: 224135 - DNA, 561 bp, Glycine max
acaccacacacatagtagctattatactctctagagtaattgcggaatctgctagaattttctaataatggcgaaagacgttgagcaggtcacagagcaaggtgaatactccgcgaaggactaccatgaccctcctccggcaccgttgatcgacccagatgagctcacaaagtggtccttgtacagagccgccatagctgagttcatagcaacactcctttttctttacatcaccgtgttgaccattattggctacaagagacagagtgacaccaaaatccccggtaacaccgaatgtgacggcgttggcattttgggcatcgcttgggccttcggtggcatgatcttcatccttgtttactgcactgccggaatctctgggggacacatcaaccctgcggtgacattcgggttgttccttggacgcaaggtgtctttggtgagggcgttgttgtacatgatagcacagtgtgccggtgcaatctgcggtgctgggttggccaaagggttccagaaatcgttctacaacaggtacggaggtggggttaacactgtcagcga

SEQ ID NO: 224136 - DNA, 307 bp, Glycine max
aattaagcattgctcctgaaggatccaagagctttgattgcagaacctctaagaatgtattgatggtagattgcagccaccgcagctccaacaaacggtccaacccagtaaatccattggtcgtcccaggctttgtcgttgttgaagatcacagctggtccgaaactccttgcagggttaatgccggtttcagtgacagggaattgtgcccagtgaactcatgaagacggcaaacccaatgggaaggggggctaacacaggaccatgaaagtccttaccgttcctctaagaaccagggggggaaaaa

SEQ ID NO: 224137 - DNA, 530 bp, Glycine max
acaccacacacatagtagctattatactctctagagtaattgcggaatctgctagaattttctaataatggcgaaagacgttgagcaggtcacagagcaaggtgaatactccgcgaaggactaccatgaccctcctccggcaccgttgatcgacccagatgagctcacaaagtggtccttgtacagagccgccatagctgagttcatagcaacactcctttttctttacatcaccgtgttgaccattattggctacaagagacagagtgacaccaaaatccccggtaacaccgaatgtgacggcgttggcattttgggcatcgcttgggccttcggtggcatgatcttcatccttgtttactgcactgccggaatctctgggggacacatcaaccctgcggtgacattcgggttgttccttggacgcaaggtgtctttggtgagggcgttgttgtacatgatagcacagtgtgccggtgcaatctgcggtgctgggttggccaaagggtttcagaaatcgttctacaaca

SEQ ID NO: 224138 - DNA, 523 bp, Glycine max
aattaagcattgctcctgaaggatccaagagctttgattgcagaacctctaagaatgtattgatggtagattgcagccaccgcagctccaacaaacggtccaacccagtaaatccattggtcgtcccaggctttgtcgttgttgaagatcacagctggtccgaaactccttgcagggttaatgccggttccagtgacagggattgtagccaagtgaaccatgaagacggcaaacccaatgggaagtggtgctaacacaggaacatgagagtccctagcgttcctcttaggatcagtggcggagaaaacggtgtagacaagaacaaaggtaccaatgatctcagcacccaaagcggtacctttgttgtagccatcgctgacagtgttaaccccacctccgtacctgttgtagaacgatttctggaaccctttggccaacccaacaccgcagattgcaccggcacactgtgctatcatgtacaacaacgccctcaccaaagacacctttgcttccaagaacaacc

SEQ ID NO: 224139 - DNA, 444 bp, Glycine max
cttcttcttcttttgggaaaagattaacaataaaagtgtggagtactgttgatagcagagatgtttgggatcttccacaaggggcaaaagataaaggggacagtggtgttgatgccaaagaatgtgttggacttcaacgccataacctccatcggtaaaggtggtgttattgacacagccaccggcatcttaagccaaggcgtcagcttagttggtggagtaattgatactgccacttccttcttaggccgtaatatctccatgcaattgatcagggctactcagactgatggcagtggaaatgggaaagttggaaaagaagtctatatggaaaaacatttttcgaccttggcaacgttgggagcaaggcatgatgcgttcaatattttctttgaatgggatgctaagattgggaattccagagccttttacctcaaaactttt

SEQ ID NO: 224140 - DNA, 588 bp, Glycine max
  unsure (1)..(588): unsure at all n locations
ttcttcttcttcttccattagttcctgctgaaagtcctaacacaacaccacccttcttcatcttcttatgtttttgacttgtggccaccactgtgacccatttctgtatcttctggcaaggttctatccgtttcttcttttggatcacccttttcactgttcgactccttcttgctatctgcttcgtcaatctgattattcatgggtgaaaagctaatttgttcacttgaataggtgtacagtgctaaagggttaagtttgaaacctagcctgctagttgcatcatcaggtcaaatccataactttctgggaatcaaacgatgatgatgtttgaagatatgggtttttgtggggatttggatatgttttctgctccccttggagaaggggacattaccacccggcaaactgagccagaggtgatagttgaggatgattatagtgatgaagaaattgatgtagactagctcgagaagaggatgtggagggacaaaatgcgtctgaagcgatngaaggagcaaagtaaacctaaggaaggaattgatgctgtgaagcataggcagtcccaagaacaagcatggaggaaaa

SEQ ID NO: 224141 - DNA, 517 bp, Glycine max
  unsure (1)..(517): unsure at all n locations
gtggtattcttgctgttcttggttgttctgatgactctcgagccaaaagggtccgcgtgcttgagctctctcgcagattgaagcaccgtggccctgactggagtgggctccatcaacatggtgactgctttttagcacatcaacggttagccatagttgatcctgcttctggggatcaacctctctttaacgaggacaaatccgtcattgtcacggtgaatggagagatttacaaccatgaagagctcaggaaacagctgcctaatcacaagttccgtactggatgtgattgtgatgttattgcacacctgtacgaggaacatggagaagactttgtggacatgctggatggtatcttctcatttgttctactggacacccgtgacaacagttttatagtggctcgggatgctattggggtcacttccttgtacattggatggngattagatggctctgtttggatttcatcagaaaatgaagggcctgatgatgattgtgaacactttgagtgttt

SEQ ID NO: 224142 - DNA, 544 bp, Glycine max
gataatagaaacacttttattaagacttcaaatcacggcattcaagataatacaatacgctacacttttagaaagccttatatctatatctatacactacaaagctttgccaagataaaagtacactgcaggcaaatttttcatacacgtttagcatagttcattctcccccaattattctttgtcacagctttatattatccctggattgcaacaccaagaggagcagcatccataggtataatcttctcaatttctacacccttgttgttgttctggttttcataggctgaaatgtgcactccaagtgctgctctaccagaaggatcaaggttgttagaccaagcagcatcccactcaacagctttggctgtgctacatgcaacacttgctcctccaggaacggtgagcctagctgagttctgagggaagaacctctcaaagatcattctgtagtaatatgcttccttggttgttggggtgttgcgagggtagatgttaccagcattaagcatcattttgtcagtcacatgttttgcagcat

SEQ ID NO: 224143 - DNA, 618 bp, Glycine max
aaatttcaacatgaacaaatggttcataaaacgcatttgacacgaagctaatcgcatcgcgcctcacctccactgctgcatctcagaatcgggacgccgtcttcctcactacatcgtccctattagcacactaggtgatgaacattctgaagccgaagccaaatccgcagcaactattgagggattggcagcgcaggcttcgccaagagtgtcgcaacattgagcgccaaattcgcgagagaagaaaaaaatgtgcagaaggctattagagaagctgcaaagaggaatgacatgggctctgcaaaggcacttgccaaggaacttgtgagatctaggcaaactgtgaaccgcctttatgaaaacaaagcacaaatgaattcaatatcaatgcaccttggagagagtgttgcaattgctcgtactgtgggacatctatcaaagagtgctgaggttatgaagcttgtcaataatctcatgaaggctcctgaaatggcggtgacaatgcaagagttcagcaaagaaatgacaaaggcaggagttatcgaggagatagtaaacgatgccgtcgactcagcgctagattctgaggacatagaagatgagatagaagaagaagtt

SEQ ID NO: 224144 - DNA, 497 bp, Glycine max
aagaagaaagacaatatagcttgacacactgtgaagaactctgtgtaatttacatacaaactgcacattccaataccatctttcccattagtgttatcaattgtcattttcaatatagatatgacaaataggttacaataaacctgttaacatctctctcttataacataccagggtacaaggtagaggctgcgaaattagaaacttgattatgatcgaactttagcaagccgggcccttatttcttccatttcttcttcatcatcaacaccctcagctatagcatcttcctttgcgccaacactttgagcaggtagcttcaccctctctttcctcacagcttcaggaagttgagcagctgtctcaccagctattgcgggcaagactttatcaacttcttcttctatctcatcttctatgtcctcaaaatctaacgctgagtcgacggcatagtttactatctcctcgatacttctgccttgtcattttttgctgac

SEQ ID NO: 224145 - DNA, 559 bp, Glycine max
gcctctttgagatattcagacgccttcctagtggcaaagagcgaagctcatgtgcctgtgtatctaaacgctggcttatgcttatgagcactatctgcaaagatgagattgagagggctacctctgttgatgaaactgtttcttctgatgagaatcaagatattgaagatgatggataccttacaaggtgtctggatgggaagaaagccactgatgtgaggcttgctgcaattgcagttgggactagtagccgtggcggtctagggaagcttttgatcagaggaagcaactctgagcgtggtgtcacaaaccttggcctctctgcagttgctcatggttgcccttctctcagatcactttctttatggaatgtgtctaccattggggatgagggtgtgtctcagatagcaaaaggatgtcatatattggagaagcttgacttgtgtcattgttcctcaatcagcaacaagggtttgattgcaatagctgaaggttgccccaacttgaccaccttaactattgaatcatgcccaaaattggaaatgaaggcttgcaagct

SEQ ID NO: 224146 - DNA, 611 bp, Glycine max
ggtctttctctccgtgacacagcacaaacaaattctcagtgttggagacttgagctcatagagaaatcatagtttgtttaatttcaattctgagcaaaggtcaacatgcaagttttttccattgaaggcgaaagtgctttgtcagttgttggtccaaggccaatggaatggtctactgttccatacaatgcccctcaagctcctgggccaaatggaaagcagcggacctcaagtttggaatcaccgatcatgttgctgtcaggtcaccagagtgctatatataccatgaagttcaatccagcaggatcagtcattgcatctggatctcatgacagggaaattttcctctggaatgtgcatggggattgcaagaacttcatggttctgaaaggtcacaagaatgctgttttagatctccactggactactgatgggacacaaatagtctctgccagccccgacaaaacagtgagggcatgggatgtggaaacaggaaaacaaatcaaaaagatggtagaacatctctcttatgttaattcatgttgtccttctcgaaggggaccacctcttgttgttagtggctctgatgatggaacttgctaattatggga

SEQ ID NO: 224147 - DNA, 508 bp, Glycine max
acatcaagaatgtatcactaacatttttcatttttaaatttaatccaattctgcaggggaaaaatttcgaaacaccttcctaagcaaaatgtctcgaagttcacaatgaaattatgaagccattctcaccaacgtcaaatcacatattacaaacaaagggtaggatataatatttttgcaagaacattatacagaattgatcgaccagggaacaactgaaggaattcagcatctctaaagtttaccactccctaatggttgtcatcaaaagcaccaacatggtcatttcatttggcaagttcctaaacgttgagcttcatatctcccctagataaatctgcttgtcactgctacaagatccaataataggctcattgggatgaaaaacacactcgttaacagatccattgtgaccgggaagcttatacaagatgcggcgagaagtggtatcccagatgtaaaccattcgatcagaactaccagctgttaccttgcttccatcaggaga

SEQ ID NO: 224148 - DNA, 576 bp, Glycine max
  unsure (1)..(576): unsure at all n locations
cagacacggaactcacaggaaaaataccagacttcatagggaattggtctaagcttcaaaccttgagatttcagggcaattcttttaatggctcaataccatcatcattttcaaatttgagttctttaacagaattgagaatcagtggtttatctaatgggagttcctcattggaatttttaaggaatatgaaatctttgactatcttagaactgaggaataacaatatttctggttcgatttcatccaccattggagagttacacaatttgaatcagttgaatttaagcttcaataacatcacaggacaaaatttgggatcaattttcaatttgagttcgctcacttacttgtttcttggaaataataaattcaacggcacccttccgatgcagaaaagttcatctcttgtaaatatagacttgtcatacaatgatctatcgggtagtctcccctcttgggtaaacgaaccanatttacaactgaatttagttgccaacaacttagatgtctcaaatgccagtggcttgcctattgngctcaatngtctccaaaaaatttttccttgcaatcaag

SEQ ID NO: 224149 - DNA, 588 bp, Glycine max
  unsure (1)..(588): unsure at all n locations
ctctttctccggcgacgatctcagattccggtcactcctctcgccggcgatcccttattcctccgtcctccgtcgagtcctttccgattcgaatcgttcccagccttgtgccaccatgaatcccgaatacgattatttgttcaagcttttgctgattggagattctggtgtaggcaagtcatgtcttctcctgaggtttgctgatgattcataccttgacagctatatcagtaccattggagtggactttaaaatccgcactgtggagcaggatgggaagactattaaacttcaaatttgggacactgcgggtcaggaacgtttccggacaatcactagcagctactatcgtggggctcatggcattattgttgtttatgatgtcactgaccaagagagcttcaacaatgttaagcagtggctgaatgaaattgaccgttatgcaagtgaaaatgttaacaagcttctagttggaaacaagtgtgatcttacggcaaataaagttgtgtcctctgagacagcaaaggcatttgctgatgaanatggattcctttcatggaactagtgctaaaatgccaccatgttgac

SEQ ID NO: 224150 - DNA, 445 bp, Glycine max
  unsure (1)..(445): unsure at all n locations
gaagggacaaagaacaaggcaaatactgctattcaccaatattcctaattttgtacaaatgttattttcttttaaaatcaaatacatagaaaaagaatggaagttttaacaacgacttaacgataaggagcaaatcatgacgaacaatcttcatatgaaagcaatatgtgaaaagctagttttacatgccactgagacacatgtaaacgtctgagaccacaaatacttcgtctctttctaagtcgagcagcaaccagccttctggttcactggctgtcctcgaatttgaactgttggaggcctggcattgttcactggttggcttgccattctgtttttaatntcagcagccatggccatgaaagcctgttcaacattggtggcatttttagcactagtttccatgaaaggaattccaatttcatcagcaaatgcctttgctgtc

SEQ ID NO: 224151 - DNA, 340 bp, Glycine max
ctcgagccgaatcggctcgagcgtttctccaatttaatcaccattgtacaacccaattcccttcgtcgttttcgattaagagagcaatggcacgtaccaagcaaaccgctcgcaagtccaccggaggaaaggctccgaggaagcaattggcaaccaaagccgctcgcaagtcagccccggcgaccggcggagtgaagaagccccaccgcttcaggccaggaacggtggctctgagggagattcgaaagtaccagaagagcaccgaacttctgatccgaaaactcccattccagaggctcgtcagagaaatcgctcaggatttcaaaaccgatctccgttt

SEQ ID NO: 224152 - DNA, 447 bp, Glycine max
aaacaaaaacccaggggggcaaatccatttgggaatatccccggggaaaaaagaggaatcttccaataaaggggcttttgaagaaaacccgaattccaataggccgtaccctaattttaatggcaaaggacccgaaaccctaaacttaagctttttcccctttgattttgcgagcgagttgaatgcccttgggcataagggaaactcgcttaacgggaatagcgcaaaggttagggtcctcaaagagcccaacgagaaaagcctccggggtttcctgaaaagccaaaacggggtttttttgaaagcggaaatcggttttgaaatcctgagcgatttctttgacaagcctttggaaggggagttttcggatcaaaagttcggggcttttttgggcctttaaaatctccctcaaaaccccccttcctggcctgaaagggtggggttttt

SEQ ID NO: 224153 - DNA, 638 bp, Glycine max
  unsure (1)..(638): unsure at all n locations
ctctctctcactccttcttctctctcctctggcacccctaaagcttcttctgttctgtgcaggcagtttttctttggtttggttgcatcctttgatctgatcagcaaatttgagaattcagtttgggaagggccattcctctttagtgcaaaacagatcgcaggtgcctttgtgctgatggccactaatgaaaatcttccaccaaatgtaattaagcaacttgccaaggagttgaaaaatcttgatgaatctcctcccgagggcattaaagttgtggtaaatgatgatgatttttcgacaatatttgctgacattgaaggcccagctggaactccttatgagaatggagttttccgaatgaagctgttgctgtcccatgatttcccgcattctccacctaaaggttttttcttgactaagattttccatccaaacattgcaaccaatggagagatttgtgtcaacacacttaaaaaggattggaatcctagccttgggttacggcatgttcttattgttgtaggtgtctattgattgaaccattcccagaatcagctctaaatgaacagggctgcaaaatgctgcttgagaatattaggagtatgctagacatgctangctttacactggaatcatgc

SEQ ID NO: 224154 - DNA, 423 bp, Glycine max
gtgccgtagttggtcatcgttgttgttgtcgtcgcggaaggaaagaagggttgagttcagagggctcggtattctagttggaaaaggagggctgcatggaaatgtttttaggatcaagccaccaatgtgtttcaccaaagatgatgcagattttgttgtggatgccttggactatgctatatctaagttgtgagattctgcctggaatcaagatatgattatatatcctgctagctacaagtggatcatcaatccaattttctataaggaaacaaatcctgctagctgcacttttgtacgtgtgttcattgctgttgtgtatttcacatactaccaataacactgcaatgctcccattgcaaagtgaaaatcctgtaaacaattgacaatataaattgaatgtgaataagtggattggtgtgt

SEQ ID NO: 224155 - DNA, 590 bp, Glycine max
  unsure (1)..(590): unsure at all n locations
cccaagtcatcatttaaggcttatttggcagactcagatggcagagtctgggccttgttggctggtctactttgtgggtttgggaatggtcttcaatttatgggtggtcaagcagcaggatatgcagcagcagatgcagtccaggcacttccacttgtaagcactttttggggcgtgattctgtttggagagtacaggaaatcatcaagaagaacatatatactgctagggagtatgttgtttatgtttatagtggctgttgctgtgctaatggcatcatcagggcaaagaaacagcactgccaaggaataattggacaacacacaagttgtttatagattgcctagtgcaaagggagaaaaattctcattgttcattggtgtgaataagagaagaagaaaaaatctattaagaaaagagtgcagaaaaagaaataaagcagggagcatagttgatatattcttattgaaatgcttttatgttttttatttttctgtatatttggacttccaaaatgaaaaattgtacgantatatatatatatatatatatatatatataatatctccaatgttgggtctggctttata

SEQ ID NO: 224156 - DNA, 420 bp, Glycine max
caactattattttgaaagcataggacacgacagatagtacacaatataaagccagaacaaacattggagatattatatatatatatatatatatatatatataatcggacaatttttcattttggaagtccaaatatacagaaaaataaaaaacataaaagcatttcaataagaatatatcaactatgctccctgctttatttgtttgtctgcactcttttcttaatagattttttcttcttctcttattcacaccaatgaacaatgagaatttttctccctttgcactaggcaatctataaacaacttgtgtgttggccaattattccttggcagtgctgtttctttgccctgatgatgccattagcacagcaacagccactataaacataaacaacatactccctagcagtatatatg

SEQ ID NO: 224157 - DNA, 535 bp, Glycine max
ctctcaatggcttcttctctctccaccaaaccattctcatcaaccgacgctctctccgccttcgcttctctcaatcccgatctccgatccttctccctcggctacctccgtctctcactccgtcctcgtcttcccaagagacttcagatacgggctgctgggagtatctatggaaatcactttcgtgtttcaacatatggagaatcacatggaggaggtgttggttgtattattgatggatgtcctcctcaccttcctctctccgaagctgatatgcaattggatcttgacagaaggaggccaggtcagagccgaattacaactcctagaaaggagactgatacatgtaaaatattttcaggagtttctgaaggacttactactggaactccaattcatgtatttgtacccaatactgatcaaagaggacatgactatactgagatggcagtagcttataggccttcccatgcagatgctacctatgacatgaagtatggtgtcagatccgttcagggtggtggtagatcttctg

SEQ ID NO: 224158 - DNA, 608 bp, Glycine max
gtgcttgctggtgttggttttaactaagagcctttcaaaaaaaaaaaaaactcagaaagaagagagagaaagggaagaaagagaaagaacaaagaaggggaaaaataactgataactgagataacaataccatagattaaaactttgcttcgctttttctcttcattgtttttcttcctcttctacccctttgatctcatgcaatctcccctcatggatccctttgatttgattcgcaaagggtttggctgaagctatctggaatatttgtgttacatttttggaggtccatctatgttttagtcattttgtccatattcttgtcaataatgagcttatccaagaaaggttcccaaacagacacaaaactgagctccttaaacaaagcaacctatttgaatccaaacgcagcagagtttgttccatttgccctcagatcatcgccatctggaagcaccagctcggtagatgcagcagcgaggtttactactgctggatctcttgggaaagcagttttagatcgatcagaatcatccatttcaaataattccgatgatgaggctcaccagtactgggcgtgtcagcttcctgatgatatcacccctgac

SEQ ID NO: 224159 - DNA, 589 bp, Glycine max
  unsure (1)..(589): unsure at all n locations
atcccatcttccatttccatcttcaatatttcttctcatcgagaagcttcgcgaacgaaaacaaagaaccctagacagatccattccatagccatgtcaggtgttggccctctatctcaggattgggaacccgtcgtcctccgcaagaaggctcccaccgccgccgccaagaaggacgagaaagccgtcaacgccgcccggcgctccggcgcggaaattgaaaccctaaaaaagtataatgctgggacaaataaagcagcatctagcagcacttcattgaacactaagaggctggatgatgatactgagaatctagctcatgagaaggtaccaactgaacttaagaaggctataatgcaagctaggatggacaagaaactcactcaggctcagcttgctcaactgatcaatgagaagcctcaagtgatccaggagtacgagtcagggaaggccattccaaaccagcagataattgggaagttggaaagggctcttggagcaaattgcgtggcaagaaatanataaactaatgctatgggtttgcatgtagcttggtttacatatcactaactcactatggggagtgtat

SEQ ID NO: 224160 - DNA, 312 bp, Glycine max
atactaattgcaactttatttagtcgaacaggtgacaggtgaaagccacaggtcctcacaaccatttaattgtcttacatattacacaattagcgagcaaacacataacactcccatagtgagttagtgatatgtaaaccaagctacatgcaaaaccatagcattagtttaatttatttcttgccacgcaattttgctccaagagccctttccaacttcccaattatctgctggtttggaatggccttccctgactcgtactcctggatcacttgaggctttttattgatcagttgagcaagctgagcctga

SEQ ID NO: 224161 - DNA, 589 bp, Glycine max
gttaaacacacactcagctcagagacaagtaataataccatcactcatcgggaaatgggagatccagcggagagcttcggatcggaaggtttggattccgccgccgccgttaagaccgacgacctttgtatggaaatcgatccgccatatcaggaaaacgtcgccaccgccgaggactggcggaaagctctcaacagagtcgtccctgccgtcgtcgtcctccgcaccactgccactcgctccttcgacaccgagtccgccgccgccagctacgccaccggcttcatcgtcgacaagcgccgcggcatcattctcaccaatcgccacgtcgtcaagccaggtccggtggttgcagaagcgatgtttctgaaccgcgaagaggttccggttcatccgatttacagagatccggtacatgattttgggttctttcgttatgatcctggtgctatacaatttctgaactatgaggagataccacttgctcctgaagctgcctgtgtaggactagaaatcagagttgttggtaatgatagtggtgagaaggtttccattttggctggtactcttgctcgtttgatagggatgc

SEQ ID NO: 224162 - DNA, 278 bp, Glycine max
gccagccagatcatctgcaaggacttgttctccttccttcccaacagccatgtcttcttttcttcccgcctcagccgagtcacttgatctggcagtggaggccaaagacccgtctgagtccatctccattctttatcaggtacttgatgatccttcttcttctccagatgctctgcgcatgaaagagcaggccatcacaaacctcactgagcatctcagggaacagaatagggcagaggatttgcacagccttcttacacagttgaggcccttctttt

SEQ ID NO: 224163 - DNA, 523 bp, Glycine max
aagccaagattctgaaaatatgtgaagcctttggtgctaatcgttacccttttgctgaggaacttggaaagcaagctcaaatgattacagaggtttctggaagacttttagaattgaagaccactttagatgctggactactgcatcggaataacttgctaaatactattggggctcaatttgagcaatgggatgttttggtgaggaaggagaaatctattcatcataccctgaacatgctgagccttgatgtgacaaaaaaatgtcttgtggctgaggggtggagtcctgtttttgcaactaagcagatccaggaagcattacagcgggcagcattggactctaattctcaagtcaatgccattttccaagttttgcaaactagggagttgccacctacctatttccgcacaaacaaatttacttcttcttttcaaggaattattgactcatatggggttgctaagtatcaggaggcaaatcctactgtgtatactggagttacctttccattttttttgct

SEQ ID NO: 224164 - DNA, 508 bp, Glycine max
ggagaataaggatttttttttttaaaactaaaacaaataaagatatgaatattaagtttatcttggaagttataattattacacgcagacacggttgcctagctcatacaaagatactcccctaattgagaatatttatttcctcaatggataaataaacaaaacggcaccacgtttgatgaaaaagctcccaggattccaccacatacaatgcccacatataccgatcactgactagttacatcaaatgaaagaatcaatacaggtccaaagctatataactcctcgttcttattaatgtgattttagagcatatcattcctcatcatccagccacgagaacgagaaagggtggaacttgtacccatcgccctcataaaacttgttttgaaactccacccagtgaagacgtaacgcatgcaaaaaggcactgtgagtttccatgacaagtaacactccgacggtagcaaaaatgaagacatgagacccactataagatataacatta

SEQ ID NO: 224165 - DNA, 577 bp, Glycine max
gagatccatcgatcaattaatttccaatggccgatcagctcaccgacgaacagatctctgagttcaaggaagcctttagcctcttcgacaaggacggcgatggttgtattaccaccaaggaacttgggactgtgatgcggtcgcttgggcagaacccaactgaggctgagctgcaggacatgataaatgaggttgatgctgatgggaatggtaccattgatttcccagaattcctcaatctcatggcgcgcaagatgaaagacactgattcagaggaagagctgaaggaggctttccgtgtgtttgacaaggatcagaatggtttcatctctgccgcagagctccgccacgtaatgaccaatctcggtgagaagctgaccgatgaggaagtcgatgagatgattcgtgaggctgacgttgatggtgatgggcagatcaactacgaggagtttgtcaaagtcatgatggccaagtgaggaccaatcaaccataacaaaaacatttgaaagcacatgaacagaaaagggacagggcagataagttttgatgaaaattctattttcattaggacaatctt

SEQ ID NO: 224166 - DNA, 546 bp, Glycine max
  unsure (1)..(546): unsure at all n locations
atgtaaaagcactaattgcaaccaattgttccagtttcatagtagtaacccaaaaaacatgaaaagtgaagtacaaatgcatggtgagacacagctaatccaagctactaaaacaagggacagagcaaacaagtagaaaatactaatgagcaataccaataaataaaagcaaacacaaatccgaccaacaaaaactaatgaccccaaatgaagattgtcctaatgaaaatagaattttcatcaaaacttatctgccctgtcccttttctgttcatgtgctttcaaatgtttttgttatggttgattggtcctcacttggccatcatgactttgacaaactcctcgtagttgatctgcccatcaccatcaacgtcagcctcacgaatcatctcatcgacttcctcatcggtcagcttctcaccgagattggtcattacgtggcggagctctgcggcagagatgaaaccattctgatccttgtcaaacacacggaaagcctncttcagctcttcctctgaatcagtgtctttcatcttgcgcgccatg

SEQ ID NO: 224167 - DNA, 233 bp, Glycine max
cagcgatggaagaagacttcgacattttcgtcggcgaggaaatggatctcggcgaagacgagggcggcgaggagcggtagatcggctcccgcggcctcaagaagaagctcctcaaagaaggtcaaggctgggaaacccccgaagtcggcgacgaagtccaagttcattacatggggactttgctcgacggaactaagtttgattcgagccgcgacagggattctcccttcagc

SEQ ID NO: 224168 - DNA, 556 bp, Glycine max
  unsure (1)..(556): unsure at all n locations
cgagaaggaataaactattacaacaatcttatcaatgagctagtggctaatggtatacaaccacttgtgactctatttcattgggatcttccccaagccttagaagatgagtatggcggattcttaagtccacgcatagtgaaagattttcgggactatgcggaactttgcttcaaggaatttggtgatagggtgaagcattgggttactttgaatgagccatggagttacagccaaaatggctatgcaaatggacgaatggcaccaggacgttgttctgcttggatgaatttgaactgtactggtggtgattcttcaacggagccttatttggttacacaccatcaacttcttgctcatgcagcagttgttcgtgtgtacaagaccaagtatcaggcctttcaaaaggtgtgataggcataaccttggtagctaattggtttttgccgctcagagataccaaatctgatcaaaaggctacagaaaagagcattgacttcatgtatggatgggttatggatccatntacatccgggagactatcaaaagcatgcga

SEQ ID NO: 224169 - DNA, 550 bp, Glycine max
gcaactaaaagactttttcattcttattaccaaagtagtagcaattgtcaacagatcgatctacatctttgtttcacctctaagtccaatgggacctctttagaataaaagaataataaaataactatttaccctctaagtctaatagggcctctttagaataaaagaatataaaaaaatcaaataattatttacaaaatataaccattggataaaagaatttcataatattatttagtagagctataaagtcttgtttctttcttgagaaaatttttgaaccactgtgcagagagcttctcatatctcttcaaattatttttgtaatccacaaaaatcattccaaaacgtgatgtatagcctgaagaccactcaaaattgtcgaacaaagaccacacataatatcccttcacatttacgccattcttaattgcagattgaagataaaagagatgacgataatgataatcaattctgaaggtatccataagagattcttcaagtgataatgttggttcattatactcatttataccattttcagtgatgt

SEQ ID NO: 224170 - DNA, 610 bp, Glycine max
ggctcctccatatccctccctgctcattctcctatttttgttgacaagccaagttacttgttatggttcagagaaggaaaagagtaaaactttcataatccaagtccagcacgaagccaagccttccatattcccaacccacaaacactggtacgactcctccctctcttccatctccaccaccgcttctgttatccacacctaccacaccgttttccacggcttctccgcaaagctctcaccttccgaggcacagaagcttcaatctctcgcccacgtcatcactctcatacccgaacagcttcgctcgcctcacaccacccgctcccctgagtttctcggcttaaccaccgccgacagaaccgggttgctccacgagaccgatttcggctccgatctcgtcatcggagtcatcgacaccggaatctggccggagcgacagagcttcaacgaccgcggcctcggccccgttccctccaaatggaagggcaagtgcgtcgccggagaaaattttccggcaggttcgtgcaaccggaaactcatcggcgcgaggtggttctcaggcggatacgaagccacccacggaaagatgaacgagaccactgagttc

SEQ ID NO: 224171 - DNA, 411 bp, Glycine max
cttaaaacgaccaataatggcgtttgctcacgacttggagttggaatcctcttcttcccctctggtgttctcagtacggaggagtgaaccggagctggtggctccggccaagcccactccccgcgaaattaagatcctatctgagatagattctcaggcgggtcttcgtacccaaattccaatcatacagttctaccgtaacgacccatcattggcaggcaaggacccagttcaagccattcgaaacgctcttgcggaagcacttgttttctactacccgtttgcgggtagaattaaggaagaaggttcggatggaaaactcgtggtggattgtaacgaagagggtgtcatgttcatcgaggctgacgctgatgtcacacttgatcagttcggtgatgctctgaaaccttc

SEQ ID NO: 224172 - DNA, 476 bp, Glycine max
aagaaacgtaattaattatgatagaagagttattgttaacacacaatttttatttggcacacagtgataatactccaagggtcaagtaacttgataatacgtaaacagcactggatgagtccaaccaaagatctcatgtcataattaattaattaattaattaatgaagttgcttctgaagcatgcatgttatgatccaactctttagcaaaggctttcatgacttggctaggcaagcaaatcaaaaccagaattccttcttcgcccttggcattctgactcggcacatgaaagttcaccgcagggaaagcaccagcaccagcaacagccattccaccatacagcgcattcccccaaccaaagtccaaatttctgaacccagcctccgtggtattcaacaccagacacgacctcaccacagtgaacaaaggcctttccttcactcgccatcaaatccgccaccgaatcaatatact

SEQ ID NO: 224173 - DNA, 500 bp, Glycine max
ctataaagtgataagcaaacgagtactctaagtcttacattcatagatctcaccttgttcattgccttcaatccttcaaatgcaataacaaacacaacccttttcaggaatcctcaatgttgatcactgttctgcaaaaaatttacctattgggaagtgaagcacagacccagatacttctttcaggccctccggtgcttgctggagttattggcatcatagcttatgctatatatagagctggtggaataggtggtgtgagactatatgtacccatattatcgattgtggctgcactacacctgaaaactggttcaagcatctcagctttcatggtcacaggagggtcaattgcatacgttatgtgcaatatgtgcatcacaggtcctaaattcggcgggagtcattgattgactatgacatagcactttcatcctaaccatgcatgttgttgctagtgagtcttaggattatttggaaccttgaattctcagaatggt

SEQ ID NO: 224174 - DNA, 506 bp, Glycine max
cgaggacttgctgcctgtgatggcaaagaagttggatgtggagacctttgtgtcggagttgtgtgggggtttcaatctcctggctgacccagaaacaggtttgatcactggtgagagtctcatgaggaattcaactctgttgggtatggatgggatgagcaaagaggaagcagagaccatggttagacagggagatcttgatggggacgggaagctcaatgaaactgagttttgcatccttatggtgaggcttagccctgggatcatggaagatgctgaggcctggcttcacaaggcacttgaacaagagctcaccaaatcctcaacttaaaattccaccctttagaaatcaattgtaagttatatatacatcaataagtgtgtgtggctgtgtacatgtgtcttgtatgtatcatgcaagttaaatatactcatttgacactccatgaatgctttctaaagggaatttgagtataataaaatgaatctgttcagtttgttcgatt

SEQ ID NO: 224175 - DNA, 506 bp, Glycine max
aatcgaacaaactgaacagattcattttattatactcaaattccctttagaaagcattcatggagtgtcaaatgagtatatttaacttgcatgatacatacaagacacatgtacacagccacacacacttattgatgtatatataacttacaattgatttctaaagggtggaattttaagttgaggatttggtgagctcttgttcaagtgccttgtgaagccaggcctcagcatcttccatgatcccagggctaagcctcaccataaggatgcaaaactcagtttcattgagcttcccgtccccatcaagatctccctgtctaaccatggtctctgcttcctctttgctcatcccatccatacccaacagagttgaattcctcatgagactctcaccagtgatcaaacctgtttctgggtcagccaggagattgaaacccccacacaactccgacacaaaggtctccacatccaacttctttgccatcacaggcagcaagtcctcg

SEQ ID NO: 224176 - DNA, 479 bp, Glycine max
aatccataaaaataaatcaatgaccattaatttaggaaacatatgataaatgttacaactgaatatggaaagacacccccctacaacataaaaaagcttctttcttcgtataaaaggtctccaaatatgtctagtggccccaagctctgcgagaaaatcacattgcagtagcacatattgtccttgataattaataataaattcctacttcttcataaaaatgcaataaataaggcatgggctacgttggctacattggctaccaaaaccaagggggaaattaccatgtatataaataaaatcaaccattgaactatatataagtgcccctataggcagaaacactcttctcaatgcaattcaataccatacaagtttaacttgccacgggctttgcaatgactttcttaacggcttcagcataagtcctgtgctgataggtgagagttgattcaagcaggtcccaaagtgaggtttta

SEQ ID NO: 224177 - DNA, 549 bp, Glycine max
gaaacttccctctttccttaaaggattccctcctaatttggtgggattatcccaagtttcagctgctaccactcatcagcattgccatttcctgtttcactcaccacatggaaaagcttattcgcatgttccctttgcttcttcttcttcttctgttccccacttttgccttcgctggccatgactatggccaagctctgagcaagagccttctcttctttgaagcccagagatctggctaccttccccacaaccagagagtcacatggagagcacattctggtttgcaagatggcaaagcaagcggggtggatctagttggagggtactatgatgcacgggacaatgtgaagttcgggttacccatggcgtttaccgttacgatgatgtcgtggagcatcattgaatacggcaaacaaatggctgctagtggtgaacttggtcacgccatggaagccgttaagtggggtacggactacttcatcaaagctcaccctcaacccaatgttctctacggagaggtgggagacaggaacactgaccattact

SEQ ID NO: 224178 - DNA, 540 bp, Glycine max
gtttgttgttgaatcgtgaaaatgttcagaaaccagtacgacacggacgtgaccacatggagccctgcggggaggctgttccaggtggagtacgctatggaggcggtgaagcagggctcggcggcgatagggctccgatcgaagacccacgtggtcctcgcatgcgtcaacaaggccaactccgaactctcctcgcaccagaagaagatcttcaaggtcgacaatcacatcggcgtcgccatcgctggcctcaccgccgatggccgcgtcctctcccgctacataaaatccgaatgcatcaactataattacacctacgagtcgccgctccccgtcggcagactagtcgttcagctcgccgataaggctcaggtttgcacacagcggtcttggaaacgtccttatggggttggactcctggtagctggattagatgaatcaggagctcacctctattacaactgtcccagtggaaactattttgaatatcaggcttttgctattgggtctcgctctcaagctgctaagacatatttggaa

SEQ ID NO: 224179 - DNA, 354 bp, Glycine max
ctcgagccgctcgagccgattcggctcgagggcgatcccacatcgatcatgatcctatttcgtaaggaattgaatcacaccccatagaatagtatatatcaagcatattgacattaatatatttattaacaataaattggaggcaacccaacatttgaagaattgaacctgccattattgtaagtaagaattgggaaaggaaggaaggagatgaatctccctatcatagatctgtcctcacctgatcctctttccactgccatttccatccgtcaggcgtgcattgagtatggtttcttttaccttgtgaaccatggcgtggagaatgacttggtcaaagcctttgatgagagt

SEQ ID NO: 224180 - DNA, 563 bp, Glycine max
  unsure (1)..(563): unsure at all n locations
ataaaagcatgatcccattccaaaggatctttataagagtgtcttgtatcaagtgctcagtaaataaaacagcacaagcattattaacgtgtccgttttacatggctacagccataatgcacaagaaatgacttaaaatgaagcaaggtcttgtggtgagtctcgcatccttcttctgtttacagccacatacaagtttaagctctttaaataaatgaaaggatggagcattttaaatccttgtcagactggtgtgttgcttaaaatttcatccatgtagtctccacttcggattggagtgaatcttggaggacatgattcgctacaacaacttttgaggcattccaccacacagtctggatgagggtctaagaagaatgccatcgaatagcgttcttttccagttcgtttaacccggtgcattgttgaccggtataaacaattagtccacctctccatcaagtctccgatgttcacaataaaggcccnctccatgtaaggcacatccttccagacccgtggttcctttaacttgtcccgacagatctgtagtcctgggactc

SEQ ID NO: 224181 - DNA, 520 bp, Glycine max
tcagcttagacactcatttttattagttttgttgctgagtgtgtgtgaaactgtgaaagagagttatggcaggaggtggtggagctccagcacctaagattgatgagccacaacctcatcccccgaaggatcagttaccgaatgtttcttactgcattacgagtcctcctccatggcctgaggccatacttcttggttttcaacattatcttgtgatgctcggtacaactgtgctaattcccactgctcttgttccccagatgggaggtggcaatgaggagaaggcaaaagttatccaaactctactttttgtagctggaattaacacattgctgcaaactctgtttggaactcgattgcctgcagtaattggagggtcttatacttacgttgcaacaacaatctctattattctttctggtcgattcagtgatgagccagatcctatagagaaattcaagaggataatgcgggcaacccaaggtgctcttattgttgcttcaactcttcaatagtacta

SEQ ID NO: 224182 - DNA, 465 bp, Glycine max
acagtgaatcaatttttcaaattccaagtcagcatttacataaagaaaggcaatataacaaatgttatagaatattctatagcagaagaggacttcatataactataacctgtcataagatccaatctcatatcagaaaaagtcaaatcacgaccttttagagactcttgtgactcaattttggatgaaacgaaaccccctattcttattagttaacctgcacacttacacagatgggaaatatttgttgaggttgaaaggcaatgaataaaactcttcacttcttgtgtcagactggaaggaacggttcttgtcccaccaatgctttcctttatgtttacgaatagcagcttccttcttatgtagtgtgctgtccaagaaagatgccacacaacccgcaacaaaggcttttgattggaacgggacattgattatatcattgaaccatcttgctttggtgtgaac

SEQ ID NO: 224183 - DNA, 347 bp, Glycine max
ttttctttttttttttcctctttttttttttctcacctaaactttatggttttgggggggactctcttgcaaagatcaagaaaggcgccacacgaagaaaaggcgggtggccccagaaaaaaccggttttaatgtacttcaaagccggcctccaattacccgtcggaagaattggcccctctttgaagactggaaggcacacccaacacgtgggtaccaaggctcccataaactggcccggaagactcgattacatagctactgcagtgcttgatttctctgtcaatgctggaaaagccaacatgcacaactggattataatcaaacacatgctattgcatgtgatg

SEQ ID NO: 224184 - DNA, 557 bp, Glycine max
cagcgatcgaagtttcacatcagccttatccagtttagggtttcggttccttaccctacctttgacgtatcgaaaccttaaatttgggattaggtctgagcaatctggttggtagaacctttggtcttagagagtcaagttttatgtctggattagacgatcaaattcctactgccttcgatccttttgctgatgcaaatgctgatgactcgggtgctgggtcaaaggagtatgtgcatattcgcgttcagcagcgaaatggtaggaaaagcctgacaaccgttcagggattgaaaaaagaattcagctataacaagatacttaaagacgttaagaaagagttctgttgcaatggaacagttgttcaggacccagatctaggacaggttattcaacttcaaggtgatcagaggaagaatgtttctactttcctagtacaggctggtatcgtgaagaaggatcatatcaagattcatggtttctgagcgattggagtctcaagtggcaagccttatctgcctgactatgttgtaggcataatagatagataatccgag

SEQ ID NO: 224185 - DNA, 494 bp, Glycine max
aaaagttacagtttttttttaattattattaaattctaaaggaaataagatcgaataggaggtccattgaactgttttcatatttgtcttcaaagcaaataacacgcaatgttctgaaatccataatcccacatcacatagtaaaacataagaacagatcagaaataccacaatcacatacacaactccgattatctatctattatgcctaacacatagtcaggcagataaggcttgccacttgagactccaatcgctcagaaaccatgaatcttgatatgatccttcttcacgataccagcctgtactaggaaagtagaaacattcttcctctgatcaccttgaagttgaataacctgtcctagatctgggtcctgaacaactgttccattgcaacagaactctttcttaacgtctttaagtatcttgttatagctgaattcttttttcaatccctgaacggttgtcaggcttttcctaccatttcgctggtg

SEQ ID NO: 224186 - DNA, 487 bp, Glycine max
tcgaagtctgttccgttctgatcagaaagggaataacggtaacggagatatggggcttctgtctaacagagtaactagagagagcctgaaaccaggggatcacatctactcttggaggactgcttacatatacgctcatcacggttctctctctctctctctcttcacttttctattttaatttcctttatatatatatatatatatatatatatatatatatattgttttttcgggttctcttgtggaatttgtttgtggttcaaaggaaaatgaagtaggagttgcgaaaacagttaatgatttagaattatagattctgtacttgtcttaacaccaggagattcatagagtaaaatatgttataattttatttggaaaaatatgtttttagcctacgtactttcgataaaaaatgttattagtcattgtacttgagctttgatcaatttggttcctgaactttagaaaaaacaatggttttcgt

SEQ ID NO: 224187 - DNA, 555 bp, Glycine max
  unsure (1)..(555): unsure at all n locations
cacaaaaacaacacaatctcacactgttcccaattttcaacactttcaagttctaccatggcggcaggactctccgccgccataaccatgaaacccctcctccgtttccaccaacctcgcctccccaaaccaatcccaacaacactccctttctctcccttgagaattttccatcacacagcatcaccgataccccaaaatttttcaactttcaccgtttgtgtcctcatgcaggacccaaaacaaggcacccagatggaaattcaggcacaagaaccaccaccctctcctcctcagcaagttttgtcacaaaagttggctgagaaattggccagaaaagagtctgagagcttcacttacctcattgctgctgtcatgtctagcttcggcatcacatccatggcagtgttcgctgtttattatagatttgcatggcaaatggagggtgaagaagtgcctttgtctgaaatttttggcacatttgctctatcagtgggagctgctgtgggtatggagntttgggctagatgggctcacagggctctatggcatgct

SEQ ID NO: 224188 - DNA, 532 bp, Glycine max
gaaggaagtcccttcctttctaaatggatcagctaacaacttgctccaatttccaaagctagacaaggaaagaatgaagaacagttaagctcagaatctggaaccatcacttgccttgattttgcaccaaaatatacccatgaaggtgcagttctctattgttgcacttgttctattaggctccacactgtgtctttctggcctaattgtagctgacttgaactctgaccaacaagctctcttggagtttgcttcaagtgtcccacatcccccaaggctcaactggaagaaagattctgtttcaatttgcacctcatgggttggtgtgacatgcaactcaaacggcacacgtgtcgttggccttcaccttccaggaatgggattaatcggtaccattccagagaacagcataggaaaactagatgctcttagggtcctgagtcttcattccaatggccttataggaagtcttccttctaacattctctccattccttcactccaatttgcataccttcagcacaatggcttc

SEQ ID NO: 224189 - DNA, 589 bp, Glycine max
  unsure (1)..(589): unsure at all n locations
cacaggtgttggaggtaggaattattgttcattctatcatcattggaatttctttgggagcttcagagagtcctaaaacaataagaccactgatggctgcattgatttttcatcaattttttgaaggcatgggacttggaagttgtataactcaggcaaatttcaagaagttatctattacattaatggggttagtctttgctttaacaactccaatgggaattggaattggcatagggatcactaaagtttacgatgaaaacagtccaactgcccttattgtggaaggaatcttcaatgcagcatcagctgggatattgatttacatggcacttgtagatcttcttgctgcagattttatgaatccaagaatgcaaaaaagtggcagcctccgattaggagccaatctctctcttctacttggagctggttgtatgtctcttctggctaaatgggcttaagatagaatgagagtttttagtggaggagagtacggtgaacttttttggcccaacccaaaaaactttngtttttaatacatgcattggctttttaatagataatcaacacagcctaagctgttcatata

SEQ ID NO: 224190 - DNA, 571 bp, Glycine max
gtgaaacaaaagaaaacaaaagattaggttttgtgatgtcgggcatggagaggcttcagaggatgttcgcgggtgcaggtggagcgctgggccatcccccaccggattcccccaccctcgattcctccgagcaggtctacatctcctccctcgcccttctcaaaatgctcaaacacggaagagctggggtacccatggaagtgatgggtctgatgttgggggagttcgtggatgagtacaccgttcgcgttgtggatgtgtttgcgatgcctcagagtgggaccggtgttagcgttgaagctgttgatcatgtttttcagactaatatgcttgatatgttgaagcaaactggaaggccggagatggttgtggggtggtatcactcgcatcctggatttgggtgttggctttctggagtggacattaatacgcaacagagttttgaggctttaaatcaacgggcagtggctgtggtggtggaccccatcagagtgtgaaagggcaagtggtaattgatgctttccgctgataatccacaactatgatgctggtcaggaaccacacagacaac

SEQ ID NO: 224191 - DNA, 531 bp, Glycine max
  unsure (1)..(531): unsure at all n locations
cttagaattaagttagtagcgagagagggagaaatgaaggttgtttacttcttcgttgtgctattggctttggcatcctccattgcctttgcttatgatccaagccccctgcaagacttttgtgtggctatcaatgataccaaaactggtgtgttcgtgaatggaaaattttgcaaggatccaaagcttgctaaggctgaagatttcttctttcctggattgggacccggaaacacttcaaaccccctaggctcaaaggtgacagctgtcacggttaatgaaatattagggctcaacacacttggcatttccttggcacgcatagattttgcaccaaagggtttgaaccctccacacactcaccctcgagggacagagattcttgtagtcttggaaggtaccctctatgttggctntgttgcgtccaatcaaaacgataaccgtttattcacaaagtgctgacaagggtgatgtgtttgtgttccctattgggctcattcacttccagcaaaacataggttatggaaatgc

SEQ ID NO: 224192 - DNA, 535 bp, Glycine max
cgcaagcaaaaagaaagaatcccaggcgaggagaaagatggaggggaaggagcaggatgtgtcgttgggagcgaacaagttccccgagagacagccaattgggacggcggcgcagagccaagacgacggcaaggactaccaggagccggcgccggcgccgctggttgacccgacggagtttacgtcatggtcgttttacagagcagggatagcagagtttgtggccacttttctgtttctctacatcactgtcttaaccgttatgggagtcgccggggctaagtctaagtgtagtaccgttgggattcaaggaatcgcttgggccttcggtggcatgatcttcgccctcgtttactgcaccgctggcatctcagggggacacataaacccggcggtgacatttgggctgtttttggcgaggaagttgtcgttgcccagggcgattttctacatcgtgatgcaatgcttgggtgctatttgtggcgctggcgtggtgaagggtttcgaggggaaaacataatacgtgcgttgaatg

SEQ ID NO: 224193 - DNA, 467 bp, Glycine max
gcatatatatgactctggtgttatttttgattttgcaagtgaaagtacacaatcacagccgtacatcacacatgagttgggcctcttccaacttaaaagcagaggataacattggcccatgacgcgacacatgcaccacctaataatcataattttacatctttacatacaaaatacaaagactttaaattttaaaaagaagaaaagagataaacagatcatcttaatgaaatgaaaccaaaacccacaaacattggcttgatttttgttgttgttgttgttcccaacttgattaagcatgaaccgtttgattgaatcacttggacttgaagggaatggccctgattacgacctggtggtagagtgctgcaagagctgcaccgatgaatggtcccacccagaagatccagtgttcatcccaaccaaggtccttgttgaagatgatagcagcaccaagactacgagca

SEQ ID NO: 224194 - DNA, 558 bp, Glycine max
gtggtggagtcaggatatcatatcatgtgcactctctcactgccatgcctctcttattctcttcacactcacacttaccagtctggacgcttctctcccccttgttcttttatcttcacacctcatagacgctctcacagtcacttcctgactccatgctcctccctcagacagagagaaagagagagcaaaaagcaactaggcaagatcaacactgccccgtctgagtctggcttgaagcgcttgtttagtcccaataacaacaagaccgaagtcgaaggtgacgccgacgccgacgccgacgccgacgctgacctcgacttccaggatggaaccgccttgaagggcaccctcttggccggtctcttgctcctcggtgttgttggcggttttgcctccgttggctatatctacaaggaccaagtcaattccttcttgaaccacctctccgtcttcattgaaggttatggtcctgctggatatgcattattcgttgcccgttatgctggattggagatcctttgcattcctgccattcctttaaccatgtcagctgga

SEQ ID NO: 224195 - DNA, 389 bp, Glycine max
cttatacctaccaataccctcccccatcaactctgttcgacccaaaaaaaaaaaaacaacgacccacctatacaaacaaaaccctaaaatcatctcaaccctcctaatacttcataaaaaaagcccaccactacaaaaaacaaaaaacccccccctacaacacaaaaaaaaacccccacaaacagaccgaccccacccaccactcaatggacctccttaccccccatcatcaaacctgaaaactgcacccacagaaaaaacttgaccaaacaaaaaacccccccgttgaccctcaaaaaaaaaaaacccctcacttcaacaaccccaacaaaaacaaaacaacaaagctcccccccccgcctgaaaaaaaaaaacccccagaatttccc

SEQ ID NO: 224196 - DNA, 505 bp, Glycine max
  unsure (1)..(505): unsure at all n locations
ctggtccaaaggcttttgttagtgaatacgctgtgaaaagtgatgctgcaaacggaaatctcttggctgctgtggctgaagccgcatttcttattggactagaaaagaacagtgatattgtggagatggtttcttatgcaccacttttcttaaatataaatgacaagagatggattcccgatgcaattgtgttcgactcttatcaggtttatggaactcctagctattgggtgcagaaactttttattgaatccagtggagcaacatttattgactcgacactcagtacaacttcatctaataaacttgctgcatctgtaattatttggcaagattcttcagataagaaaaattacctaagaataaaggcagtaaactntggagcagccgctgagagtcttgacattgatttaagtgggttggactcaaatgtgcaacaatatggttctacaataacagtgcttacatcnaaccacgtaatggatgaaaaatcattcttggagcc

SEQ ID NO: 224197 - DNA, 563 bp, Glycine max
  unsure (1)..(563): unsure at all n locations
tataacattgccaaccttaacaaaattaggatttgattgatcagtgtcaaagagagggttatgtgcaaagggtaaaggatgaagaaggtgaaggatgcaatcttcaaggatctcttgaagttaataaagtagcaggaaattttcattttgcaactgggaaaagctttcttcagtctgctatatttctggctgatgtgcttgctttacaggataatcattataatattagccatcggatcaacaaattaagttttggtcaccatttccctggattggtaaatcctcttgatggggtaaggtgggtgcaaggacctactcatggcatgtaccagtatttcataaaggtggtccctacaatatacacagacattagaggtcgtgttatccattcaaatcagtattctgtgacggagcatttcaagagttcacagctgggtgttgcagttcctggagttctcttcttttatgacatatctccaatcaaggtcaactgtaaagaggaacatactccatgtttacatttcctgaccaatattngtgcaattattggaggtgtatttact

SEQ ID NO: 224198 - DNA, 549 bp, Glycine max
gctgcttcttccgccactcagcacttcgctccctctgtgcttcaccaaccatggccgaaatcgaagctaccgttccagatccctctcaaatcgacgtcaaacttttcaaccgctggagcttcgacgacgttgaggttactgatatgtctctggctgattacattggagtgtccccgtcaaagcatgctacatatgttcctcacactgctggtaggtactcagtgaagaggttcaggaaggcgcagtgccccattgttgagagactcaccaactctctcatgatgcacggaaggaacaatggaaagaagctcatggctgtcaggattatcaagcatgcaatggaaattattcacttgctcactgacctgaacccaattcaggtcattgttgatgccgtcataatagtggtccccgtgaagatgcaactagaattggttctgctggagtggtgaggagacaggccgttgatatctcaccccttagacgtgttaatcaggccatctatcttctaacaacaggtgctcgggaagctgctttcagaaacatcaa

SEQ ID NO: 224199 - DNA, 526 bp, Glycine max
  unsure (1)..(526): unsure at all n locations
tgttgacctggatgactatgcagcggatgatgatcaatatgaggagaagctcaagaaagagactcttgcatttttcatgctggcaacttatggagatggagagccaactgataatgctgcaagattctacaaatggtttactgaggggaaagatgagaggggcacctggcttcaacatctcacatatggagtttttggcctgggtaacagacaatacgaacactttaataagataggtaaagttgttgatgaagatcttagtgaacaaggtgcaaagcgtcttgttacatttggattaggcgatgatgatcaatccattgaagatgatttttctgcctggaaagaaactttgtggcctgagttggatcagttgctccgagatgaggatgatgcaaatactgtctctaccccatatacagctgctattcttgaatatcgagtagtgattcatgacccgactntcacatcatcctatgantatcacgtaaccgtggcaaatgggaatgctgtgtttgatattcatcat

SEQ ID NO: 224200 - DNA, 511 bp, Glycine max
caaacactcttctcttaagctctagtagttaagaaacattagttgaagaaaataagaaacattatacctagctattagagtttaagatggcttcaaaaacttgttcctcccttgcccttttcctcacactcaacctcgttttcttctcacttgtctctgcatgcggttatacaccatgccctggtccaaacccaaagccaaggcccaaccccaaccctaaccctaaccccagcccaagtggctcgtgcccccgtgacgcactcaaactaggtgtatgtgccaatgtgctaaacttggtgaacgccactttgggtcaaccaccagttaccccttgctgcacccttctcgatggtctcgttgaccttgaagctgcagtgtgcctttgcactgccctcaaagcaaacattttgggcatcaacctcaaccttccaatctccctcagcttgcttctcaatgtttgctcagggaagctccacgtgatttccaatgtgcctaatcatggcccatgagc

SEQ ID NO: 224201 - DNA, 565 bp, Glycine max
cgtttacacatctctccaacctttcactttcgtttctcagttttattcgaatccctctgtcaatctcctttccaaatggccagcgttgaggttgcacagcaaacaccaacaacagttccagaaaatgaaacaaccgaggtaagcaagacccaggaaacaaccccagtcactgaggctcctgcaacagaacaaccagcagctgaggttcctgcaacagaacaaccagccgctgaggctcctgccccagaatcaaccaccgaagcaccaaaggaagaaaccaccgaggcaccaacagaaacagtagaaaaaacaactacagaagtagccccagaggagcctaaagaagttccagttgagaccgaggaggtggtggcaaaggagacagaggaagagaagccagcagaagagaaatcagaggagaaaactgaagaagtgaaagaagaagcagaggagcctaaagaaactactgaaacagaatcagcagcagcaccaccaccagcaaccacagaggaagagaacaaaccagctgagtcagttgaaaccccagtagaggttcctgttgaga

SEQ ID NO: 224202 - DNA, 348 bp, Glycine max
gttaatttgcctggagtgatagtggatcttccaactttgacagacaaggacaaggggggatgttgtcctggggaattccgaataaaaccgacatgattgctctttcttttgttcgaaaagggttctgaccctggtggaagtcaggaaagttctgggaaaacatgctaagaacattatgctcatgtctaaggttgaaaaccaagaaggggttgcaaattttgatgaaatccttgcaaattcagatgcatttatggtggcacgtggtgaccttggaatggaaacttcaatagagaagacttttctcgcacagaaagtgattatttacaagggcaccatccaatgcaaacc

SEQ ID NO: 224203 - DNA, 396 bp, Glycine max
  unsure (1)..(396): unsure at all n locations
atcaatcttctgagagtgtttggttgaaagtagcaaagatgtttcctttcgggcaaaagggtcaaaagataaaggggactatggtggttatgcagaagaatgtgttggatatcaacagcatcaccagtgttggagggatcgttgaccaaggcttaggcttcataggcagtgcagtcgatgcacttacttttgcagccaccaaaatctccatccagttgattagtgctaccaaagctgatggtgggaaaggaaaaattggaaagagtacaaatttaagaggaaaggatacattaccaaccttgggagctggcgaacaagcatacgatgttaattttgaatgggacagtgacttcngaattcccggtgcattttatattaagaaccttcatgcaaaat

SEQ ID NO: 224204 - DNA, 560 bp, Glycine max
ctctcttctctcttccttttcagatcacacgcacacagttacgctcttcaaatctatctcttctcagcgattcttgcttcaagttccagaaatgggtgtggctcaaaacattcccgatgcggaggagggaaccttggagattggaatggaatacagaactgtttctggagttgctgggccattggtcattcttgataaagttaagggacccaagtttcaagagattgttaacattcgcttaggagatggtactactcggcgtggacaagtgctagaagttgatggtgaaaaggctgttgttcaggtctttgagggtacatctgggattgacaataaatttacaactgtgcaatttactggagaggtgttaaaaactccagtatcattggacatgcttggccgcatattcaatggttctggaaaaccaattgataatggtccacccattttacctgaggcttacttggacatatcaggaagttccatcaaccctagtgagagaacctatccagaggagatgatacagacaggaatatctaccattgatgtcatgaattcta

SEQ ID NO: 224205 - DNA, 529 bp, Glycine max
  unsure (1)..(529): unsure at all n locations
aaccaatggacttcgacgagtacgaatacctggagaagacagtggaggaagacatagattcctccaagaagaagaaggacgtcaccgacaagagcgagaggagttaccgaaagccccgcgacgtcgacgacgatctcgacgccgatgacagaaagagcaagaggtctagggtcgacgacgagaacggcggttccaagagagatcgcgacagagacagagagagagaccgtgaccgcgaacgttcctctggtcgtcacaggagcgagagggagagagacggagagaggaaagacagggataaggatagagagaggagggataaggataaggataaggataggagagaccgtgatagggacagggatagggatagggatagggaaaaggagcgcgagagaagagagaaggatagggagcgagagagggaaagagcggagagggagagatccacaaggagcaggagtcgctccgagagggacagagatagggagcgagattttgatatgcgcgatggccggagatttnggat

SEQ ID NO: 224206 - DNA, 512 bp, Glycine max
gttaaaatgtgcattgggatgcgcaacggtaacctgatcataaaaatcgccaatatcaggacattatcatttttgtaatcatacatctaatacaattcatgaatcaatctataaactagaacttaatgtatgaaaactaagaccacaaaaaattatgcatattgtatcttcaggagcctcgagccatgtatgaacttcctcaaacttcccctttaaacttggcttcatacaactctggttgcatgaagacagctgaaattaacctgcgtgcaaaccatctcatgtgcattgcacgttgagcaccacttgccgcttccactgtatcaaaccgcaaatacacaaaacctgaactttttttgtcaacaaaaatatgcttcacccggccatatttagaacactcttcctctacatcctctttaatgtctatatcaaaatcaggttccgtctcagtgctcgggtcgaacatattctttaaaaagtaacagtcgctggggtttcctacaggttctact

SEQ ID NO: 224207 - DNA, 532 bp, Glycine max
ccggaacacgacgaatcggaggctctgacgccgcagaagaagcttctcgacaacatcgatcaggttgaggaagcggtgcgcgaagaactgaacaagctgaagagaactccgagcgcgaagagaacagagagggaaaagcgggttcgcacattgatgtccatgaggtaaacgaattgagattttgattttttttttcatccacagagccataggcagcagagcagggttattagagtcattttactctggactgagttgattcagcgggacggtgtttttcggttcgctttgcttgtgtcttcggcttgaagttgcaacatattattctctagttttgttttttctaactttcttgttggaacttttttgattagtagtgttcgttgatagatatatccatcattttcttgtgatggttagtgattcccagctcctgttgtacatatttcccatacatttcgggttggtgattacttcttgtgtaccaattgttaaacagttcaagataacaatcgattcgttttttggtgcc

SEQ ID NO: 224208 - DNA, 427 bp, Glycine max
ctactaccggacgttttagacttcttcaaggatgttgctaacctagagccagcagcaaaggtgctggacttctcaaaggctcttcaggtcattatgttgataggcattggactgacactgacttaaataatttgatccagacgcaattgaagtttttggctgaggagatgcaagctataaacaaaggattagaaaaagtggtacactgaactatcaacctatgaaaatgatgggcctatatcaaaaactgtctgcaaggtatagcgtcatgccttaaacactattgacttatcttttcttaaattgcccttgatcattttcattgcttcaagattcatatatatatatatatataaggaatgatagagttactcttcatcctcagcattcattgtcttggactctaatcgataagattagtgactta

SEQ ID NO: 224209 - DNA, 512 bp, Glycine max
cgcgctttctcctcactatctcacttcacaaaacccttttctgtttccaatcgttctcctcacattctcgccgaagctcactccaaatgaacggagaaggcctcgccgccgacgactcctcgccggatcacgtcaccaaagactggtactccgtgccggagctccggttgcgcgatcatcgcttcaaggttcctctcgatcactctctgggaccccattcttctcccaagatcactgttttcgctcgtgaagtcgttgcagttgggaaagaagagaaaaacttgccatacttattatatttgcaaggtggacctgggtttgagtgcgggcggccaactgaatcaggtggatggactaaaaaagtctgtgaagaattccgtctcatcttaatggatcagcgaggaacaggcttatcaaactccgtgactgtgtcatcaatgtcacagttcaagtctgctgatgaattagctgacttcttaaaatatttccgagcggatatatagtaaacgatg

SEQ ID NO: 224210 - DNA, 442 bp, Glycine max
gggaggcaaagaagagatgtatagtgtatttgattccacatggcaaatataatttttcacatttagggagaacttaatagttatagcatccacatcctagacgcaatttcttatttctcaactgttttttcaaacacgtataatggtgatcaaaatagaggtttccttccatttagcatccccaacaattgatcaataactttgctcccatcatcacgcaagccagaatgcatgaactcattagttatccatggcctaatccctgctatttgagaagctgtttccatggccagcttaaaattcacgtacaagtcttcatagtacacagctgccgcaacaagtaccttgttgatattcagaacctgaacatcatatagtggaggccagtccttcttctctgccaatatatgagctgcctctttgaaaggcttcaatgcatgaa

SEQ ID NO: 224211 - DNA, 495 bp, Glycine max
gttgttggtgggtttcagcgttccgcttcaacttcaaattctcagtgaaaccaattcagttcagtccaaatcccaaatccgaagtgagatttgcgatggagaggcttcagcgaatgttcgcaggtgcaggtggagctctagggcaccctcccccagattccccaactctcgattcctccgagcaggtctacatctcctcactcgctctcctcaagatgctgaagcacggaagggctggggttcccatggaagtgatgggtttgatgcttggagaattcgtggacgagtacaccgttcgtgtggttgatgtcttcgcaatgccgcagagtggtactggtgttagtgttgaagctgttgatcatgtttttcagactaatatgcttgacatgctcaaacaaaccggaagaccagagatggttgttggctggtaccattcgcatcctggatttggctgttggctctctggtgttgacatcaatacacagcagagttttg

SEQ ID NO: 224212 - DNA, 489 bp, Glycine max
aagactttaaataacagatgtatggagctacgtaaaacttgcaatcatccatccctgaattacccattacttagtgaattatctacaaattcaattgtaaaatcttgcgggaaattgtggatcctggataggatccttataaagcttcaaagaactggtcatcgagttttgctgtttagtaccatgacaaaactcctagacctcttggaagattacctgaattggcgaagacttgtttacagaagaattgatgggacaactagtttggatgaccgtgaatcagctataatggactttaatagccctgattcagactgtttcatcttcttgcttagtattcgagctgctgggagaggccttaaccttcagtctgctgacacagttgtcatttatgatcctgacccaaaccctaaaaatgaggagcaggctgtggccagagctcatcgtattggacaaaaaagagaagtcagagttatctacatggaagct

SEQ ID NO: 224213 - DNA, 495 bp, Glycine max
  unsure (1)..(495): unsure at all n locations
gcattttcagaggaacaatggcgggtagggtttcgacgtgcttcttcttcgtgtttgctctttctctccttcttccttttcagatctccgctgaggaatcatcggagaaagagttcgtactcacattggatcactctaactttcacgacactgtcagcaagcacgatttcatcgtcgtcgagttctacgctccatggtgtggccactgtaagaagcttgctcccgagtatgagaaagctgcttctatcttgagtagtcatgatcctccggttgttttggctaaaattgatgccaatgaggagaagaacaaagaccttgcatctcaatatgatgttaggggatacccaacaattaagattctgagaaatgggggaaaagaatgttcaggaatacaaaggtccccgtgaagcagatggcatcgctgactatttgaagaaacaaaagtggtcctgcttcaacttganataaatctgctgatgaagctactgctttcat

SEQ ID NO: 224214 - DNA, 519 bp, Glycine max
  unsure (1)..(519): unsure at all n locations
cagttttataggttttggtggctgaaaccctgttcgggaattcagtggctatggctgcaaatgaagatgctgtacaggaatttacaccaaagaagaagccaccttcagaggatgagaagaggaagaagaaaattgtgcctgggagtttaatgaaagctttgatgaggcctggtgggggtgatgctggaccttctgatggtgaccagattatctatcactgcacaattcggactttggatggagtacttgtggaatctaccagatcagattatggaggcaagggcatcccaataagacatgttttgggcaaaagcaagatgttattgggattgctagaaggaattccatcaatgttgaaaggcgaagtggcaatgttcaagatgaagcctcagttgcattatggggaggatgattgtcctgtttctgctcctgatggttttcctaaggatgatgaacttcattttgaaattgagctgataagaattttcaaagccaaggttgntactgatgnnattggga

SEQ ID NO: 224215 - DNA, 546 bp, Glycine max
  unsure (1)..(546): unsure at all n locations
atctcactcacaaatcacaatgctcttcctttcttccttaataataataccataataatctgttacgttacggggcccaaatgtctgttacggagctcaaggagcgtcactctgctgccaccgacaccgtcaacaatctcagacaccgtttaaagcagaagcgcctttcgttgctcgacacagatatttctgggtatgcaaggtctcagggtagaacgcctgtgacctttggacctacggatctggtttgctgtagaaccttgcagggtcacacgggaaaggtgtattcattggattggacttctgaaaaaagtcagattgttagtgcatctcaagatgggcgattaatagtgtggaatgctctaactaggcagaaaattcatgccataaagctaccttgtgcatgggtcatgacctgtgctttttcaccaactggtcagtctgttgcattgtggtggtctggacaagtgnttgttctattttcaatcttaattcgccaactgacaaggatgggaatctaccttgttcccgatgcttagtggacat

SEQ ID NO: 224216 - DNA, 580 bp, Glycine max
  unsure (1)..(580): unsure at all n locations
cggctcgagctcgagccgctcgagccgttcccaaccactactactcactcactgcagatctcaattgcatcgctgtccatggctaccatcgttagcatcaaggcccgccagatcttcgacagtcgtggcaatccaactgtcgaggtggatttgacttgctccgatggtacttttgccagagctgctgttccaagtggtgcatccactgggatttatgaggcccttgaattgagagatggaggatctgactaccttggaaagggtgtatcaaaggctgttgacaatgtgaacaccgtcattggccctgctttgattggcaaggacccaactgagcagactgctattgacaacttaatggttcaacagcttgatggaactgctaacgaatggggttggtgcaagcaaaagctaggagcaaatgccatattggcagtgtctcttgcagactgcaaagctggtgctagcgtcctgaaaattcctctttacaagcatatngctaatatcgcgggtaacacaaagttggttttgcctgttcctgctttcaatgtcattaatggtggatcacatgctggaaacaaac

SEQ ID NO: 224217 - DNA, 525 bp, Glycine max
attaaagctaaatatcattaaacacctttcaaagtcgtaagacataactgtcctagctctgtgaatcagaactcaaattattggcaaggtctttatcataccaagactaatgttccaactatcaacttatatatcacaccaaaaaccgcgcatccaaatctcaatgctcaaactcgtgtggatctccaggttttttccacttgaaaactttagtagggttcaacgggggtacggaagttagctccggcgtacactgcttcagcaccaagctcctcctcaattctcaagagctggttatatttagcaagacgctcagacctgcatggagctccagtcttaatttgacccgtagccaaaccaacagaaaggtcagcaatgaaggtatcctcagtctctccacttctgtgactggccatgacaccccatccagcttttttggacatcctgacagcttcaatactctcagtcacagaaccaatttggttgaccttgaggaagagagcattgcatgctttagtatcaatt

SEQ ID NO: 224218 - DNA, 364 bp, Glycine max
caccaacgaggttgagtgacttcaagacaagtagggcatacttctattgggtgactagagagcagggttcatttgactggttcaaaggggtcatgaacgaagtggccgaagaggaccgaaggaaagtgattgaactccacagctactgcaccagcgtctacgaagagggtgatgctcgctctgctcttattgctatgttgcagtccctaaaccatgcaaagaatggagtggacattgtctctggcacacgcgtcatgtctcactttgccaaacccaattggcgcagtgtctacaagcgcattgcgcttaatcatccagatgcccgaattggggtattttactgtgggccatcagcccttaccca

SEQ ID NO: 224219 - DNA, 534 bp, Glycine max
  unsure (1)..(534): unsure at all n locations
ttgtgatcttagtgagtgagtgaggaagcattgagagttggtggaaattaaggtcaagaatcaaactgaccaaggagtattcaggatatcatggacgagaatggtagctcaagtaatgcacccaagaacaagagaaacctacctgtctcagttttcttcaaagatgcaagacatgttttcaagatggattccattgctaaggagattcttgggattgcattcccatctgcactggctgttgctgctgatcccattgcttctcttatagacacagcattcataggccatttggggcccgtggagcttgctgccgcaggagtgtccattgctttgttcaaccaagcttcaaggataaccatcttccctttggttagcatcacaacttcctttgtggctgaggaaagtaccattgaaaaaatcaatacagaaaagaagttaactgataagaccaagtccaaggaagtaatgcacgatgatcattcgcttcagacatagaaaaggtgcatncaagagaaaatgagactccacagaatc

SEQ ID NO: 224220 - DNA, 513 bp, Glycine max
ccacggtctcattggtgcccaaccgtgattgcccatcgaatgctcagttcctagatacatatgttcacgctgctgatggtactccgttactcatcaagaacgcaatctgtgtctttgaacaatatggcagcatcatgtggcgtcacaccgaaacaggcattcccaatgaatcgttcgaagaaacgagaacggaagtcaacttagtggtaagaactgttgttaccgtgggcaactacgataacatcattgattgggagtttaaaacaagtggctcaatcaaaccctcgattgctctctcgggtatattggaaattaagggagtggatattaagcacaagagtgacatcaagagcgatcaacatggtatcttggtgtcggcaaacagcattggtgtttaccacgaccacttctacatttaccatcttgaccttgacattgatggtgttgccaactcttttgagaagacaagtttgaagactgtaagagtgacagatggaagttcgaagaggaaaa

SEQ ID NO: 224221 - DNA, 493 bp, Glycine max
gtcaagttcaagtaaacttctcattgatataataataagcgaagacatatcaaatcattattcttgcacatgcaataagcagatcgcatttcacattatccaaggaacacatctagttgtagcactcgaagcacactaatataatggaaatggctggctagctagttttacttggggcaaccaggccattggacatccgggggagaaagtgttttaagaaccggattcctctcgaagaaattggttggcctgagctcgaatgcagtgctcaataatggcattatggggaagtcttcctgtgctggaacatgatgaattcccacaacgtgccacagcacaatgtccttgttgttaatgtctctattctttttggtccaaacggctaaagtatcatctccatggctgtgatcaacgtagagtccaccagcccacttctcagtcctattggatggagtgacccacacattgaaattggtaaaagcgccacgtattt

SEQ ID NO: 224222 - DNA, 520 bp, Glycine max
  unsure (1)..(520): unsure at all n locations
atttcaaatccaatcatggggagctcaaccttctgtgccttcttcctcctgtgtgcaatcttggccgtccacgtggcacaatcctcatcctccaccctcgacctggacgccttcttcctccctctcaagtccggctgtcgcggatccgtcgccgagtgcagcctcctcgccggcgacgacgccgagtttctgatggagtcggagagcaaccggcgcattctagcaggaaggagctacataagctacggtgcgctgaggaggaacactgtcccttgctcccgacgtggtgcttcctattacaattgccgccccggcgctcaggccaacccctacagccgcggatgcagtgctatcacccgatgaaggcgttgaatctattcttcttctctttttttttttatttcatttttttatttatattnttggaattgatgaaaattgttatattattattggtcgtgctactaaatatatttacacaagtngagaagagaaagagaagtngagatgaataaaatct

SEQ ID NO: 224223 - DNA, 603 bp, Glycine max
ttcgctttcaccgaagaataacttgactttcccgaactccacctgagaaaaagatacgcttaattcgcaggcgcgtcttgtgttggacaacaaccacaagatgattaacttcgaagaaaccgagttgcgactcggcctccctggcaacgactcagcactcaagggaagtgctgccaagagaggcttctctgaaactgcttctgttgatttgaagcttaatctttcttcttgcattaacgactctgcctcggattcaccctcatctgtgtctacagagaagcccaaagagaacaagactaccactgctgaacctcctccagctaatgatccagcaaaaccacctgcaaaggcacaagtggtgggttggccaccagttaggtcatttagaaagaacatagttcaaaggaacagcattgaagaagaggcagagaagagcacgaagaatgctttcgtgaaggtgagcatggatggtgcaccgtatctacgaaaggtggacataaagttgtacaagagctaccaggagctgtcagatgcgctggctaagatgttcagttcttcacgattgaaagtgtgggtcccagggatgaagggacttatgatgag

SEQ ID NO: 224224 - DNA, 504 bp, Glycine max
cttgcagtaatggcttcaatgaataaccaaaaagaaattgagctctttgagggccaatctcttctgtacatgcagctatatgggcacctaagacctatgtgtcttaagtgggctgttcaactaggtattccagacataatacagaaccatgccaaacccatttctctttctgacttggtctctactcttcaaattccaccagctaacgctgcttttgtgcagcggttcatgcgcttcttggcacacaatggaatctttgagatccatgagagccaagaagatcatgaactaacatatgctctaacccctgcatcaaagcttcttgtcaatagtagtgatcattgtctatctccaatggttctagcgtttaccgatccacttcggaacgttaaataccatcacttgggggaatggattcgtggggaggacccctcagtatttgagacagcccacggaacaagcgctttgggacttcttgagaaaaatcctgaatattttagtctc

SEQ ID NO: 224225 - DNA, 556 bp, Glycine max
  unsure (1)..(556): unsure at all n locations
taagaattgaaattgggccaaaggatttagcaaataagcaggttcgcgctgttcgacgtgataatggtgcaaagatagacattgctagtgctgatttggttgtggaaataaaaaagttgctcgatactattcaacagaacctgtttgatgttgcaaaacaaaaacgagatgaatgcattcagatcatacacacttgggatgaatttgtgcaagctttgaaccaaagaaaaatgatcttagctccttggtgtgacgaggaggaggttgaggctgatgtcaaagcgaggacaaagggtgagatgggagcagctaagactctttgcagtccctttgatcagccagaactcccagaaggcaccaagtgctttgcatcaggaaagcctgcaacaaagtggacatactggggaagaagttactaggctactnggctgtgattgtggtattttctggaattaatttggtatttaatggtaccttgtacgaatttgtggatcacacagatattagttttcttctcttgggaatatttntcaactgatagttttactttgatttt

SEQ ID NO: 224226 - DNA, 518 bp, Glycine max
aaaaatcattgtaaaactatcagttgaaaaatattcccaggagaagaaaactaatatctgtgtgatccacaaattcgtacaaggtaccattaaataccaaattaattccagaaaataccacaatcaacagccagtagcctagtaacttcttccccagtatgtccactttgttgcaggctttcctgatgcaaagcacttggtgccttctgggagttctggctgatcaaagggactgcaaagagtcttagctgctcccatctcaccctttgtcctcgctttgacatcagcctcaacctcctcctcgtcacaccaaggagctaagatcatttttctttggttcaaagcttgcacaaattcatcccaagtgtgtatgatctgaatgcattcatctcgtttttgttttgcaacatcaaacaggttcttgtgaatagtatcgagcaacttttttatttccacaaccaaatcaacactagcaatgtctatctttgcaccattataacgtcgaacagcgcgaacct

SEQ ID NO: 224227 - DNA, 495 bp, Glycine max
ctcgagccgaatcggctcgagcaacactattcttcttcgcagcaatggcgcgagtggatctggacgggaaccccatgaaggcacttacgatctgcatgatcggcgctggcggcttcataggctcgcatctctgcgagaagctcatgtccgaaacccctcacaccgtcctcgccctcgacgtctacaacgacaagatcaaacacccttctcgacccctccgattccccctgggccggccgaatcaccttccaccgcctcaacatcaaacacgactctcgcctcgaaggcctcatcaagatggcagatctcactattaatctggctgccatttgcactcccgcggattacaacacccgccctctcgacaccatttacagcaatttcatcgacgcgctccccgtggtgaaatactgttccgagaacaacaagcgccttatccatttctctacttgcgaagtgtacggaaagacgattggagcctttctccctaagata

SEQ ID NO: 224228 - DNA, 466 bp, Glycine max
gtcgtttcggggcattcttgtgcactcagttactctctctctctctggagcgtcgtcgtttcgttagggcacaaaaccccttttcggatcggtggagcaaggcctcgccggcgagattcccgaggctgttcaatcagcgatcgagcaccggcgaaaagcggcgaagatgaaggttttcgtgaagactctcaagggcacgcacttcgaaattgaagtgaacccttcggacacgctttctgaagtgaagaaaaatatagaaactgttcagggtgcagatgtctatcctgctgcacagcaaatgcttattcatcaaggaaaagttctaaaggatggtactactttggaggaaaataaagtagctgaaaatagttttattgtaattatgttatcaaagactaagagttcatctggtgaaggatctactacttcaactgctgcttcagttaaggcaagtgcaactcctact

SEQ ID NO: 224229 - DNA, 492 bp, Glycine max
aaacaattatacaagccaaacagccctgtataagaatatggataaaatttctaagagaagaaaatgatgaatacctgtgcaataatgcagtgattaaaatatctcttgtccattcgagacttgtcattatcaaatattacctcattacataacaaagactgttcaaaaggaaacataaaacaactattttgacaaattggaaaggagatctaattattcatcaaactcgtgcatgtgatctaaaaggtagttggcagccagctcctcatttttgttacaagcgaagtacacctccaatacagttgcacgatcaaatcccattgcttcgagacgttcaattgcttgccgttcctcaggggtgactgtcactgcttgcggcatggcactagctagctgtcccagtatatatccctcacccccttaacgggttcattaattaggcgaaggaagtcaacttgatgctcttgaatcaatcgcataagatgaggattt

SEQ ID NO: 224230 - DNA, 558 bp, Glycine max
ctagactcttccttttctcttctctgtctaaggggtgccctgagatcacattgaacaatggtgaaggctgtggccgttcttggcagcagtgagggtgtcactggaactattcacttcgttcaggagggaagtggtccaaccaccgtaactggatctcttgctggtcttaagcctggtctccatggtttccatgtccatgccttgggggacactaccaatggttgcctctcaactggatcacatttcaatcctaataacaaggagcatggtgcccctgaggatgagaatcgtcatgctggtgatcttgggaatgttaatgtcggtgatgatggtactgtcagcttcactattactgacagccagattcctctcactggaccaaacaacatcataggaagggcggttgttgtccatgctgatcctgatgatcttgggaaggtggtcatgagcttagcaaaactacctggaatgctggtggcagagtagcttgtggtatcattggtctgcacggataaactaatcacatgaaagtggaaacgtgctttagatttgtggaat

SEQ ID NO: 224231 - DNA, 507 bp, Glycine max
  unsure (1)..(507): unsure at all n locations
cgcagaactttgtttcccaatttccattgcctccgcttccacctcgcaaccatgatcatcccggagaagaaccgcaaggagatctgcaaatacctcttccaagagggagtttgcttcgcgaagaaggacttcaatttggccaagcaccctgagatcgacgtgccgaatctgcaggtgattaagctgatgcagagtttcaagtctcgcgagtacgtgagagaaacttttgcttggatgcactattactggttcctcaccaacgatggcatcgagtttctcagaacttaccttaaccttccttccgaaattgtccctgctactttgaagaagcaagccaagccacctggcaggccctttggaggcccatccggtgatcgccctagaggtccaccacgctttgaaggggagcgtaggtttggtngtgaatcgtgatggataccggggaggtccccgaggaggacctggtggtgactttggaggagacaagggaggagctcctgctgacta

SEQ ID NO: 224232 - DNA, 501 bp, Glycine max
  unsure (1)..(501): unsure at all n locations
aacaatctttgttccatttcggcatgaaaccctaattcactcgcttctcgatctcgttagagcaatctttccacgctcgtcttcgcgctccatctgtacaagaagatccgtcacgagcgttggttatacgatggatgggaacaaggacgacgcgttgaaatgtttaagaatcggcaaagaggcgatggaaagcggcgatcggtcacgcgctttgaagttcgtgacgaaggcgcgtcgcctcgaccccactctccccgtcgacgatctattgtccacgatagaggtggatgcaggggatcaggcccccgccgccgaggcggagggccccacgaagcccactgatcaaccttctatccgccggagggccaccggggcggctgcgaccgtctcggccggcgcctcgtcgcnctcgtcctcttcgccctcgtacaccgaagagcaagtctcaattattagggaaattaagaggaagaaaaacttttatgagatattgggattgga

SEQ ID NO: 224233 - DNA, 476 bp, Glycine max
gagaaaatggtgttgtctgatctggagatctgcaagccaacttcaagttctcacaataaagttggtagtatttctagatctgggagagatctgccaccagctcattacttgttcaaaattgaatcatattccgaattgatgaacacaggagtggagaagtatgagactaatgttttccaggctgggggatacaaatggaggctgatactctatccaagtggtaatatcaaaagcaatggcaatggttacgtgtccttatacttggcaatagcagataccgagaagctttctagcggttgggaggttgacgtaaacttcaagctgttcgtctttaatcagaaaaataacaattatttaaccatccaagatgcggatggcaccgtaagaaaatttcaagaaatgaaaacagaatggggttttgagcaattaatttcgttggagactctcttagattcatctaatggataccatgttga

SEQ ID NO: 224234 - DNA, 584 bp, Glycine max
  unsure (1)..(584): unsure at all n locations
tcgggatcacagaaaccaacaacagttcttgcactgaggtttcacgatgttgctggaacttgcacttggtttgtttgtgttagctttgtttctgcacttgcgtcccacaccaagtgcaaaatcaaaagcacttcgccacctcccaaaccctccaagcccaaagcctcgtcttcccttcattggccaccttcacctcttaaaagataaacttctccactatgcactcatcgatctctccaaaaagcatggccccttattctctctctccttcggctccatgccaaccgtcgttgcctccacccctgagttgttcaagctcttcctccaaacccacgaggcaacttccttcaacacaaggttccaaacctctgccataagacgcctcacttacgacaactctgtggccatggttccattcggaccttactggaagttcgtgaggaagctcatcatgaacgaccttctcaacgccaccaccgtcaacaagctcangcctttgaggacccaacagatccgcaagttccttagggttatggcccaaagcgcagaggcccagaagccccttgacgtcaccgaggagcttc

SEQ ID NO: 224235 - DNA, 389 bp, Glycine max
atgtaaccttatttacttgattaagtaccagtcacaccgtatgggaatgatgattatgaatacatacaaagcaactgcgatggcaagacactactattgtatatgatgattatcttaattcagaaaggagtttagatgcaacgccgatccttgcaagtggaacacaaacaacactatgtgcccttggaactgtgaggccagctctctcttccatgctaacttgagcattatcacctttcaatatttctccttgagggcccaccacttgccggacaaagcattgtatgagagatgcaagaagtgttgccatttctgtagtaggcatattgtcaccagggcacattcttcttccagacccaaatgggaagagttagaaatgctggccccta

SEQ ID NO: 224236 - DNA, 355 bp, Glycine max
gctgttttatgtcctctaatttatttttattttttatacccatggccttctgtccaatcgcaataaatccccgttacccttttatctcctcattctccctccggtcttcttactctcaacgatgtgggatcagagtgtgaaatgaaaccatgagtctcctctttccaactttgataatctcattggttattcttctcgtcactgttaaccaatgttgcgctctcagtagagacggtgttctgttactctccttcaagtacgctgtgttgaacgacccactctacgttcttgcaaactggaactacagtgatgagactccatgttcctggaacggagtttcttgttccaacgaaaa

SEQ ID NO: 224237 - DNA, 467 bp, Glycine max
attccttaaaaatcaattagcaaatgaattggcatggagatggtcaatggacttggcacaattccaacacacaatattgaatttaacacgatgacctattggtcaatcataaggacactgggagtgtaatgtatgctctttctacaaacccagggtggggcaaatcatggtttagacgctatcatgataagaggaagaagacgagaaggaggatgagatcttttcaagaacttgttacgcctctttcattggagggctttgctggggaatgctaaagacacaactataccctagctagaagtatggcaacaagggctggtacctaccctacatgtcaggccgtataaccatatcaaccatgcgcaaggcccgggtcttatgctgcagcaaaagcccgggaccctggcccatatgatccaaaaccacaatctgtcctgtttgctactcaagaaacattaccccaaaag

SEQ ID NO: 224238 - DNA, 444 bp, Glycine max
  unsure (1)..(444): unsure at all n locations
tgaattagggtgggtagagagacaaagtaagagagagagaggcgtttgtgttgtgttgtgtctcataaacctcacactctccctcactattctccagcctccactcgctgaaagagactcctactcgtcaatcattgtgaagaaaagaagtgaacactgactctgttattgttctgaatttcctcaccctatacaactagttttaacgaacatggaaactgaaaagtctaatgtttcaaaggctgaagaatttaaactccttgccaatgaagcattcaatgctcgaaaattctcccaagccattgatctatatacacaagcaattgagctgaacagtcaaaatgcagtttacttttctaatcgtgcctttgcccatcttcggctngaggaatatggtagcgcaatacaagatgccacaaaggctatngaaattgatcctaaata

SEQ ID NO: 224239 - DNA, 495 bp, Glycine max
gctatttcgatcactagctagaatggcaaacaacggtgatgttgttaagatcaatattgaggagatgctggagatgctggagggggcaaaggcacccctaattactgagtgttgcatttacaaagtgccgtttagtatccgaagacacaacgaaaaagcctacaccccagaggttgtttctattggcccttttcaccacggccatcctcgcctccaagacatggagaaacacaaactcttttactccaaggcttttctcaaacgaactcaaacaactttggacactttgatcggcaacattcaagagatggagcccgagtttcgtcgctcttattcacacactcttgagttcagcatggagcaactggtcaaaataatctttatggattgtgcttttatactagagctcttttgcagataccactatcgagaatggaaagaggacgacatgtgtcttccaaaaccttggttgacgagtaacatagtgtatgattt

SEQ ID NO: 224240 - DNA, 523 bp, Glycine max
  unsure (1)..(523): unsure at all n locations
gatgatggaagtgatgatctgtgagaatttccggtattcaccactctccatcttatcttcttctccttcacctcgttgccatctctctgttccatcttcttctttgaggattaaaccttcttcttcatcttcatcatcatcatctgtgtcttgttctctcatggagaatcaggagacccaacgcagcaaattcatggactttccgttcgtttcatctgcccagaagaacctcatggttgatctcgtttcaacacttgagaatcgctttcactctcagcttcttccttgcacactcccctctgatgttcagtattaccaaagccaaactgccactgcccaagcttcccttcatattagaccagctcataatgactcccagatagattttgtgttgggaagctgggtgcattcagagctaccaacaggagggtccttagatataacaagtctttcagcctatctcaacagctcaactgatgcgccaattntgtgtttgaaatgatccgcagtagtccaacaatgc

SEQ ID NO: 224241 - DNA, 527 bp, Glycine max
  unsure (1)..(527): unsure at all n locations
tttattaaagtctttgcgtgcaatctgacatctcttttcaatctcaaaaaggcattgtgaagaaactaaaaacacaagcgcgtttctcttgttcccttcttctcttttggagttttttaaaatgtgtgaaggacactaatgggttcacgggttctaatcgagaatttaccaagggggaatttttgtaccctgctgttagttttgtgggtttgtgcagttacagcctctgtgacttatgatcacaaagccattgttgttaatggccagagaagaattttgatctctggttccattcactacccaagaagcacacctgagatgtggccagaccttattcaaaaggccaaagatggaggcttagatgttatccaaacctatgtgttttggaatggacatgagccttctcccggaaagtattatttcgaggataggtacgacttggttaagttcatcaagctggtacagcaagctggtctctatgttcatctncgcattggtccctacatatgtgctgaatggaaactttg

SEQ ID NO: 224242 - DNA, 531 bp, Glycine max
  unsure (1)..(531): unsure at all n locations
ctcgagccgcttgttgccaaaaagtcatgttcaggagagtgatgctgggtttgatgatttcaatggagcttcattttctggggctgtttttaacttgtccaccacaattattggtgctggcatcatggccttgcctgcaaccttgaaacagttggggatgatacctggtcttcttgccatcatcatcatggctttgttgacagagaagtcaattgagcttttgattcggtttacccgggcagggaagtctgtttcttatgctggtctcatgggggattcctttgggaattatggaaaagctctggtgcagatatgtgttataatcaataacatcggtgtgctgattgtttacatgattatattggngatgtgctctctggaacattntcaagtggagatcatcactatggtatccttgaggatggtttggtgtgcactggtggacggngcgaacatttgtgtcctttttcaacacttgccatatttgcaccccttgcaagctttaagcgaattgattcattgagattcaca

SEQ ID NO: 224243 - DNA, 591 bp, Glycine max
gtttcatatcttctttctgttgatgtttatgctgaagactgaataaaaatctgagtgcctatggcgatgcaaactgtttatcttaaaaagcatgaaggaaatgcacacaattttgtgggcacgttgtcgtctgcagcttcagcaccctggtggagtgcttttggatcacaatccgttcatcagggagaatcttgtggccaaatgaaaccctttgcattggagctgcctaactgcatagaccaacttgctgccactaagctatcagcaagaggagctgagcaagtgttgggtgaagggcatacaactcagttcaccatttttccagatggttgtaaaatgtcagatgatgcgcaaaagcttcagacaaccatatcactgcagtcttcacttactgatccccactctcgttttgagataggatttagtcagcccatgttatgtgcaaaatatccttacacggatcaattttatggcctcttctcagcttatgcacctcaaatttcgggacgtataatgctgccacttaacatgtcatctgatgatgggaccaattacgtaaatgctaagcagtaccatggaatcattagacgt

SEQ ID NO: 224244 - DNA, 538 bp, Glycine max
ttcagctctaataaagaggatattctgggaaggcatgatgcacccgttcgttgcattgagtattcatatgctgcagggcaattgatcactggtagttgggacaaaaccctgaaatgttgggaccctagaggtgcaagtggccaagagcgcacacttgttgggacatatccacaacctgagcgtgtctactctctctcactggttggacatcgcctggttgtagcaacagctggaagacatgttaatatctatgatttgagaaacatgtctcaaccggaacaaagaagagaatcctcactgaaataccaaaccagatgtgtgcgctgttacccaaatggaacaggatatgcacttagttctgttgaagggcgggttgctatggaattcttcgacctctcagaggctagccaagcaaaaaaatatgcttttaagtgtcacagaaaatcagaggctggaagggacatagtctatcctgtgaatgcaattgctttccaccccatgtaagtgttttagaaatgctgtgtcaccttgagtatat

SEQ ID NO: 224245 - DNA, 493 bp, Glycine max
agaggataacaggaaatgtcttgcgactttgaaaatgggggtactacaaaccatctaagaagcctcagtctcaggccaaatacacaaataaatatatacatgacaaacaggcagaaaggaacatgaagccagttgacagtagaatagacctacctaatggtgacaaacttgttggtgccatgttttgcccaataagtcctcaaatcaatcggattagaaaagatataaccctcagctgcaaggtactctaacactttcttaaatgctcctatactcattttactgccagctatcctagcaccacgccgtttggtactcataggcaaaggatacactgacatccctgtcgtgcaacatgcagactggcaaccggcagagccccatttataacactgatggtgcactgcaacgcatgaacaaacaggaactggaatactaaaaatatccatattaatgtcgtctattacaatatcagtagatttttttggaaccc

SEQ ID NO: 224246 - DNA, 557 bp, Glycine max
  unsure (1)..(557): unsure at all n locations
atatggtcttgaagtagggcttacaaattatgctgcagcttattgtactggtctcctgttggcccgaagagtcctcaaaacacttgaaatggatgaggagtacgaaggaaatgttgaggctactggagaggactattcagtggaacctgctgagagcaggaggccattccgtgctctccttgatgttggtcttattaggactacaactggcaaccgtgtctttggtgcccttaagggagctctggatgggggtttggatattcctcatagtgacaagaggtttgctgggtttgataaggagaagaaggagcttgatgctgaggtgcatcgcaaatatgtttttggtggacatgttgctgcctatatgaagatcttggcggaagatgaacctgagaaatatcagtcacacttcagtgaatacatcaagcgtggaatagaagctgatggtattgaggcactgtacaagaagggtcatgcttgcatccgtgctgatccttctctcaagaaatctgagaagcagcccccgaaggaacacangaggtacaatctgaagaaac

SEQ ID NO: 224247 - DNA, 382 bp, Glycine max
gaaacaaatcttttatcataaaataaggtaagacatcaaggggtgttgacacgaaattgaccaaaaatacggcttactcaacttcaaaaagtatccaaaattttggacctagaaaataaacagcacatgtaaataaaatgattgactgaacgcaaaataagagagttttagttgcgcaacgatgacatggaatctgccatgaactttcactcatcatcttcatcattatcagcagcagagttgatagccgccacacgagcaatcaacttagccttcctgtcctgataagtgagtttacttagattgtaccttttgtgttccttcgggggctgcttctcagatttcttgagagaaggatcagcacggatggcaatatgaacct

SEQ ID NO: 224248 - DNA, 514 bp, Glycine max
caacaaagtcacaaagagagagagagagagagatagatgctcgtcggtgttcgttccgattctccttgaccttctttttcttcttcttcttcgcttcgttatcgttcccaacattccaaaccctaaatttgttgcctcggtcttccattcccaatctccgaactccgacgcggagtggcagcagagaacaaacatgtcgtcttggctgagatctgcggtccacaaagccgtcgaggtcggcaacaaaaacaacctcactcgaaccgtcaagaactacgccgacaccgtcgttcaacacgccggccaagccgtcgccgagggcgccaaaatccttcaggatcgcattagtgctcggaattacagaagtgttgcgcagaccattaaaaggttggaagaagctgctgtttcgtataggggacctgagagagtgcagttgcttagaagatgggtgggttgtgcttcaagagattcagaagttgtctgagtcgtcatcggctgaaggtaaagagaggac

SEQ ID NO: 224249 - DNA, 497 bp, Glycine max
gccgacagccgtgggcggtggcggggaccaccacttgggaatgggatgggcttccacgtgcaaaggatccattgctgagtgcctgggaggggaagagtacgaattggactcggagatcaaccggcgcatcttagccaccaacaagtacatcagctacggtgcgctgcagaggaacactgtcccctgctctcgccgcggcgcttcctactacaattgcagacccggggcccaggccaacccttacagccgcggttgcagcgccattacgaggtgcagaagctgaattttttaatttaatttattttttttcggatgtgaattggaatgtgttttgttgttgttgttatataaatttgttactattattattcacgaacatttgtggtaatccatttcgggttgctgttgtttatttggaattgaatgtttctgtaacaagaaagaaaaaaagtgttttttttttttttgcttccctttttactactactttggttttg

SEQ ID NO: 224250 - DNA, 523 bp, Glycine max
gggaattgaagtcaaagtagtacacaatgcatctgtgatgaatgctattggagtttgtggtctacagctttaccgttatggggagactgtttctataccattctttacagagacgtggagacctgatagcttttatgaaaagattcaaagaaaccgaatgatgggactgcatacactttgcttgttagatattcgtgtgaaggagcccacactagaatctttgtgcaggggaagaaaagcctatgaaccacccaggtatatgacaataaacacagccattgagcagctcttggagattgtgcaagcacatgaagaacctgcctacactgaggatactgaggtgtgttgggcttgcacggcttggtaatgaagatcagatgatagtagctggaacaatgaagcagttgcagttgattgattttggagcacctttgcattgccttgttataacaggcccgacccatcccgtggaggaagaaatgctggatttttacagatgcaggacatagatacaacattaaga

SEQ ID NO: 224251 - DNA, 394 bp, Glycine max
  unsure (1)..(394): unsure at all n locations
tctcgctcttgcaattagtcctcttccaacaatccgcacctaaactctagggttctgacatggacactggtggaaagatcaagaagggcgccggaggaagaaagggcggcggcccaaagaagaagccggtttcaaggtccgtcaaggccggtctccaattccccgtcggaagaattggccgttatttgaagaaaggaaggtacgcccagcgtgtcggtaccggtgctcccgtttacttggccgcagttctcgagtacctagctgctgaggtgcttgagttggctgggaatgctgcacgtgacaacaagaagaacaggattattccgagacatgtgctattggctgtgaggaacgatgangagttggggaaattgcttgctggtgtcaccattgc

SEQ ID NO: 224252 - DNA, 343 bp, Glycine max
agcagtgcagggaagttggtgtgtgtcaccggtgctgccggttatattgcttcatggattgtcaagttcctacttgaacgtggttacactgtcagggccactgttcgaaacccaaatgatcacacgaaggtagaacatttgctaaaacttgaaggtgcaaaggagagactgcacctttttaaggcagatcttttgggtgaaaattcttttgactccattgttgaaggctgtgatggcgtctttcatactgcttctccttttattatcaacgtcaaagacccacaggctgacctacttgacccagcagtgaagggaactcttaacgttcttaatcatgtgtaaa

SEQ ID NO: 224253 - DNA, 534 bp, Glycine max
  unsure (1)..(534): unsure at all n locations
ctcgaaacagtaaccctctctcgtcgccgccactgctctcactcttctctccctttagcgccgtcagatcccttccttctccgccgcctttctccgcagccgaagccatgcccgaaactgagactcacgatgtggagtggccggcgaagcgcgttagggacactttcatcagcttcttccaggacaaaaatcacgtcaactggaagtctagccctgtcgtccccttcaatgaccccactctcctcttcgccaacgctggtatgaaccagttcaagcccatctttttgggaactgcggatcctaacactgccttgagcaagctctctcgtgcttgcaacacacagaagtgcattcgagctggcggtaaacacaatgatcttgatgatgtagggaaggatacttaccatcacaccttctttgagatgttgggcaattggtcctttggggattactttaaagtagaagccatcagctgggcgtgggagcttctaaccaaagtttataaataccatcagatcgcatntatgccacata

SEQ ID NO: 224254 - DNA, 503 bp, Glycine max
  unsure (1)..(503): unsure at all n locations
cttctccttcttttgggaaaagattaacaataaaagtgtggagtactgttgatagcaaagatgtttgggatcttcgacaaggggcaaaagataaaggggacagtggtgttgatgccaaagaatgtgttggacttcaacgccataacctccatcggtaaaggtggtgttattgacacagccaccggcatcttaggccaaggcgtcagcttagttggtggagtaattgatactgccacttccttcttaggccgtaatatctccatgcaattgatcagtgctactcagactgatggcagtggaaatgggaaagttggaaaagaagtctatttggaaaaacatcttccgaccttgccaacgttgggagcaaggcaggatgcgttcagtattttctttgaatgggatgctagttttggaattccaggagcattttacatcaaaaactntatgactgatgagtntttcctcgtcagtgttaaactcgaggacattccaaaccatggaac

SEQ ID NO: 224255 - DNA, 430 bp, Glycine max
ggaaagggagaacacgggttattatatgaaaaccgagagcatccaaatacaatagggcagaagttcaggcaataattacccatagacatgcataaagtctatgttattcagaagtccaacatagataaggaaaccacaaactctttttaattaaatagagatactggtgggaattcctttgaaagtaaacccttcctcacttgaacgatggagcaaagtgtatgggagctgaactggcccagcccggtttctcagacttggatcactgcgccttgaagtgatttttccttcaattccaggcaggttgcttccaaaccttttgaaagcttctaaggccttcttatcagtagaccaatttggagtctccctctctccaaggtatagtctatcagaagcatgccttgacaatatctctatcactgaaagatca

SEQ ID NO: 224256 - DNA, 450 bp, Glycine max
gaatccacacaaactcagggtagggcagagagagagagagagagagagagagagagagagaatgggagggtgggctatcgcggtgcatggtggcgctggtgtcgaccctaatctcccactcgagcgccaagaagaagcgaaacaacttctcacgcgctgtctcaatcttggaatctctgctctaaattctaatcttcccgccatagatgtcgtcgaacttgtggtgagggaattggaaacggatccgctgttcaattcgggccgtggatctgccctgacagaaaaaggaacggtggagatggaggctagcatcatggatggtccaaaacgacgatgcggcgccgtttcgggtcttaccaccgttaagaacccgatctcgcttgctcgtttggttatggacaaatccccgcattcctacctcgccttctccggcgccgaagaatttgctag

SEQ ID NO: 224257 - DNA, 440 bp, Glycine max
aagagaaatacatcaaagttaccatattattatttcacagggtgtgctaattcttagaaacaaggttaccattttttatctaaatcgggcaccagcagaaagaccctacactacagtggaacatggtacagaaatccaaaagttgcatcgaaacaaccatgaaggaaaataatgaagctattcccagattccgacctacatgaagccattgtcagtggcacagcccctaaacatgccattgcaattgaaaccataagccacttccccagcgttggacacagggatgagaccagccatcctttcatcgagacggtgcttgatcacaaaatccacggcttcttgaagcttcaagcctttgtataccatcagagatgccacctcacgcgccagcgcgccaagtatgatggcctcgtcttcacccgtgcacgatacgccgcaca

SEQ ID NO: 224258 - DNA, 486 bp, Glycine max
  unsure (1)..(486): unsure at all n locations
gaaatcaaagacattgaatctcacaaaaaatgggtccaagctcgaagaaagcttcacctaaatcaggtgtgacaaagcacatgaagggcttcagcctctgcaactcaaccctaaaagtaaatgggcaagtcatcctctcccaagtccccaagaacgtaaccctcaccccatgcacctacgacactcacaccaccggatgcttcctcggtttccacgccacctccccaaaatcccgccacgtggcacccttaggacagcttaaaaacataagcttcacttccatcttccggttcaaggtttggtggaccactctctggaccggctccaacggccgcgacctgnaaaccgaaacccaattcctcatgctccaatcccacccttatgttctcttcctacccatcctccaacccccatttcgcgcctcgctgcagcctcactcagacgacaacgttgcggtgtgtgtggagagcggctccagccacgtaa

SEQ ID NO: 224259 - DNA, 510 bp, Glycine max
agaaactgcatttcttctacaatgccaaacacctcgcaggttatttcatgcaaagctgcaatatgctggggggctggaaagcctgtaacggtggaagagatacaagtagacccaccaaaagcaacagaagttcgagttaagatgctatgtgccagtttatgccacacagacatctcaagcattcaaggattcccatatatcaattttcctctagcacttggacacgaaggagttggtgttgtagagagtgttggtgatcaagtgagaaatttgaaagaaggggatgtagtaattccaacatacataggcgagtgccaagaatgtgagaactgtgtttcaggaaaaaccaatttgtgtctgacataccctataagattgactggtctactaccagataacacttcaaggatgtccatccgaggccagaggctacaccatgtcttaagttgtgcaacatggtcagaagacatggttagtgatgccaactatactctcaaagttgatccaacc

SEQ ID NO: 224260 - DNA, 528 bp, Glycine max
  unsure (1)..(528): unsure at all n locations
ctggctttggaaatccatgaataaaattatctgagatttgagagctttgagctgcgaagatggtggctaattgactttgaggtcaacttgcaaggtcatgaggtggagttgcagtgagctacatgtaggagcaacatgattgagcaattcatcaatttcgttattaggcctcccagggcggagtataaccctgatcagtacctatgggaaaaggaattcacccttacaggtcgaacataccaaaggcaggatttggagctcaagaacaccagaggctataccttgaagtgtagtcattatcttccttctcctttccctgaagatacttctcttccttgtgttatatattgccatggaaacagtggatgtagggcagatgccaatgaagctgctgtaattcttcttccttcaaatattactgtttttacccttgacttctcggngtcaggcttatctgatggagactatgttagtcttggttggcatgaaaaagatgatctcagatggtggtgtcatatttgaggagca

SEQ ID NO: 224261 - DNA, 456 bp, Glycine max
  unsure (1)..(456): unsure at all n locations
cgttcctccacccatcctcccaaggaattcacctgccccatttccggctcactaatgtccgaccctgtcgtcgtagcttcgggccaaaccttcgaacgactcgccgttcaactctgcaaagacctcaacttctcccccaagctagacgacggcacccgacccgacttctcaaccctaatccccaacctcgccatcaaaacgacaatcctccactggtgcgacaacgcccgcacccaacacccgcgccctcccgattacgcctccctccagcgcctcgtcttagaacaaaaagaaaatgaccgcgttagggtttccgaaatggagcttctcaacgccgtcgccgacctccctcccgtcatcttctcccacgccgccaccgagttaggcccccgagtcaaccacttcaattcgggatcctcctncgagcaggaatccgtcatcatcccttcgagtccg

SEQ ID NO: 224262 - DNA, 561 bp, Glycine max
  unsure (1)..(561): unsure at all n locations
gccggatctgctaaaatacgcttgatccatatgggcctcctcgaccacttgtgggacgacaccgtcgccggcccaaggccggaaaacggtctcggcaagctccggaaacaccacaccttcactttccgacctagctccgaagcggagggcgggagcgtgagatcgtacggtgacgaatcgtcggaggaagcgactagagtgacgcgtagtatcatgatcgtgaaaccgccagggtaccagagtggatcgcctccggtttctcctgccggttctactcctccgatttctccgttttccggaggaaaagattcgcttcggtttcgaagaaggtcgggatctgatgcgtacgagaagagagggcagaacagatcaggcccttcttctcctttcgatgtgtgacgcantttctcgtacctgaaagctgaggatgtagcagcttttttggcctttgctgtattcatttttgnttagtctttgtgtgcatgtataatgtctgaatgtctgcagggagttctgccagttcatgcgaggtagcttttggttagcttctttagtctttac

SEQ ID NO: 224263 - DNA, 421 bp, Glycine max
aaaacttgctatagcagtaagctataactcatttgaggctctgtgagaattgagaaatggctaaagatgttgaggttcaagagcaaggaggagagtactctgccaaagactaccatgaccctcctccagcacctttgttcgacccagaggagctcacacagtggtccttctatagagccctcatcgctgagttcatagcaacccttctcttcctttatgtcactgtgctcaccattattggctacaaaaggcagactgatacaacggtaggtggcaccgactgtgatggggttggcattttgggcatcgcttgggcctttggtggcatgatcttcatccttgtttactgcaccgccggtatttcaggaggacacataaacccggcggtgacattcgggttgttcctaggacgcaaggtgtc

SEQ ID NO: 224264 - DNA, 427 bp, Glycine max
ctcccaacgctttgtctaccgctccggcagcgggtagtaggaagaacgcgacgctaatttgcgtcccaataatgggagaatcagttgaaaagatggagattgacgtggacaaagcgaaagccggaggcgcggaccttgttgaaattcgattggattctttgaaaacctttgacccctatcgagatctcaacgctttcattcaacaccgttctttacccttgttgttcacttacaggcccaaatgggagggtggtatgtatgatggtgatgaaaataaacggctggatgcacttcggttagccatggagttgggagctgattacattgacattgaacttcaggtagcacatgagttctatgactctatacgtgggaagacattcaataaaaccaaagtcattgtttcatctcacaactatcagcttac

SEQ ID NO: 224265 - DNA, 552 bp, Glycine max
  unsure (1)..(552): unsure at all n locations
tagcaaattccaattcccaatccaaaaccctaatttcgttcaaagaaccaattgtgatggcaccaaaggcagagaagaagccagcggagaagaagcccgcggaggagaagaagtcgacggtgggagacaaggctccggcggagaagaagccgaaggccggaaagaagcttcctaaggagggaggagccggcggagaaggggggaagaagaagaagaggaacaagaagagcgtggagacatacaagatatacatattcaaggtgctgaagcaggtccaccctgacattggtatctcaagcaaggccatgggaatcatgaacagcttcatcaacgacatcttcgagaagcttgctcaggaatcttccagacttgcccgctacaacaagaagcccaccatcacttcaagggaaatccagaccgcggtcaggcttgtgctgcccggtgaattggccaagcacgccgtttctgagggtaccagggccgtcccaagttcaccagctcttgaactaactatatcttatcgattntctcaggctctggggtctgtatcta

SEQ ID NO: 224266 - DNA, 583 bp, Glycine max
  unsure (1)..(583): unsure at all n locations
aagaaagagagttcttcgtaggctcggatacgctacaagtgacaatgtagtggaattaaaagggagggttgcttgtgaaattagtagtgcagatgaactgaccctaacagagctcatgttcaatggtggtttaaaggacataaaggtggaggaaatggtttctctcctttcttgttttgtctggcaagaaaaaattcatgatgctgccaaacctcgggaagaacttgattttctttttatgcaattacaagacacggctcggagagttgcccaacttcagctggagtgcaaggtaatgaccaaatgccaattcattgcatatctggcatctaactgcacatattgtgttccaagttttatttgttaaaatctaggtcaattagtgtatcatctgaaaattataaagtgttatacaagttagttccattttgaggatggataattagataaacctcttgttatcactctgatcacctgcattntttccgatccacatttatctgatattcagttatgcacttggttgcgaaacatagtggacttgtttactacttctccatacttatgggattcgtttggtcac

SEQ ID NO: 224267 - DNA, 529 bp, Glycine max
gtgtttttgtgtgtcaccttggtgcatacaacacaagatggaggaccaaaatggtagtggtaagttgagccaagggcttcgcaaggtgaagccttaccttgctatattgtcccttcagtttggctactcagggatgtatatcatcactatggtttctttcaagcatggcatgagtcattggatactctcagtgtaccgacatgtagttgctgctattataatagtcccttttgcacttgtccttgaaagaaaaataagaccaaagatgactcttcccatcttcctgaggatagtggcacttggtttccttgagccagtgctagatcagaacttgtacaacatggggatgaagatgacctcaacaacgtttgcatctgccactgttaatgtcctgccggccattacttttgtaatggcactcattgtcaggctagagaaggtgaacttgagaaaattcacagtgtatccaaagtcattggaaccctataacaggttcaggagctatggctatgactctgtacaaagccct

SEQ ID NO: 224268 - DNA, 523 bp, Glycine max
  unsure (1)..(523): unsure at all n locations
cacagatctgtcttccgaagcaggaactaaatatggctgacttgttggaatggtcaaagcaagataagaaacgaatgcttcatgtcgtctaccgtgttggtgaccttgatcgcaccatcaaattttacacagaatgtttaggaatgaagcttttgaggcaaagagatatcccagaggagaaatatgctaatgcttttcttggatttggccctgaagaatcccattttgttgttgaattaacatataattatggggttacctcgtatgacattggcgatggctttggacattttgcaattgcaactcaggacatttataaattggttgagcacatcagggccaagggtggaaacatcacaagggaacctggtccagttcaaggtggaactactgttatcgcctttgtaaggatcctgatggttatacttttggacttatccaaagacctacangtcatgacccattttgtcaagtaatgcttcgtgttggtgatttaaagcgctcattaagttttatgaaaagg

SEQ ID NO: 224269 - DNA, 581 bp, Glycine max
ctcgagccgaatcggctcgagctgattgttcggaatgcattgaggtgaaggtctctcctgcgcatgaccaaaggattccgttgatgagatcaagaagaggaggacggcggcggcgcggcgacacgtgggtggtgtcggtgttcgtgataatccagatcggggttttcatcgccaccatgctcgtcaacgattgctggaacaattctcacggcgattgcgttcttcaagccctcggaaggttctcgttccagcctctccccgagaatcctctcttaggtccttctcagtccaagttggatgaaatgggagctcttcgacgtagccttttgacagagcatcatcaaacatggcgtcttttcacatttccatttttgcatgctggggtcttccacctgctgctcaatctctccagtgtcatctatgtcggagttagcctagaacaccactttggaccaataaggattggtatactctatgcattgactgcttttgtgggttccttgggggcttctattttttttcaaaacatgcccgctgatggtgctttcggtgctttatatggattattgggaacattgctt

SEQ ID NO: 224270 - DNA, 488 bp, Glycine max
ggaaaaccctagctagtagtctcagttcgtttgagagagaaaaaatggcagagggtctcgttctccgcggaaccatgcgcgcccacaccgacgtcgtgacggcgattgccactcccatcgacgactccgacatgatcgtgacggcgtcgcgcgacaaatccatcattctctggcacctcaccaaggaggacaagacctacggtgtcccccgccgccggctcaccggacattctcacttcgaccaggacgtcgttctctcatccgacggtcagttcgccctctccggctcctgggacggcgagctccgcctatgggacctcgcggctggcacctctgcccgccgcttcgttggccacaccaaggacgtgctctccgtggcgttctccatcgacaaccgtcaggatcgtgtcggcttctcgtgaccgcacgatcaagctgtggaacaccctgggtgagtgcaagtacacaatccgagatggcgatgcgca

SEQ ID NO: 224271 - DNA, 544 bp, Glycine max
cacaactataaaaagcgtagagagttctgtgtgttcagaaactgccaaaaactcacgcagagaaagtacaagtagaaggagaagaagcacattgaagctgctctctccaaaattgttcactctcgccattctgctcgcggcggcgctggttttagcttccgccgacgcagtcagtgacaatgagatgcagaaacatgaagccacggaatcaagggacgtggttgaagagaagttgcgagtgcagagcttgaagaattcgtcaatggcagaaaggtcagggggtgctttaaatgaacatgcagatgataatccagaggagattgcttccatggttgatgagagcatacgcaattacacagctcgaaggaacctgaacttcttctcatgcgggaccgggaacccaatcgacgactgctggcggtgcgacagctgtggtacgcccgccgtaagcgcctagccaactgcggcatcggcttcggccgcaacgccatcggtggccgcgacgggcggtactacgtggtgtcggaccctaacgacgacgacc

SEQ ID NO: 224272 - DNA, 606 bp, Glycine max
ccggcggcccgccccccttttttatttattttattttatttatattttatttttattctcttttctatatttctattcttttacctcaatttgggtttgcttgatttttttattcacttctccatatctttcaatattcacaaaatttctataaacttcacatttttgcgtagctcacatcttttctcacacaaaccccaaaaaaaaggcaccccacccaaaaaaaaaaaacccacatgcaaaaaaaaaacaacacaaaaaaagatagccccaaaaaaccaaaaaaaaaaaacaaacccccaagggggggccaaacaaaacaaaaagaaacgacgcccaccaaaaaaaaaaacccccgccaaaaaaaaaaaaacccccccgccaaaagactctctcgaaagagaaaacccccaaggaaacaaaaaaaaaaaattctcttcaggggggggcaaaacaaaacctaactgggggagaacaaaaaacacttcaaaaacccccccaggggaacccaaaccacccgtgggggaacacccccctgcaaaagcacacgcaaaaaaaaaaagaaggggccacacccccaagaccccccacaaaaaagaagaaggc

SEQ ID NO: 224273 - DNA, 561 bp, Glycine max
gattcgttcgttcactttcactttaccaactcctaacaatttctctctgtttccttcggcaccgcatcaatggagttggacggcgttctcctcggcatgtgcaaccctctcctcgacatctctgccgtcgtcgacgacgctttcttgcaaaaatacggtatcaagttgaacgatgcgattctcgctgaggataagcacaaacctatgtatgaagaattggctaacaatcctaatgtggagtacattgctggaggtgctactcagaattcaatcagggttgctcagtggatgcttcaagcaccaggtgccacaagttacataggttgcataggaaaggacaaatttggagaggagatgaagaagaaatgtacacttgatggtgtaaaggttaactattatgaaatcgacaatacacctactggaacttgtgctgtttgtgtggttggcggtgaaaggtcccttgttgccaacttatcagctgcaaattgctataagtctgagcatttgacgagaccggaaaatgtgcattagttgaaaaggccaagtatttctacatttctg

SEQ ID NO: 224274 - DNA, 578 bp, Glycine max
agataaacacttttaacactaaaaagatgaaatcctctcttatcttgttatttatgatctgtggtggagtgattgcaactcctccagaggatccaattcggtgttcttcaaagaacacagactgcaccatcacaaacacctatggcgtctttccggaccgaagcatttgccacgccggtgaggttatgtacccaaacacagaggaggagctcatatccgcggtggcctcagcttcgaagaacaaaagaaaagtgaaagccgccacgcgcttctcccacagcatcccgaagctggtttgccctgatggcgaaaacgggttgctaataagcactaaaaatctgaacaagatattgaagattgacaaggaggcaaggacgatgacagtgcagagtggcgtgtcgctgagagagataatcagcaagggtgcagaggctggattggccttgccatatacaccatattggtggggtttaaccattggtggactcatgggtacaggtgctcatggaagcactttgtggggcaaaggaagcgcggttcatgagtatgtggttgagctacgcattgttactcctgct

SEQ ID NO: 224275 - DNA, 578 bp, Glycine max
ccttcctctaacctaatcaaatcctctcctctcaaaccaattcccacttttcctctcttcggctcccctcagaaaccaatgtccataatcaccccacgccgtcatcctcaaacgacacccttccgctagcaaaacgactgcggtttggtcgtcgtcttccccgaggcatgctcttgggatattattattcatcatcgtaatcacaccctacagagacgttgactttgtgctttttctgggaggggaacaaatggaccaagctcttctggacgacataatcaatcgccttctcgaagttcgcagccggccggggaagcaggtgcagctgtcggagtcggagatccgccatctctgtgccgcttacagagagattttcttgcagcaacctaatttgttggagcttgaagcacccattaagatttgcggtgatgtacatggtcaatattctgatcttttaaggctatttgagtatggtggactacctcccgaggccaactacttatttttgggggattatgtagatcgagggaagcagagtttggaaacaatatgccttctcctagcagtataaataaaat

SEQ ID NO: 224276 - DNA, 601 bp, Glycine max
  unsure (1)..(601): unsure at all n locations
ggcaaaatcccaaatggaatgagaaaaaatttctataattagagtctcactctcatactcgttgtatgtatggctacgctctctctcactctcaactgttggagtaccgtggaacttgctcacaccagattttcttctaccttcacctccctcggtcgcagtgtctcatgttgcgtcagtggaaggattgccagtctttgactgctctacagaagtatcatttggctttgaaatgtggcatcttgagttgattacaggacttgtagtattaatatcatcatgtcgctatttgctattgaagacgtggccagattttgccaagtctagcgaagcagccaatcaacaggtccttagctcacttcagcctttggattatattgttgttgcatttttgcctggtattagtgaggaactacttttccgaggagcgattcttccacttttgggaatgaactggaatagtattgngattgctgcccttgatnttggtgttntacacctaggcaacggtcganagtattcctttgccatctgggcaaccttagttggtcttgcttattgatatgctacaattntatcctctagtggtgcggttcccatg

SEQ ID NO: 224277 - DNA, 552 bp, Glycine max
  unsure (1)..(552): unsure at all n locations
atttgtaatccgagtccctccagcagcatgccaggtctcgtatcggacgcccaacccctcggaatctccgtcccggacacacccaggcaatcccagagaaccccttctccactccccaaaaaaccacccagcccatctccttctcgctcctgcaaaaagaaaactcctgaaacccctccgcttctctctgatgcctctctcgacaacccggatctcggcccattcctccttaagttggcccgtgacaccattgcctcgggcgatgggccctccaaggccctcgacttcgccatccgggcctccaagtccttcgagcgctgcgccgtcgagggcgagcccagcctcgacctcgccatgagcctccacgtcctcgccgccatctactgcagcctcggacgcttcgacgaagccgtccccgtcctcgaacgcgctatccaagtccncgacgtcgaacgcggcgccgatcacgcnctcgccgncttctccggctacatgcagctcggcgacaccttctccatgctcgccaggtcgacagatccatctnctgctacg

SEQ ID NO: 224278 - DNA, 451 bp, Glycine max
attccattctctatgtgtattaccctacctctccctttaagatgcaaatcttagtcaagacccttaccggtaagaccatcacccttgaggtggaaagctatgacaccatcaataacgtaaaagccacaaaccacgacagggtaagaatcctccagaaccagcaacgtctcattctcgccggaaagcaacttgaggacggtcgaacccttgatgactacaacattcaaaggagagtactcttaacatctctcgtgtcgagggggcatgcaaagctttggaaagacacttaccggcatgaccataactctagaggttgaaagctacgacagcatcgataacgtcaagggcaataaccatgacaaggagggtatccatctagtgcagcatcggatgatcttacgaagacagcagcgtgaggacaggcgctatctagccgactaccacataaaga

SEQ ID NO: 224279 - DNA, 327 bp, Glycine max
  unsure (1)..(327): unsure at all n locations
gacaattaattttttcatatttcacacattcataacaaacgttgtggggattttagagtactattattaatgggacacaattgagttcaacacaaaccgaacttattttcaagggacattattacagacccattaaacatcaaagttcttcaaatgttttgggaacacatccaacattacacaacgagtttaaaaccctccacagaaactgaggacaaggagaagggttgattccttctggatgttgnagaaaaagagggtccttccattctcaagctgcttgccagcaaaaattatcctctgctggtccggtgggatgccttgctt

SEQ ID NO: 224280 - DNA, 582 bp, Glycine max
  unsure (1)..(582): unsure at all n locations
atcaaacatggctagggttagtgctttgtttcactctttgctcttgatttcttcccttgtattggcttctcaaatccatgtttcctctgggaaactagtccctggactatcatggaattactatttgttgacatgtcccaagcttgagaggattataaggaagcatcttgaggatgtcttcgagaaggacagtggagtagctcctggcatacttcgactcttcttccatgactgctttcctaatggatgcgatgcgtctatattgttgaatggagacggtgacgagaagcaacaccgtgctaactttggtttaaggcaagaggccattgacgccattgaaaaccttcgggttctcatttacaagcagtgtcgtaccagttgtctcatgctcagacatccttgttatccgnncacgtgaagctgttcgccaattaggaggccctgattttgacgtgccactgggaagaanagacggtctaggaccaaacgccaccgcgccggacaacctaccgtcaccattcttccgaaccgacgatcttctcagaggatttcgaaatagaggtntcgatgccaccgatgtgg

SEQ ID NO: 224281 - DNA, 465 bp, Glycine max
aaaagaaaacacatatcaacgtttattacacaatccattcagaaaaacaaaaaagaacaccctgagcaaaaggacccaatacaattatatctcctgagccaattccactacttcttccaccacagacgccatagaagatcttctcttatttgcaacaaagcacttatcacgaatctcccctttcccaatacgatccgttatcacatctagctggctcaccttcacaaaagcatcggaaaatttcttaaaaaacagtttctggtctgaagcgaactggttcacgatttccttggttttggggctgcccgcgatgtcctggtcagaagtgaacactccttggcggttcaagaggttgatgtaatacatgttgtcgaacttcacgggggttctcacgtccaaattaacggtgttgggggactcggcattgggacacgtagctatcaaattgttgttggaagtttgggt

SEQ ID NO: 224282 - DNA, 511 bp, Glycine max
gataataatttaactttaaagagaacttcatgatcatcaaccatccaaggatttaagacgaaaggaacaagtacaaccctcgaaagtgaattaggaagaaaacacaaggaaggaaaaccatacacagaagaagattccagagaaattcaataatacacaatttttttttttttattttcatttccccccctctagtagtcagtggtgggaagctgctcgtgggtgtggctgataaagacaacctcgtaaacaaggccagcgattccaccaccgatgagaggcccggcccagtagatccagtggttggtccaggtccagctcacgacagcaggcccaaatgtcacagcggggttcatggccgctccagagaaggccccacccaacaaaatgttagcgccgacaatgaaaccaatggcgatgggagcaataattcccaaattacccttcttggggtcaatggcagttgcgtaaaccgtgtacaccagaccgaaggtcatcacgatctccaaca

SEQ ID NO: 224283 - DNA, 603 bp, Glycine max
attagttcattctctttgcgcagttccctacctctcctttcaagatgcagatcttcggcaagaccctcaccggaaagaccatcacccttgaggtggaaagctctgacaccatcgacaacgtcaaggccaagatccaggacaaggaaggaattcccccggatcagcaacgtctcatcttcgccggaaagcagctcgaggacggccgtaccctcgccgactacaacatccagaaggagtcaacccttcaccttgtccttcgtctccgtggtggcatgcagatcttcgtcaagactctcactggcaaaaccataaccctagaggtcgaaagctctgacaccattgacaacgtcaaggccaagatccaggacaaggagggaatccccccagaccagcaacgtctcatcttcgccggaaagcaacttgaggacgggcgcaccctcgccgattacaacatccagaaggaatcaacccttcacctcgtcctccgtcttcgtggtggcatgcagatcttcgttaagaccctcaccggcaagactataaccctagaagtcgagagctccgacaccatcgacaacgtcaaggctaagatcccagacaaggagg

SEQ ID NO: 224284 - DNA, 571 bp, Glycine max
ccgcgttctctctctctctctctctctgttgcaaaatccgttcccctatctttctgcgtttcgagttgttgctaaagagtgatggactcaccgcccagtaatcaccacgccgtcgacggagacgccaacgacctcgttagacccttttcccaccgcgacgacgacggcaaaccccaacccctcaccggcgacggcgccagtcccggaaagatattcatagggggtttagcgagagaaacgacgattgcgcaattcatcaagcactttggtaaatacggtgagataacggattccgttatcatgaaggaccggaagaccgggcagcctcgcggtttcggcttcataacttacgccgatccctctgtggttgatacagtgattgaggacactcacattatcaatggcaagcaggtggagattaagcggacgataccaaggggggctgttggctcgaactcaaggacttccgaagaagaaattttgtgggtggaattccttctactgtgaccgaagatgaatttagggacttctttacacgctatggagaagtcaaagatcaccaaataatgcg

SEQ ID NO: 224285 - DNA, 554 bp, Glycine max
gagatcctcaagctcatgtcctccactttcctggtcgccctttgccaagccattgacttgaggcatttggaggagaatttgaagaacacggtcaagaacgttgtgagtcaagttgctaagaagactctcaccacaggtgtcaatggagagcttcacccttcaaggttttgtgagaaggacttgctgaaggttgttgatagggagtacacatttgcatacattgatgacccctgcagtggaacataccctttgatgcaaaagctaaggcaagtgcttgtggactatgcattggccaatggagagaacgagaagaacacaagcacatcaatcttccaaaagattgcaacatttgaggaagagttgaagacccttttgcctaaggaagtggaaggtgcaagagttgcatatgagaatgaccaatgtgcaattccaaacaagatcaaggaatgcaggtcttacccctttgtacagtttgtgagagaggagttgtggacagcattgctaactggtgaaagggttatctacccggtgaagagtgtgacaaagtgttcact

SEQ ID NO: 224286 - DNA, 508 bp, Glycine max
tgcttcttgcaagaagtttctgagcttttatatcctctatatatagttctctggcaaggaaggtctcatccaaataagcacaaatgggtagccagagttacttcaaggctttgattatttgccttatagcactaattggatcaactcaagctcaattgcagcttggtttctatgccaaaagttgtccaaaggctgagcaaataattctgaagtacgttgttgagcatatccacaacgctccatcactagcagctgctctcataagattgcacttccatgattgttttgtcaatggctgagatggatcagtgcttgtggactcaacaccagggaatcaagctgaaaaggacgctattccaaatcttacactccgaggctttggcttcattgaagcaataaagaggcttgttgaagctgaatgccctggagtagtctcttgtgctcatatcttggctttgactgccagagactctattcatgccactggtggaccctattggaatgttcc

SEQ ID NO: 224287 - DNA, 619 bp, Glycine max
gctgactgttgcaggaaaaattaattggaaggtgaaactcattataggtgttgtttctggagtggtgggggcacttgctgtgggcattatcggctatctctgttatcgtaaaaagaagaatcgttatacaatgtcatatacacaatctcggagcctctcttctgatccatcttcaaaagacactgagaagggaattcaacgctttactcaaagctttgtacctggagtgcacctcttcacatatgatgaacttgaagaggccacaaattactttgactcatctaaaaactaggagaagggggctttggaacagtgtattttggtaaaagcaaaaaccctttgttgtatctctgtcgtttttgtgctttcgatgaccattaacaaaggttcctgtcttgtgatgtttcttgtctaggcaaactgcgggatgggcgttctgttgcagtgaagaggttgtatgagaacaactttaagagagttgcacagttcatgaatgaaattaaaatcctagcaaatttggatcatccaaatcttgtgacattatttggatgcacctctcgccacacccgtgaacttctgttgtatacgagtacattcctaatggaaccattgccgatca

SEQ ID NO: 224288 - DNA, 615 bp, Glycine max
  unsure (1)..(615): unsure at all n locations
ctcagaattctctaaaagagatctttttctgctctttgaagaaagaagggtctttgcttgattttggagatgtctctgctctcagatctcatcaaccttaacctctccgataccaccgagaaggtgatcgcagagtacatatggatcggtggatcaggaatggacctgaggagcaaagcaaggactctcccaggaccagttagcgacccttcagagcttcccaagtggaactatgatggttccagcacaggtcaagctcctggtgaagacagagaagtgattttatacccacaagccattttcagggatccattcagaaggggtaacaatatcttggttatctgtgatgcctacactcctgctggagaacctattcccactaacaagaggcacgctgctgccaaggttttcagccatcctgatgttgttgctgaagtgccatggtacggtattgaacaagaatacaccctgttgcagaaagatatccaatggcctcttgcgtggccctgtggtggtttccctggacctcanggtccatactactgtggtgttggcgctgacaggctttnggccgtgacattgttgacgcacactacaaagcctgtatttatgctg

SEQ ID NO: 224289 - DNA, 492 bp, Glycine max
actccaatgaacatgacaatttcatatattattattatacttggcaatcagcatttctttgttcaagactgataataaccattaaattattgtcattgtaacaatcggaaaacgagggaaaggaatagaagaaaacaatgaacaacccttgccagttagttgcaccaaccaacaaggcaccaaccatagtaccaatcaaaaggtaaaaagagagagagaccaaatcctactaagaaaagcataactgttcctttccatccaaagggagaaaacatgcaggttttgctcatggcttccacagaatggttgtgtctgcaatcatggaagtaaccacgtatgggtccatgttggaagctggccttctgtcctcaaaatatcccttccctgctttctctgtgtctctcccaaccctaacagaagctccacggtttgcaactccccatagaaggtgttgatgtcagcggtttcgtggcgtcctgtcaaacgacgttc

SEQ ID NO: 224290 - DNA, 619 bp, Glycine max
agcgcatgggcaagcacccctaacggtaataaaaagctggatgcagcatatcaggaagccaaggagaagcccggtggctgtcccatatttttgttattttcggtcaacactagtgggcagtttgttggttagcagagatgttgggtcctgttgattttggtaaaactgtagattattggcagcaggacaggtggactggttgtttttctgtgaagtggcacgtcataaaggatattccaaatagcgtgttgaggcacataacgcttgaaaacaatgaaaacaaacctgtaacaaatagcagggatactcaggaggttaagtttgagaagggtgttcaaattgccaaaattttcaaggagcattcaagccaaacatgcatcttggatgattttgggttctatgaggctcgtgaaaaggcgactcaggagaaaaagtccaaggaacagcagttaccaaaacaggtcagcaagcccagtgatttcacatttgggacagttacatttccaaagtctcttgatgcaaccttgatgaatgaagctgctactgcaaatgcagcagagggaagaatgaatgcataagggctggtagaagggaatggatcgaccccacacttggagat

SEQ ID NO: 224291 - DNA, 550 bp, Glycine max
  unsure (1)..(550): unsure at all n locations
caactccgaatcaaaccctagtacaacaatccaacgaaaccttcttcttctcaattctgcgatcccatcctcaatggaaaacccggattcctctcttcctctctccatcaagaaggagaacgtcactcccattacctctaaaatcgcggaacttaatgaatcgagatcggagcttctgggcagagttcagagtttgaaacaggatttgcaaagttggaggtcgaagttagatacacaagtcaaggtctatcgcgacgctgtctgttccaagaaaaaaccggagtccctgacccttgctaattcatatcccaaaatgtaaggcttgaatgcctttgtgatggagaacggctttgaaagaaccaggaacttttcaggagctgtcagaacttaagaaaacatntaatgttgaagtggaccaacttcgagcagaattcaagatctgaggactacccttcagcagcaacagaggatgtcactgctagcttaagaaaactgnngcttcaggatgcctcagatgtcaagcatgctccgtcgcaggagacaaagattg

SEQ ID NO: 224292 - DNA, 478 bp, Glycine max
atgcccaaaaaaagaggacgttcttttttatgggatagattgatcacaattacatcacacgcatggccatcttccaacttaaaagtagaggaaacctggccccttaggcaacaacacacgcgcaccaccataatcatactcataatattacattacattacataatttacatacaaaatagaaggtttaataataaaaaaagaaagaaaaataaggagaaaagaaaacagatgacgatatatcataaaataaaaccagaaacttgcttggtttgggtcttttaatttacccaacttgattgaccacgaatcgttgtaatccaattaattaactggatttgaagggaatggctctgattacaacttggtggtaaagagccgcaagagctgcaccaacgaaaggtccaacccagaagatccagtgatcatcccaaccaaggtcttttgtgaagatgatggcagcaccgagacttcgtgca

SEQ ID NO: 224293 - DNA, 407 bp, Glycine max
gaacgttctatgttcttgggatcataataattccgtgagcgacaaccctttgtcacttacaaaaaacatgcaccaagattaaacttatgacaacgctcaactatcatgtaatgaagtattaaacttcaatctcaaggcttcaggggattcacttaggacaacttacaaaaataatagaaaaaataaccgacacttgtttcaagtaaaacccggaatttttcctgggattggagctaacacattattgctaaaatttttctcgtcataaaaagagggacgcaccactctacccccaaagaaccgaccatcaaagacgacaagcgctctatttgtttctttagatctctcaaactgcacaaagattcttactgctttatgaacggggaaaaatggctctgttatttcaa

SEQ ID NO: 224294 - DNA, 591 bp, Glycine max
tcaacggagcacctctcttcaggtcgccatctagactgcaatcatggctgatggaccacagcatccatcaggtgttcagaagctagctggacagtcttacctggtgtccaggctaagccccaactttaactctgggaattattcctcgactggttcttacttcaatggaggactgcactcttctgggttggctgttgtgtcgcctggatctccagttactgtgcatgctccagcagagaaaggagtgagtggatttctagtggattttctgatgggtggagtgtctgctgctgtgtcaaagacagctgctgctccaatggaacgagtcaaattgcttatccaaaatcaggatgaaatgatcaaaagtggtcggttatctgagccatacaagggaattggtgattgttttgctcgaaccatgaaggatgaggggtgtgattgctctttggaggggcaatactgctcatgttatcagatatttccctactcaggctctgaactttgccttttatgattacttcaagagacttttcaacttttaaaaggacaaacatggctactggaagtagtttgctgggaatttggcatctg

SEQ ID NO: 224295 - DNA, 552 bp, Glycine max
tgaacattgataaaaccgtttgttcctcccattcccactcccaagccaaacgaactaaaatcaccggcgatgttgccggggattccaccggctccaccaccgcaacagtaaccgatccttcgccggaaccatcacattaaccacaatgtcgtcgacaccgcagagcttaaagcagagagtcttcagatgcctaaccaaactctccgaccgcgacacgcagtctctcgccgctgcggagctcgagtcaatcgctcgaaacctcgacggagccaccttgccgatgttcctctcgtgcatgtactccaccgacgactccgacaagccaccggtgcgcaagcaatgcgttcagctcctagggttcctcgcggagacgcacggcaacatgctcgcgccgtacctgccaaagatcctcggcagcgtcgtgcgaaggctccgcgatgcggactcgtcggtccgatcggggtgcgtgaattccattgcggcattgtcacgccacgtcagcaagccgccgctgaatgcgtttctgaagccgttggcggaggcgcttttcac

SEQ ID NO: 224296 - DNA, 599 bp, Glycine max
gagagtggtttcagtgagtgatcggtgttcacttgatccttcataagtcgtcatcatcatcatcatcatcaccgttgattgaagaagatgccgatcagaaacatcgccatcggaaggcctgaagaagctactcaccccgacacgttgaaggcggggttggctgagttcatctccaccttgatcttcgtgttcgccggttcaggttccggcatcgcctacaacaagctcaccgacaacggcgccgccactcccgccggcctcatctccgcttccatcgcccatgctttcgccctcttcgtcgccgtctccgtcggcgccaacatctccggcgggcacgtcaaccccgccgtcaccttcggcgccttcgtgggcggcaacatcaccttactccgcggcatcgtctacgtcatcgcccagctcctcggctacatcgtggcctccctcctcctcgccttcgtcactgcctcccctgttccagcattcgggctttccgctggagtcggagttggcaacgcttggtggtggagatcgtgatgaccttccgttggtgtacacagtctacgctcctgccgttgaccccaagaagggcaattgggaat

SEQ ID NO: 224297 - DNA, 522 bp, Glycine max
ggcggcgctggttttagcttccgccgacgcagtcagtgacaatgagatgcagaaacatgaagccacggaatcaagggacgtggttgaagagaagttgcgagtgcagagcttgaagaattcgtcaatggcagacaggtcagggggtgctttaaatgaacatgcagttgataatccagaggagattgcttccatggttgatgagagcatacgcaattacacagctcgaaggaacctgaacttcttctcatgcgggaccgggaacccaatcgacgactgctggcggtgcgacaagcggtggtacgcccgccgcaagcgcctagccaactgcggcatcggcttcggccgcaacgccatcggtggccgcgacgggcggtactacgtgtgtgtcggaccctaacgacgacgacccagtaaaccccaaacccggtaccctccgcacgccgtgatccaggaccgcccctctggatcgtgttcaagcgcgacatggtcataaccctaaagcaagaactcatcatgaacagc

SEQ ID NO: 224298 - DNA, 597 bp, Glycine max
gggagagagaaagaaaggtgaattggattgcatctctctctgtgtgttggaagaggggaatcgtagatctgatttctttctttctttttaataattttgtgatcagaattattgagctgaacaaaaagacaatgggattgtgggaagcttttctcaattggcttcgcagcctttttttcaagcaggaaatggagttatctctaataggacttcagaatgctgggaagacttcccttgtaaatgtagttgctaccggtggatatagtgaggacatgattccaactgtgggattcaatatgaggaaagtgacaaaagggaatgttacaataaagttatgggatcttggagggcaacctatgttccgctgcatgtgggaacgttactgtcgtgccgcttctggtattgtttatgttggtgatgctgccgatccagataaccttagcatatcaagaagtgagcttcatgatttgctgagcaaaccatcattgggtggcatccctctgttggtattggggaacaagattgacaaagcgggggctctgtctaaacaagcattgactgaccaaatggatttgaagtcaattactgacagggagt

SEQ ID NO: 224299 - DNA, 571 bp, Glycine max
  unsure (1)..(571): unsure at all n locations
gggagagagaaagaaaggtgaattggattgcatctctctctgtgtgttggaagaggggaatcgtagatctgatttctttctttctttttaataattttgtgatcagaattattgagctgaacaaaaagacaatgggattgtgggaagcttttctcaattggcttcgcagcctttttttcaagcaggaaatggagttatctctaataggacttcagaatgctgggaagacttcccttgtaaatgtagttgctaccggtggatatagtgaggacatgattccaactgtgggattcaatatgaggaaagtgacaaaagggaatgttacaataaagttatgggatcttggagggcaacctaggttccgcagcatgtgngaacgttactgtcgtgccgnttctgctattgttaatgttggtgatgctgccgatccagataaccttagcatataaggaagtgagcttcatgatttgctgagcaaaccatcattgggtggcatcccttngttggtattggngaacaagattgacaaagcgggggctctgtctanacaagcatttgactgaccaatgga

SEQ ID NO: 224300 - DNA, 457 bp, Glycine max
agttgcaggaaaaatggtttcgctgaaactgcagaagcggctcgcagccagcgtcctgaagtgtggcagaggaaaggtttggcttgaccccaatgaagtcaacgaaatctccatggctaatttctcgccaaaacataaggaagctggttaaggatgggtttattatcaggaagcccaccaagattcactctcgctcacgtgcccgccgaatgaaggaagccaagaggaaaggacgtcactctggatatggtaagcgtaagggtacaagggaggcaaggcttcccactaaaatcctttggatgaggagaatgcgtgtgcttagacgcttgcttcgcaaatacagggaatctaagaagattgacaagcacatgtatcatgacatgtacatgaaggtcaagggtaacgttttcaagaacaaaagagttttaatggagagcattcataagtccaaagccga

SEQ ID NO: 224301 - DNA, 581 bp, Glycine max
gcatccctcagctctccatcccattcggaaccaaatttcagttccacccaaaaccctaattttctttctctcccgcacctagatcttcaggttttaggcaccttccgccatgcacaaattgggaagaggtcatcgggacaaactccagcagttcataacaataactggagccagtgagaaaatagcactgcaggctctgaaggctagtgattggcatcttgaaggagcatttgatttcttttacaaccaaccccagcttaaaacatttactgattctaggcacttggaggagctatacaatagatataaagatgcatatgttgatatgattttggcagatggcatcactgtcctttgcaatgatatccaggtggatcctcaagatatagtaatgttagttctttcatggcacatgaaggctggacccatgtgtgaattttccaaaaggagtttatggaaggtttacagtctttggggattgattctctggataagttccgtgaaaagataccatatatgcgctctgagctgaaagatgaacagaaattccgcgagatatataactttgcttttggctgggc

SEQ ID NO: 224302 - DNA, 603 bp, Glycine max
  unsure (1)..(603): unsure at all n locations
acaatgatgagggtgagaatagttttatggaggagtttgaagagagagtgaagggaagcaaaaaggggtatttgatatggggttgggcgccacagttgttgatattggagaaccgtgcaattggggggatggtgagtcactgtggttggaacacggtggttgagagcatgaatgtagggttaccaatggtgacatggcctttgtttgcggagcatttcttcaatgagaagcttgtggttgatgtgttgaagattggggtgccagtggggaccaaagagtggaggaattggaatgagtttgggagtgaggtggtgacaagagaggagattgaaaaggctattggtgtggtcatggatggtggagaagaaggtgaaggaatgagacagagagccaaggctcttagtaatgcggcaaaaaaggctataaagcttggtgggtcttctcataacaatatgatggaactgattcgggagctcaaggaattgaaactcangaggaagcctcaataaattaaacagtgcctagtcccacatcatcacatgtttttctttgattaataaaaagttacggtttggaatcgattaacatgattaggagatcgag

SEQ ID NO: 224303 - DNA, 577 bp, Glycine max
  unsure (1)..(577): unsure at all n locations
ctctctctctctccgacctagcgagaccgagcgatccgaccctaatctcgcgatgctccgccgcgcaacctcctccctcctcaccggcgcctcccgccgccgcctctcctccgacgtgccggcgacccccgccgcggattccgccttcgcggaggcgtggaagaaagtgagccccaacatcgacccgccgaagacgccgctggcgtacatgaagccccgaccacccactccctcggctctcccttccaagctcacagtcaacttcgtcttgccctactcttctcaattggccgcaaaagaggttgatatggtcattgtaccagcaacaactgggcagatggtgtgttctcccaggacatgtagcaacaattgcagagttgaacctcggtgtcttatctgtacatgaagggaacgatgtgaccaagtactttgtcagcagtggctttgcattcatccatgcaaactctgttgctgatataatagctgttgaggctggtgccgtggaccgaattgatgcgaatctagtccagaagggtcttncagatttcacccagaagctgaactcagccacaactga

SEQ ID NO: 224304 - DNA, 593 bp, Glycine max
  unsure (1)..(593): unsure at all n locations
caacatttcaagcatttgatttgcaaattgcaaatccctccaccttttcaaaatcttttgtgatcttttccaatggccaccttcatcttaaggtctaacaaagcagtgcatgcctttggttggctttgtctgctactgatggttcataagggtgcttcctatgattttgttgttggtggccaaaagggttggagtgttccaaatgaccccagtttcaatcccttcaatcaatgggcagaaaaaagccgttttcaaattggagactcccttgtgttcaactaccaatctggccaagactcagtgctctatgtaaagagtgaagactatgccagctgcaacattgattcaccttatgcaaaatactctgatggccacacagtctacaagctaaaccaatcaggccctcacttcttcataagtggcaacaaagacaactgcaacaagaatgagaagttgacagtgattgtgctagctgacaggaacaaaaacaccaaccaaacaaccactgcttctccaccatcaccacaaacatcatcatctccttcagcagcacctactggccaagatcanggtcagtctgcaacttcagacac

SEQ ID NO: 224305 - DNA, 595 bp, Glycine max
  unsure (1)..(595): unsure at all n locations
tgcacagccgcggtaagggtatatcctcttctgctttgccctacaaaaggacaccccctagctggctcaagatctcttcgcaagatgtggaagaaaatatctgcaagtttgcgaatgaaggggtttgacccccgtctcagattggtgtcattcttcgagattctcacggtattgctcaggtcaacagcgtcactggcagcaaaatccttcgcatcctcaaagctcacgggcttgcgcctgaaattccacaggatctttaccatttgattaagaaggcagtttcaattaggaagcatcttgagaggaacaggaaggacaaggactccaagttcaggttgattcttgttgagagcagaatccaccgacttgctcgctactacaagaagaccaagaagctcccaccagtctggaagtatgaatcaacaactgcgagcactctggttgcttagagaatgtatcaactttcatgggttttgctaccttgcagcctctggtgagctagcagttttccatatcatattgatgtttatttgaaagctggataggtgatgtggtctttagttntgttaacaacctatttttagactgggaaaga

SEQ ID NO: 224306 - DNA, 449 bp, Glycine max
actcccctttgccgctgttgttgttgctgcaccaccgaacaacttcccctgtaaatcgcgtttcgtttgtgcaaggttttaaaagatggctgatgctgaggacattcaacctcttgttgttgataatggaactggaatggtcaaggctggttttgcaggtgatgatgctcctagggccgtgttccccagcattattgggagaccacgccatactggtgtaatggttgggatgggtcagaaggatgcttacgtgggtgatgaagcccaatcaaaaaggggtatactcaccttgaagtatcctatagagcatggcatagtcagcaactgggacgatatggagaagatttggcatcacacattttacaatgagctacgtgttgcccctgaagaacaccccgtacttcttaccgaggcaccactcaatcccaaggccatcagagagaagatga

SEQ ID NO: 224307 - DNA, 538 bp, Glycine max
  unsure (1)..(538): unsure at all n locations
actcccctttgccgctgttgttgttgctgcaccaccgaacaacttcccctgtaaatcgcgtttcgtttgtgcaaggttttaaaagatggctgatgctgaggacattcaacctcttgttgttgataatgggactggaatggtcaaggctggttttgcaggtgatgatgctcctagggccgtgttccccagcattattgggagaccacgccatactggtgtaatggttgggatgggtcagaaggatgcttacgtgggtgatgaagcccaatcaaaaaggggtatactcaccttgaagtatcctatagagcatggcatagtcagcaactgggacgatatggagaagatttggcatcacacattttacaatgagctatcgtgttgcccctgaagaacaccccgtacttcttaccgaggcaccactcaatcccaaggccaacagagagaagatgacccaanttatgtttgagactttcaatgtgcctgccatgtatgttgcaaatcaggctgtcttgtctctgtatgccaagggacgtactac

SEQ ID NO: 224308 - DNA, 550 bp, Glycine max
  unsure (1)..(550): unsure at all n locations
gctccactctgggtttcaatggcggtcttgccttgggcactttaaaaccccactttgtcgtctaaatcttatccaatctaataatttgtatacatggctagggcatgaaccaaccttcaattctgaaaaatcccattgccaatgttgaagctcattgcatcctcctcgcgcatccaccgggtgcaccccacggtgctccgtcccgcacacgattccgcctcgccgctgctcagagtgctgagttctctcgtcgggttaagctggagaaacactaatgttggaggcaggtattttttctgttccggttccagcgacagctccatcgcgtggttgacgccggagtccaagccgccgatgagtccgagtcaaaggcctccgctatcgttcccacatatcccagacccgaagattatctcactgttttggcactaccattgatacatagaccactttntccaggattttaccatgccatctttgtgaaggatcccaaattattagcagctntacggaaagtcgagaacgacaagccncatatgctggtgctttc

SEQ ID NO: 224309 - DNA, 503 bp, Glycine max
gaacttgaaaagttgttttgtattattgtatgtattagaatattgttccttgtgaacaacaacactccatggccctgcctcggcaaaaaatgtaattttttttaaaaaaaatccctcaaatataaatatacatggtattacaattggaatgtctgaaaaatggaaataatagaacaagaccttgagcccaagcgatgaatagaaactccaaaaaccattggtactaaattaatatagtaccaaatttagctggttcccagctcaacaaagaatcaagtttcatctcaagatcctacagaacattaatgactctctctatattctgagattgatcatcacccaaagccaaattaaatatctgcatgtagtcatcaacaaaatgaacatcaagaccttctttcacattaggtgctagctcatcaaaatctctcctgttagctgaagggaatataatagtcttaacttcactccttcttgcagctatggtttttctctttaacccc

SEQ ID NO: 224310 - DNA, 328 bp, Glycine max
attaggggggatatcataaacattttcactctcagggataacagcactacacgcatacattgacatcttgccatcgatagcagcactcacatgcatacataacatagtaattaacaccatgaacatgcccttctacccaactctaacctacttgcacagtacttattgaaataaaaaataaaaaaacaaactaacaaacaagagtgacatcggaagattaaaaaacaaagcgtcttaatcctcgcatccccatgaacctggtgtggtcttgatcggttcattgaaccaaataaccaacccatttaaagaaaaacaccttaattatttt

SEQ ID NO: 224311 - DNA, 486 bp, Glycine max
gtggttttcatcgtcttccttctcttatatttcttttttttttttgtcttcgccgcacgccgaaacaatggccggaaaaggagagggtcctgctatcggaatcgatctcggaaccacctactcttgtgtcggtgtgtggcaacatgaccgagttgaaatcatcgccaacgaccaagggaacagaacgacgccgtcttacgtcggcttcactgataccgagcgtctcatcggtgatgcggctaagaaccaagtcgccatgaaccccatcaacaccgtcttcgatgccaagaggttgattggtcgtagattcagtgactcctctgttcagagtgatatcaaattgtggccttttaaggtcattggctggtgctgctgacaagccaatgatcgtggttaactacaagggtgaagagaagcaatttgctgcagaagaaatctcttctatggtgctcatcaagatgcgtgagattgctgaggcttaccttg

SEQ ID NO: 224312 - DNA, 624 bp, Glycine max
  unsure (1)..(624): unsure at all n locations
ctccttccagagcttcgatgatgactgcaggttgcttggtaatctcctcaatgacattctccagcgtgaagttggcaccaacttgcttgacaagatcgaaaggactcgagtccttgctcagagtggttgtaatatgaggcaggcgggtattgtaaacatggcagagatgcttgagaagcagttggcttcggagttatcaaagatgacactagaagaagctttcacccttgctcgtgccttcagccattatcttactttgatgggtatagctgagacccaccatagggttcgtaaaggagggaatatggcacaaattgcaaaatcttgcgatgatatatttaaccagctggtgcagggtggagtccccccagaagaactttatgacacagtctgcaagcaggaggttgaaattgttctcactgctcatcccaacagattaaccgtcgaaccttacagtttaaacacattagacatgctcatcttttggattacantgatcgacctgatcttagcactgaagatcgagaaatggtgattgaagatctggtgagagagataacttcaatatggcagacagatgagcttatgcgccagaaacccactccagttgatgaagctagagct

SEQ ID NO: 224313 - DNA, 426 bp, Glycine max
cgcacagccacggattgggtatatccttttctgcttcgtcctacataaggacaccctgtgggtggctcaagatcggtctccttgatgttggaagaaaatctcatgcagggcatgcaataagggggcgacccctgctcatattggtgtctttcgtcgcgactttcacggtattggtcagggcaacagcgggactggcagcaacatcctacccatgctcaaagctcaccggcttgcgcctgaaattccacaggatctttaccatttgcttaataaggctgatctacttaggaagcctctagtgagggacctgagtgacgagggctccctattccagctgcttcttggtgagagcatattccaccgactctctcggtcctacaagatgaccactaagctcccaccactctggatgtatgattcaacgac

SEQ ID NO: 224314 - DNA, 571 bp, Glycine max
  unsure (1)..(571): unsure at all n locations
caacggagcacctctcttcaggtcgccatctagactgcaatcatggctgatggaccacagcatccatcagttgttcagaagctagctggacagtcttacctggtgtccaggctaagccccaactttaactctgggaattattcctcgactggttcttacttcaatggaggactgcactcttctgggttggctgttgtgtcgcctggatctccagttactgtgcatgctccagcagagaaaggagtgagtggatttctagtggattttctgatgggtggagtgtctgctgctgtgtcaaagacagctgctgctccaattgaacgagtcaaattgcttatccaaaatcaggatgaaatgatcaaaagtggtcggttatctgagccatacaagggaattggtgattgttttgctcgaaccatgaaggagacnggtgtgattgctctttggaggggcaatactgctaatgttatcagatatttccctactcaggctctgaactttgcctttaaggatctacttcagagacttttcaactttaaaaaggacaaagatggctactggaagtggtttg

SEQ ID NO: 224315 - DNA, 551 bp, Glycine max
  unsure (1)..(551): unsure at all n locations
ggtgaaattaccctctgggaactcagtttacgagaaaagttggtctcaaagccattcaagatatgggatgtgtctgcatgctcattaccatttcaggctgctgcagtcaaggatgcacctatttcggtcagtcgggtcacatggagccctgatggaagttttgtgggtattgcttttactaaacatttgattcacttgtatgcttgcactggatcaaatgagctaacccagcgtatagaggttgatgctcatgttgggggtgtgaatgacttggcatttgctcatccaaataaacagctgtgtattgtgacttgtggagatgataagttgataaaggtatgggatttaaatggacgaaaactattctcctttgaggggcacgaagcacctgtgtattccatttgtccccatcacaaagagaacattcagttcatattntcaactgccattgatgggaaaataaggcatggctatacgataacatgggtttagggttgactatgatgcncctggtcactgtgcactacaatgctntacagtgctgatggact

SEQ ID NO: 224316 - DNA, 394 bp, Glycine max
ggaagcaagaaacaataacattacaaacaataaaattgagttaacaagaataaaaggtatacacgattgtacgtctaagcatttaccattttatgtccaagctgacctgatattgatgagacatattggtgaatcgaaatctaaacatctaagctgatacaattacagatgaaaagaactacactagtataatacaatttgttgatcgtttatctttgagcctgatcagcagtgtggttgcttgttgtagatgatgatcctgttctaccattcaatattccattgtccgttggggggcaggttccccacttaccctctgactcgttcggttctatcactttgacagatccatccgtcaacccaaccgcaaactggttgggttctagaggatgag

SEQ ID NO: 224317 - DNA, 539 bp, Glycine max
gtgaaactgaaaaggggaagaagagagtgaaatgggggagctttacgcgttggacttcgatggagtcatatgtgatagctgcggagaaagctctctctctgctctcaaggctgccaaagtgagatggcctggtttgtttgatggggtggattcaaccacagaaaattggattattgaccagatgcacacagtgcgaccagtagtggaaactggatatgaaaacgttttacttgtgagattgttgcttgagagcagaacaccaaccatccggaagtcttcggttgcagaggggctaacagttgagggtatattggagaactggtcaaagttgaagcctattatcatggaagaatgggatgagaagagggatgatctgatagatctttttggaaaggtcagagatgaatggttggagcaagaatttgctacttggattggtgcaaacagattatatcctggtggttctgatgcattaaaatttggcagctcaagagtgtacattgtcaccacaaaacagagcccgcttgctgatgctttac

SEQ ID NO: 224318 - DNA, 467 bp, Glycine max
gcagtaaaggttttagcatttcattggaaaaggaaatacaccggaggctgttctcatcaattaaaccccccacacactgttagaaaaggattgtcaataatatacgccatttccagacaccacacaaataaaaacataccatttatatatccacaaatggactatctctctccccctattgccaaaggtggggcaaccaaccccaaacaaagagaaaccacaggagacctatctctagctaatccaaccctcaaatccggccctcaatgtacattcccttcatctaccatcatattttggcgaacttaaaattgcatttatgtgtgaagagtgactcatgtaatgctcattactttgcttccaaaaacttatcatgggaatgtttctattctatatatgtagtattgtgaatgcttatcgattcattgtttttaaattaattaggatatcttttgtatcgacaatct

SEQ ID NO: 224319 - DNA, 407 bp, Glycine max
ctcgagccgctcgagccgattttcagtggaacaatggcgggtagggtttcgacgtgcgggtcgttcgggttggctctttctctccttcctccttttcagatctccgctgacgaatcatcggagaaagacgacgtactcacatagcatcactctatctttcacgacactgtcagcaagcacgatggcatggacgccgagttctacgctccatgcagaggccactgttagatgctggctgccgcgtatgagaaagctgccactatcttgagtagtcatgatcctccggttgttttggctaaaagagacgccaatcaggagaagaacaaagacctagcatctcaatcgacaggaggggatacccatcaattcagaggctgagaaaggggggaaagaatggccaggaatac

SEQ ID NO: 224320 - DNA, 567 bp, Glycine max
cgcatttcctcgtttttttcttcccttttctctttctccggcgacgatctcagattccggccactcctctcgccggcgagcccttactcttccctcctccgtcgagccctctccgattcgaatcgttcccagcctcgcaccaccatgaatcccgaatacgattatttgttcaagcttttgctgattggagattctggtgtaggcaagtcatgtcttctcctgaggtttgctgatgattcataccttgacagctatatcagtaccattggagtggacttttaaaatccgcactgtggagcaggatgggaagactattaaacttcaaatttgggacactgcgggtcaggaacgtttccgaacaatcactagcagctattatcgtggggctcatggcattattgttggtttatgatgtcactgaccaagagagctttaataatggtaagcagtggctgaatgaaactgaccgttattgcagtgaaaatgttaacaagcttctagttggtaccagtgcgatctcacggcaataagttgtgtcctatgagacagcataggcctttgcagatg

SEQ ID NO: 224321 - DNA, 528 bp, Glycine max
cgagggacaaagaacaaggcaaatactgctattcaccaatattcctaatttgtacaaatgttttttcttttaaaatcaaatacatagaaaataatggaagttttaacaacggcttaacgataagaggaacaaatcatgacgaacaatcttgatatgaaagcaatgtgaaaagctagttttagatgccactgagacacatgaacttctaagaccccaaatacttcgtctctctctaagtcgagcagcaaccagccttctggttcactggctgtcctcgaatttgaactgttggaggcctcgcattgttcactggctggcttgccattctgtttttaatttcagcagccatggccatgaaagcctgttcaacattggtggcatttttagcactagtttccatgaagggaattccaatttcatctgcaaaagcctttgctgtctcataggacacaactttatttgccgtgagatcgcacttgtttccaactagaagcttggtaacattttcacttgcataacggtcaattt

SEQ ID NO: 224322 - DNA, 438 bp, Glycine max
aaaataaaacaagtaatccattcagagtgtcacaaatgcaatcaaggaactaatcatgtcataatttacatccatacaatggattaaaacaaaaagattcacatgaatttccaaatgaagaagactccagatacataaataacaactaatacaagcaagcacatacaaaaacaagagcctaagcccttgtcttgaaagggatggctcggatgactatctggtgatacacagcagcaagggcagctccaatgaaaggtccaacccagaaaatccattggtcatcccatgcatggtctctgttgtagatgatggcagctccgagactcctagctgggttaatgccagttcctgtgatgggaatggtagccaagtggaccaagaacacagcaaatccgatgggaagtggagccaaaataggaacgtgtgagtctctagcgt

SEQ ID NO: 224323 - DNA, 564 bp, Glycine max
ctttgaattttctatcagaatctgattaccttaaatctagggttatctgttcttctgtggggatctgaatacatgcagtccacgtctgaaactgcaaatcggctgaggtcagatcctcattcctttcaacctgacggtgtttattctgagccttggtggcgtggtattgggtacaatcccatggcccaaacaatggctggggcaaatgcctccaattcgtcgtctcttgaatgccctaatggcgattctgaatccaatgaaaagggccagtctctgtccactaaggggatgaatgaggaagatgatgatgccactaaggattctaagcctgctgctcctaatgaaacaggaaattatgagcaagaacagcaatggatgcagcatactgcatcatctccaccatgcatgcgtgaagaatgccttactcagacaccacacctggaacttgatggtcattcaattgcgtgatctacatatacttaccagcatccgtattatgggggcatgatggcagcttatggtcaccaacatgtgggatttgctactttttaggaatgccctatg

SEQ ID NO: 224324 - DNA, 558 bp, Glycine max
ttcgattccatcactgatatttctcttctctctctctttctctgccgaatatggcgccgcctgcgccagcagttgaaggcggccaggcgccgcaagggcggcagcaacagccgcaaggagggtttggcctctccggaatcatacgcatggcagttttctggtacttcgcctccaaattcttttcccccaaaaaacctaccgaaccttccgctctcatctccaatctctatcagaaggcacagcctctggatatgtggctttatctttccgagtacgagaagttcaatgactttggtagtgaaagttctcttgtatggcatgaaaccaatattccgtatgccgtttggggacctgagagtaccaggactctaactttgaagtatcatccgtctgagtctttgaagcataatgggagtctatatgctcatgttttctttgcacactctggcttttcgcctgacccaagtgatccagaataccagcctcaagcagcatttggaaggacgcatactgttgtgatgtacttgcccaagtcacaagcagataataagaaaagtc

SEQ ID NO: 224325 - DNA, 465 bp, Glycine max
gccattcgtattgtcgcagagaaagaaaaccctagctcaccgtttcaagatgcaaatgttcggtgagaccctcactggtgagaccatcactctcgaagtcgagagttcagataccataggacaatgtaaaggccaaaattcaagacaaggaagggatcccaccagatcagcaacggctcatttttgctggcaagcagcttgaggatggacgtacccttgctgatgataacatccaaaaggagtgcactctccacttgggtcttcgtctgcgtggagggatgcaaatctttgttagagaccttgacgggaaagacaatcacccttgaggtcgagagcttcgataccattgaccacgtttaggctaagattcaggacaaagagggcatccctacagatcaacagaagctgatctttgctggaaagcaccttgaggatggccgtacccttggtgatttcaacatccag

SEQ ID NO: 224326 - DNA, 460 bp, Glycine max
gaaattgcctatctcaagaagcatctgagttcttattatttgtaatatatatagtcactcaagcttctaggatttgtgccagctacatgaaaatgggaagcaacttcaggttttcgagtctttgcctcttggcattgattgcatcaacccatgctcaacttcagcttggtttttatgccaagagttgcccaaacgctgagcaaatcgttttgaaatttgtccatgaccatatccacaatgctccatcactagcagctgcattgatcagaatgcacttccatgactgttttgtgaggggatgtgatgcataagtccttctgaactcaacaaccaatcaagctgaaaagaatgcttctgcaaatctcacagtatgaggctttgacttcattgacagaataaagagccattgtgaagcagaatgcactggtgtggtctttcgtgctgatatcctcactttgtc

SEQ ID NO: 224327 - DNA, 585 bp, Glycine max
  unsure (1)..(585): unsure at all n locations
gaacgacaccgagaccagacacggtttggggcacagttaaggtggtagcagtagcattgttaggccatatctcctttttttctctgccttgtattgaggtaaaactcacaaatattataactttgatctgaggaagcaatggcatggagaggacatctttcgaaaaacataaaagaacttcggtttgagatgtgccagtcatctcctgcaagctcacctgcaagggcttttgtggagaggaattataaggaactaaagacattgaacccaaaattgccaatattaattcgtgagtgcagtggagttgaacctcaattatgggcaagatatgatttgggtgttgagaaaggcatcaaattggaaggcttgtccgaagcacagatctttaaggcacttgaagatttgtcaaaagcaggacagtctttgaaagcttgatattgctgcttatgcactgtcttaagtggaataaatgctctcttgctgaccttgctattgcaaattgctttttgatttaaaataagccaggccttttntttctctgttctatggcctctggtttcagcctgtctctgcatcttacatcat

SEQ ID NO: 224328 - DNA, 568 bp, Glycine max
  unsure (1)..(568): unsure at all n locations
caagacctttgagcgtgtggagggagtgcttcatgttgtccctggcactggcatgtgggagtgtgttgactttttccctgtatctagcaagggtgaaaatggccttgatacttcaatcaatggggagaatgtgaagcatgtggtaaaggttagcttggatgatgatagacatgattactatgcactcgggacttacgatgagaagaatgttaagttcacacctgatgacttcaacaacgatgttggtattggactcagatatgactatggtatattttatgcatccaagacattttatgacanagtaaggggaggagagtgtgggggttgaatgggnagaagtctgatagcgaatacgctgacgtggccaaaggttgggcatcagttcagggtattccaagaacagtggcacttgataagaaaactggtagcaacttaattcaatggcctgtggcaaaggtagagagtttgagattgagaagcgacgagtttcaaaatttgaaggtgaagccagggtcagtggtgccactagaaattggaacagctgcacagttggacattgtagctg

SEQ ID NO: 224329 - DNA, 487 bp, Glycine max
aaaatccccaaccaatctgtagatacagaagggcaaaaacaaaactattttttatgccctttcaagtacacatgcaaatattaaactatttcaatttcttaaccattttttagccccacagacatacacaaatgcaaaataaaaacttatatacccattaagattctacaacttctcggggattggcttgctctctttttttttttaacttccattcactttcttacaatctggtctgatttctccttgagttccagtcaaagggctgatgttacccatgttgatcattgactgagcaaatgcttcaaaaaaggctgattggttgttggcaaaattgttaacaatggagattgtggaaaagccattcttaaaaaaaagttcttgatctgtttgaaaaagaccttggttgatgaaaaaattggtgaaatatttgttgtcaaaagtgtcaggggttgaaggatcaaaattgttcaatgtagacccattt

SEQ ID NO: 224330 - DNA, 366 bp, Glycine max
ggacatgacaatttcatatattattatacttcacaatcagcattacttttgtttgagactgaaaataaccatattacattattattattattattggaacaatcggaaaacgagggaaaggaatagaaaacaatgaacaacccttggcagttggttgcaccaaccaaagtagccacaaatcgaaatcctagaaaaatcaaaaggtaaaaaataaaaaggaccaaaccctacttagaaaagcataactgttccttgttccttgttccttgttccttgttccatccaaagggagacaacatgcaagttttgctcatggcttccacagaatggttgtgtctgcaatcatggaagtaaccacatatgggt

SEQ ID NO: 224331 - DNA, 349 bp, Glycine max
ccatatccatttgttattatcgttattatcccacgggtatccaagaaaagtcttggcggcatccaagcttggaaaatacgtcggttcaaggaaaatctgagtcaacgagtcagccgagtcgcaactcaacccaactcggttaccgttagcctctgaacttcccatcaccaccgccaacacctgcttatacgcgtagaagaatctcttcatcgccgcctcaatcgcctgcatcgcctgcaacaagtgaaccttctcgaactcgctcttcgaaacgtagagcttcatcgccgcctcttgaatcctcggccctcccttcggatccacctccacctacaatatctccggcacc

SEQ ID NO: 224332 - DNA, 487 bp, Glycine max
gtggttttcatcgtcttccttttcttatatttctttttctttctgtctacgggggacgccgaaacaatggccggtaaaggagagggccctgctatctgaatcaatctatgaaccacctactcttgtgttggtgagaggcaacgtgaccgagtagaaatcatcgccaacgtccaacggtacagaacgacaccgacttacgtcggcttcactgataccgagcgccttatttttgatgccgctaaaaaccaagtggtcatgaaccccatcaacaacgtcttcgatgccaagaggatgattggtcgcagatgcagcgacttctctgtactcagtgatatcaaattggggcctattaaggtcattgatggtgctgctgacaagccaatgaatcgggttaactacaagggtgaagagaagccctttgctggataagaaattttttcttggtgctaattaagatgcgagagattgttgatgctcaccttggctt

SEQ ID NO: 224333 - DNA, 555 bp, Glycine max
  unsure (1)..(555): unsure at all n locations
aagagtctcaccaatgactgggaagagcatttggctgtcaagcacttctcagttgagggacagttggagtttaaggctatcctctttgttcctaagagggcaccttttgacctctttgacacaaggaagaagcctaacaatattaagctttatgtccgccgtgtctttatcatggacaactgtgaggagttgattcctgagtatttgggctttgtcaagggtattgtggattccgaagatctaccactcaacatttcaagagaaatgttgcaacagaacaagatcttgaaggtcatcagaaagaacttggttaagaagtgccttgagctcttctttgaaattgcagagaacaaggaggattacaacaagttctatgaggctttctccaagaacttgaagctaggtatccatgaggattcacagaacaagggaaagattgctgaattgctcaagtaccactccaccagagtggtgatgaaatgacaagcctcaggattatgtgacccagatgaaggaggtcagagtgacatctactacatcacangtgaaagcaag

SEQ ID NO: 224334 - DNA, 456 bp, Glycine max
atagctaattagctaaatatccattgaacactggcatcaattcaaaattaaaaagggggaaaaaaacctatccaaaaaaggcattagatactcttctaacaagaaacgcatcatttttaattttaatcaacctcctccattttgctgcccttagcattaacctcggcctcctccagggggggctttttagcattagcttcacctgcatcctcgtcaatgcttagtccaagctttaacattttgtggatcctgttcccaaaagtgttgggctcgttaaggttgaaaccaaaagtgagaaaagcattctctaacagcaacacaacaagggccttcacggatttgtcatttttgtttggattagcacgctttctgagctccctcatgattgggttttcacggttgatctccatggtctttttgcttgacatgtaccctgccatgctggtgttccttaaa

SEQ ID NO: 224335 - DNA, 539 bp, Glycine max
tatcacttctcatgccaatttactgctgatctttttgcaatgaaccacacagactttatcatcaccagcaccttccaagagattgctggaagcaaggacactgttggacagtatgagagtcacactgccttcacccttccaggactctaccgtgttgttcacggtattgatccctttgatccaaagttcaacatcgtctctcccggtgccgacatgagcatatacttcccatacactgaaactgagcgtaggttaacagagttccaccccgacattgaagagcttctttacagctcagtggagaatgaagaacacatatgtgtattgaaggaccgcaacaagccgatcatcttcaccatggcaagacttgaccgtgtgaagaacatcacgggacttgtggagtggtatggcaagaatgcgcgcctccgcgagttggtaaacctcgtggtggtggcccgagacaggaggaaggagttcaaggacttggaagagaaggccgagatgaaaagatgtatggcctcatcgagacctacaagttg

SEQ ID NO: 224336 - DNA, 584 bp, Glycine max
gcggtgttggctggtggtagagcaggagcatctgatattaaagactgcccattgatgtatagatggcatggaacaaggtacttgggtgcagcaaatggccttgctggtatccttcatgtgctgctacattttccacttccaagtgaggatgctgaggatgtcaagggaactttgtggtacctcatgagtaagcgtttccctcacagtggaaactatccctccagtgaaggtaatccaagggataagttagtgcaatggggtcatggggcgactggcatggccatcacgttgtccaaagcagcagaggtatttcctaatgacagagaactaagagatgctgcaatagaagcaggtgaagttgtatggaagagtggattggtgaagaaggtgggacttgcagatggggtatctggaaatgcctatgcctttctttccctctacagactcactaaagagggtatatacgaagagagagcaaaaacattcgcttccttcttgtatgataatgcaaaatctctggctgctgccaatggctattcacttttccaaggacttgctgggacagcatgcctcttgtttgatct

SEQ ID NO: 224337 - DNA, 578 bp, Glycine max
ctcgagccgattcggctcgaggtcaaatcggtttggcgctgggttattcggatgtgtctctctttgtatccttgactagtatttggggcttcttcggtcggatcgtctcgggttcggtttcggagcactttatcaagaaagctgcaactcctagaccactttggaatgcagcctctcaaattctgatggcggtgggatacatactcctggcaatggctatgccaggttccctttacatagggtccgttgtggttggcatatgctacggggtgaggcttgccattactgtgccaactgcctcggagttattcggcctcaaatattatggtcttatatacaacattctcattcttaaccttccccttggctctttcctcttttctggtcttcttgctggcattctgtatgatatggaggcgactaccaccgtaggaggaggcaacacttgtattggagctcattgctacagactagtattcatcatcatggctgtagcttgtgatgttgcttcttctaaacatttatttgcattcagaactaaaaagtttaccacagatctcttcagaaaaactcaacaa

SEQ ID NO: 224338 - DNA, 578 bp, Glycine max
attccattctctctgtgtatttccctacctctcccttcaagatgcagatcttcgtcaagaccctcaccggcaagaccatcacccttgaggtggaaagctctgacaccatcgacaacgtcaaggccaagatccaggacaaggaaggaatccccccggaccagcaacgtctcattttcgccggaaagcaacttgaggacggccgtacccttgctgactacaacattcagaaggagagtactcttcacctcgtcctccgtctccgtggtggcatgcagatcttcgttaagacactcaccggcaagaccataaccctagaggttgaaagctccgacaccatcgataacgtcaaggccaagatccaggacaaggagggtatccccccggaccagcaacgtctcatcttcgccggaaagcagctcgaggacggccgcaccctcgccgactacaacatccagaaggaatcaacccttcacctcgtcctccgtctccgtggtggcatgcagatcttcgttaagaccctcaccggcaagactattaccctagaagtcgaaagctccgacaccatcgacaacgtcaag

SEQ ID NO: 224339 - DNA, 508 bp, Glycine max
ggtgggatattagagtactattattaatgggacacaattgagttcaacacaaaccgaacttattttcaagggacattattacagacccattaaacatcaaagttcttcaaatgttttgggaacacatccaacattacacaacgagcttaaaaccccccacggagacggaggacaaggtgaagggttgattccttctggatgttgtagacagcgagggtccttccatcctcgagctgcttgccagcaaaaatcagcctctgctggtccggtgggatgccttccttgtcctgaatcttggccttcacattgtcaatggtgtcagagctctccacctcgagggtaatagtcttacccgtaagagtcttcacgaaaatctgcataccaccacgaagacgcaacaccaagtggagagttgactccttctggaagttgtagtcaagaagggtgcgtccctcctcgagctgcttcccgcgaagaacagcctcggtggtctgggggaaaccccctt

SEQ ID NO: 224340 - DNA, 437 bp, Glycine max
ccaattaattgcactatattttgatgatgtggccttccaatggttgcggcttcactaataaaatcttggccatttccttttgattcacctaacatctttattgccacacaagacccgctacccaattttcccttgaacacagagccatatgctccttcacccaacttgtatttaaaacctcctgccatgttcttaacttccttgtatgaatatctaataggcatcaagttattttgttctagataattttcaatactttcaaacattgacaaaggtgtttttctccatttacacgtcaaaatcacaataaacagtgacactggtaacaaaattttccatgcccataacatagtgaaaattatgagaatactccaaccccatgatgattcccagttccaataatgaacctcctgggtgacagagtcaaaaaagcagac

SEQ ID NO: 224341 - DNA, 403 bp, Glycine max
gcttattgtgatggtgcatattaccaatttgggttcccttctcttgattttgggggtcataactcttggctcttctttcccttccaccgctggtacctctacttctatgagaaaatcttgggaagcttgatcaaagatcttgaccctaattttgcccttcccttttggaactgggatttccccaatggcatgccaatgccagccatgtacactgatcccaagtcaccactttatgactccctcagaaacgcaaatcataaaccgccaaaactcgttgacctagactacaacggcgttgaagaccaattctcaacacaagaacaaatattaaccaatctcaacaccatgttcccggccactggtgtcaagttaaaagactccaacgctcttcttcggtagcccc

SEQ ID NO: 224342 - DNA, 527 bp, Glycine max
tgtcacaccaactcaataacagatcaaaccaaacccaaactgttaggtttcctttgtttggtgtgaagccatggctgattcttcttccaacctgaaatccgacgcgataatggagcagatgaagcaacacctcgccaccgacgctggcaaacaagtcaccaataaaattggactcgtttatcagtttcacattgctcctaagaaacttggattcgacgaggtcgtctacaccgttgatctcaagaaaggagaggtcaccaaagggtcatatgaaggaggaaagcctgatgcatctttttcgtttaaggatgaggactttgttaaggttgccttagggaagatgaatccgcagattgctttcatgaggggtgcgatgaagattaagggaagtttgagtgctgctcacaaatttactccggatatcttcccaaagccttctaagctgtgagctgagatttctgcaactacctgcacaaggttgctagaattatcgtttggctgcagtcaaacaaaatagatagcaatca

SEQ ID NO: 224343 - DNA, 248 bp, Glycine max
ggactgtccatgatgttgttcttgttggtggttccaccacaattcccaaggggcggcagctcctgcaagatttttctaatgggaaggagctctgcaagagcatcaatcctgatgaggctgtggcatatggagctgcatttcaagctgctatcttgagtggtgagggtaatgagaaggttcatgatcttctccttcttgatgtcacccctctctctcttgggttggaaactgctggtggggagatgaca

SEQ ID NO: 224344 - DNA, 514 bp, Glycine max
atttcccgggtcgacgataggcggcggccgcccttttttttttttttttttttatagaaacataaacatactaaaaaaccagcttataacatatgctttaaagcctgtatgtgtccactaaaacacagtgaaaactgaaaagggtaacatgatactgaaatcattaatttatcttgacatacttccaaatattgtttttcttgagaaatttaatccaaccaaaggacatgaaatcagacatttaaaaataaatagtaaatcaaaagcagaaattaactaaatttagtctacttcctcaatctttggccccgcaccgctttcagcatcaggaacatcatctttcattgtaccacccacgtttggaccagcaccaccctgttacattttggcaatgatagggttgcagatgctttccaactcctttattttgtcctcaaatacaattgcctctccaagctggttgctgtctaaccactggatgggctgcttaatggcattctcaatctttttcttg

SEQ ID NO: 224345 - DNA, 515 bp, Glycine max
gggaataggctactcggacttagtggttcatatgcaacgaaagtgctcaacactttgatattcaactcctttgtattttgccaggtgtttaatgagataaacagcatagatattgataagataaacatattcagaggcatgtttgacagccggatatttttggcgataattttcgccaccgtggcatttcaagtggtgatagttgaattccttggaacgtttgccagcactgtgcctctaaactggctattctggttactaagtgtggtaatcggagcagttagcatgcctatagctgctattcctcaagtgcattccagttgaaagagatactagtaagcagcaccatgatggttattaagcactgccatttggtcccgagctggcatataatattataagagggattaccctggttgctctgctgatttctcctactagtgtagtgtgcatttaatgctgtcattccttacgggattgcaaatttatgttattttgtcaaggacttgatacca

SEQ ID NO: 224346 - DNA, 581 bp, Glycine max
gtcacgaccatgttgtcattattcaccaacttgctcctcttcctatccctgctaatcggtctatgcaattgcagggtaacaacaacaaatgaagaggtgcaaaccctaaacacaaacactcacttcaacccacaggtcccacccctccgaaccctctcttcctcgaagcggttcgagggttcctcggagttcgtgaagctcaaataccacatgggacctgtgctatcgtctccgatcaacatctacctcatctggtacggcaagtggccccaatcccagaagctcctcatcaaggacttcctcaactcaatctccgacgaccaccaccgcgcctccccctctccctccgtctccgactggtggcgcactgtctccctctacaccgaccagaccggcgccaacatctcccgctccgtctccatcgccggcgagtactccgacctccgctactcccacggcacacacctcacccgcctctccgtgcaggacgtcatcgccaccgccgtccaggccaagcccttccccgtcgaccaccgcaacgggatctacctaatcctcaccgccgaagacgtcaccatgga

SEQ ID NO: 224347 - DNA, 488 bp, Glycine max
ccctcattctcttctccaaacacgacacaaacattaagaagaagaaacataccacgaaatgtacggacaaagtagctatgagtccgatttggcccttttggactccattcgccgccacttacttggcgactccgaggagcacaaattcggagccccgaatgttagttcgggtaacactccagcgtactctcggagctcctgtttcagcaggttgtacccttgcttgagtaacgattggggagaacttcctcttaaggaagacgattcagaagacatgcttctttacggtgttcttcgcgatgcaataaacgcagggtgggtcccatctctcgatgcatcctcaccggagagtttctcgtcgggtttcatcccggcggtgaccgtgaaatccgaaccggatctatttccggcgccagagcctgtctatattcctccggcggctcagaaggctgagcccgcggtggttccggcgaaagggaagcactacc

SEQ ID NO: 224348 - DNA, 455 bp, Glycine max
  unsure (1)..(455): unsure at all n locations
ttgtaatccgagtccctccagcagcatgccaggtctcgtatcggacgcccaacccctcggaatctccgtcccggacacacccaggcaatcccagagaaccccttctccactccccaaaaaaccacccagcccatctccttctcgctcctccaaaaagaaaactcctgaaacccctccgcttctctctgatgcctctctcgacaacccggatctcggcccattcctccttaagttggcccgcgacaccattgcctcgggcgatgggccctccaaggccctcgacttcgccatccgggcctccaagtccttcgagcgctgcgccgtcgagggcgagcccagcctcgacctcgccatgagcctccacgtnctcgccgccatctactgcaggctcggacgcttcgacgaagccgttcccgtccttcgacgcgctatccaagttctcgacgtcgaacgcg

SEQ ID NO: 224349 - DNA, 508 bp, Glycine max
aaaacacaatctcatcaaaatttattcactcagaataaaaatgggctttcaacattttccggaaacgtaggacaggtatagaattttgtggtacagcttaaagatcacaacacaattggtaaagccatttaacacagagaaacaaatgcatgaacaaatatcaagaaacaggaaagctccctcccaaattacatattcaaccctatacaagatatcctatgttacagaatgtgcattcaatatatatatttaaatgaataaaactatggttaaattctaaaccccaaaccaggccacctctttgccccctccttcttcgtccgctttgagccaggatcaataaggttttccagagattttgcttttctgtcccgtgtcttgcctgcttctttcagaagctctgccagacgacgctttttatctttaaaatcaggatttgctatcccaagcttttcctccctcagcttgagaacatattcttaagatttaatcgcttcttccactcttc

SEQ ID NO: 224350 - DNA, 530 bp, Glycine max
gaaatgtagtggacgccgtgcatgccaacggcagctttatcttctgtcaactctggcatgttggccgtgcatcacatccagtgtatcagcctggtggggctctaccctcttcgtccaccagcaaacccatatcagacaagtggaaaattctcatgcccgatggctcccatggcatctatccagagcctcgtgcacttaccacttctgagatatctgaaatagtgcatcattatcgccaagcagctattaatgcaattcgagcaggttttgatggaatcgagattcatggagcacatgggtatctcattgatcaattcttaaaggatgcaatcaatgatagaacagatgaatacggtggaccactagaaaaccggtgcaggttcttaatggaggtagttgaagctgttgtctctgccattggagcggaaagagttgctatcagaatttcaccagcaattgatttcaatgacgcccttgactctgacccacttgggctaggcttagcagtgaatgaaagactcaacaatttg

SEQ ID NO: 224351 - DNA, 534 bp, Glycine max
  unsure (1)..(534): unsure at all n locations
tgaangctgatcttctcggtatacagaacagacgntacatgcactcggcccttacctaggaattcggttcgggtcgcggcatagagtatgacaattggtcatcttgtgttgctcctcatgctgtacactactacacatagagggcagcctgtcaagcccaagcccaagcccaagcccaagcccgctcataaaatccttctgcagcagcacccactacccacccctgtgcggcctatccctatacgtctacgcctgcagcatgcaacaggaccctaaccaactgggtgagacagcactctcgctatccctgaaccgcacccaagccaccaaaaccttgggggctaactgcaacaaattccgaggcctgaaacccaaagagcacgctgcactcaaggactgcgccgaggaaatcagcgacagcgttgaccgcctcaaccggtcgctgtaggagctcaagctatgtaagggtaagggtgaagacttcacgtggcacaatagcaacgaggagacatgggtcaggtctgctttgaccga

SEQ ID NO: 224352 - DNA, 527 bp, Glycine max
gagcaacttccaacaccatagtgaaatggcttccaaggctgcacttctcttgtgtttcaatgttctcttcttcaccgtggttagctccacatatgtgccatgcaacccaccccccaaaactccaaaacacccacctgtcccaaagccaccttccccaaagcaagcaagttgccccaaagacactattaagtttggtgtgtgtgctgatgtgttaggtttgatcaacgtgcaacttgggaagccaccaaagaccccatgctgtaaccttattgagggtctcgctgatcttgaagctgcagtgtgcctcttgcactgctctcaaagcttatgtgttgggcatcaaccttaatgttccagtgaacttgagcttgctactcaactactgtggaaagggtgttcccaagggttttgtctgctattaatgaataaacactcttataatgtgtagtttcctatagtaaagtatgtcttaaggttctatttcgctatattcgtattcatcatcctttgtgctttggacttttgga

SEQ ID NO: 224353 - DNA, 560 bp, Glycine max
tctagatcgtcttcacgaggaagaatggcaaagagttacttcaaacaagagcatgatcttgagaagagaagagctgaggctgctaggattagagagaaatacccagaccgtatcccggtgattgtggagaaggcagaaagaagtgatatcccaagtattgacaagaagaagtaccttgtccctgctgatctgacagttggacagtttgtctatgttatccgcaaaaggattaaattaagtgcagaaaaggcaatctttatctttgtggacaacgtccttccacctacaggagcaattatgtcttccatatatgatgagaagaaggatgaagatgggtttctttatgttacttacagtggagagaacacttttggggatctgacttcccattagcattattttaaagattggcactataatataattgctttctcattggccagtctcataaatttgtatcggtactcgatatcaaagaacattgctctcaatacaatgtacagttgtatataaactctaagaagaacctgtttaatgtaaaaatgcttcctccttttcag

SEQ ID NO: 224354 - DNA, 541 bp, Glycine max
  unsure (1)..(541): unsure at all n locations
ccgagaacaaaaaaaaaaaaaaaaaaaaatccgcgattcgctcttctcttggaaaagtgaaaaccagaagtacgaacgaaagagaagagcgatttagaagtgagagaagatggggttgtcgttcacgaagctgttcagcaggttgtttgcgaagaaggaaatgaggattctgatggtaggtctcgatgctgctggtaagacaaccatcttgtacaagctcaagcttggagaaatcgtcaccactatccccaccatcggatttaatgttgagactgtggagtacaagaacatcagcttcactgtgtgggatgttggtggtcaggacaagatccgtccactgtggaggcattatttccagaacactcagggtctcatttttgtggttgatagcaatgatagagatcgagtggttgaggcaagggatgagctgcacagaatgttgaatgaggatgaacttagagatgctgttntgctttgtttgccaacaagcaagatcttcctaatgcaatgaatgctgcagaaataactgacaagcttggac

SEQ ID NO: 224355 - DNA, 508 bp, Glycine max
gccataatagcaaggtatttgaaggtgttcaaatctgcagaccctgcttggttttaccttcatgttacatgccaaacctctgcctacatagttggtgttgctgggtggggaactggtctcaaactcggaagtgactcggttggtattaagtataacacccatagagcactcgggatcaccctcttctgccttggaacccttcaggtttttgctctgcttttgaggcccaacaaagaccacaaaatcagaatctactggaacatttaccactacgccgttggatactccaccataatcatcagtatcatcaacgtctttaaagggtttgatgcattggagacttctgtaggggatcgctacaatgactggaagcatgcttacattggcatcattgcagctttgggtggcattgctgtgcttttggaggcctacacatggattgttgtgttgaagaggaggaactcatagaacaagacagcacatggtgtcaatggaacaaatgggtatg

SEQ ID NO: 224356 - DNA, 622 bp, Glycine max
ctcgagccgattcggctcgaggagaaagcgaaacgcatagaatcgaaagaggggaaaagaaaaagaaaagttagggttagggattttgagagatggcatcgactaagaagatcaccctgaagagttcggacggtgaggccttcgaggtggaggaggcggtggcgctggagtcgcatacgatcaagcacatgatcgaggacgactgcgccgacagtggaatccctctccccaatgtcaccagcaagattctggcgaaggttatcgagtactgcaagaagcacgttgaggcgaacagtgctgatgagaagcccagtgaggatgtgctcaaggcttgggacgtggatttcgtcaacgttgatcaggccactctcttcgatctcattctggctgcaaactacttgaacatcaagagccttttggaccttacttgccagacagtagcagacatgatcaagggaaagactcctgaggaaattcgcaagacattcaacatcaagaatgacttcacccctgaggaagaggaggaagttcgtatggaaaaccaatgggcgtttgaataagctttatgattctgctgtttttgaaattcaatgagaagattgcccttagttactagttatgt

SEQ ID NO: 224357 - DNA, 554 bp, Glycine max
ctcagatttggtttggtttcctcgatggagtcagaggatgatatgcacgacgccaacgacatcgagtccctcgacgacgatttctacagtggcgagaccgaggacgctcctttggactactacagcgacgacgacgccgacgattacttcgacgacgccgagaggatcgagtctcgccgccctgagcaaaattttaccatattgaaggaatccgatatccgactaagacaggaagatgacgtcgctagagtagcaacggttctttccatatcaagggtttctgcaagcttactactccgtcaccacaattggagcgtcagtagagtgcatgatacatggtttgctgatgaagaacgagttcgaaaagcagttggcttgttggagaagccaattgtccagcatcctaatgctagagagcttacttgcggtatctgttttgaaaattatcctcgtgctaggattgaaatggcttcctgtgggcatccctatcgtatctcatgctgggaaggctatatcagcacatccattaatgatggtccgggatgtttgatgct

SEQ ID NO: 224358 - DNA, 530 bp, Glycine max
agtcggcggccgccctttttttttttttttcaccatgttagtcagatgctcaactgcatatagctgattatccacaacagccacaagtggaggtgcctgaacacccacgttaacatatggatacatcccctctattttcccgccaactccttgtcttgagatcatacttctctccacaacttaatgaaacagttgtacttgacattccaccaatcacgtagaatttgccatccataaaaaaaccagaacacaatctacgcgatgtgtgcatgtttggtaaaagttcccacatacctgttgaagagtcatacaactcagctgattttagaacatttccatacttatcacttcccccagcaacaatagcaatcgatccaagactactagatccaaacaaacaccgaggctggttcatttcctggcacttcacccaaccacgacaaatcatgctatacttccaaatagcaaactccatcagttcccgaccgaagacttacagtttcgcacccacggccaaggactccttgtct

SEQ ID NO: 224359 - DNA, 519 bp, Glycine max
gcaaggctgattaggaggaaacatttttaacattaaacagggtctttttagagattatatacaaactgtacattgtattgagagcaatgttctttgatatcgtgtaccgatacatatttattagactgtccaatgagaaagctattattttatatgtgccaatctttaaaaatatgctattgggaagttagatccccataagtgatctctccactgtaagtaacatatagaaacccatctttatccttcttctcatcatatatggaatacataattgctcctgtaggtggaaggacctctgtcacaaagataaagattgccttttctgcacttatattaatccttttgcggataacattgtcaaactgtccaactgtatgattatcatggacaaggttctttttcttgtcaatactctggatatcacttttttttgtctttttcctctattccgagatacggtctgggtattcttctcttaatttctagaagccttatcttttttcttttaaaaccttc

SEQ ID NO: 224360 - DNA, 253 bp, Glycine max
attctcagtctcagtctcagtctcagtctctacacacacctcagaagaacagaacagaaccaccacataacagtgcttttcaaaggcggtttgagcaatggcgttcttaaataaaattgggaatctgctcaagaattctgctgtcaagcacatcaatcaggatttttcggcgtctaccccttcacttttccaagcaattagatccatgtcatctgcaaagcttttcgtcggaggtattcttacaggactgatg

SEQ ID NO: 224361 - DNA, 529 bp, Glycine max
gagaagataaaaatgaatatcgtcattaataataaaaaaaagcgtcattaggtgtatgatacatagatagggtaagtaagcaaaaaaagagtagcaggcagagcttgtaatgtatgaaggaattcaatccaaagcattgggcccagcacaagccttcaaaacggggctccaaatccactgcactagaaacttccgtccattcctaccgttaagattaaaggttctcccttcaccatctttcataacggaaccaatataaccgccgccaccacccgttccgtacaacccctcgcacaaatctccgatctcggttggcgcggtggggtcctcgccggcgtaccacgcgttcaccagcgggttcgacgagagctccgacagctcgtgcccgatcacgctcaccatgccgttcactccgacgtcgccgttcggcggcgtgaggtggccggagccgtcgccgcccatgttgccgggaacagcgaagggataagcgcaaccttggacactgttttctgagttcccacccagcgta

SEQ ID NO: 224362 - DNA, 461 bp, Glycine max
ctcattttcccaatttcgcgataccattaccttagcaatcaacaatgtcgtttttctcaagggggcgtcgtgactacgacacggtggacgactacgactagtactaccccaccccttacggcggtggttactatattgccctcacctactgtcgccccattccacccttcgatgagacctgctaccctctaggagcctattcttttgatgacaacttctattatgatcgccctcaatacacctctaacgctgaaccctctgtttatggtgatgaagccctagctactgagtatagcagctactcttgccctaagcccaggcctgtttctgcaggcttcaacctcgccgtatggtccgggtacggagggttctgatccgggtatgggaggaagcatgagtcggaatatggatccgggtatggtggaaggatcgaatattgtgaatactgctcaagatatggt

SEQ ID NO: 224363 - DNA, 447 bp, Glycine max
tggagggaggggacagctgtgaaaattgtagatccgtcattaaacaacaattcacgaaatgagatgttgagatgtatccatatcggtttgctttgtgttcaagaaaatttagctgacagaccaaccatgacgaccattatgctcatgcttaatagctactctctcagtcttccaattccttctaaacctgcattttatgtgagcagtagaactggaagcatttcagccacgcagtcatgggggtatagttcaggggaatcaagatcaagagaattaacaattaaatcagctcaagaagcagaaaatgagtttactgatccataccctcgctagattttgctcatggaattgatattcattcaccatcgatgtcctggagttcatgtaatttgttcatgtaatgtctttttgtttgaataatccaaactatctctttgtttaatcttg

SEQ ID NO: 224364 - DNA, 586 bp, Glycine max
cacacaacaaaacttttttctggcattgtagcatcatgactggcagagaaatcctccatatgatgaaggtgaaagcagggtttggaacaccagacacagggaatggaaaaggcaaaatatcaaaacacattacacatggctttcacttgatgaagggcaaatcagcgcatcctatggaagattatttagtttcagaatttaagcaagaaaaggacagagaattaggcttgtttgcaatatttgatggccacttaggccatgatgtagcaagctatttgcagaaccaccttttccaaaacatcttgcaacagcatgacttttggactgagacagaaagcgcagtgaaaaaagcttacgttgaaacagatgagaaaatattggaacaagaacttgtgttggggcgaggagggtcaacagctgtgactgcaatacttattgatggtcagaagcttgtagtagcaaatgttggtgactcaagagctattatctgtgagaatggaaaggcaagacaactatcagtggatcatgaaccaagcaaggaaaaaaaatcgattgagaggcgtgggggttttgtattaaacatttc

SEQ ID NO: 224365 - DNA, 568 bp, Glycine max
gaaatttttcataagatgaaggaaaaagttttgggatcatctgatcccgattcaggtaaaggaaagagcaagatgaagaagcacataactcatggctttcacttggtaaagggaagatcaggtcatgccatggaagactatcttgttgctcaatttaagcaagttgacaacaaagagttgggtttatttgcaatatttgatggccactctggtcacagtgtacctgattacttgaagtctcatttgtttgataatatcttgaaagagcctaacttctggacagaacctgctgaggctgttaagagagcatatagtataactgattctactattttagacaaatcaggtgaattgggtagagggggttcaactgcggttacagcaatattgatcaactgttacaagctactagtggccaatattggggattcccgggctgtcttatgtaagaatggcgtagccaaacaactatcggtggatcatgaaccaagcatagaaagtgaagatataaaaaacagaggtggttttgtgtcaaactttccaggggatgtgccacgtgtcgatggtc

SEQ ID NO: 224366 - DNA, 548 bp, Glycine max
aacactctgaaactaacaacatctattaaagaccatgtcggtgaaggagtgggagcacctttaggggaagaagaggaagatcttccggcaagtgttctggtgcttagtggtgttccttttcatcgtgctggtcacaattcttttgatatgggcaatccttagacccaccaaacccaccttcacgctccaagacgtcaccgtctacgccttcaacgccaccgtggcgaacttcctcacttcgaattttcaggtcacgctcatctcgcgtaacccgaacgaccgcatcggtgtttactatgatcgcctcgaaaccttcgtgacctaccggagccagcaggtcacgtaccgaaccgccatccctccgacatattaaggccataaagagatcaatgtttggtcttcgtttgtttatggcaccaacattcccgtcgcgccgttcaatttcctcggcctcagccaggaccagagtaacggtaacgttctcgtcaccatccgagccgagggtagggttcgttggaaggtcggcaccttcatttccggtcggtacc

SEQ ID NO: 224367 - DNA, 387 bp, Glycine max
gttgctgagctgagagccacggttttgggcaaaaaattcaaccactagctcgctagctagttaatttcaataacctttttggtcacttgaatatgttatatcatatatgactctctcgaagttcacagaaccttcggggattattcagcatgggccatctagcatatggccaaattaatgtctactagtgtgattggatctcatgttgaatactcaaactatgctttagttgaattctcttttgctgaataatacgagtagtttgaaactttcaaaaaaaaaacacataaaaaaaaaaaaaaaaatgaacaagaaataacaaaatattaaaaaataatgtacaataaaaaaaaaagggcggtccccaaaataatggggggggccccc

SEQ ID NO: 224368 - DNA, 551 bp, Glycine max
aaaaaaaaaaaaaaaaaaatccgcgattcgctcttctcttggaaaagtgaaaaccagaagtacgaacgaaagagaagagcgatttagaagtgagagaagatggggttgtcgttcacgaagctgttcagcaggttgtttgcgaagaaggaaatgaggattctgatggtaggtctcgatgctgctggtaagacaaccatcttgtacaagctcaagcttggagaaatcgtcaccactatccccaccatcggatttaatgttgagactgtggagtacaagaacatcagcttcactgtgtgggatgttggtggtcaggacaagatccgtccactgtggaggcattatttccagaacactcagggtctcatttttgtggttgatagcaatgatagagatcgagtggttgaggctagggatgagctgcacagaatgttgaatgaggatgaacttaaagatgctgttttgcttgtttttgcccacaagcaagatcttcctaatgcaatgaatgctgcagaaataactgacaagcttggacttatttactccgtcaacgc

SEQ ID NO: 224369 - DNA, 487 bp, Glycine max
gtcccagctgtcaacgggggtattattctcgaagagagagagggcggttgcaggggcatagagaagtgcagagagagcgcagcgtaacgactcagtcaaacagtcggtaactctttcttttcttttctttctttctccgatcgcatcgatcgcaaccacaatcatgccttcctgaagaagaactctcttgaaggtcatcattctcggtgacagcggggtggggaagacgtctttgatgaaccagtatgtgaataagaagtttagtaatcactacaaggcaaccattggagcggattttttaaccaaagaagtgcaatttgaagataggcttttcaccttacagatttgggatacagctggtcaagaaagattccaaagccttggagttgctttctatcgtggtgctgaatgttgcgttcttgtataatgacgttaattcattgaaaccatctgacaaccttaataactggagggaggaatttctgat

SEQ ID NO: 224370 - DNA, 569 bp, Glycine max
gtcggactaggaaagttttcaaagccaagcaaatacgagctttacccaattttcttgctgttgaattttccactgttcaatcttcaaaatcacatttttctcgatcttcaccttctgggttgctttttttttttcttcttcttcttcttcttcttttgttttcgctatggaatcgaaaaaccctgcgaggtttacgctggggaagcagtcgtcgcttgccccagaacgccataacaaagaagcagagctccaaaaagatggggaagctgttgatcagggtgtgaggttgatgtattcggcattcgaaggcgatgtggatggaattcgcgaggcgttggagtctggtgtgagtgtgaattacaaggatattgataatcgcactgctcttcatgttgcggcgtgtgagggcttcactgatgttgttgatttattgctccaaaaaggtgctgaagttgaccccaaagatcgatgggggagcacgccacttgcagatgctatttttataaaaagaatgacgtgatcaaactatttgagaagcatggagcaaagcctttgatgcccctatgcat

SEQ ID NO: 224371 - DNA, 468 bp, Glycine max
caagaacaaaacgcatggaaatatattcaatcaaaaatcaaacaaacaagatgtaagcaacacagcacgcacgcacaagagggtgcaagagttccaattatagctaaaagtattagctaatttaagcaatcatacaaacccaagttacacaaaagagaatacttctagcaagcattctgctattacaacattcgctagaaaagataagcttctttctccaagaaccgccagactcgcatgaaatcaccagacaagaccaaaatttttcaaatgtctcatgctttgctggcaatgttgttagaaagccagtccaaaccctcatagagaccctctccagaagttgcacaagtgctctggatataccattggcgttgacggagtgaatgaagtccaagcttgtcagttatttctgcagcatttattgcattaggaagatcttgcttgttggtaaaaacaagcaaaacagca

SEQ ID NO: 224372 - DNA, 370 bp, Glycine max
ctagatcgcgagcgccgccctttatttttttttttcaaggttttaatattttacttattaggcaccttaatataccccacatgtgaggaattggcccctctagtaagggtttgaagatcataagctacccaacaccttgaattctccttgtggtagaaataacccacacacttgcaatccttggtgcatttgtttccacaagtactctcactcactttatcccttgtagtgtatttgcttatgtaatgctcaactccttcaattatgaagtagaggaaatcactagccttgcatgatgtcacagtcttggcagtgcaattgttgttccaaccaagtagtccattttccaatggacaagccacacattggt

SEQ ID NO: 224373 - DNA, 429 bp, Glycine max
cggctgtccaatttgttttgatgaatatgatgttgagaatcctaaaactatgacataatgtggacaccactttcacctgacttgcattcttgagtggatggaaagaactgatttctgtcctatatgcaatctggagatgatatgtgaccaaacattgaactagatctgttgtttaaaaaagaagagcttgctaaaggcgtgagagatagatgaaatactatacgcatgatagcatgggatgaagcattgaacataatttctttcttcatattcctagagcatttaaaatctcttgtaataatggacccattaattgattgttcaatatgttgaaaagaataatgagaaggttttgacttaatgctacaacacattacaatgtagttagtgcaatttccaggtacgaactttaccctatgattcaaagtg

SEQ ID NO: 224374 - DNA, 532 bp, Glycine max
ggcggccgcccttttttttttttttttttttcaacttttttctctttcgtataatacacatataagaagattgcagagacacacaataataataattataattaaactcttattcctaaaagagactcgatcttgctcgagtacatttgctttcttgtgacacagatgaacaaccaagccgattgttgtggccgaaccctaaaatcacttcagcttctgttcttgcacttttccacggctcttggtgcaaggccgatagcctcataacctttcattatgcgaaggcgctggcttgattcaacgaacattttccagggcacgtttccgacgtgcatccagtcttcgtccttgttttgtaagtgggccataatcagagccgttcaaaaggtctattcatattgggttaatttattaaaagtccttaatcccttgggacccacatttttatactggaaggaactgaacattctagccagagcttttgaacagttcctgggagcttttgaccacctttatgtccccttttcggaga

SEQ ID NO: 224375 - DNA, 521 bp, Glycine max
  unsure (1)..(521): unsure at all n locations
gaatattcaaaatggaatatttctattattttattcttcatccaatgactatacattcattatatttttgtgtaaatagaggaaaaactcgatggaaaaatggtggtttaattctatgttgtttaataggaagttagaatacaggtgtgaattaagtaaatcaatggatagtcttggtcctattgaaaataccagtctaagggaagaccctaaaattttaaccgatatagaaaaaaaaattcacagggatttggattatttagaaatggaaggttttttttctagcgatctgaatactgtttctaagaatgatgatgatcattacatgtatgagactcaatttagtttttaacaataatattactagtttcattgatangtgcattgagagttttaatttaggtgatatttgacaaatacactgaattttatttatatagttacatttttttgacggcaataaattgtagtgaaagcgataattctagtactagtataatacctagtacgaatgattcaaa

SEQ ID NO: 224376 - DNA, 523 bp, Glycine max
gttacaacactccttaacttatcaatcaatgataacaacaaagctgttattgcaaattctggcgcaattgaacctttgattcatgtccttcagacagggagtccagaagccaaggagaattcagctgtcactcttttcagcctatcagttactgaggaaaacaagatcaggataggcaggtctggtgcaattcgaccactggtcgatttattagggaacggaacgcctagagggaagaaagatgctgccactgctttgtttaacttgtcattatttcatgaaaacaaggatctaattgtgcaagccggtgctgtgaaaaaccttgtagagttaatggacccggcagccggaatggttgataaagcaggggctgttctagcaaatcttgctacgataccagaagggaaaacagctattggtcagcaaggtggcattcctgttttggatgaagatatcgagatgggttctgtgagaggaaaggagaatgccgcaaaggctcttcttcatctatgcttcaacaatc

SEQ ID NO: 224377 - DNA, 515 bp, Glycine max
tctgaggcacaaggtgccggatatattttaggtggaggtggatccgaagggaggaccgaggattcaagaggcggcgatgaagctctacgtttcgaagagcgagttcgagaaggttcacttgttgcaggcgatgcaggcgattgaggcggcgatgaagagattcttctacgcgtataagcaggtgttggcggtggtgatgggaagttcagaggctaacggtaaccgagttgggttgagttgcgactcggctgactcgttgactcagattttccttgaaccgacgtattttccaagcttggatgccgccaagacttttcttggatacctgtgggataataacgattattacaaatggatatgaaaacgaaaaaaaaaaaaaacaaaaacgatggtcagagtgaaaatttctttatggatggataatgttattcagtttagtttgatagtgtcacacgtcaaaaaaaatgaagaaaaaaaaaacaaaagacgcactctagaaattcattttttttttt

SEQ ID NO: 224378 - DNA, 531 bp, Glycine max
ttgtgattgtctttgtatcacgaaaactatacgattcgattccttgttttcaatggacaccttcttcaattctcaatcttcttcttcttcgagaagccgctggagttacgatactctcaagaatttccgtgagatctctccgctggttcagaatcacatcaaacgggtttattttacgttatgttgcgctgtggtggctgctgctgttggagcttttcttcatgttctgtggaacattgggggttttctcaccacgttggcttccattggaagcatggtttggttgctatctacaccccctgttgaagagcaaaagaggttgtctctgttgatggcttcggccttgtttcagggcgcttccattggacctctgattgatttggctattgccattgatcctagccttattgttagtgcatttgtggcaacttctttggcttttgcttgcttctctgcggcagctatagttgcaaggcgtaaggagtacctctaccttggtggtttgctttcttctgggctgtccattcttat

SEQ ID NO: 224379 - DNA, 489 bp, Glycine max
ctctcaaatgaattcttcaacattataataagaattcgcacaaagattgctgccaaatcagtgaacaatgtcaatgcatgcttcacataatccaggtcaccaaagtgagccctttcaataatttcttgagtgtctactataacgtagcccacaaacaccaaatgcccaaagtacagctcaaacttgaagagtgcaattgagcccccaaagagagaggaagcaaagtgcaaccacataagaatggacagcccagaagaaagcaaaccaccaaggtagaggtactccctacgccttgcaactaaagctgccgcagagaagcaagcaaaagccaaagaagttgccacaaatgcactaacaataaggctaggatcaatggcaatagccaaatcattcagaggtccaatggaagcgccctgaaacaaggccgaagccatcaacagagacaaccctttttgctcttcacagggggtgtagatagcaaccaaacca

SEQ ID NO: 224380 - DNA, 570 bp, Glycine max
ggcgaggacggcattcgcgtcggcgcgctccgggaggtacgcgtggtctccgggctccccgccgtgtcgagcaccgagcggctcgagatcctcgacgacgagcgccacgtcatgagcttcagcgtcgtcggcggcgaccaccgcctaaggaactaccgctccgtcacgacgctccacggcgacggcaacggagggacagttgtaatcgagtcgtacgtggttgacgtaccgcccggtaacactaaagaagagacttgcgttttcgttgacacaatcgtacggtgcaatttgcagtccctggctcagatcgctgaaacctgaaaatatggcaagccaacaacactcaacattttattttctccgttagtttttttggttattgccttgggtgtttttttgtttcgaatacgggttcgggttcgaaattgatgattacagacaccattaggatttggttttggaggacttatcaaggtcagacgacaatggttgaaatgaagaatgcgacatataatatatggtatatgattcatgtatatatacatataatatatgtagttcttttatcta

SEQ ID NO: 224381 - DNA, 485 bp, Glycine max
tggggtgtcatcagatcgcaacagcttaattcccggtcgagcacgctactagtccgtggacttcctttctagattataccctaatccattatttttttggccagagagattcttgacaacccacggggatgttgacattaaaggtcaacattttgaattaattccatttggtgcaggtagaagaatgtgccctggactttctttcggtcttcaagtaatgcatctaacgcttgctactctattgcatgggtttgacattgtaactagtgatggggaacatgtcgattatgcttgaacaaattggactaaccaacaattaggccctcttcactccaagtcattcttacaccacgtctttctggtcatatttatgatgaaatttaaatcctaaaaaattagtatatatggtttgcatggattaatttgaatggtttgcttttatcgtttttgataattaccaatgctatgattttattttttaaatt

SEQ ID NO: 224382 - DNA, 420 bp, Glycine max
tctagatcgtcttcacgaggaataatgggaaagagtaacttcaaacaagagcatgatcgtgagaagagaaaagctgaggctgctaggattagagagaaatacccataccgtatcccggtgattgtggctaaggcacaacgaagtgatatcccatgtatagacaagaagaagtaccttgttcctgctgatctgacaggtggacagttaggctatgttatccgcaaaagggtcaaataaagtgcagaaaaggcaatctttatcttagcggacaacgtccttccacctacaggagcaattatgtcttccatatatgatgagaagaaggatgaagatgggtttctttatgttacttacaggggagagaacacttttggggatctgacttcccattaacattattattaaagagtggccctataa

SEQ ID NO: 224383 - DNA, 386 bp, Glycine max
tgacagtaagatgagaatgcggtggagaaagagggtcctccggcggcgcctcctcggtgtcacgtgcattctttttgtaaaacgctgacggcgtctgatacgagcactcacggtgggtttttggtgctgaggctacatgccgatgaatgcctcccttagctggacatgaccaagcagccacctacccaggagttggtggccaaggatctgcacgggaacgagtggcgattcatgcatatctttcggggtcaaccgcgtatgacacttgctgcaaagtggttggagtgtttttgttaactccaagaggttatttgctggcgatgcgtttatattttcaaggggtgagaatggggaactttgagttggtgttaagcgtgtcatgagac

SEQ ID NO: 224384 - DNA, 542 bp, Glycine max
ggcggccgcccttttttttttttttttttttaaaataaaagaggcggttgaatttttctaggccatccgagattgtcgatacaaaagatatcctaattaatttaaaaacaatgaatcgataagcattcacaatactacatatatagaatagaaacataccatgataagattttgaaagcaaaataatgagcattacatgagtcactcatcacacataaatgcaactttaagttcgccaaaatatgatcgtagatgaagaccctatctttgtatagaaaacttttggggtctgggaatcaagtgagtaatctactgttgtttgtcattcctagcctctagttgtccccccttgttttttgactttgcccgggcgatcttggcagggtttgaacgctctgactgtgagaattgaatcagaatttgcataagtgcagtaacaactgccaaaccaaaagctgaaaatgcaacacccttccaggaagagagtagcgaagaccgctgtaggaaacttacagaccccgcaacaaccagacaaacccaag

SEQ ID NO: 224385 - DNA, 541 bp, Glycine max
  unsure (1)..(541): unsure at all n locations
gcttagtacagcggaataacgaagcctcctcgttcttcttcttccgccctttctctctctagaaccgtacggtcgtttctttctctctcctcaaccggagacagcgtcgccttcttttctgaatctcgcggtgttgttagttctgcggcggttgtagttccggcggcgatgggacagcaatcgttgatctacagcttcgtcgctcgcggcaccgtgatcctagcggagtacaccgagttcaccggaaacttcaccagcgtggcggcgcagtgcctccagaaactcccttcctccaacaacaagttcacttacaactgcgatggccacaccttcaactacctcgttgataacggattcacttactgtgtggttgctgttgagtctgctggacggcagattccaattgctttcctcgaacgaatcaaggaggattntaccaagaagtatgctggaggaaaagctgcaacagcggctgctcatagcctcaacagagagtttggacctaagntgaaggaggagatgcagtactgtgttgatcacc

SEQ ID NO: 224386 - DNA, 508 bp, Glycine max
acgtaatggttgatttcttaatatgtaagcataattaaaaaacataatcctcacaccaaatgctgaaactcccacctaaactatagagaatgacagattagcattatgctatggagacaagatgataaaggctaaataattcacactatacaagcaatgccatataatattcatcatcggagaagtcggaagaatgtaaatcccaaaaagtcaaaagcactatgttgacagtagaggcaatggcaatctgctagcaacaattttattaagtgaggagacaaataccacagttgaagccaggatgtgggaagacttatttaccacagttgaagccaccacaaacggaaagaacaataatgagaatcaaggcaattatgatacccagaacaattagctttatcttcaagttttggaaccacatctttctcctaaacttggttccctgctgcctgaaaatctgagcccgagagcgaaagttctctgttttattcaacaaaagctcaatttt

SEQ ID NO: 224387 - DNA, 588 bp, Glycine max
gtgatttggagtttggagcgactgaactaatcattaatttgcactcgctgtttcagcttcatcacccttcttttgcatcatttatatctcttgagaaatggcacaagaaacctttctattcacatctgaatctgtaaacgagggtcaccccgacaagctgtgcgaccagatctctgatgcagtacttgatgcgtgccttgaacaggaccctgacagcaaggttgcctgtgagacatgcaccaagaccaacatggtcatggtcttcggagagatcacaaccaaggccaacgtagactatgaaaagattgtccgcgacacatgccgcgaaattggattcatctctgatgatgttggtcttgatgctgacaaatgcaaggtgttggtcaacattgagcaacagagcccggatatcgcccagggtgtgcacggccactttaccaagcgcccaaaggaggttggtgctggtgaccacggtcacatgtttgggtatgccaccgatgaaacccccgagtacatgctcctcaatcatgttcttgcaaccaaacttggtgctcgcctcacagaggttaggaagaatgcacctgtgct

SEQ ID NO: 224388 - DNA, 509 bp, Glycine max
ggggacaaaattctgataaaatttccattgcatcaacacagtaacattgcataaccaaacaataaattgtgagtatagggagaaaaaaaaaaacgaacagtttaggtatttatgagatggcattatacattgaatggagtaatattattagtaatcattaaacacgcaaattattcatccacacccagcaagacatccactgaagggagtgattaacttaacaacactcttaagcttgaggctaatctgacttgagtggcttcacaacttcccaggtgaagtctgcattatcccttccaaagcgtccataagcagctgtattgaggaacctatgaccacccctttttaaggtccaagttaatggtgatcattccatgtctgaaatcaaaattctcctttacaatttgcagaatttccttgaaaagaaaattcccaagttcataagtgtccaaaatcactgacaagggctcaaggacaccaatggtaaaagaaaattgaacaatgcactt

SEQ ID NO: 224389 - DNA, 549 bp, Glycine max
gttgaaacctcccagcgatgaacctcttttaggaagtgctgatgatacaaggctcattgacctgactgatgttgatatccgtcttccccttcttgtttatgtttctcgagagaagcgtccaggctatgatcacaacaaaaaagccggggccatgaatgccttggttcgagcctcagctataaatgtctaatggtccttttatactcaatcttgactgtgaccactatatctacaactcaaaggcaatgagggaaggcatgtgctttatgatggatcgtggaggtgaccgcctttgttatgtccagttcccccagaggtttgaaggaattgatccctctgatagatatgctaaccataatactgtcttctttgatgtcaatatgcgagcccttgatggactccaaggaccagtctatgtgggaactggatgccttttcagacgggttgcactttatggttttgacccaccgcgttctatagagcaccacacaggttgctgtaattgttgctttggtcgtcaaaagaagcatgcatcactggcaagcaccc

SEQ ID NO: 224390 - DNA, 467 bp, Glycine max
tttttgtttttttttgacaacatactttaagtccattcattaggagaaccgccaatctggggaggcatgagaaaaacgacactcattttaaataaaaatatagctgactgattcatccttttgacaaaaaacaatgacctgtcaagggaactggtttgaaccccctatttgtccagcaccagcaggggggtcgatggctccccacaggagagaacttgtgattgctatggggcctgaccacactccccctgtggtagggggcctccctttttttgccataatacctttcgtagagggatagagatgcgccaggacccaatggccggagaatgcaccagctagcatacgggtccactgcggtatgacactgtgtatgggtctgatcactccatctgcttttggtatggagttgcccatcataattgtgaatggcggcatcattaagcgatgccattttacagtgggga

SEQ ID NO: 224391 - DNA, 541 bp, Glycine max
ggcgaggacggcattcgcgtctgcgctcttcgactggtacgcgtggcctgcgggctccccgacgtgtctagcaccttgcggcttttgatcctagacgacgagcgccacgtcatgagcttcagcgtagtcggaggtgaccaccgtctaaggaactaccggtccgtcacgacgctccactgcgactgcaactgagggacagttgctatcgagttgcacgaggttgacgtaccgaccggttacactaaagaagagactttgcgtcgtcgttgacacattcagtacggtgcaatatgcagtctctggctcagatcgctgaaacctgaaaatatggcatgccaactacactcaacattgtattacctacgtccgtttttttggctattgccttgggtgtttttttggtatgaatacgggttcgggttggaaattgatgattacagacaccatttcgactttgtttttggaggacttatcacagtcatacgacaaggttggtatgatgaatgtgaacatttatatatggcctttgaatcatggttat

SEQ ID NO: 224392 - DNA, 511 bp, Glycine max
  unsure (1)..(511): unsure at all n locations
cttgggtttgtctggttgttgcggggtctgtaaagttcctacaacggtcttcgctactctcttcctggaagggtgttgcattttcagcttttggtttggcagttgttactgcacttatgcaaattctgattcaattctcacagtcagagcgttcaaaccctgccaagatcgcccgggcaaagtcaaaaaacaaggggggacaactagaggctaggaatgacaaacaacagtagattactcacttgattcccagaccccaaaagttttctatacaaagatagggtcttcatctacgatcatattttggcgaacttaaagttgcatttatgtgtgatgagtgactcatgtaatgctcattattttgctttcaaaatcttatcatggnatgtttctattctatatatgtagnattgtgaatgcttatcgattcattgtttttaaattaattaggatatcttttgtatcgacaatctaggatggcctagaaaaattcaaccgcctcttttatttt

SEQ ID NO: 224393 - DNA, 470 bp, Glycine max
atattattatataaagatagtctataatcactagaatttctatatatttatacttagtatataataattctagcgattatagctaagccaatatatatcataatataacatacccttttcttattcaaagaatttatggctatgccttatcatttttagtcaaagaaaagaaattatggaattgaaataactcactcagaacgccctttaaaagattacgcggtacgattgaatcaaataagcccttatggaataaatattcagctgcttgtgaaccttcaggtactggcttattcaatgttcgctcaattactcttttaccagccaatgcaatataagcatttggttcggcaataatgatatcccccaacatgccaaaactagcagttacccccccactagtgtgagatggtagtttggatacatagaataacttttacttttttgctatcatttaaagcagaaaagat

SEQ ID NO: 224394 - DNA, 577 bp, Glycine max
  unsure (1)..(577): unsure at all n locations
tccaaagagaacaccaccctttttcctcattctcttcctcactaaaacatcacactttttttcatttcaccaaacaaaacagtaacaccacacagccatgacagacagggtgtacccatcggccaagcccgccgcggttaacggcgccgccgccaacccatctttcccggcgactaaggctcaactttacggcgccacacgccccacctaccgccctcagccccaccaccggcgccggagcaagcgccggtgctgctgcaccttcttcttctggctgatcctcaccgttctgatcctcctcctcctgatcggcgtcggcggcacggtgttctacctcctctaccgcccccaccaccccaccttcaccgtgacgtcgctgaaactctcttacctgaacctcaccttctcctccaacacccttaactcccgcttcgacatcaccgtctccgccacgaaccccaacaagagatcctcttcgcctacgaccccaccttcatcaccatcctctccgncgacatcgacctcggcgacggcaccgtccccggctttcagcacccgaagaagacaccacgctgat

SEQ ID NO: 224395 - DNA, 477 bp, Glycine max
gcaagaatatcaaattggtctcttgtcttcctcctcatctctacactactccacatagagcccagcctctcaagcccaagcccaagcccaagcccaagcccgttcataaaatcctcctgcagcagcacccagtacccagccctctgcgtctcatccctctccgtctacgcctccagcatccaacaggaccctcaccaactggttcagacagcactctccctctccctgaaccgcacccaagccaccaaaaccttcgtggctaactgcaacaaattcagaggcctgaaacccagagagcacgctgcactcaaggactgcgccgaggaaatcagcgacagcgttgaccgcctcagccggtcgctgaaggagctcaagctatgtaaggttaagggtgaggacttcacgtggcacattagcaacgtggagacatgggtcagttctgctttgaccgatgagagcacttgcggcgatggattc

SEQ ID NO: 224396 - DNA, 456 bp, Glycine max
aatcatagaaaaacacaacgtcatatttcacatttaagaagcatgagaagatccatatatctataaagactcacatatataataattacatagagcacataaaagaagaaaagtaaagcattaagcaaccaagatcattgttcccaactagtgttgtgcagcatagtggttaataagcgagagagcattgctagtaacctgagcaacattgagcatcctagccctaatagagtccttgatcttcccattcagcgccttcccggagaatccatcgccgcaagtgctctcatcggtcaaagcagaactgacccatgtctccacgttgctaatgtgccacgtgaagtcctcacccttaaccttacatagcttgagctccttcagcgaccggctgaggcggtcaacgctgtcgctgatttcctcggcgcagtccttgagtgcagcgtgctctctgggttt

SEQ ID NO: 224397 - DNA, 599 bp, Glycine max
aggctgctaagagcattgtggcaagtgtacttgccagaaggtgcattgtgcaagtgtcttatgccattggtgtgcctgagcctttgtctgtgtttgttgacacctatggcactgggaagatccatgataaggagattctcaacattgtgaaggaaaactttgatttcaggcctggtatgatctccatcaaccttgatctcaagaggggtggaaataacaggtttttgaagactgctgcctatggacactttggaagagaagaccctgacttcacatgggaagtggtcaaacccctcaagtgggagaaggcctaagtaattcattccactgctctatgctggaagttttttgagcgttgcccttataatatgtctaatatacataactttccacgtctcttactctgtgtgtttctctcctcttcctcctattttgatatttgtatgttcttttggaaatttttacgtgatcaactaaaaacatggactttcttgttgtatgtatgccctaccaatgtgtcttttaatatcactatcaaaaagagagtgttcaagttaatgtttggattccaatgcttttttcgataaaaattcggctgc

SEQ ID NO: 224398 - DNA, 514 bp, Glycine max
gcagctcgaacttcatcgagagaagcattggaatccaaacattaacttgaacactctctttttgatattgatattaagagacacattggtagggcatacatacaaaccgagagttcatgtttttagttgatcacgtaaaaaattacaaaagaacatacaaataacaaaataggaggaagaggagagaaacacacagagtaagagacgtggaaagttatggatattagacatattataagggcaacgctcaaaaaacttccagcatagagcagtggaatgaattacttaggccttctcccacttgaggggtttgaccacttcccatgtgaagtcagggtcttctcttccaaagtgtccataggcagcagtcttcaaaaacctgttatttccacccctcttgagaacaaggttgatggagatcataccaggcctgaaatcaaagttttccttcacaatgttgagaatctccttatcatggatcttcccagtgccataggtgtcaacaaacacagac

SEQ ID NO: 224399 - DNA, 447 bp, Glycine max
tgcaagcgctctctttctttgcttttccttccccctttcagtttcttcaacgctgcaactatccatggcaaaccgctggctcagacccgaggtgtatccactgttcgctgcggatggtgccgctgttgggatctgtggattccaattggttcgtaatatctgcatcaaccctgaagtcagggtgaacaaggagggaagaaaggcaggagtgttggacaactttgctgagggagagaagcatgctgagcatttcctgaggaagtatgtgcgcaacacaactcctgagattatgccctccatcaacagcttctttgctgacccaagtcgcaacttaatcgctatgaataaataaaggtttatgtgagatatgaattctattatggttgaagacagattgtatcgtgcttttagaaaacaaaatgaggctgttgctttctctggccgcgc

SEQ ID NO: 224400 - DNA, 585 bp, Glycine max
  unsure (1)..(585): unsure at all n locations
aaggggccgaaaacccaaaccaaaggacgaacacgggaagggtttgaaggaaggtaggaaaacacaacaacaacaacaacaacaacaacaacatcatcatcagcagcagcaacagcaacaagatcaaccttcggtggacgagaaatacacgcagtggaagtcccttgttcctgtcctctacgactggctcgccaaccacaacctcgtctggccctctctctcttgcaggtggggcccccagcttgaacaagccacttacaagaatcgccagagactctacctttctgagcagactgatggtagtgtgccgaatactctggtgattgcgaattgcgaggttgtgaagcctagggttgctgctgctgagcacatttcgcagtttaatgaagaggcgcggtccccatttgtgaagaagtacaagaccatcatacatcctggtgaggtaaacagaattagggaattgccacaaaattccaagatagtggctacacatacagacagccctgatgtccttgtttgggatgttgaaagtcaacctaatcgccatgctgtccttggagctacanactctcgtnctgatttgat

SEQ ID NO: 224401 - DNA, 373 bp, Glycine max
tgaagttttacatctgattgagtcaccagatgctctgaaggcaaaagttgctgaagccatggatgtgttaagaaatgttgctcaacagcaaactaacccagctgatcaactagcttcactctctctcaatgacaatcttgtgtcttagattcctttagtcttttgactggaatctgctttccagttattcctattccgtatgcttccccccagtttatttgcaggtgtcttagatgttttgttttagtcagagtactaaggaagtttatgttcttggtacttttggtttcactttttttcgtatctgaattgctgtaggatggattagcataacttgttggatttattagatatgcatttgcggtttggattt

SEQ ID NO: 224402 - DNA, 431 bp, Glycine max
  unsure (1)..(431): unsure at all n locations
nagggggagtagtctacgtagagcaactctgccggtttatgttcccgggccgacgcgctcactattcgtcgggcgccctttttttttttttctcttctctttttattcataaatccaaaccaactatgcctgggtagaacatccaacttgatgtgctattccatcccaccattgtccacatacaaaataaaatttaacccaaggtaccgataccatcctgcccccttaagactttgtcttaaacaaaacctatttgacgcctgccaataaactggggggaaccacatccaaaaggaataaatggtacatctattgctttcaataaagtgagggattctaaaactctgcattacttttgccagagagagcatctcccttgacgggtgattctcggacaccattgacaatgtttatgaccacatccatggctt

SEQ ID NO: 224403 - DNA, 386 bp, Glycine max
aggaagcgaattgaacagcaatatctaagaatggggaaacaaatggagaaagaaaaatagtaaataggtgtttattgcattttcattaaccgacctaagagtagattactagttacaagacactttctggacattgtttaatcaggagtccaagccaaaatggcattcaaaatacgccctttccaccccagccaaacccacttgccatcctgaggcaccacaaaatgtttttgatattccttcttcaccatttctttttcatcactcaccaatagtggatcaaattggacttgcttgaacccaactatctggttcctaacctgccactgcttataggtctcaggtttttcaaccctttgagtccctttacacgctataacattgat

SEQ ID NO: 224404 - DNA, 562 bp, Glycine max
  unsure (1)..(562): unsure at all n locations
taaggtcctcgctgctgctaagtgcctccttcttcctcctatatatatatatatatacatatatgcacgtaaagcctcttcgcacaacttaaccctctctctctgagatggcaaagaatgtggggattctcgctatcgacatctacttccctcccacctgtattcagcaggaattgctggaggctcatgatggtgccagtaaagggaaatatactattggacttggtcaagattgcatggcgttttgtacagaagtagaagatgtcatctcgatgagtttgacagtagtttcttcccttcttgaaaagtatgcgattgatcctaaacaaattggtcgtctggaagtaggcagtgagactgtgattgacaaaagcaaatccatcaaaactttcatcatgcaaatctttgagaaatatggaaataccgatattgagggcgttgattcaactaatgcatgctatggaggaactgctgctttgttcaattgtgtcaattgggtggagagcagctcatgggatggacgctatggactngttgtctgcactgacagtgctgtctatgc

SEQ ID NO: 224405 - DNA, 468 bp, Glycine max
aaacttgaagagtttcggaaaatttttgaactaacaacacctggctcctacagatttcataattgttcgtttgtcttcccttaagaagaaactaatccaaacgagaacagccttctaaatgctaagcacagttgaattcctggtttccaggtattacacgttctctaagtaaaacgtcagtgaccattggtgaccaaaccattttcactagttttctttgcatagaatctcctatacatggagtcaacttcagtgagatagaatgtgcctggagataaaaggctggggtccttgcttgttacaaactccttgccaccatacctatgttccattagcttcatgggttcaacaaatttctctggtggaaactcatgtcttgacttcaatttgccagcaacattcatcattttatcaatgtttgacaggctaaatggatgttgaccttcacgtaatagcaaagagaacatt

SEQ ID NO: 224406 - DNA, 514 bp, Glycine max
  unsure (1)..(514): unsure at all n locations
cagatataaagaaaagaaatttcaccgtaccagagaacaaggaaggatagaagaaagtgaaagaaaatggcgttgtacatggacgaagaagagatttggaagtgtccgaagcatccatcaaagagaagaagaagcggaatttgccctacttgccttcgagaccgtctcgtaactctttgccctgactgtgctaacgtgcgcccctgttcctgctacgcaaccagctcctcctcctcttcctcgtcttcctcctccttatcgcgtttttctggcgccggcgatggcgtcggttccgtcggccgcgtccacaacctcatcgagcaagagcctgggctccgccgctcgcgctccatggcgattccgtttctcaggtcacggtcgcggttctctggcggcggagatagggtttcggatctcgacagcacgagggactcgccggcaatgaacggaagccggtcggcgaggtcgttctggtcaatgttcaagtcgcagaagagcagtanacacggcggcg

SEQ ID NO: 224407 - DNA, 561 bp, Glycine max
aatatatataaacttatataaagtatttgttgttattattatgataatggttttaatctacaaaatttcaacctctatacaaaggagacccttcctgaatcactttagagaccttggattgccggaaagccttcatcggacttgggaagaaccaccctctccctttcgtccgcggtctcaattctccgtcgccggaaaccaccgataccgccgtcactgccaccgaccttgaccgcaccatcatcggatttatgccaccatcgccgtctcgttcctccgccaatatctttttcgcctcccactcttgctccggcgcgccgccttctccgccggcgtgactactgctcttctgcgacttgaacattgaccagaacgacctcgccgaccggcttccgttcattgccggcgagtccctcgtgctgtcgagatccgaaaccctatctccgccgccagagaaccgcgaccgtgacctgagaaacggaatcgccatggagcgcgagcggcggagcccaagctcttgctcgatgagggtgtggacacggtcgacggaaccgacccatt

SEQ ID NO: 224408 - DNA, 504 bp, Glycine max
tttgttctctccaagaggtggcaatgttgggaagcctcttattggtttagacactcaaactaacaccaccatcaaagaggttggtgcagttcctcaatcagccaaaccggttcaggaaaacaatgatcagtttgctgcaacaaatgcccatgcaattgctcctgctgctaaggcacaagttgtgggatggccaccaattcgatctttccgaaagaacacgatggcctctaatttgacaaagaacaatgatgaagctgagggaaaatcaggatttggttgtctctatgtgaaagtcagtatggatggtgccccttatcttagaaaggttgatctcaaaacctataacaactatatggaactttcctcagctcttgagaagatgttcagctgcttcaccattggtcaatgcaattctcctggactttctgggaaagatggactaagtgagagctctttgagggaatctctcatggatctgatatgtcttacatatgaagataagat

SEQ ID NO: 224409 - DNA, 446 bp, Glycine max
gttcaacaagcaattcttttatacagcaactagaatccagggatacacaaaatagagaaacaaacaaaatatgtgtatatattgtctggatgtctccagttgaattctactgataaaacttgtcatactatatatattaatgcacaaaaactgagacactgaatagcatatgtttttgattttgaacagaatcataaactcaaacacccttggaaatctttatatgcttcaatgaataccccccgctttggtctaatggggttttttctgcattagttttggctcctagatttttccatggcccttggagctagcccaattgcctcagagcccttcatgatccttagtctccgacatgaatcagagaacattttccaaggaacattacccacaagcatccagtctccatctttatcttcatatgtaagaacatattcagatccatg

SEQ ID NO: 224410 - DNA, 614 bp, Glycine max
  unsure (1)..(614): unsure at all n locations
ctcgagccgaatcggctcgaggttctctctctttgactcacaaccctattgcgtgctttgcaatcgaccccgcttatggccaacagtaacctccctcgaagaatcatcaaggaaacgcagcgtttgctcagtgagccagcgcctggaattagtgcgtccccttcggaggacaatatgcggtatttcaatgtgatgatccttggcccgactcagtcgccatatgaagggggagttttcaagttggaattatttttgccagaagaatatccaatggctgctccaaaggttaggtttctgacaaaaatatatcatccgaacattgataagcttggcaggatatgtcttgacattctgaaagataagtggagtcctgcccttgggattcgcactgtacttttgagtattcaagctcttctaagtgcacctaacccagatgatccactttctgagaacattgccaagcattggaaatctaatgaggccgaggctgttgaaacagccaaggaatggacccggttatatgctagtggcgcttgatgctttgngggaaaactttggcttcaaatatctatagtggaagtgtatgctgtataactgtcaaattgaaatggaaa

SEQ ID NO: 224411 - DNA, 516 bp, Glycine max
ctctctctctctcatccttatatttccaacggaaccttctagaaccaccataacatcattctccgttccctcgcgtttcaacaccgataacccgcaaaaatacccattgatctgcgcctcctcttccatggctccaccgccgccggtggaacacaacggcgactccgccgctaccgcctccgcctccgcctccgcggagtctcagagatcaattcccacgccctttctcaccaaaacctatcaactcgtcgacgaccaatccatcgacgacgttatttcctggaacgacgacgggtcaacgtttatcgtctggaaccctaccgttttcgccagagacttgcttcctaaatttttcaaacacaataatttctctagcttcgttcgccaactcaacacttacgtaattatttcaattcaactctttggtttggtttttttttttttttttgcttaggtttcgatgattttgaattttatttctaaaatttgtttataattttgcttgatttgcaggga

SEQ ID NO: 224412 - DNA, 547 bp, Glycine max
  unsure (1)..(547): unsure at all n locations
aagtgtagtaacctccaccatctccctcaaacaacacttggtggagttctaaagtgccactgctggccaagaccaatgttggtgctggtcggttagtgcttcagcctcagggctttgctattcctcattattcagatatatccaaagtaggttatgtgcttcaagggaacgatggcgtagctgggatggccctccgcaacagtactactagagaagaggtggttgtgaagcttaagaagggagatgttataccagtacctattggaagtgtctcgtggtggttcaacgatggggactcagatcttgtcattgtttttcttggagaaacttcaaaggctcttattcctggcgaaattagttatttctttctaaccgggcttcaaggagttataggaggcttctctaatgagctcacaagcaaaatatatggtttggacaaagatggggtggaaaagctcacaaaaagccaaagtggngttgtgatcatcaaattagacaaaagccaatctttgcctaagccccaaatggaaataaccaaaagctagtc

SEQ ID NO: 224413 - DNA, 583 bp, Glycine max
agcacataaaactcatattttatgaaattattggaaataggttgtcacacttggtttattttaacatttctggttgatcgcaacacagactttttctccaaaagcaactcaagggttagtaaacactcaacatcatacattgaaaatacataaatatatgcataaacaaagtgactaattagtagtgggaggaatgagatttgtggtttccttgatcttggatatgaagaggctttgaaattctgaatccacgtgaagagatgcttgttgcacagatggtgacaaggcgctccaaattgatgcccttccacccaactcttcaaataaaggctttgtagttgtcacgatagagtaactctcaattccttcttccccagcaatttgtgcaaccacaaagaattgtggcacaacaagcaaatgaccagcctcaacttgagtctctaatgcacactttccactaaagtccacaatttcaatcttgccactttctctagcaatgtaaatcaactgaaccgtagggttgattgggtatgatggtgccttaataacccccggttaagtttcactcttatcacactaaccc

SEQ ID NO: 224414 - DNA, 581 bp, Glycine max
gtctggtcggaacagtatgcagttcagtatcacatcacaattccttcatatcttctctcttaccatcttcattatcattacctcttcactttcacaatccagccagttttgtgatgtgggaactgaaattccatcatccaagctgttgatcaagggtggcacggttgtgaatgctcagcacccccagattgctgatgtttacgtggaagatggcatcattgttgcagttaatcctaacatcagggtaggagatgacgtcactgtcattgatgccaccggcaaatatgtcatgccaggtggcattgatcctcacacccatctagatatggatgttggttttactgcaacggttgatgacttcttcagtggtcaggcggcagcattggctggtgggacaacaatgcacattgacttcgttataccacttaatgggagtttgacagctggttttgaagactatgaaaagaaggcaaagaagtcttgcatggattatggttttcatatggttattaccaaatgggatgaaactgtttcgagagaaatggagctcatggttaaagataaagggatcaactctttta

SEQ ID NO: 224415 - DNA, 598 bp, Glycine max
  unsure (1)..(598): unsure at all n locations
cacactttcttccttaattttctagctcttgctacgtacttgaattcaattagttattaatggctgagattgagggttctcccggaagctccatgcatggagtaacaggaagagaacaaacatttgtagcctcagttgcttctccaattgtccctacagacaccacagccaaatttgctctcccagtggattcagaacacaaggccaaggttttcaaactcttctccctggccaatccccacatgagaaccttccacctttcttggatctccttcttcacctgcttcgtctcgacattcgcagcagcacctcttgtgcccatcatccgcgacaaccttaacctcaccaaaagcgacattggaaacgccggggttgcttctgtctccggaagcatcttctcaaggctcgcaatgggtgcagtctgtgacatgttgggtccacgctatggctgcgccttcctcatcatgctttcggccctacggtgttctgcatgtcctttgtgaaagatgctgcggngtacatagcggttcggntcttgattggggtctcgttggcgacgtttgtgtcgtgccagtactggatgagcacgatgttcaac

SEQ ID NO: 224416 - DNA, 451 bp, Glycine max
gcaaagagtacaatgtcaatttcatttctgattccatttcaagtacagaatatacaaaccagaacattctgattatgatacttatgacttgccacaagttgacaaccatatagtaagccagaaagtcaaataaaagggcctaattactggataattaaacacaaccagcaatggtaaaattgattttaaatcaaattaactaaactgatactattgatactcagcatcaagatctgcattgacatactgattatgatacttatgacttaccacaagtagacaacttttacaccacacgcaaaccagaaccagaacattttatgtctacatgttacaagatttcttattagaaaaatcttcactcatggttcttcattcccaaaactgctcagtaattatgtttcatgaccttctttgattgaagggctatggctagacatgagtgggagtt

SEQ ID NO: 224417 - DNA, 455 bp, Glycine max
gtcatttgtccttgcaacactctaaagccatgaaggcaacactaagatacttagcaggaatggcaggccctagtggttttggctcaaattcaacagctgaacaagtcactgaagattgttcttccttccttccttctgcagctctaaccgctctcatcactggggcgagttctggtattggagctgaaacagcaagagtgttagcaaagagaggagtgagagttgtgattgctgcaagggacttgaagaaggccacggaagtgaaaaagaacatacaaaaggagactccaaaagctgaggttattctgttggagattgatcttggctcttttggttctgtgcagagattttgttccgagtttttggctatagaacttcctcttaatattctcataaacaatggcaggatgttttctcaaacttggagttctctgaggataaaattgagatgacat

SEQ ID NO: 224418 - DNA, 468 bp, Glycine max
gcagagagattttatgtttcattgctctcttatttgtacaattaatcaacatggagctacacaggaaatggggtcactaacaagaaacccccatgattatgatgttttaagttgccttttaagactcaaattttgtgttgagcctgcaggttaacgtaaatgaataacctaatatacatggtgtcttgaaaaggagaaatgcttcaaatcgttgcttgacgcagtcgtttgtgaagcaaggcatgtgtgttgttccatagcttttgagcttccgattcgtcatttgctaggctcgagcatttacactcattgcaatctgcaaagtattttccacttatcccttctgttttggggctcagtgctacataacacgtaattgatgcaccctgtgatgtcgttttgagtaactttgatgcaataaaaaatagggaatccgttattaagcccttatgagctctaataattcct

SEQ ID NO: 224419 - DNA, 544 bp, Glycine max
ctctctctctatcttgctgcctgtctgatctatctatcttcttcccttctttgacccaccctcctccttatacttcaatgtctttcgcactcctaaattcatttccacactctataccctgaaattctcctccaattctcaccactccaaacaaaccctttccctttttttctctttctatggagcagaaaagatgaagtactccttcaccaagttgaataaaaatgcacttgacacgaccgcctccaatgacaaaaaagactttccccccaccgctaaattcgacgaactcgccctcgctgccaaggacatgcaagacatgagagattgctacgatagcctgcttgctgcagcggctgctactcaaaacagagctcacgaatttgctgagtcactgcaagacatgggtacttgcctactggagaaaactgccttacatgatgatgaagaaagtggtaaagttctgcggatgcttggaagcgtgcaacttgaacttcataagctaggagatagctatcgatctcacatagtactgacaataacc

SEQ ID NO: 224420 - DNA, 495 bp, Glycine max
attattatcaaaaccaaaagctagcaagctaccttgcaaagcaacacatggcttctacagacaagcatggcgacactgaatacagaacatcatcttcaactccagctcctgcgggtgttgattactttaaatttgatgttatcctaaggtttgtgttatttgcagcatcactggtagctgttgtggtgatcgccactggtaatcaaacagaggttattcttgtgccacagcctgtgccatggccagccaagttcagatacacaccagactttgtgtattttgtagctgcattgtccgttactggcctctacagtatcattacaacacttgcatcactctttgccagtaacaagccagccctcaaaaccaagttgctcctctactttatcttatgggatgcgctgatattggggataatagcctcagcaacaggcacagctgggggtgtagcatatttgggtgtgaagggaaacagccatgtggtgggttggaata

SEQ ID NO: 224421 - DNA, 469 bp, Glycine max
ggtatccaatattatttttgggggaacaggggtaagtaaaaatttcaatttatgtcaccaatgtcatgtaataaaatacaactgatgtacttggaggggaaaacactgttttacaaaaaataattaacacaactgaagcactacattaaaccatatacacactcttaacaattactgaattactgagcacgctcactttataaacaattaatgaagatgggtgaatgcgttatccatgttccttccatctacttggggcactctctattaatgctgtaagctgaaagccaaattgatcaagactgcgacaatgcttccaaacaaagccactgttttagaggcaccaacatgcctacagaacttatcgtgaacatggcaaattttattccaacccaccacatggtttgttccctttaaacccaaatttgctacacccccaactgtgcctgttgctgaggctattatcccc

SEQ ID NO: 224422 - DNA, 526 bp, Glycine max
ttcccttgataaaaaaacaaaagctgaatacaaagagtgaccatggcacacaagttccatgttcgctcaaataggtttcccactggatctcatgctagcaccattacagttgaagaacagctgaacaagctcaaaacttgggaaaccacttccacatccacatcaaagtcaattttcactggcttgtacttgcttcaagatttgcatattcgcttagaagatcttctaaacatggcatcaacccaaaagatgatttccaaccatcaaggcgaggaatgcatagaagagcttcttgatgggtcagcgagaattttggatatctgcggcatcacaagggacaccatgctacaaactaaggaaaatgttcaagcccttcattctgctcttagaacgagaaagggggattcaaacattgaaaaaattggagccgaatataattgcttctcaaagaagatgaagaagaatgtcaagaagttgatgacatctttgaagcagatgggcgagagtcaatttggagtatccccac

SEQ ID NO: 224423 - DNA, 441 bp, Glycine max
actaggttaataattgaggaacaaactattatccgagggggcggattaaattaaccaatgttactcatcacagactccaatcactatctgaacgatccaaatgatactgatatctcagaaaggaaaggaaggattaaaggggatcggatagcaaatgatatacataacaccgtaatatccccgctacaaagcagagataggagaaaagccaccgcgacttcccgggaaaggacccattctgaggcacctactcggagatcaaggcagaggggaacctgttactatttaagagagtaacccacgggtggacacgaccacaggattggcggtcctgccggagctggatccgaccttggttatcttcttggagaagttcatccaatggacgacctggccgaacactacgtgcttttgtcgagccactccgtttttcacctgcag

SEQ ID NO: 224424 - DNA, 510 bp, Glycine max
ccttatcgatggaaatttgaatcatctctgtgatgtatcccaaaagggacaatttaaagagaaacatcattccctagactcaattttttttaaaattaaaacgcacaatttcttcggccgcaaaaaaaaaaaaaaacctatactttttcaagttttcatccattaccctattactgaaaggcaaaaaactgaccctaataataaccccatcaccatcatcatcacattacagatttctgggctttcctccgctcataatcagcatcatcaggggggaactcatagcgacaaacgggacaagtgttccttatccccaaccacggcacaatgcactccccatggtaacgatgcgaacacggcaacaccttcaccccttccccagacaccaaacttatttttacagaccgcgcagacgaccaccacgttgtggttgtatgccacgtcagcttcgggaacaaccaccgacggaagactcctcactatggaggcggaggccggaggtttcccatt

SEQ ID NO: 224425 - DNA, 440 bp, Glycine max
atctgatcccagaaatgaaagatggggccattcgaactgccattgatactggttgtggaggtgctagctggggcggtgacttgctcgatcgtgggattctaactctttctcttgcaccacgagataaccatgaagctcaggctcaatttgctctggagcgtaggatccctgctattatcggggtcatttgtacacagagacttgcattcccatcaagcttctttgatatggctcattgctccagatgccttatcccatggacagaatatgggggagttcatctccttgatattcaccggattcttcgccccggaggattgtgggtcttggctgggccacccaccaattatgagcgcaagtggggcggatggaacacaactattgtagcgcaaaaatcgtattatgagaagttgaaagagttgctgacttcattgtgcttt

SEQ ID NO: 224426 - DNA, 534 bp, Glycine max
gcaagaatggcacttcggtgcttggtgatgtccctttctgttctcttcactcttggtcttgcgagagaaagccatgccagagacgaagatttttggcatgctgtttggccaaacactcccattccaagttcattgcgagatcttctaaagcctggccctgcaagtgttgaaatcgatgatcaccctatgcaaattgaagaaacacagtgcccggaaaccttcttgtataaagaagaccttcatccaggcaaaacattgaaagtacaattcagcgagcctccctttcaacaaccatggggtgttggtacatggttaaaggaaattaaagacactactaaagaaggatatagttttgaagagctatgcgtcatgaaagaagccattgagggagaagagaagttttgtgcgaaatccttgagaacagtaattggttttgccatttcaaagctgggaaagaacattctagtactttcacgttcctttgtcgatgagcaagaccaatacactgtggaaggagtgcataatcttggagac

SEQ ID NO: 224427 - DNA, 410 bp, Glycine max
agataaccactttttaccatatatatatacagagagagaatgcgaagcacactgatcacaggatgatgctctctttaagtagggaagcagatcttatcaattcacataggtaggttgaaattctagctctagcaatctagctagagaaggtagtacttgcacaacacacagcacatgataatttattttatacacaatctcattctcatggtgctcaagaagcatggactaattaagcagcaatgttggtctgataggcagtgtccacagataaattgggtacccataaaatggccttgcttccaaggaaatggcaaacagggttagttccaggatcaactcccataagttgatgaagcatttgatgattcattccagaagtatttgagtggcaaatagcaagtgcctga

SEQ ID NO: 224428 - DNA, 509 bp, Glycine max
ccttaatttgccaccctaacctactgcattattattctcttccccttaatttctatctccaatccctcagcaaaacgcagcaaatgggtcggcttaatctcctacttgtgtggtcactctcattaacactgtccctttattatctacacccaatctctgctcagctcagtccaaaccactatgctaaaacatgccccaatcttgaaagcatcgttagacaggccgttgccaagaagttccaacaaacctttgtcaccgtcccggccacccttcgtctcttctttcatgattgctttgcgcagggttgtgatgcttctgttttgattgcatccaccggaaacaaccaagcagagaaggatcacccagacaacctgtctttggcgggtgatgggtttgacacagtgatcaaagcaaaggctgcagtagatgccatccctcagtgcagaaacaaagtctcatgtgctgatattctggccttggccacccgtgatgttattgcactgtctggt

SEQ ID NO: 224429 - DNA, 474 bp, Glycine max
ccccctctgggtaacatttatttatgtgaacaattctaaaagttcgaattatttggaaacattacaacaaataaaaactcaaccttacccttccttttccggacatccaaattacaactcccgaattattcgcaaacaaatttattaacaacagtcaatctaaactaccccgtgcaaattccccgcaataaaattgcaatgtgtgtgtgtgttttgtgttcacctccaaaacatgcactgtttgcgactttctacgtacaactaaagccttaacttaaagaacagaacaatcggtacgaattttcccatttctcgcagtcttaactccaacacgacccaatttggttattgcagccacaaagttggagttgaaaacgttgctactagaagcgaaggaattaactgtgtttctggaccttgggtccgtgaagaggatttgttcgaggaaaaaggccctttccttgtagaggtttt

SEQ ID NO: 224430 - DNA, 444 bp, Glycine max
agaaaagttagggttcacaacttttccttttccttttgcttgcgaatctgaatcaaataatcaatcatccattcattattcatcatgtcgtcggcgaagaaaatcacgctgaagagttcggacggcgaggctttcgaggtggaggaggcggtggcgctggagtcgcagacgataaagcacatgatcgaggacgactgcgccgacagcggcatccctctgccgaacgtgacgagcaagatcctggcgaaggttatcgagtactgcaagaagcacgtcgaggccgcgaatcccgaagacaaaccctgcgaggacgatctcaaggcctgggacgctgaattcgtcaaggtcgaccaggccacgctcttcgatctcatcctggctgctaactacttgaacatcaagagcctgcttgaccttacatgtcaaactgtagccgacatgatc

SEQ ID NO: 224431 - DNA, 504 bp, Glycine max
gaacacagtcaacggaaatagtcttgaatataaaacaaacaagtatatagcataggcaaatctacaagagagatctttgataaacaaacaagcatagcataaatccacatggcagatctttgattcagattttttgagattaacaaaatcattcaaatgcccattggttttcccgacgaacttcctcttcctcctcaggggtgaagtcattcttaatgttaaaggtcttgcgaatttcctctggagtcttccccttgatcatgtcggctacagtttgacatgtaaggtccagcaggctcttgatgttcaagtagttagcagccaggatgagatcgaagagcgtggcctggtcgaccttgacgaattcagcgtcccaggccttgagatcgtcctcggagggtttgtcttcgggattcgcggcctcgacgtgcttcttgcagtactcgataacctttcgcaggatcttgctcgtcacgtttcggagaaggatgccgttgtcggcgc

SEQ ID NO: 224432 - DNA, 571 bp, Glycine max
  unsure (1)..(571): unsure at all n locations
ctctctctctctcttgctgtctgtctgatctatctctcttcttcccttctttgacccaccctcctccttctccttcaatgtcttttgcactcctcaatccattcccacactctttcccctgagattctcccccaattcccaccactccaaacaaaccctctccctctttttcccttcctagggtgcagaaaagatgaagtcctcgctcagcaagttgaagaaaattgcacttcacaagaccgtctccaaggacaaaaaggactttccccccaccgttaaattcgacgaactcgccctcgctgccaaggacatgcaagacatgagagattgctacgatagcctgcttgctgcagcggctgctacgcaaaacagtgctcacgaatttgctgagtcactgcaggacatgggtacttgcctactggagaaaactgccttaaatgatgatgaagaaagtggntaagttttggggatgcttggaagtgtgcagcttgaacttcagaagctngntgatagctatcgttctcacatagtactgacaatacccatccatcagagtctcttcttaatgagc

SEQ ID NO: 224433 - DNA, 549 bp, Glycine max
attattatcaaaaccaaaagctagcaagctaccttgcaaagcaacacatggcttctacagacaagcatggcgacactgaatacagaacatcatcttcaactccagctcctgcgggtgttgattactttaaatttgatgttatcctaaggtttgtgttatttgcagcatcactggtagctgttgtggtgatcgtcactggtaatcaaacagaggttattcttgtgccacagcctgtgccatggccagccaagttcagatacacaccagcctttgtgtattttgtagctgcattgtccgttactggcctctacagtatcattacaacacttgcatcactctttgccagtaacaagccagccctcaaaaccaagttgctcctctactttatcttatgggatgcgctgatattggggataatagcctcagcaacaggcacagctgggggtgtagcatatttgggtttgaagggaaacagccatgtggtgggttggaataaaatttgccatgtttacgataagttctgtaggcatgttggtgccttcatagcag

SEQ ID NO: 224434 - DNA, 452 bp, Glycine max
ggcattcaatattatttttgtgggaacatatataattaaaaatttcaatttatgtcacgaatgttatgtagtaaaatacaactgaggtacttggaggggaaaacactgatttacaaaaaataatcaacacaactgaagcaatacattaaaccatctacacactcttaacaattactgaattactgagcacgctaactttataaacaataaatgaagatgtgtgaatgcctgatccatgttccttccatctacttggggactcggctatgaatgctgtaagctgaaagcccaatgagcaagactgtgacaatgcttccaaacaaagccactggtatggaggcaccaacatgcctacagaacttatcgtaaacatggcaaattttatttcaacccaccacatgggtgtttcccttctaacccaaatatgctacacccccaactgtggctgttgc

SEQ ID NO: 224435 - DNA, 550 bp, Glycine max
  unsure (1)..(550): unsure at all n locations
ttcccttgataaaaaaacaaaaacagaatacaaagagtaaccatggcaaacaagttccatgttcgctcaaatagttttcccactggatctcatcctagcaccattacagttgaagaacagctgaacaagctcaaaacttgggaaaccacttccacatccacatcaaagtcaattttcactggcttgtccttgcttcaagatttgcatattcgcttagaagatcttctaaacatggcatcaacccaaaagatgatttccaaccatcaaggcgaggaatgcatagaagagcttcttgatggttcagtgagaattttggatatctgtggcatcacaagggacaccatgctacaaactaaggaaaatgttcaagcccttcattctgctcttagaaggagaaagggggattcaaacattgaaaaaattgtagccgaatataattgtttctcaaagaagatgaagatgaatgtcaagaagttgatgacatctttgaagcagatggtggagagtaaattnggagtatccccactcttgaatcaagaccaacaactcg

SEQ ID NO: 224436 - DNA, 537 bp, Glycine max
catcacaatcaatcaaagttgatatatcaaatataattgccatatattggtgcaactgtattagtgacttacaatgggcaatacacgaagtgtaattcataagaatcttttgaaagaggtttcaaaacttgctagagttctaccattgggaatttataaactttgttgttttacataaggacaagaaaccaataaaaaaaaagggacaagaaaccaataatccaatactatcctatcccaagcctataaaatacacagacacgtgtccttcaatatttttgcagccttgcgttttaaataatagtcttcacctgaatagactggaaagccataggagtggcacgtgttggagcaacatctgagaccactagaacaacatctccttggctgatcaaccctctagattacataagttggacagactttgagatgttggattcagcatcatcggacaaatcaaccataaggggtacaacaccccattgcaaagtcagagccatgcgggtactgtcatcgttagtgaaagcaaatatggga

SEQ ID NO: 224437 - DNA, 482 bp, Glycine max
caaagacggaggagaggtcgcaaacgcaaaaatggtgaagtttctgaaaccaaacaaggccgtcattgtccttcagggacgctacgccggcaagaaagccgtgatcgttcgaaccttcgacgaaggaactcgcgagcgcccctacggccactgtttggtggcggggataaagaagtaccctgcgaaggtgatcaagaaggactcggcgaagaagacggcgaagaagtcgcgcgtgaaggcgttcgtgaagctcgtcaactaccagcacctcatgcccacgcgctacacgcttgacgtggacttgaaggacgcggttaaccccgacgttctcaacgcgaaggataagaaagtcactgctctcaaggagaccaagaagcgcctcgaggagaggttcaaaaccgggaagaaccggtggttcttcaccaagctcaggttctgagcggtaatcttatcgagttttggtattcgaatgcttttggatc

SEQ ID NO: 224438 - DNA, 422 bp, Glycine max
aaacaacattaacctatgatatcagtctcaataaaccaccttaatcatccaatatgaccaaaatttaaccataaattccaaaatttaatctcaacaccagcattttaaagtatcaattaaagcaagatccaaaagcattcgaataacaaaactcgataagattaccgctcaaaacctgagcttggtgaaaaaccaccggttcttcccggttttgaaccttttctcgaggcgcttcttggtcttcttgagagcagggacctttttatcctttgcgttgagaacgtcggggttaaccgcgttcttcaagtccacgtcaagcgtgtagcgcgtgggcatgaggtgctggtatttgacgagcttaacgaacgccttcacgcgcgaatttttcgccgtttttttcgccgagtccttcttgatcacct

SEQ ID NO: 224439 - DNA, 312 bp, Glycine max
ctgagagacggggagctagagtcttgtgattctgctgcgagatggtccctacactgaagtcagtgtctattctttatttaactcaataccatgttggcgaggactccgcatacaaccgacaatgccaggtgctaccaaatacctcggcgactacaagaacgctcgagcaggatgatctgaagaaggcttacaagaaagccgacattaacaatcaccccgacatgggcggcgatccctataggtataaagagctggcgcacgctcatgaggttctgagtgaccctgagaagcgagacatatatgatcagcatg

SEQ ID NO: 224440 - DNA, 577 bp, Glycine max
atctgatcccagaaatgaaagatgggtccattcgaactgccattgatactggttgtggagttgctagctggggtggtgacttgctagatcgtgggattctaactctttctcttgcaccaagagataaccatgaagctcaggttcaatttgctctggagcgtggtatccctgcaattctcggtgtcatttctacacagagacttccattcccatcaagctcctttgatatggctcattgctccagatgccttatcccatggacagaatatggtggagtttatctccttgaaattcaccggattcttcgccccggaggattttgggtcttgtctggtccaccgatcaattatgagcgcaggtggcgtggatggaacacaactattgaagcacaaaaatcagattatgagaagttgaaggaattgctgacttcattgtgctttaaaatgtacaagaaaagggtgacattgctgtatggaggaagtctccagataacaattgttataataagctggctagagattcctatccacctaaatgcgatgacagccttgaaccagattcagcatggtatactcca

SEQ ID NO: 224441 - DNA, 551 bp, Glycine max
gcaagaatggcacttcgttgcttggtgatgtccctttctgttctcttcactcttggtcttgcgagagaaagccatgccagagacgaagatttttggcatgctgtttggccaaacactcccattccaagttcattgcgagatcttctaaagcctggccctgcaagtgttgaaatcgatgatcaccctatgcaaattgaagaaacacagtacccgaaaaccttcttctataaagaagaccttcatccaggcaaaacaatgaaagtacaattcagcaagcctccctttcaacaaccatggggtgttggtacatggttaaaggaaattaaagacactactaaagaaggatatagttttgaagagctatgcatcaagaaagaagccattgagggagaagagaagttttgtgcaaaatccttgggaacagtaattggttttgccatttcaaagctgggaaagaacattcaagtactttcaagttcctttgtcaataagcaagaccaatacactgtggaaggagtgcagaatcttggagaccaagcagtgatgtgtca

SEQ ID NO: 224442 - DNA, 496 bp, Glycine max
agataaccactttttaccatatatatatagagagagagaatacgaagcacactgatcacaggatgatgctctctttaagtagggaagcagatcttatcagtacacataggtaggttgaaattctagctctagcaatctagctagagaaggtagtacttgcacaacacacagcacatgataatttattttatacacaatctcattctcatggtgctcaagatgcatggactaattaagcaacaatgttggtctgataggcagtgtccacagataaattgggtacccataaaatggccttgcttccaaggaaatggcaaacagggttagttccaggatcaactcccataagttgatgaagcatttgatgattcattccagaagtatttgagtggcaaatagcaagtgcctgagttttggttccatcaccagccaccaatggaaccatgaaagctgttgttacacggacttcatggcagtaaaaactgcagttctgaaa

SEQ ID NO: 224443 - DNA, 577 bp, Glycine max
  unsure (1)..(577): unsure at all n locations
ccttaatttgccaccctaacctactgcattattattctcttccccttaatttctatctccaatccctcagcaaaacgcagcaaatgggtcggcttaatctcctacttgtgtggtcactctcattaacactgtccctttattatctacacccaatctctgctcagctcagtccaaaccactatgctaaaacatgccccaatcttgaaagcatcgttagacaggccgttgccaagaagttccaacaaacctttgtcaccgtcccggccacccttcgtctcttctttcatgattgctttgtgcagggttgtgatgcttctgttttgattgcatccaccggaaacaaccaagcagagaaggatcacccagacaacctgtctttggcgggtgatgggtttgacacagtgatcaaagcaaaggctgcagtagatgccatccctcagtgcagaaacaaagtctcatgtgctgatattctggccttggccacccgtgatgttattgcactgtctggtggaccttcatacacnngttgaatgggaagatttgatggtttagtttcaagaaacttcgatgtgaatgg

SEQ ID NO: 224444 - DNA, 477 bp, Glycine max
ccccctctgggtaacatttatttatgtgaacaattctaaaagttcgaattatttggaaacattacaacaaataaaaactcaaccttaccctttctttcccgaacatccaaattacaactcccgaattattcgcaaacaaatttattaacaacagtcaatctaaactaccccgtgcaaattccccgcaataaaattgcaatgtgtgtgtgtgttttgtgttcacctccaaaacatgcactgtttgcgactttctacgtacaactaaagccttaacttaaagaacagaacaatcggtacgaattttcccatttctcgcagtcttaactccaacacgacccaatttggtcatagcagccacaaagttggagttgaaaacgttgctactagaagcgaaggaattaactgtgtttctggaccttgggtccgagaagaggatttggtccgaggtaaagaggcccttttcttgttgaaggtttt

SEQ ID NO: 224445 - DNA, 445 bp, Glycine max
  unsure (1)..(445): unsure at all n locations
agaaaagttagggctcacaacttttccttttccttttgcttgcgaatctgaatcagaggagtcaatcatccattcattattcatcatgtcggcggcgaagaaaatcacgctgaagagttcggacggcgaggctttcgaggtggaggaggcggtggcgctggagtcccagacgataaagcacatgatcgaggacgactgcgccgacagcggcatccctctgccgaacgtgacgagcaagatcctggcgaaggttatcgagtactgcaagaagcacgttgaggccgcgaatcccgaagacaaaccctgcgaggacgatctcaaggcctgggacgctgaattcgtcaaggtcgaccaggccacgctcttacatctcatgctgggtgctaactactggaacatcaagagcctgctggaccttacatgtgaaactgtanccgacatgatc

SEQ ID NO: 224446 - DNA, 452 bp, Glycine max
gaacacagtcaacggaaatagtcttgaatataaaacaaacaagtatatagcataggcaaatctacaagagagatctttgataaacaaacaagcatagcataaatccacatggcagatctttgattcagattttttgagattaacaaaatcattcaaatgcccattggttttcccgacgaacttcctcttcctcctcaggggtgaagtcattcttaatgttaaaggtcttgcgaatttcctctggagtcttccccttgatcatgtcggctacagtttgacatgtaaggtccagcaggctcttgatgttcaagtagttagcagccaggatgagatcgaagagcgtggcctggtcgaccttgacgaattcagcgtcccaggccttgagatcgtcctcggagggtttgactttgggattcgcggactcgacgtgcttcttgcagtactcgataacc

SEQ ID NO: 224447 - DNA, 568 bp, Glycine max
  unsure (1)..(568): unsure at all n locations
tagaagaacaatggcgcttgtatgatggttttgatcctgtattggagcgtaaactacgagcaaggatcaggcgtaatgtgagctgctatgggagattcatgcctcgcatggcgacaattccacctggtatggagttccatcatattgttccacacgatggtgatatagaaggtgaaccagaaggaaatttggatcatcctgccccccaagatccacctatttggtctgagataatgcgcttctttaccaaccctcgcaagcctatgatacttgctctcgctagaccagaccctaaaaagaacatcacaactttggtaaaagcatttggagaatgccgtcctcttcaagagcttgccaaccttacattaattatgggtaaccgagatggaattgatgagatgtcaagcacaaatgcttctgttcttctctcggtacttaagttgattgacaagtatgatctgtatgggcaagtggcatatcctaaacatcacanacaatatgatgttcctgacatatatcgcctagcagcaaagacaaagggtgttttcattaatccagctttcattga

SEQ ID NO: 224448 - DNA, 555 bp, Glycine max
ctgaaattatatatgggctaagggggcacttttcatgggaggtgtggaagatgaagaaccatccatgaaacgaatgaaattatcctctaaaggattagttggcttgtctaacggttcttctaaagagcctgttggaggcttgtccagtgacttgatggctcggcccctaccatccaaaggggacgaacatgttggttccaaaggggttataaagaaagaagaatttgtcaggataattgcaaaggcattatactctcttggttacggaaagagtggggcacatctagaggaggagtctggaatacctttacactctcctggggtaaatctgtttatgcagcaaatacttgatggaaattgggatgacagcgtagccacattgtataaaattggtctggcagatgaaagtatggtcaggtcagcttcattcttaatattggagcagaaattttttgagcttctaaatggtgaaaaggtcatggaagcgttgaagaccttgaggacagagattgctccactttgcattaatagtagtagaattcgagaactttcttc

SEQ ID NO: 224449 - DNA, 457 bp, Glycine max
aatggaacacggatttattatgagatatatatatgaaaagtcacatgcatgtttggcatgaatggtccacttgagataatagtaacggtatttacacaattgcaatgataaaaaagagaaatcaattggaatgagtttgtcatactaagttcccccattgcagtaatggatgccattgctgtgaacattttggtacttgttgtgcagacaatttaggccccataccctaattgttcggtcatcactggctgaggctaacatgtgggggtttgctggattccacctcacacaattaacagatcctgaatgaccagccaatgcttctattagctcccctgagcttctgtgccatatgtaaacctgtgaatcctcacttccactaacaataaaagcttgctttaggccaccaaagcaagacctgattataaaccgggcgcgtttatgacctttgtacttg

SEQ ID NO: 224450 - DNA, 523 bp, Glycine max
ggagaattaggtttttagggtttacatcgagcagccacacctcccgcagcagccatgggtctcaaaactgaactatgccgattcagtggtgccaagatctacccaggaaagggcatcagatttgttcgtggtgattctcaggttttcctgtttgcaaactcaaaatgtaagaggtatttccacaatcgcctgaagccttcaaagctcacctggactgcaatgtacagaaagcaacacaaaaaggacattgctcaagaagctgtgaggaagaggagacgtgctgccaaaaagccttactctaggtccattgttggtgcgaccttggaagtaatccagaaaaagagagctgagaagccagaagttcgagatgcagctagggaagctgctcttcgtgaaattaggagaggatcaagaaaacaaaggatgagaagaaggctaagatagccgaagttgcttccaagtcgcaaaaagcaggagggaaaggcaatgtttctaaaggtgctatgcccaaagtcccaaactt

SEQ ID NO: 224451 - DNA, 547 bp, Glycine max
agtaaaacagttttataaaagattaatcttccaaatgaaagaggggtacatttgagtcaaaacaactatttaaattgtagccaaaattaggaacaaaactaaaagctcagcgtttcccgcctccaccgccaagtttgggacctttgggcatagcacccttagaaacattgcctttccctcctgctttttgcgacttggaagcaacttctgctttcttagccttcttctcatcctttgttttcttgagcctctccttaatttcacgaagagcagcttccctagctgcatctcgaacttctggcttatcagctctctttttctggattacttccaagggcgcaccaacaatggacctagagtaaggctttttggcagcacgtattctatttctcacagctttttgagcaaagtcctttttgagtcgctttctgtacattgcataccaagggagctttgaatgctttaggcgattgtggcaatacctcttacattttgagtttgcaaacaggtaaacctgagaattaccacaacaaatctgatgcccttt

SEQ ID NO: 224452 - DNA, 505 bp, Glycine max
aaaagatggcgcggttgatcacagtggtgtggtgcgcggtggcggtgctactgtgcgccgcggcgggcgcgtcgtgggtggaggaggcggcgaacccgatacgaatggtggcgggggtggaggcggaggtggttcgggtgatagggcagtgccggcgcgcgctgaagtttgctaggttcatgagcaggttcgggaagagttaccgaagcgaggaagagatgagggagaggtacgagatattctcgcaaaacctcaggttcatccgctcccacaacaagaaccgcttgccctacactctctctgttaatcattttgctgattggacttgggaggagttcaaaagacacagactaggcgctgcccaaaattgctctgccactcttaacggcaaccacaagctcactgatgctgttcttcctcccacgaaagactggaggaaagaaggaatagtgagtgatgttaaagatcaaggcagctgcggatcatgctggacattcaacacaac

SEQ ID NO: 224453 - DNA, 514 bp, Glycine max
  unsure (1)..(514): unsure at all n locations
agcatctgagtgcttattatttgtaatatatatagtcactcaagcttctaggatttgtgccagctacatgaaaatgggaagcaacttcaggtttttgagtctttgcctcttggcattgattgcatcaacccatgctcaacttcagcttggtttttatgccaagagttgcccaaacgctgagcaaatcgttttgaaatttgtccatgaccatatccacaatgctccatcactagcagctgcattgataagaatgcacttccatgactgttttgtaaggggatgtgatgcatcagtccttctgaactcaacaaccaatcaagctgaaaagaatgctcctccaaatctcacagtaagaggctttgacttcattgacagaataaagagccttgttgaggcagaatgccctggtgtggtctcttgtgctgatatcctcactttgtctgccagagacactattgtagccacaggtggaccattttggaaagntccaacaggtcgaagagatggngtcatc

SEQ ID NO: 224454 - DNA, 500 bp, Glycine max
  unsure (1)..(500): unsure at all n locations
cacaagccacaatttcaacgccacaccaaaaattccactgcaccaccaccctccccatttgtacttttcttctcattctctttccactcccctgcattctgcacacaatctagctttacgtgcttctgggcaaccgcataaggttaaactgttaagcatatcattgaaatccttttgggattggaacttgatatgatcatttgtattggggagtaagaccttgttacttttgcaaatgctaaattttaataggatcagaagtcagcccaggacaaccagatctatgtctttgggaggcatggattacgtggatccaaaaaggaaaggcaattttgttggaaaagtttttcttgctgcagcattaacggcattatgcattatcatgatcaagagatctccatctntgaatcccncgagtccgttttccatccatgacccaggtgtcactcatgtnttagtgacaggaggtgcaggctatatcggctcacatgctaccctac

SEQ ID NO: 224455 - DNA, 549 bp, Glycine max
agaagaaaatctataccaaccagaggctgggcattatattatttattattattgactcattgtatgttgaatacacatgtaagtataacgaatcaactaccaaactccctaaggacgaccaaaaagaaaaagaaaaaaaaaatcctgagcaccatgtaaaagagcagttgatggccaactgcttggctgaatggctagaaactcagattgcagatgaaataccgtaaccgttacgatgagctttttgccatttccatgcaacctgcaaactcttctcaaggtcagtgtattgtgcggtccaattcagttccctgttgatcttagaagggtcactatacacctcggcataatcgccgggtcgacgtggaaggtagtctactttgatgtccacccctgtggcctttttgcaagcattcacaaactccttcactgatctaccctttccagttccaacattgtagatccctactttagcaggttgtgccttctcaagagcctttacgtgagcatcaaccaaatcaggtacatcattgtagtctcgtatgcatg

SEQ ID NO: 224456 - DNA, 578 bp, Glycine max
ggcagttgttgaaagaaggagggaattgatattcaggtcgaagcttccggatatctacatccccaaacaccttcccctccacacatactgcttcgagaatttgccagagtacggtgcacgcccctgcttgatcaatgcccccacgggagacgtctacagctacgaggaggtggaaagcaccgccagaaaggtggcgcgggggctgaagaaagagggcgtggaacagggccaggtcatcatgatcctcctccccaattgccccgaattcgtcttctcgtttcttggcgcatcccaccgcggtgccatggccactgctgccaaccctttcttcacccccgccgagattgcaaagcaagcccatgcctccaatgccaagctcctcatcacccaggcctcttactacgacaaagtcaaggacctccgccacatcaagctcgtattcgtcgactcttgtcccccccagcatctccatttctcacagctgtgtgaggataatggtgacgctgatgttgatatcaagcccgatgacgtggttgcattgccttattcttcggaacaactggtcttcccagggagtg

SEQ ID NO: 224457 - DNA, 494 bp, Glycine max
aataacgaacaaaatgacaattaggtttatcacttcaattggcaaaaggaattttttttcaacctgacggtcaattttgctatctcaatcacaatagattaaacaatgcaattaaatatatttttataaataaaaatataatttgatgaaggtgaaagtccttgacagattgaatattttccatgtaagaaaatcacactcgtaattagttatacatggttgttacgtacgagaaaatacgtaaaagctagcgatgaagcaacagcgcctcttccttttctgctgaagcttgagcgggcatcgtataatatctatatgatgatatgatgggtgaagggtgggtctgctttaatttcatgttggaacagatgctgttagctttgctcttagatccttgcgcaagattttgcctgacggtgacttgggaattgcatcaatgaagaatactctgtttattcttttgtaaaacaccacctgtttggagataaactgct

SEQ ID NO: 224458 - DNA, 621 bp, Glycine max
  unsure (1)..(621): unsure at all n locations
aaagtcggaaccaccggagaggagggcttcacacagagaattacgcggttgcagcagtcaacgcccgggattcccacgtccataccaaccacaacaggcggagagagagtttaggccttagtgagaaggataacgccatttggttttggcttggaatacgtcatccactatcaatcaactgggctttgaaatggtgaaggagaccgaatactatgacgtgctgggtgtcagccctacggcatccgaagccgagattaagaaagcttattacattaaggcacggcaagtgcatccagataaaaacccaaatgaccctcttgctgcacaaaattttcaggttttaggtgaggcttaccaagttctgagtgacccagctcaaagacaagcttatgatgctcatggaaaatcaggaatttcaactgaagcaattattgatcctgcagcaatctttgccatgctttttggtagtgagctttntgaggaatatataggtcagttagccatggcatcaatggcttcaatggacatctttactgaaggagaacaatttgatagtaaaaagttgcaagagaaaatgaggggtgttcagaaggagagagaagaaaagcttgcagagatact

SEQ ID NO: 224459 - DNA, 511 bp, Glycine max
ggaaaaggcgtcttcataaacgccgcccaaaacttctcatacccttttattcattccattcctttctaagggttttcttttctttgccgagaaaatgagagagtgcatttcgatccacattggccaggccggtatccaggttggaaacgcctgctgggaactctattgccttgaacacggcattcagcccgatggacagatgccgagtgacaagaccgttggcggaggagacgacgccttcaacacatttttcagcgagaccggcgccggaaagcacgtgccccgcgccgtcttcgtggatcttgaacccaccgtgatcgacgaagtccgaaccggtgcgtaccggcagctcttccacccggagcagctgatcagcggcaaggaagacgccgccaacaacttcgcgcgtggccactacaccatcgggaaggagatcgtcgatctctgcctcgacaggatccgaaagctcgccgacaactgtaccggtctccaggggttcctcgtcttcacg

SEQ ID NO: 224460 - DNA, 499 bp, Glycine max
attggtaatagaaggaaacagatatatagaaacttctgtgctatacatagcacatatatttgataacaatcatcattcaaaaaccacacatgttcgacagaagacgaaaaagttgacatcaaacacacgatatttcagacactctaataatcatcatctccttcaccatcatcatctccatcaccagactcgggaccaacctcctcataatccttctcaagagcagcaaggtcctcacgagcctctgagaactcaccctcttccataccttcacccacataccagtgcacgaaggccctcttcgcatacatgaggtcaaacttatgatcaatcctggagaacacttcagccacactagtggagttcgaaatcatgcacacagccctctgcaccttggcaaggtcaccttcaggaacaacagtaggaggctgatagtttataccgcacttgaacccagtggggcaccaatccacaaactggatggttctcttggtcttga

SEQ ID NO: 224461 - DNA, 521 bp, Glycine max
cctcgatcccaattccactagggatttatattccgatgcgattccgagcttgttagatcgcacgacatcgtttcgtttcccagattcttttgtaaaaaaaaataatcttcctttgcccaacaggtaagttggaaaaaaatggaccatgacaagactgggtgccaagctcctcctgaaggtcctatattgtgcatcaacaactgtggattttttggaagtgcagctaccatgaatatgtgttctaaatgccacaaagacatgttgctgaaacaggagcaggccaagcttgcagcatcatccattgggaatattatgaatgggtcttcaagcagcactgaaaaggaacctgctgttgccgctgctgctgctaatgttgatatcccagttattccagtagagcctaaaactgtctctgtgcaacctttatttggttcaagtccagaagggagtggtgaggcaaagctgaaggatggaccaaaacgctgtagcagctgcaacaagcgagttggtttgacagggtt

SEQ ID NO: 224462 - DNA, 559 bp, Glycine max
  unsure (1)..(559): unsure at all n locations
ctcgagccgaatcggctcgagcttaatttgaacgtttccctctgactctgaggttacaagaatcctccacccaacctctgttgtgtttccggagattaggatctggttgggaaactgctatagaagtgtacggatctcatccatcggggcatagcttgtttttgcgatgggttggagatacaacgctggattgttcctcatagtcactgttgttattatttgggtcacctccgccgaagttacccaggatatttttacagattataagcagccatttgcagtaacatatcttggagcttctcttatggtagtttacctcccaatagcattcattaaggactgggtctgtaacttgcttaaatcccgctcctctaaaagtggtaaaaatgcagaatgcgtggatgagttttctgtcaggattagctctcctctcaaaagcaatggagtgcagaaaaactttgaactggaatngnggagtgtgaatcgaaaagatagtgatttagacctttcaacacttgcagaagtaaagccattagtagctaaatataatgataatact

SEQ ID NO: 224463 - DNA, 507 bp, Glycine max
  unsure (1)..(507): unsure at all n locations
gaaagaaattaatcttaaattatatggagaaaaaaatattgcatacacaaatgtaaaaaggcttcattacatccatctgaaccatgactaatagctcaaaacctataatgaatacaacataaccctcactctagaatgatatacacaaaaaaaataaaatatagcactcaatcagcgcattgatttaggatatacattgtctcatggtacagcaccgaacaatggacggatgatggaccgaacaaagaatcaattgtgaaaaaaattaatatagaaaacaatatgctacaatcccaacatcttcgtcaaccgatctgaaagattagctattacaaagcctgcaaatacctgaactgagccaagaatgtatactgccgaataatgccgaccatgaattaccatgtcagccaccatagcaagaggaatggtgagtgacatgcccaaagtggccacaagaggagtagtccatacaacgcanagtgcccagaagtagtctgaaagtacgct

SEQ ID NO: 224464 - DNA, 456 bp, Glycine max
ttccattgttgttatattgtattgtagccggagaagaagagaagagatagcggcgaagaaagaaagatgacggaggcatatataaggaagaagcccgggatggcgagcgtgaaggacatgccggttctccaggacggtccaccaccaggcgggttcgctccggtccggttcgcccggcgcatccccaacaagggccccagcgccgttgccatcttcctcactgctttcggcgctttctcttggggcatgtaccaggtcggccagggcaacaagatccgaagggcactgaaggaagaaaagtatgctgcccgccgatccatactgcctgtgctacaggctgaagaggatgagagatttgttaaagagtggcataaatatctcgagtatgaggcagaagtgatgaaggatgtgcctggttggaaagttggtgaaagtgtgtatcactctgggagatgg

SEQ ID NO: 224465 - DNA, 498 bp, Glycine max
attccagggagtttcttattggatgtttgctaattatctcattcttctggctctgcttcttcttcttttgaattaagagatggggttgtctttcaccaagctttttagccggctctttgccaagaaagagatgcgtattctcatggtaggtcttgatgctgctggtaagactaccatcttgtacaagctcaagctgggagaaattgtcacaaccattcccacaattggatttaatgtggagactgtggaatataagaatattagctttactgtatgggatgtgggtggccaagataagattcgtcctttatggagacactacttccaaaacactcaggggcttatctttgttgtggatagcaatgatcgtgaccgtgttgttgaggctagagatgagctccaccggatgttgaatgaggatgagttgagagatgctgttctcctggtatttgccaacaaacaagatcttccaaatgctatgaatgctgcagaaatcac

SEQ ID NO: 224466 - DNA, 579 bp, Glycine max
caaacttagccttcttgtttcatctattagagtagcaaccatgtggtctgcagtaacagatcccattagagctttttttgcaaattttctccgccatttcatccacaaagacttccatgaagcagtggccagaatgaccataatagatgctttcctcttcgttattgtgcactccattgataagttggggatatggccacgcttgccggttttcttagggctattgtacctggcgattcggcggcggcttcatcaggagtacaacctcttcaacgttggaacaacaccggtgggggttaggtttaaccattctgattttccatacagaacagctgatggaaaatataatgaccctttcaacgaagttgctggcagccatgggactttctttggcagaaatattctccctgtggatcagaaaaaaaagctattgaaacctgatccaatggtggtagccacgatactacttgctaggaggacatacaaggatactggaaagcaatttaatgtgatagcagcttcttggattcaattatgattatgatggatcgatcatcttgaggaacaaaccagattgac

SEQ ID NO: 224467 - DNA, 600 bp, Glycine max
  unsure (1)..(600): unsure at all n locations
gagtgaagcagcagagggaggagcggcattaaaaatgcagatcttcgtgaaaaccctaacggggaagaccataaccctcgaggtcgaaagcagcgacaccattgacaatgtcaaggctaagattcaagacaaggaaggcatccctccggatcagcagcgtttgattttcgccggaaagcaacttgaagatggaaggaccttggccgattacaacatccagaaggaatcaacccttcaccttgtcctcaggcttcgtggtggcatcatcgagccttccctcatggctttggctcgcaaatacaaccaggacaagatgatttgccgcaaatgctatgctcgtctgcaccctagggctgtgaactgccgtaagaagaagtgcggtcatagtaaccagttgaggcctaagaagaagatcaagtaaattctgggtgggatattgtntggtctctactttcgttttggttgtcttagaacagtgacttgtttggtatttatcngttctgggtttgattaatgtaaatggtttgagacatagtttgaactagtcaatatattttatgatccatttggtcttagcattatatgtatatgacattgatc

SEQ ID NO: 224468 - DNA, 434 bp, Glycine max
gatcaaaatgtcataataacattataattgactaagaccaaaatggcatcataaaaatataattgactagttcaaaactattgtctcaaaacaattaacattaatcaaaaccagaaacgataaataccaaacaagtcactgttctaagacaaacaaaacgaaagtagagaccaacaatatcccacccagaatttacttgatcttcttcttaggcctcaactggttactatgaccgcacttcttcttacggcagttcacagccctagggtgcagacgagcatagcatttgcggcaaatcatcttgtcctggttgtatttgcgagccaaagccatgagggaaggctcgatgatgccaccacgaagcctgaggacaaggtgaagggttgattccttctggatgttgtaatcggccaaggtccttccatcttcaagtt

SEQ ID NO: 224469 - DNA, 578 bp, Glycine max
  unsure (1)..(578): unsure at all n locations
tgagtagtgagtgctgaatcgaatcgaatcgattctccgaacatggcggcgagcgatcgcacagtgttgcaattctcttcatcatcttcttcttcttcgcagatcttgtccgcgaaggtccaccctctggtcatcttcaacatctgcgattgctatgttcgacgccctgaccaagccgaccgcgtcatcggaaccctactcggctccgtccttcccgacggaaccgtcgatatccgaaattcctatgctgttcctcacaacgagtctatcgaacaggttgcattggatatagagtaccaccacaatatgttaatatcccaccaaaaagtgaatccaaaggaaatcatagtaggatggtattcaaccggtcttggagtaactggtggtagtgcattaatccacgagttttattctcgagaagtgcccaatcccatacacttgactgttgatacaggatttacaaatggagcgggtacgattaaagcatacgtgtctaacaatttatctcttggagaacgtcanatngctgcacagtttcaagaaattccattagatcttcgtatggtggaagctgagcg

SEQ ID NO: 224470 - DNA, 514 bp, Glycine max
aatggagagaaagctttttgctcattttctttcaaatacagattacatgaaaaataacaagtgaacgctacactgcataccttggacaataagtgaacttacctagcaaagaccagcacaaaacataaataaaaaaataagcgaagtaaaagtgaagtataaaacgctgacattccacgtttctggaaataagacaagaaaagaaactcagaaaaatttgacttcggcgataaacaagcggaagaatcacagaatctgagcagctgtgttcaatttttcagccaagctaagctgcgttcttgtgatactagataaatacagcaaaagcaagtgatcctgcaaactgtcattcacaagcttatcaaaaactgatggggacaatttgggaagggaacctacagcttctgatataaatctcccgattttgttgtctggtgccactcgtccttccacaacatcgtcaacatatttgtagatgtcatcaatcaagactagcagatgttgcattgatgct

SEQ ID NO: 224471 - DNA, 573 bp, Glycine max
atggctacctccatggtgaagcttatgcttttctctgctctcatactcttgtccttgcaagcagttgtgtctgtaacaccactgcattttcaacatccactagaccctttaaccaaacaagagataagtcttgtccaaaccatagtccaaaacaagtacccaagctcaagtaacaggttgagcttccactacattggactcgacgaacctgaaaaggatgccatcctcaaatgggaatccatcaaaccaactgttataactgtccctcgcaaagccttggccattgttataatcaacagccaaacccacgagatcttaattgatctaaaggcaaggcgcattgtctccgacaatattcactccgggaatggcttccctaccctttccgttgatgaacaagtcgttgccatagagctgccactgaaatacggtccattcattgagtcagtgaacaagagagggctgaacctctctgaggtggtgtgttccacattcacaatggggtggttttggagaaaccaaagacagaaggacagtgagagtggaatgcttcatgaaagaaagcagccccaa

SEQ ID NO: 224472 - DNA, 443 bp, Glycine max
cgggggcaagttcaagtaaacttctcattgatataataataagcaatacatatcaaatcattattcttgcacatgcaataagcagatcgcatttcacattatccaaggaacacatctagttgtagcactcgaagcacactaatataatggaaagggctggctagctagttttacttggggcaaccaggccattggacatccgggggagaaagtgttttaagaaccggattcctctcaaaaaaattggttggcctgagctcgaatgcagggctcaataatggcattatggggaagtcttcctgtgctggaacatgatgaattcccacaacgtgccacagcacaaaggccttgttgttaatgtctctattctttttggcccaaacggctaaagaatcatctccatggctgtgatcaacgtagagtccaccagcccacttctcagt

SEQ ID NO: 224473 - DNA, 527 bp, Glycine max
acaggggaggaaagaaatacatcttaatttctaagcagttccaaagatggaaaatagaaacatgtcaatttatagcttgcttcacatcacatgcatcacggtcaccgactagtgttcttatgacacattggacagtttgtctacatgtgaaatattagaagtccaaaatggtttgagaaaggggactgtaaacaacaaatgaactcatctacgctagtgcttgctctatctggtgatactcaagattgcgcagaacaattctggcaaagatttttgcttcaagtggagcagttgctgcagcagctgcaccacgcagaactcttgatgctcccaggctttgcatgaggctagcatggtgcatggcatgtcgtccaccacgaatggtaaactgcaattgaaagatcaacacataggaacgccaaaatttgaaccaaatttagatataaaaaagagaaattaagttgttgctacttgctatagatacctggagaagagcaaatgctgcacaagccttgagtatagatgat

SEQ ID NO: 224474 - DNA, 507 bp, Glycine max
caatgctcacttagcagggtgtgaattttgacttggtcatcaacacaggctcattgaggttgttctgtgccttcgctgatgaatgagattctacttattgtgcctgaccctgcgacgcactgaatgcgagcaatctagccaccgtcacttgctgtgattcgatcggaggaaaatggacgagcagtcatcgtaagctgaggaaatccagaaaaaggctgagaacaagctcagcggttggggctagtactggctccaagtacgacaatgccggcgatctcttccataaagacgccaatcgcttcaatctggccaaatgatcggacaaggctggagcgagatacctgaagttggcaggttgagagaggaagacggaaagctcgcatgaagctgcacaggcccatggctatgctggacagggttgcaaaaagactaatatcaacgagtctgtatcgagcttaaaccgagctgggaatcatttttgggacgttggaagactccatatggctg

SEQ ID NO: 224475 - DNA, 509 bp, Glycine max
ctcctcttctgccctccacacaacttctctctcctctctctctctctacaaatccttctttcttctcttcgctgctcactgtagcgtagccatggctttcagagttggaggagcgggaggaggaaatgcctcttctggcatgggtgttgctgagcatagcgtaagcacgttcctggaattgcagaggaagaaagttcatcgctatgtgatttttaaaattgacgagaaaaagaaagaggttgttgttgaaaaaactggaggccctgctgagagctatgatgatttcactgcatccttgcctgaaaatgattgccgatatgctatctttgactttgattttgtgacatctgagaactgccaaaagagcaaaatcttttttattgcatggtctccttcggtagcccgcattcgccctaagatgctatatgcaacatccaaggacaggttcagaagggagctgcagggcatccattatgagattcaggcaacagacccaaccgagatggatc

SEQ ID NO: 224476 - DNA, 571 bp, Glycine max
  unsure (1)..(571): unsure at all n locations
ctgaatgcgaagaacgaacgagagtgcagcgccagcggcaatgggaaggagcactttggctttggttctcgcgattctgatctctttgcagggaaccccccacgttagatccgatgcctccgatcatcgttacaaggacggagactccgttcctctttacgccaacaaagtcggtccctttcacaaccccagtgaaacgtatcggtactttgacctgccattctgtgtaacaggtcatgagaaagataagactgaagccctcggtgaggtgttaaatggcgatcgccttgttagtgctccttatgaacttagtttcaagaaggagaaagactctaaggttgtatgcaagaggaagctcacaaaggagcaagttgctcagttccgagaagcagttaagaaggactattatttccagatgtactatgatgacttgccgatctggggatttattgggacggttgacaaggaagggaaaactgaccctagtgagtacaagtattttctttacaagcacattcagttcgatattcattacaacaaagatcgagtcatngaaatcagtgcccggatg

SEQ ID NO: 224477 - DNA, 528 bp, Glycine max
  unsure (1)..(528): unsure at all n locations
agtacaagctacttcaaataaatttcagtgactacagtaatcaaagttaaatcccatggttccaaaaacttcctcaagtgcaagcctgtgcagttatagagatagcatgacaccaattcatgaatagagtctaagcttctctagtttccaggtacacactatataacctaccttatgacagcaaaagaaaaaaataataacagacccttttctcttctcctaacagaaataatatgaactttaccaacaccttcaaaccccagctactcacacttgatggaccggtatatgtgacgaacaaagagcagggaggcacggaatcctacgctaccgagcatgaggaagaagccatagcagatacaggccatgtaaccaaagaagaacgaagtttgcataaaaccagacatatctgatcgtgcatagtagtaatacaagcaatagccgtagatgaacaagccagttgatccaccacaaaggaaagacctncaccaccattcatgatcctcagcagcangttggaagtatgtc

SEQ ID NO: 224478 - DNA, 550 bp, Glycine max
  unsure (1)..(550): unsure at all n locations
gaaaacaatatcttctaccgactattttgaatttaattcaaaatttacagacaaaatgaggagaatcaagattcctcttcctcctgttgatgagaagaaaaaagtaattgaggatgttgacaaagacagaagatatgccattgatgcctcaattgtgcgtattatgaagagtcgaaaggtgttaaattaccaacagttagtaatggagtgtgttgagcagttaggtcgcatgttcaagcctgatgtcaaggcaattaagaagcggattgaagatttgatctctcgagactacttggagagagacaaagataatgcaaatttgttcaggtacttggcgtgatgtggtcttgacgattttgctaaagtggtggttactgcagttgccacaaacagcaaaacaagagcatcatatntgaacatgcnaaatatcagtttctcatagtttccttggaggagggtctgcgagtgcttgtacattttgcctccatattccagtatgggatactactgtagatgtgtgccccttgagaagttgtatgaattccataag

SEQ ID NO: 224479 - DNA, 475 bp, Glycine max
gcaagagaatggatgagtcaaaaaacaggcataatgataatttgggtgtgaacaaaatggggaaaaacattaggaagagcccattacaccagcccaattatggcaacaacaacaacagcagcatgaatgggggtagacagcaacagcaacagcctcagcctcaggtttacaacataagcaagaatgatttcagggatattgttcagcagcttacagggtctccctctcagtctcaggatcatcctcaatccaaacctcctcagaatcagaacaattccccaaaacctcaaagtatgaggttgcagaaaattaggcctccccctttgccctatgtgaggcctccattgcacaccaccttgccagcagctagacctgctcactttagacaacaaccatcaccaaaccctaataatatagctgagtcaccaatctctgcctacatgagataccttgaacattcaattacagatcccac

SEQ ID NO: 224480 - DNA, 561 bp, Glycine max
gaccatcaagtcaacgttcctcgttttgtgcctcttagcctcgttcctctgtccaatcaaggctcacggaggaagttctcatgatggtgtatctgaaagcgaagatttgcattctcggggtctgatcgtggtgaaaatatggtgtttgatcatcttccttgtgagcactttcgctggcggggtttctccttacttctaccgttggaacgagacttttcttcttttggggacacagttcgctggtggggttttcttaggaacctctctgatgcatttcttgagtgattctgctgagaccttcggagaccttacttcaaaatcttacccttttgcttatatgctggcttcatctggataccttctcaccatgcttggtgactgtgttatcactattgttaccaggaatagcaacagggaagccaaagtggtggaactggaaggagggacaacgccccaagagcatgacctagccagagatcattgcgcagtggcggagacaacaaaccctgtattattgaagacttcttctttgggagacaccattctactcatccttgcact

SEQ ID NO: 224481 - DNA, 498 bp, Glycine max
gtaggaacaatgactataaattttcattcaaaatagtaaacaaacgtttaatattgtagcgaaatataatggtacattcatcataattatcacacacgcacaatttcgtagaacaattattaatgaacaaagaaaaacaggaattgaaacatgatgatcagtcccagatcatgactacagctataacagcaacaccagaaagcacggcgacaaacctaaacaagggagtgtcgtaacgcattgtcctctgtggtttgaagcctttggaaattaaatgattgatggcaacatagatgaagaccccacaagcaatacccattgttatagcaaacatccaatctgcggtgcttccttgtgttgtggcatctatggcaatgccaatccccacaccaatggggcttgagacagcaaaggccaaagaatatgctgctgttgttacaaagggtcttttaagtaacatccttagcaaagctattcccattgcaatagcagcaaata

SEQ ID NO: 224482 - DNA, 518 bp, Glycine max
ggcgaacagttcctcaagtatccaccacctaaagtgatgcaggtggataagtctgcatggatgactgatgaagaatttgcaagagaaacgattgctggtttaaatccaaatgtcattaagattatagaggagttcccactaagtagcaagctagatactcaagcctatggtgatcatacctgtataatagcaaaagaacatttggagcctaacttaggtgggctcactgttgagcaggctatccaaaacaagaagttgttcatcttagatcaccatgactatctcattccttatttgaggaaaataaatgcaaataccacaaagacttatgctacaagaaccatatttttcttgaaagatgatggaactttgacaccattggccattgagttaagtaagccacatcctcagggtgaagaatatggtcctgttagcgaagtctacgtgcctgccagcgaaggagtggaagcttatatttggttacttgcaaaggcttatgttgttgtgaatgatgcatg

SEQ ID NO: 224483 - DNA, 477 bp, Glycine max
gttaaaagttaaaacatgcatgattgcatttattattttggtttccattatactaacacaactctctttattaatgacaaatacaaatacattcagccactccaaatacatgacttaagcatacacaactgattaaggaatctggttccttcaatttcacatttatttaaaaccaggaacagtacttaagcaaccatagggtccttagatagagatactgttgggaattcctctgaaagtcaatccctcctcactagaaggatagagcagagtgtaaggcattttagctggcccatagcggtttctcaatgtctcatctttgttcttctctataagcttcttttcaatctcttcaagcttctttccaaacctcttaaatgcctctaatggaccggcatcagaagtccagtagtcaccaccatctctctgccaaggtagaactcatcagatgcgtgccttgacaagatttctataact

SEQ ID NO: 224484 - DNA, 563 bp, Glycine max
cgcttgtgatgcctgacatcagaggaagccaacctggtgacaagtggaattttgaggatatttatgatgttgatgtgttcatgaaaagcatggaaggggtggtcagagtggtaaaggatcttcctactcgtatatcaacacgaaatattgctgctgtgaaagtccctaatcgggttacagaagattacatagctgaacatgtggagccaatatacagaacaaagggaagtataagacttggaacttacttcccttcaataaacatgagaaaggcagggaaaaagggtgacactgattctgttgcatgcttagcaatgtttggaagtttagagttgcagccagaaatgcatgaagtggttgactcaatggttgaaagactaagaactttaagccgaaattcagatgggcaattcatagctgtggacttgagggttgagatgttgaataagaagggctgccaaaatagtgatattgatggggagaaaagctgctacaatgcacaagagattgcagtatttttgaggcagattggttttgacaaggataccacaggttatgtgact

SEQ ID NO: 224485 - DNA, 518 bp, Glycine max
cctcgcagttccttgatctctcctctcaagatgcagatattcgtgaaaactttgaccggcaagaccatcacccttgaggtggaatcctccgacaccattgacaacgtaaaagctaagattcaagacaaggaagggatcccacctgaccagcagagacttatctttgcgggtaaacaacttgaggatggtcgcacccttgccgattacaacatccaaaaggaatcaaccctccatctcgtgcttcgcctcaggggtggcatgcaaatctttgtcaagactttgaccgggaagaccatcacccttgaggtggaatcctcggacaccattgataatgttaaggccaagatccaggacaaagagggcatccctccagatcagcagaggctgattttcgctggtaaacaacttgaggatggaagaacccttgctgattacaacattcagaaggaatccacccttacttggtgcttcgtttgagaggtggcatgcagattttcgtcaagactttgacaggaaag

SEQ ID NO: 224486 - DNA, 537 bp, Glycine max
atcagaaactattcgtagtaattttaataaaataaaaagtaattgtgagatgataatggttttttattcttttgcacgagaccgtgcatagcaagctatgtcacagacatagccttaaaactaaaaacattaaagcagcacctaaataacagctgcaaccaacgagttcaacatacactggacataacaacagagaattcaactaatattggacataacagacagactcagaaaccaccacgaaggcggaggacaagatgcagggtggattccttctgaatattgtaatccgccaaggtacgaccatcttccaattgcttcccagcaaaaataagcctctgctgatctggtggaataccctccttgtcctgaatctttgctttcacattatcaatggtatcagagctttccacctccaaggttacggtcttccctgtcagagtcttcacaaatatttgcataccaccacgaagcctcaacaccaaatgcagagtggattccttttggatattataatcaagcagggtacgcccatct

SEQ ID NO: 224487 - DNA, 443 bp, Glycine max
  unsure (1)..(443): unsure at all n locations
cctcgcagttccttgatctctcctctcaagatgcagatattcgtgaaaactttgaccggcaagaccatcacccttgaggtggaatcctccgacaccattgacaacgtaaaagctaagattcaagacaaggaagggatcccacctgaccagcagagacttatctttgcgggtaaacaacttgaggatggtcgcacccttgccgattacaacatccaaaaggaatcaaccctccatctcgtgcttcgcctcaggggtggcatgcaaatctttgtcaagactttgaccgggaagaccatcacccttgaggtggaatcctcggacaccattgataatgttaaggccaagatccaggacaaagagggcatccctccagatcagcagaggctgattntcgcttggtaacaacttgaggatggaagaacccttgcttgatacaacattca

SEQ ID NO: 224488 - DNA, 282 bp, Glycine max
atcagaaactattcgtagtaattttaataaaataaaaggtaattgtgagatgataatggttttttattcttttgcacgagaccgtgcatagcaagctatgtcacagacatagccttaaaactaaaaacattaaagcagcacctaaataacagctgcaaccaacgagttcaacatacactggacataacaacagagaattcaactaatattggacataacagacagactcagaaaccaccacgaaggcggaggacaagatgcagggtggattccttctgaata

SEQ ID NO: 224489 - DNA, 485 bp, Glycine max
atttgacggtgtcggtgattcaccaaattctctctctctctctctctcaaatctcaattcactcattcatttcccctttcttctctttctcaatttcgctttgtattgtcttcaattcagtaaaccgcaccaattccgatggcggcgtcgcggcggctccgggacctccaatcccaaccggcgaacaagatctgcgtcgactgttcccagaagaacccgcaatgggcctcggtttcctacggcgtcttcatgtgcctggagtgctccggcaagcaccgcggcctcggcgtgcacatctccttcgtgcgatccgtgacgatggattcgtggtctgaaatccagatcaagaagatggaagccggaggcaacgacaaactcaacgcgtttctcttgcagtacggcatccccaaggaaaccgatatcgtcgccaagtataactccaacgctgcctccgtctaccgcgaccgcatccaggccctcgccga

SEQ ID NO: 224490 - DNA, 552 bp, Glycine max
gagggagtgttgcttcccgtgtgtccttcaccttcttcttgctctgcaactcctaaacccagaatccccattccgctacgctcttctttcccttctccattattacacaaccgtttcttctcccaaaacgcagcgttttcccttcgcaactctctccgcacttccaccttcgcactcgcgcaacacgaagctcccgttctgggcaaacccgataacaacaacaactcttcaccctatcttcccaaaatcgataagacgggacgcttctgcagccccagagccgccagagaactcgcactgtcgataatctatgctgcgtgcttggagggaatggacccggttcggctctttgagaaacggatgaatgcgcggcgagaagccggatataaatttaatgaggaaaagttgttggagtataatcatatgagtttcggagggccgcctgttactgttggatcggacgaagaagcaaatgagctactgcggcacattgaagaagagtctgccattgaagcagaagtccttacagctcctccaaagctggtatacaac

SEQ ID NO: 224491 - DNA, 498 bp, Glycine max
gtagtaccatgtttcaaaagtacttaattaaattagaatgtcaaaagttctttaacttaaacaaaatttattacaaatcccacgagctagcatacataaaatatacatatacacgattacaatattgcaatgtcataataactgctgtaaaaacaaaatgtcataataactctaccagtttcaaacaacacgattcctaactcaggccttgtctacaggtcaatatgcaaattatcaaacccccataggtgatatttcctgaaatgcacgtcaagcttttcaatgacccaagaactacaacgtgtagacaatctgacaatgtacatcaaggtcaactaaacctggttattcgatgcttcaagctccagttctcggaaaaatgtgcggagacagccgttaatgatgcgaggggctgctccatcacaaaaccggttagcaagaactaccgcctcattaatgacgatttggtgtctcgttctagcacttccattttggaca

SEQ ID NO: 224492 - DNA, 567 bp, Glycine max
  unsure (1)..(567): unsure at all n locations
ctgacaccctcccatttgctacaatgggatcaggttcacttgctgcaatgtctgtatttgagtccaagtacaaggaaagtttgagtagggatgaaggcattaagctagttgttgaggcgatatgcgctggaatatttaatgacctaggaagtggaagtaatgttgacgtttgtgtgataaccaagggacacaaggaatatctcaggaaccaccttctaccaaatcctcgtacctatgtcaatccaaaaggctttgatttccccaaaaagacagaggtcctcttaacaaagattaccccgttgaaggagaaggtggaagtgattgaaggagatgctatggaagagtaacaatcgttccaaaaaatatttggtgtttgagtataaaacttgattgtgcaatggctgtgatatttagttattgtactttcacaactttggctttcattaccaaaaattatgtgaatttaattagattggtgcaagttatttcctcaaatntcttcatttggttggattttggctatgaaaatgcttaacacaacatttaatatatacaatttgtttgatg

SEQ ID NO: 224493 - DNA, 444 bp, Glycine max
catcaatcaaattgtatatatttaatgttttgttaagcattttctagccaaaatccaaccaaatgaagaaatttgaggaaataacttgcaacaatctaattaaattcacataatttttggtaatgaaagccaaagttgtgaaagtacaataactaaatatcacagccattgcacaatcaagttttatactcaaacaccaaatattttttggaacgattgttactcttccatagcatctccttcaatcacttccaccttctccttcaacggggtaatctttgttaagaggacctctgtctttttggggaaatcaaagccttttggattgacataggtacgaggatttggtagaaggtggttcctgagatattccttgtgtcccttggttatcacacaaacgtcaacattacttccacttcctaggtcattaaatattccagcgca

SEQ ID NO: 224494 - DNA, 549 bp, Glycine max
gtcagatctgatgcaagggtaagcagtaaggttctgaaggccggagctctcaagcatgaattgttggttactaatgcagtcgcaacaaaggaaggcagttctgcggcttctacatcaaaatctgggcatgaacttctcctttttgaggccctacgtgaaggtttggaagaagaaatggagagggatccttgtgtatgtgtcatgggcgaagatgtaggtcactatggaggatcctacaaggtgactaaaggccttgccacaaagtttggggaccttagagttttggacacacctattgctgagaactccttcacgggcatgggcattggggctgccatgactggtctgaggccagttgttgagggcatgaacatgggatttctacttctggcatttaaccagatttctaacaattgtggcatgctccattacacttctggaggccagtttaagataccaattgtcattcgtggacctggtggagttgggcggcaacttggagcagagcactcgcagcgattggagtcatattttcaatcaatccctgga

SEQ ID NO: 224495 - DNA, 336 bp, Glycine max
gggggtggctgttttaaatactctttaaaaaaaattgcagagatggtcagattttaaacaacaatctaaaggtacgggctatagacttcagaaataaaaggaaaagaaagtcatgatgaaaattcaagcttaatttgacaagcacaatagctttaccaaaaaccatatactaattgctagggttgttgaacaatcacttgcagagacagctcaactgcaatcacaattcgagcaggatgaaccactgaccattcctccaatgtgccagcataaggagtcggcacatcctgagaggagaaacatactatatgggcatccaaatcgtcatggaaaatt

SEQ ID NO: 224496 - DNA, 568 bp, Glycine max
tggaaatgtcgggatcggaggacgagggaggagaagagtacctcttcaagatcgtcataatcggagactctgcggtgggcaaatccaaccttctctcccgctacgcccggaacgagttcaacatgcactccaaggccaccataggtgtcgagttccagactcagtgcttggaaatcgactccaaggaagtcaaggctcagatttgggacaccgccggccaagagcgattccgcgccgtcacctccgcctactaccgcggcgctgtcggcgccctcattgtctacgacatctcccgccgcaccaccttcgatagcgtcggccgctggctcgacgagcttaaaactcattgcgatacgacggtggcaatgatgctagtggggaacaaatgtgacttggagaatataagggcggggagcgttgacgaagggaaaagccttgcggaagcggaaggcttgtttttcatggaaacgtctgcgttggactccaaaacgtgaagacggcatttgagatggtaattcgagagatatacaccaacgtgagcaggaaggtgctcaactccgaaacatac

SEQ ID NO: 224497 - DNA, 535 bp, Glycine max
  unsure (1)..(535): unsure at all n locations
gacataaatggatgtccgctttcattcgctgcagtgcaattacaagctctttgtaacccaattatacaatttatacccgctttcctgagattgaagacaacattttgatttactatataggtgtaactgataaacaagttttgaaggaacaatccaaccgagcccatttaattaataaagcaaagaaaagaaagaaaaaggaaatagaagtgacaaagcaagttgcagagtattgtaggtcatctggaacagcaagaaaaatagggttgattttgcttagatgtagaagcaccattgttgacgaggctgaccctgttgacagataactctgccttgtatgtttcggagttgagcaccttcctgctcacgttggtgtatatctctcgaattaccatctcaaatgccgtcttcacgtttgtggagtccaacgcagacgtttccatgaaaaacaagcctttcgcttgcgcaaggctttttccttcgttaacgctcaccgnccttatattctgcaagtcacatttgttccccactagca

SEQ ID NO: 224498 - DNA, 578 bp, Glycine max
gtggttgcctctagcttataggatgcaaataattggttgctatgcccaaactgaactgggtcatgggtccaatgttcaagggctagaaacaactgcaacgtttgatcccaaaacagacgaatttgttatccatagccccacattgacttccagcaaagtgagtgaaatgggttatcactcctgtgagcctttactggtcttttactatttttaaccgtttaagattctacatcttacaatgttaccaagtgctttaacaagtaacatttagggaaaagagttgtacctttcttatgcattcactgcttctacttgttataaaataattttggatttacatcatgcttctgacattgatttaaacagtggtggcctggtggattgggtaaaatatccacccatgctgttgcttatgcccgtctaattattggtggtgaagaccatggagtgcatggtttcatcgtccagctgcggagctaggatgatcacttgcctcttccaggcataactattggtgatattgggatgaaatttggaaatgcagcttataacaccatggacaatggagttctaagatt

SEQ ID NO: 224499 - DNA, 541 bp, Glycine max
agacatcaaggatcgttaatgtaataaataaatgagtttttccggttccagatacacctaattgcgatggaaattagctgggtaacaaattcccattcgtatgtactcaagcaattttatttatcgttccacacaactttattaacagttgcatacttgcattagaatagtggataagtttcttggatgcaaagagagcatcatagccacaaaatgaactagagcctagcattacgtagttgttgcttaagcatcggttgaatatactctttaaagccatcaggaacaactgaatcattcaaaggatccttccatgcctcctcgtacaacttcggatacacatttccatcgtaacgtccaagaattgaaccaaggtagtgatcagtgtagttaaatgcatcaacaagcgcaattgcattaggacggacctgtgaatataagtttctcagctgctcactttgcagagatcctttgtttgggttaatgcagcccgtggaaagaaaatcacccagatgtttatgaagtagaaacaaagcataaa

SEQ ID NO: 224500 - DNA, 549 bp, Glycine max
caacaacttctcccactcattcatcaacaaccacacacactctctctcccctctctgcaccaaaaccacttctccggcgacatctccggtcaggttccggcaacctcatcggcgaatcggcatgccaacacaatgaatgcggaacctccgctgccgccggcgctcctcatgtcggtttcctgcctctccgactacgacctcctctgtggcgaggacacctccggagtcctctccggagagtcgccggagtgctcctcatccgacatcggctcctcaccacttccgccgtcacctccgccgtcgccgacgatgacggaggattgttattccatcgcgagcttcatcgagcacgagcgcaacttcgtccccggattcgagtacctgtcgaggttccaatctcgctccctcgacgccaacgccagagaagaatccgttgcatggattctcaaggtacacgcgtattatggctttcagcctttgacggcgtacctcgccgtcaactatatggatcggtttttggattctagccagttgccggaaacaaatggg

SEQ ID NO: 224501 - DNA, 565 bp, Glycine max
cttattccctgacaccaggactcagcttgctcgggcttaaccacagaccaattaggaatttcattagctgcagtgagtatggctgcagcagcaatgcatgatggcctgtaagcaagaaagctagcctcttggatattagatacgatgatttctgtagcccgggaaatgaggaaccgggtaaaagttccagttgaatctgctttgcacgcaaagaaaacgaggaagcaaagtggggttactgatcttagcctccaatccaagacacccagaacaagtagctccatcctacgaattgttctcggttcaaatatgtacttggcaccttctatctgaaggtccaagagagatggaacaagaggttcctccatttttgctgccaaagacaagcatgcaacagatagaagttgcagaggccacccatttgtttccggcaactggctagaatccaaaaaccgatccatatagttgacggcgaggtacgccgtcaaaggctgaaagccataatacgcgtgtaccttgagaatccatgcaacggattcttctctggcgttggcgtcgagggagc

SEQ ID NO: 224502 - DNA, 536 bp, Glycine max
cgagtacatttctaaaattcagaagacgtaatgccctttcgacctcttctagagccaccttaacattttccattcaataattaaattatcatcattattataataaactttacctataaacgcatccatgccttccccttcagttcgcagactcacaatggccgcaatatccaactccttatcactgaagcacagtttctctctgagtcgagctcctccttcttcctcttccatcaaattcaaattcagaagatgttacgccgcgttcgccaatgagaatcgcgagtacgtgatcgttggcggcggaaatgccgcgggatatgctgcgcgcactttcgttgagcatggaatggctgatggtcgtctctgtattgtaaccaaagagccgtatgcaccttacgagcgtcccgctctgacaaagcgtatttgttcccgccggataagaaaccagcacgccttcctggttttcacacttgtgttggatcccgtggagagaggcagactccggggtggtataaagagaatgggatagagat

SEQ ID NO: 224503 - DNA, 615 bp, Glycine max
aaaggcaaaggctatcttaaattattgagaaaattcaaggataccttatggcaccagatcaaatccaaattagacattccagttaaaaaccattactaatgtcaggtgactgagaatgtaatgaaaattattctcttaaggagcaatccctactcagatgatgacagatagtcactgataatctggccgtaagagaagataaattacagaatgatgttaccaagatcggtactagacagcagcttcgccttgcaaggattcccgagcaatctctagggcctcctccactgatgttgcattttgaagtttggctttatcaatcagaggctgacttctggcaagtttaggcaggagttgaaattcctcagggctcccactttcaagaagaactcctttcagcttaccagattcaatccagaaggtagatattttaggatcaaaattttcaatttcaactgtttcttcaacattgtcttcaaagaactgccaccacacttttctagggcttcctttatattcaaaaattctcgagtagaagtatggaagataatcatacgtgtgagtttgtgcactgagtaatgctttcacacagtgctgtgcaaaacgacgggcatg

SEQ ID NO: 224504 - DNA, 418 bp, Glycine max
  unsure (1)..(418): unsure at all n locations
gaacgcagggttaactctaatatgaacatttcacatgcccttgcaaagatgactggtgcttcggctgatatcatcctaacatcctcgtcagccttcataatcttcttgatccttgccaggggaagactgtggttcttggaatcacactgaagagaacaaaaggcgaacacttcaaaaaaatgatattgctgctgcaatcacaaggactgacatctttgatttcttggttgacattgtgcctcgtgaggacttgaaagatgaagtgcttgcatcaatcccaagaggaacaatgcctgttgcagggcctgctgatgcccttncatattgctacatgccgcctcagcatgcgtccaaagttgagctgttggtgtattatggggtagcctgtgatggacccaacatgtatgctcagcagtct

SEQ ID NO: 224505 - DNA, 588 bp, Glycine max
ctcgagccgcacagtggtccttctatatagccctcatcgctgagttcatagcaacccttctcttcctttatgtcactgtgctcaccattattggctacaaaaggcagactgatacaacggtaggtggcaccgactgtgatggggttggcattttgggcatcgcttgggcctttggtggcatgatcttcatccttgtttactgcaccgccggtatttcaggaggacacataaacccggcggtgacattcgggttgttcctaggacgcaaggtgtcgttgataagggcgttgttgtacatggtggcacagtgtgccggtgctatctgtggtactggattggccaaggggttccaaaaagcatactacaacaggtatggaggtggtgccaactctgttgctgatggctacaacaatggtactgctttgggtgctgagattattggtaccttcgttcttgtctacactgtcttctctgtcactgaccctaagaggaacgctagggattcccatgttcctgtactggcgccacttcctattggatttgccgggttcatggttcacttggctacaatcccaattactggtactg

SEQ ID NO: 224506 - DNA, 603 bp, Glycine max
  unsure (1)..(603): unsure at all n locations
ctttcttattcttccttctaagaaaccacttcaaatcatcaacttccctagacttacacaccctttgggctgtaacaagcaatctgatcctcttgttatcattcagattgatttctcttctagcacctcgatcaaagggctaaaaaaatttgctacttattgcacttttcttttcatggtttgatacatcttattgattttagtgctatttcaaggggtgaatttgagacatgggtttgagttctaagcaggtttctagcagtggacttgattggaaacaaaccttgttggaggctcagaatttggaacttccaaagcctaatctgatgaggaaacaacagcagcagcaacaacaacaacaaactcagccgaattcagagtctttgaaatgtccaagatgtgactctaccaacaccaaattttgttactacaacaactacaacaagtctcagcctcgccatttctgcagggcttgcaagaggcactggactaaaggtggaactctacgcaatgttccagttggtggtggagggagaaacagagggtcaaaaaatcaatcactccaattacaacatcttncaccaccaccacaccaatcacaac

SEQ ID NO: 224507 - DNA, 549 bp, Glycine max
atctctactgaccaaatctgaagaaaattgctttctctttggttcctagctcgcactctctctacgcacgcctcaacatcccttctctgctccattcattatgtctccgtcgttggatcttccccccaagggtggcttcagttttgatctatgccgaagaaacgcaatgcttcaaaacaagggcctcaaagccccaacctttctcaaaactggcaccactattgtcggtttagttttccaggatggtgtcattcttggggctgatactagggcaactgaaggacctatagtggctgataaaaactgtgagaaaattcattatatggcacccaacatatattgctgtggagcaggcacagctgctgatacagaggctgtaacagacatggttagctcacagctgcaactacatcgctaccatactggtcgggaatcaagagttgttacggcactgactcttcttaagaacacctgttcaattatcaagggcatgtctcagctgctttagttcttggtgggggtgatatcactggacctcatttgcatact

SEQ ID NO: 224508 - DNA, 467 bp, Glycine max
gaggaacaatttgcaatgatctaattgaattcaggtaaattttggtaataaaagccaaagttgtgaaagtacaaaatcaaatatcacagccattgcactaatcaagtttcatactcatacaccaattttttttggaatgattgttactcttccatagcatctccttcaatcacttccaccttctccttcaacggtgtaatctttgttaagaggacctctgtctttttggggaaatcaaagccttttggattgacataggtacgaggatttggtagaaggtggttcctgagatattccttatgtcccttggttatcacacaaacatcaacattacttccacttcctaggtcattaaatataccagcccatatcgcctcaacaactagcttaatgccttcatcccttactaaactttccttgtacttagactcaaatacagacatttgagcaagtgaacctgatcccat

SEQ ID NO: 224509 - DNA, 514 bp, Glycine max
  unsure (1)..(514): unsure at all n locations
aaaaaatattcactaagatttatttcccttattttattcatttattctttgttcctagtctttatcttataatttctcattgcttgcccggtaattcaagatcaacttggaaaatttgcaagatttgggatgaaatctggtcggatcttgctttgtgggatggggattttggtgggtcttatttcaatacaaagctcttcctctctcaatcccatctccctctcttcttcttcttcttcttcttcataacacaaacacaaaacataaacctttcttccaaccaaccttttttccaattcattctttgtttcttcaaaaatcttcaatccattttcaccttttcacaaatggggatggctgcagagtcacagtttcatgtcttggctgttgatgacagtctcatagataggaaactcattgagaggctcctcagaacctcttcttatgaagttactacagttgattctggtagcaaggctttagagtttctggngttgtgtgagaatgatgagag

SEQ ID NO: 224510 - DNA, 444 bp, Glycine max
  unsure (1)..(444): unsure at all n locations
ctcgagccgattcggctcgagcgtcgatctgagctcaaaacaatggcgaaaccaaggtactctcgtcttccacctcgcaagtcatcgtcgtcttccacgctgattctgactctgttcctggtcttcaccttcctcgttctcattctcctggctctcggcatcctctccattcctagctcctcgcgtggaaatttgcccaaacctaacgatctcgcatccattgctcgcaacacaatccacacttccgacgatgacgacgtgaggggagagcagtgggttgaagtagtgtcgtgggagccgagagcctttgtctatcacaattttctgacgaaggaggaatgcgagtatctaattgacatagcanagccaaatatgcataagtcatcagttggtgatagcgaaaccggaaagagtaaagacagcagagtacgtacaagctctgga

SEQ ID NO: 224511 - DNA, 454 bp, Glycine max
ggagaggcagcaagaagagaaaaaggggaatggcatggttgcagttgcagagaatcatcaccaataccaagggaggtgctaatttgatctcaccgctcccacgattcttctcgaaatgttccccctatgttttgaaagttggaataccagagtttctaaacgggattgggaagggggttgagtcccacgttcctaagcttgaatctgaaatcggtgatttccagaaacttctcgtcattcgaacccttaaactcaagaagctcggtattccttgcaaacataggaagttaatattgaaatacacacacaagtacaggctgggattatggaggccacgtgctgagttcatcactgcctgattgtttctaagtagtaagtagtcgctgtttgttagaccatattgcaaatgtttagccgcagcagaatgacaatgctctacttgaaaagatcaagt

SEQ ID NO: 224512 - DNA, 511 bp, Glycine max
ccttgccatggcctcaaactccatggctggcttgatcaccggttcgaattctcacttctcgcgtgactccgatgagcatcagactcctcctacccgacaggcttcatcgaaaactacttgtcgagtttgtggcgatgagattggatacaaggaaaatggggagctgtttgtggcttgtcatgtgtgtggatttcctgtttgccgaccgtgttatgagtatgagaggagtgaagggaaccagagctgtcctcaatgcaacactcgctataagcgccacaaaggttgtcctagagtagctggagatgaagaggacaactttgatgcagatgattttgatgatgagtttccggttaagaatcatcgtgaagatctagatcggaaccatgatgttaatcatgtggaaaatggggactacaatccagagaagttgcatcccaatggtcaagcattctcttcagctgggagcgttgctggcaggattttcgagggggacaagaattctacagcaatg

SEQ ID NO: 224513 - DNA, 504 bp, Glycine max
gtaaatggtgaaaacttcataatataaggtaacaagaaagcatgaagcacttacataggtgttggaagattattatcatatgtgatacatgatagaatagtaaaacttgagcatctaacagacttttatcagttcaaacgtctccgccttggagcacgagaatctccactatccacatcagacactcttgaagcatcgttcctcctcctagaagaggatgttgacaaggataccatggaatcaatctctacagcagtgtccagttgactctctgaatttataacagcaccaatgcttgaaaaggaatctctgtcttcaactggaggaggaggttgttcttggttcctacctaatggattgctacggaaatatgcctcaactaacctttcagcggaagttagtgctgatgaaagagtagaaagtgttgctctgtgtgattgtgttcttcgaagcaaatgggactgcaccctagtccggggatcccctgcctcagaagtattaaca

SEQ ID NO: 224514 - DNA, 569 bp, Glycine max
  unsure (1)..(569): unsure at all n locations
gtaaatggtgaaaacttcataatataaggtaacaagaaagcatgaagcacttacataggtgttggaagattattatcatatgtgatacatgatagaatagtaaaacttgagcatctaacagacttttatcagttcaaacgtctccgccttggagcacgagaatctccactatccacatcagacactcttgaagcatcgttcctcctcctagaagaggatgttgacaaggataccatggaatcaatctctacagcagtgtccagttgactctctgaatttataacagcaccaatgcttgaaaaggaatctctgtcttcaactggaggaggaggttgttcttggttcctacctaatggattgctacggaaatatgcctcaactaacctttcagcggaagttagtgctgatgaaagagtagaaagtgttgctctgtgtgattgtgttcttcgaagcaaatgggactgcaccctagtccggggatcccctgcctcagaagtattaacattgntttgtgccaaacccattacatcctctgggggtgccactagattctgatgctctctacgtat

SEQ ID NO: 224515 - DNA, 514 bp, Glycine max
  unsure (1)..(514): unsure at all n locations
ctgagctgcgaaaacccccaactccaacctctgttcatcgtctaccgcgctttcttttcaaccagaactatgattaagctttttaaagtaaaggaaaagcagagagaacttgcagaaaatgcaagtggcggaccacctgttaagaagcaaagtgctggagagttgcgtcttcacaaagatataagtgagctgaatctaccaaaatcatgtaccatgcaattccccaatggcaaagatgatctgatgaactttgaagtttcaattcgacctgatgatggatattacttaggtggcacatttttgttttcctttcaagtgtctcccatctatccacacgaagcaccaaaggttgaagtgtaagacaaaggtctatcatccaaatattgacttggaagaaatgtttgtctcaacatcttacgagaagattggaaacctgtccttaatataaacactgtcatctatggcttgtatcattttttcacggaccaaatacgaggatccactgnatcacgat

SEQ ID NO: 224516 - DNA, 457 bp, Glycine max
ctcatttcgcaaccatcggccgcacttactcttgttctcaagggattcgattttctctgcactcacttctagggtttcctccgcgctatcagcaatcatggccgacgaaacaccaaatgagatgaaggaggaggttccagaaattgttccttttgatcctaccaagaagaagaagaagaagaagattacaattgtagatcctgctgatgaccctgtggagaaattggctgagaagacagaaaacctctcagtttctgagggggttgagactgcatttgctggtttgaaaaagaagaagaagaagcctgttgaaatgagtaacttgaatgatgagagtggagatgcaaatgaagatttggatgatcaccctgaagatgatgaaggagaagtggttgctcccgaggctcgctatccttgggaagggaagtgatcgtgattatgaatatgaggagcttct

SEQ ID NO: 224517 - DNA, 445 bp, Glycine max
aagcttaaatggaactaaaattcgggatttcctaaatgattagtttgggacaatcattttcacttgccccgaaagaaaaagatataacaattttgactcaaaagataccatttactgcaacaaactcaattggagttaagagtaagagagacatcatataatatgcaaaactttaagaaaaaggttcatatcctcagccaattacatttattaaaagtagggactatgtccctgtgttccttcggccaacacgagcaacaaaaccagccttgattggagcaactgatcttcctgatccacacttttcacaccggagaaagaagagacgattctcctttgtaagtatagtatccggactcttgcacccaaggcaaataacgtattcattgacatatcgtcgcagaattccttcaaagttctttggtgcaaacctttcctttacaac

SEQ ID NO: 224518 - DNA, 553 bp, Glycine max
ctcttcttcttcctttgatcaactccccacacagcacggcacaaaaacgatggtgtccaaacctaccgactctgcttccaaacctcgaaaacaacatggagagccagcaaatgatgcaattggaaacttgtccctcaagataaatcagttgaaaaagcaaatccaggcggagagaatattgtacattaaagaaaaaattcagagcaatgagaagaagctacaatttcatatgtcaggagtcctgtcagaaatatcaacaaggggatcttcaccgccagaggaaaataggaaaactccaattctttcttcaagaattgaccatcctttatgtaaattcagtggtttctctccagtctcaggagacaaagaccacagcaatcaagatgcattatctgctacaagtatcaaaattccatatattgaaacattaccgccatatacctcttggatatttctagacagaaatcagaggatggcagaagaatcagtcagtggttggaagaagacgtatatactatgatcaacatggaagtgaagcactgatatgtagtga

SEQ ID NO: 224519 - DNA, 501 bp, Glycine max
cacaaatctcagcattttattatatttaataataccttggatggctcacaatcacataacataatgaagagcaaaaccaagtttgaatagaacaagttcgccgaaatgccatgctaggttagtttctactagcttgttgccgacttgccgccaacattaatttgcttcatgccttcgtctcttgcccattttattgctttagctgtgtcatatccaataatttaatggcaaattagcatcagcaaaccacttattatctccttctgtgacagttgacccatgggatgtcacaaatttgtttgtatagagtatagtagtagaagcaaaaatctgtatgtgctagacttgggtccaggctcatcaatgagactggtgtttcttagctctgccttgagaagctgttgattcgtctctcttggaaccctcaggtttacgtgcccatggtggtgcttgatctggaccataacggtaatcatagaagagctcctcactagcatcgat

SEQ ID NO: 224520 - DNA, 553 bp, Glycine max
ccacatcttcttcccaaccactactactcactcactgcagatctcaattgcatcgctgtccatggctaccatcgttagcatcaaggcccgccagatcttcgacagtcgtggcaatccaactgtcgaggtggatttgacttgctccgatggtacttttgccagagctgctgttccaagtggtgcatccactgggatttatgaggcccttgaattgagagatggaggatctgactaccttggaaagggtgtatcaaaggctgttgacaatgtgaacaccgtcattggccctgctttgattggcaaggacccaactgagcagactgctattgacaacttaatggttcaacagcttgatggaactgttaacgaatggggttggtgcaagcaaaagctaggagcaaatgccatattggcagtgtctcttgcagtctgcaaagctggtgctagcgtcctgaaaattcctctttacaagcatattgctaatatcgcgggtaacaaaaaagttggtttgcctgttcctgctttcaatggtcataatggtggatcacatgct

SEQ ID NO: 224521 - DNA, 450 bp, Glycine max
  unsure (1)..(450): unsure at all n locations
caagatttcagttccaaacaaaacttatcaaaatctcatatactgattcagttctatacataaccatcgagatttattatcaaaccaaaaattctcaaaatctcttcacctctgtgatgaccatggaatacagaaccttagaactcaacatcatatccgcaaaggacatcaagaacgttaacctcttctccaagatggacgtatacgccgtcgttacgctctccggcgaccctctccaccctcagggcgccaccacccacgtccacaaagacgccggcagcaaccccacgtggaactaccccgtgaaattctccgtcaacgaatcgctggccaaggagaatcgtttgtctcttgagatncaagctcgtctncgaccgcaccctctgcgacaccgttatcggcaccgtccatgttccttctcagggaactcatggacattcccggcgacga

SEQ ID NO: 224522 - DNA, 411 bp, Glycine max
aaaaaacaatcttataaaacataatttccccccccccgaaaaaaaaaaaaagccaaaggaattccccaaattaaaaaaaaaaaaagaccttggtttattgaaaaactgaaaattaaaaataaaatcccccagcttttttaaagcccgcattatagcccgctttataatcaggggcttcagaaaccatttttccaaaaaacatgccccccaggggcccaccaagcaatccggctcccaatcccattccaaatttgtttttttttggtttttgagcccggggggggtccccaaatccaggcgggggggggtttccaaaacccggtggaggggggggaaatcccgcaccaccaccctgggggggggacccaaatccctggggggggggggttccaccatacccccggggggggg

SEQ ID NO: 224523 - DNA, 533 bp, Glycine max
ctcgagccgaatcggctcgagaaaacattcttgtggggtaggtactctatggaaatgtccgctgtcatttacaaggactgggttttcactgatcaagcattacctaatgatcttgtaaagagaggagttgctgttaaggacccatctgctccccatggagttcgtcttttgattgaggactatccttatgcttctgatgggctagagatatgggatgccatcaagtcctgggtgcaagaatatgtctcattctactacaagtcagatgaggaactccaaaaagaccctgaactccaagcttggtggaaagaacttgtagaggtgggtcatggtgatttgaaagataagccatggtggcaaaagatgcaaactcgtgaagagttggttgaagcttccgctatcctcatatggattgcttcagcccttcatgctgctgttaactttggacagtatccatatggaggtttaatcctaaacaggccaactattagcaggagattcatgccttgaaaggggtctcctgaatatgatgc

SEQ ID NO: 224524 - DNA, 443 bp, Glycine max
atactaacacaactctctttattaatgacaaatacagaatacattcagccactccaaatacatgacttaagcatacacaactgattaaggaatctggttccttcaatttcacatttatttaaaaccaggaacagtacttaagcaaccatagggtccttagatagagatactgttgggaattcctctgaaagtcaatccctcctcactagaaggatagagcagagtgtaaggcattttagctggcccatagcggtttctcaatgtctcatctttgttcttctctataagcttcttttcaatctcttcaagcttctttccaaacctcttaaatgcctctaatggaccggcatcagaagtccagtagtcaccaccatctctctgcccaaggtagaactcatcagatgcgtgccttgacaagatttctataactgtaaggtcaatga

SEQ ID NO: 224525 - DNA, 425 bp, Glycine max
ctctaacctacctctttttcttctcttttaacttttttaccttcttcctcctcgatcatgtcttacttcaagggcaagtgccatgatgagcttatcgccaatgctgcgcacattggctcttatggcaacgatgaccttgttgctgatgagcaatacaggacaattggcgaccgcgcggtcaacctcagcgcgcacaacatgcgccgcaacacgctagctgtgcacggaggctgctctttcactagttacagccgtgtcttgaatacgtcatgggcgtcatcatgttctaggtaagcgtcttccacagcacacattccaacaagcccttcgccaatgacgcgaacgaacttcgtgtagttaatggcctccaggttgacatggtctcagacccccttgttggcgctaattaagaagcggccactcac

SEQ ID NO: 224526 - DNA, 504 bp, Glycine max
gcggcgccctctatcattgtcgtcgatatggttttttcccttctcgtggcagatgaggttggaaggtcagaaaccgaaccgtctaacccacacaaacacaacccagatactataattggttgggttcgaaccatatatttctggattactgctgaaatcctatgtgccactaacagaatcagtctttactatgttgcagactaccacttttttgtttattcctaaatacatggacactgatgccactggagatcctggtgactagctcaaggctattcagaatgatgatgttgaatatcaagacgaagatgatgattttgatgacgaagaataagaagaagatgaccctattactcttggtttcgatgacaaacccaagaatgaatggtctcttcgccgtcgatatttcccaagcaaaactggtggagtcccggcttggcttgaccctctgagtataccatcaaggagatcatctgtgtgtgacatttgcggagatactttaca

SEQ ID NO: 224527 - DNA, 548 bp, Glycine max
ttggaaggccaaactccaagtctatagttccttttggtacaagttctaatgctaaagaggcctttcaactagcaggaattgatggtggcttctttgagttgcaacctaaagagggtttggcactagtaaatggcactgcagtaggatctggcttggcttccgtggtcctttttgaggcaaacttacttgtcattctttctgaagtcttgtctgcaatttttgctgaagttatgcaaggaaaaccaaagttcaccgaccacttgactcataaattgaagcaccaccctggtcaaattgaggctgcagctatcatggaacatatattacatggaagctcatattgtaaggcagcacggaagttacatgagactgatccacttcaaaagcctaaacaagataggtatgctcttagaacatcacctcaatggcttggaccacaaattgaagtaattaggcatgcaacaaagatgattgaaagggagataaactctgtaaatgataaccccttgattgatgttctaaggcataaggcactacatggggggaat

SEQ ID NO: 224528 - DNA, 576 bp, Glycine max
aaataaccatctcagaaattttggatatatcattattcatacataataatttcaaggaagtatatacacactaaacttgtgaaatcccaagaaaacatagctcaggaaagaattttagtttaaaacattgagttccagaatcacataatcccaagcaaaatttacgggtttctaagagccgccaaacgcttctcaagttcttcaatgcccgagctgctatcattttcagcattctttgatgcgactctccctttgggagctgctgataactgtgaggcaacatttacaccaatttcatcgagcacctggtttgtcagctcttcagtctcctcttcagcttcatcattatccaaggcatcatctatggcatctgacatcatttcagtagtcatatccatctgcgctgattgtttctggaagtcttgtataatcttagcttgctttgccggttccattttcttattcatagctgccattgccttagtagcacctttcaagccaacagcaacagaagaatgtgcatgcatggcctgagtgtgaagtgctatgcctcttatctgagctcgactaccttga

SEQ ID NO: 224529 - DNA, 432 bp, Glycine max
aaaaaagaggcgcaagatgagtggtatgtttttttggaaggtgaagtggttcaacgatcagaaggggtttggattcataacccctgacgatggcagcgaggaactcttcgatcaccaatctcagatcaaatctgacggtttccgaagcctagctgaaggagagtccgctgcgttcgctattgaatctgaatctgacggacgcgccaaggctgttgatgtcactggccccgacggcgccagcgtccagggaaccagacgcggtggtgatggctgccgaagctatggcgggggacaaggaggtggtggaggtggatatggcggtggcggcggttacagtggtcgcggtggctatggtggaggctgtggctacggtggtagtgggcgaggcgctgctggcggggcttgctacaactgcggcgaatctggacatct

SEQ ID NO: 224530 - DNA, 502 bp, Glycine max
agactaagttcttttgatatgtacaatcatgtttttctccttggccatctggattggggtcccatgcacaaagatcccatattctggcgagaaaatataaacaactttgaagaaaatgaggtccagattctaagggtcctactaacaattttggacacgtccagtgatccaaggactctggctgttgcttgctatgacctttcacagtttatccagcatcattctgctggacggatcattgtgtcagacctcaaggcaaaagaacgagttatgaaactaatgaatgatgaaaatgtggaagttactaaaaatgcactgctctgcatccagcggattttcttacgtgcaaagaatgcaagcttattgcaggtttaatgctgtttctgtggggcggtcaagatgcacttaattccatcgacttgactggtagctcacaaagtggatcggctctcgcatacaaccatgattgattgccctaatgatcaatatatagtgtatgact

SEQ ID NO: 224531 - DNA, 409 bp, Glycine max
tttcttcctttttttttttttttttttttaaaaaatccatcatacaagaattttttggtgaaaagtaacatgccattttgaagacaaagtactgggctgttaaaatattcaagctggaaagaaggaatatattttctttccatctttctgccgaacagctccgttctgtacagttatctttttaacagcaaaacttctttttctcgaataatcttctttcctgactatagaagtatgccagaagttcttcttgtatgatcaaagctttatataaagccctctttgaagcgatcagttgtgcttccaatgtattcacgcgattaacagcagctttcagcagcttctctttttcatatggcatgacatttggttttgactgcagtatggcgaccttttcttcaagctcacc

SEQ ID NO: 224532 - DNA, 497 bp, Glycine max
acaatcttattatcaatatagccaacatagcatacattatatatacgcaaatatatatatgaagtaacaccataggcataattaaacactcttcaagctcgcacagaatttattcaaaggcacactagaaatggaagatatgatagagatacacaggcatggtgatactttggagcttgaatattaattatatatgaatatttatcatgttcagccaaacagatggtggtgcttctttccatgagcttcctcatcttctttcttaacttcctttttctcatggtgttcatgcaagacaaaaccaccagcaccaacagtagctgctgccgcaatctccttttctaccttgtgcctgagagcatgctctgggtcttttttggccctatgcttctcatgcaaggcataagcaccggcagccgaacaccaagttcccaaggtgctcaagatgcctggggtgcttcttctcctttttatatcaacctcgccaggcacatcat

SEQ ID NO: 224533 - DNA, 504 bp, Glycine max
ccaatggctcgtcactccttgctctttttcctttttctcttcgccgccgtggccaccgccgcgatggcggttgacgtgttcgacgcctacgacatcctgatccgacaggtggcgccagatgttggcgaagccgaagaggaggacaacctgatgaacgccgagcaccacttcgcgagcttcaaggccaagttcggcaagacctacgcctccaaggaggagcacgatgatggcttgggcgtcttcaagtccaacctacgcagagccaggctgtactccaagctcgacccctccgccgtgcacggcgtcaccaaattctgcgatctaactccggacgagttccggcggcagatactctgcctcaagtctcttatctttccggtgcacgcccagaaggcgctcatcctccccaccaaggatctgcccaaggatttcgattggcgagacaaaggagccgtcactaacgacaaggactcaagggcgcgtggttcgtgttggtcttttagt

SEQ ID NO: 224534 - DNA, 525 bp, Glycine max
aagactctttgcatctggctgaagcgtatagttttgttgttactgaacttcctccagatgatgctaagagagctcttgaggcattatgcataccagtcataactcctttacaggaagctatcaatcaaggtccagaaagcttgagtaaaagaccttctcggcagttaacggttcatattgatcgatttgcctacatctttagatttgtaaatcatcctcaagttgtggcagatgctattcaacggctatggccaaatcttaaggctatttttgatattcgcgcttgggacatgagaacaatggaatctctctgccgagcatgtaaatatgctgtgagaacttctggaaggttcatggggctcacaattggtgccatgctggaagagattcagagtctttataggcagcaccaccaaccatgctttctttatctctccagtgaagttataaagatattaggctctgatccatcttgtgctgactacctgaaaaatttgattgaggcactcttacagcacacaacac

SEQ ID NO: 224535 - DNA, 581 bp, Glycine max
  unsure (1)..(581): unsure at all n locations
aagactctttgcatctgggtgaagcttttagttttgttggtactgaacttcctccagatgatgctaagagagctcttgaggcattatgcataccagccataagctcctttacaggaagctatcaatcgaggtccagaaagcttgagtaaaagaccttctcggcagttaacggttcatattgatcgatttgcctacatctttagattcgggaatcatcctcaagttgtggcggatgctattcaacggctctggccaatttttaaggctatttttgatattcgtgcttgggacatgagaacactggaatctctctgccgggcatgtaaatatgctgtgagaacttctggaaggttcatggggctcacaattggtgccatgctggaagagattcatagtctttataggcagcaccaccaaccatgcttattttatctctccagtgaagttataaagatatttggttctgatccatcttgtgctgactacctgagaaatttgattgaggcactgttncagcacacaacactccttatcacaaatattcaggaattcacagcccgggctgatatagcagatgattg

SEQ ID NO: 224536 - DNA, 534 bp, Glycine max
ctctcactcgcagaaaattgacgcaattccatttatgcggataagctcggtgtctgggttgaaagtgaaataaaaaaaataaaaaagtccggcatcatgggcatgttcccttttgagcaaagtttgcgacttgaagagagaagaaaaaggatgagcgcagcggatgatgacgagccataaaggagaagaagattgaaagcgtcgaatagtggtgggttgaagagctttcaacgcgatctgatcgctggggcagcgatgggtggtggggtgcacacgattgtggccccaatcgagagggcgaagctcttgttgcagacccaagagagcaatttggcgattgttgcgagtgcgcgtcccaaattcaaggctatgttggattgcatagcccgtacggtcagggaagaaggcattctctctttgtggagaggcaatggcagcagtgtacttcggtactatccttctgccgctctcaatttctctttcaccgatctatacaaaagcatgctaagaggtggcaacttctaacgacaatct

SEQ ID NO: 224537 - DNA, 468 bp, Glycine max
  unsure (1)..(468): unsure at all n locations
gagagagagagagagagaagnggatgtaggagtgttaggaagagaaagaggtggttggggtgagtgtgctgcacggtggtatgatcataccaacgcacgaggagcagctgagtgtataaggacgggggaatcgtggttgaacatgataaaatcaaatgcaatcggacaataagctgatatccttgtagagcattttgatgacgccgacagcatagatgatatgagcggacatatcttactctcaggatttattaacacccacgttcatagatcccaacaaatgggcagatgcatagcatacgatgtggatttaatgacctggctgcgtgagcgcatctggccttaccaatcgaacatgagcgaacaggatccgcaccactctacttggctctgtgggatagaactcaatcactctggtgtaacctgttttgcggaagctgggggtcaacatgtttctgggatggctag

SEQ ID NO: 224538 - DNA, 561 bp, Glycine max
attcaaatgattccttaatatgttaatttcttttctttttgggtccaattttttccctggccaataggggccggcaataagataatgtagctaaaagaaaaataaatacagaaaaaggcaaaatctttcatcctatacaagaaatcaccactagtattccgattgcttgaatcgaaatctcctatgttacaatgaaattaactagttttccagaccccttgcatcaactagcggagatgtcttggcaggtaatattttaacactccttccagaactgagaaaaaaattaaaactgtatgtgaatcattcattgcggattgaataatatttatcccagagagtttgtgattttgatatttcgttcataagattcttgaacttgacactgcaatcttctacacttatgcggttcaaggatgcaatagctcggagtgcacttcgaatcatgtcttcattgcgatctactttttgcttgacagcgttttgctttggcttaaaattaatagttctttggagaggatcaaccaatgaatcaacactgtcaagactgcagaaggacac

SEQ ID NO: 224539 - DNA, 490 bp, Glycine max
aactcaacccataagttagtttatggaatgatagtttatggaatgagttatctcccacttagacttattcaaccataatagcaagactgattcaaccatagctaatactgccacgatgaaaaaatccgttgaaattatggcgaccaatttggtttagcaaacaaaacaaagcacaccagaaaaacatctcctgctaatgctatacttgataaactacgggtctaacacattgatcattacaaccggtgagtttcaagaactgaaatcagagcaaaattttcaaaggaaactaattaaactagtaaaagaaacccagcactttcccaccaacattctttctcctagcttcttcatgatccatgatgccagctgaggtagtcaacacaatatacccaaactgttttgaggggagcaacctaacagtccaacctttaatttctttgacaccaacatcaaaacgcggactaataaccccacatttgttcagtct

SEQ ID NO: 224540 - DNA, 643 bp, Glycine max
  unsure (1)..(643): unsure at all n locations
acctcacctccagaactccggcgacttcaatgttcagcggcgaggaaagagaaactgcggccttccgtgctctcgcggatcgctgccggagcctcgaggagaagcagaccaagctcagggaggagttcgatgagctgttgcagaagaataacctcacagtcagggacgataacgatcacgttagcggtaacggtaacaataacgaggtcattgctgattcaacaaccgacggttttctttccggtttcatcttctccggaaatccctacgcaaccgtgttgaaatgcatgggccacgccgttcacgttcttagagttccctcctccgagatcgtatactggaatcactcagcagaaactctgtatggatggaaggactacgaaatcattggccaaagagtagctaaagtcctaattgctgaagaaaattatgcatctcttcaaaaaattctggaagggttggtcacaggcgtaccatggtctgngcagtttcctttcaagaagaggtctggtgaagtatttatggcaatggtaacaaaaactcctctttatgaggatggtgagcttggtggtgttatagctgtttcaagtgacgcagctatattaaacactacanantcagaanatcaaagaacttaccaatc

SEQ ID NO: 224541 - DNA, 537 bp, Glycine max
gctaaacaccttcttcttcttcttctttatctttagttacgccactgcaattcattcgaattccaataccaaataataatcataatcggcaccattcccattttccatggcaaaccctaaaaccaaaagtcaccattcctctgggcggagaggacgatcccgactcgaccgaatcgcggagggtcttccagcgaggacgaggatccctccgagatcgaggactatgacgccgcagatttgcgccaccagtccatgttcgattctgacgacgaggacaatgccgagcagagactcgttcgcaccggtccccgaaacgattccttcgacgacgaagaccttgaggttcctggcgctcacagaaacgactacgaggatgttagtgtgggaaaaggaattttgttggattttcaaactctaggagttgtctgtggcgatgttggaacgagttctatgtataccttcagcgctatgtacaggaaggcttctattaagggaaatgaagagattctaggagcctagtcgcttgttttgacactt

SEQ ID NO: 224542 - DNA, 585 bp, Glycine max
tggaaaagaagtctatttggaaaaatttttttttaccttgccaacgttgggagcaaggcaggatgcgttcagtattttctttgaatgggatgctagttttggaattccaggagcattttacatcaaaaactttatgactgatgagtttttcctcgtcagtgttaaactcgaggacattccaaaccatggaaccattgaatttgtttgcaactcatgggtttacaacttcaggagttacaaaaagaatcgcattttctttgtcaatgatacatatcttccaagtgccacaccagctccactacttaagtacagaaaagaagaattggaggttttaagaggagatggaacagggaagagaaaggactttgacagaatctatgattatgatgtctataatgatttgggcaatccagatggtggtgatcctcgcccaatccttggtgggtctagcatctatccctaccctcgcagggttagaacaggaagagaaaggaccaggacagatcttaacagtgagaaaccgggcgaggtttatgttccaagagatgaaaatttggtcacttgagtcaatcgattccttacata

SEQ ID NO: 224543 - DNA, 618 bp, Glycine max
  unsure (1)..(618): unsure at all n locations
ggggcagagccgagattccgtgagtttgtaattgaagacgattctttccaccgagaccatgaacatcccggacggcgtgagcatcaaagttcatgccaggcatcgaagtcgagggcccccgcggaaaattggtgcgagacttaagcattgaatctcgattttcagctcattactgacgaaaacggaaaagaaagctgaaaatcgacgcgtggtttggttctcggaaaacatccgccgcattcgcaccgccttgagccacgtggagaatcttatcaccggcgtcaccaagggctaccgctacaaaatgaggttcgtttatgcccattttcccatcaacgcaagcatcggcaacagcaacaagtctattgagatccgaaatttccttggcgagaagaaggtgaggaaagtcgacatgcttgatggcgtgtccgttgttcgatctgaaaaagttaaagatgagttgattttggatggaaacgacattgaacttgnttctaggtcctgtgctctcattaaccagaaatgccatgttaaaaacaaggatatcangaaatttctggatggtatttatgtagtgagaagggaacaatactggagagtagatgtgaaaacacgagt

SEQ ID NO: 224544 - DNA, 588 bp, Glycine max
  unsure (1)..(588): unsure at all n locations
nnaacctgccnnnnnaaacttttnannatgntnacgnatnangtttaangacctaaagcctncggaatncggcttcgaggaaanaggagatttnctgatgatgagtgatgnaggatgnatgaagaaggactgaggacgggtaaagggtgacagattgtggattgaagataacggagaaggccggagacacgaaaaagaagactcattaatggagcgtatctcatgacgtggtcatatggtgaacacagcagaagctctatttggatgagtgaaacgctgaagagtatcacaaaacgacgaatatgcttgctttctacaagagtcttaccaatgattgggaagagcatttggctgttaagcacttttctgttgagggtcagctggagtttaaggctgccctctttatccccaggagggcaccttttgatctttttgacactaagaagaagcctaacaacatcaaactgtatgtccgccgtgttttcatcatggacaactgtgaggagttgacgccagaatatcttagctttgttaagggtattgcggattctgaggaacttcctctcaacatttctagagaaatgctgc

SEQ ID NO: 224545 - DNA, 629 bp, Glycine max
  unsure (1)..(629): unsure at all n locations
ctcgagccgaatcggctcgagcatcgtttctttttttgactccatcatcttcgatttggacgacaccttgtacccctccagcaccggaattgacaagtgcgtcaagaaaaacatccaactctttctcatccagaaatgcggattctcagaatccaaagccttgacccaacgagttgagctcttcaaaacctacggaagcacccttgccggcttaagagcacaaggcctcgatatcactgcagaggactaccacggtttcgtgcacggaaggctaccttacgactccatcgacactgatcatcagttacggaacctcctcttgagcatcaaacaaagaaaaattgtttttactaattctgacaggattcacgcgatgagggcgctggataggcttgggatcaaggactgtttcgagcaaatcatatgcttcgagactataaacccgaaccttccctattcaacccgacccgacgaattccccatcctccttaaaccttcgctcgacgccttcaagatcgcgcttgacgctgccaacgtggatcctcgtcgtacgttgtttctggatgacagcgtcgcaatatttgccgcggaaaagaaatgggtctccacactggtctggntgggaagac

SEQ ID NO: 224546 - DNA, 526 bp, Glycine max
gtgaaaatagtttggttttgagtatttgagttgtaggtgccaaaatggtgaagataactcttggtactttcgatgactcttttggtgctgcctctcttaaggcttatttggcagagttccatgcaactctgattttcgtgttcgctggtgttggttcagccatcgcttacaacgagcttacaaaagatgcagccttggatccaacggggctggtggcagtagctgtggcccatgcatttgcactgtttgtaggtgtctccgtcgcagccaacatctcgggtggccatttgaacccagctgttacttttggattggccattggaggcaacatcaccctcattactggtttcttatactggattgcccagttgttgggttccattgtggcatgcctcctcctcaatttcatcaccgccaagagcattccaagccacgcaccggcaactggtgtgaacgattttcaagctgtagtgtttgagattgtaatcacatttgggttggtttacactgtgtatgcaactgcagc

SEQ ID NO: 224547 - DNA, 531 bp, Glycine max
gcaagccccactcaaccaccacaccttttctcgttcacgctacccctttctgctcttcttctacctttcaagttttaaaagtataaagatggcagagacattcctatttacctcagagtcggtgaacgagggacaccctgacaagctctgcgaccaaatctccgatgctgtcctcgacgcttgcctcgagcaggacccagacagcaaagttgcctgcgaaacatgcaccaaaaccaacttggtcatggtcttcggagaaatcacgaccaaggccaacgttgactacgagaagatagtgcgtgacacctgcaggaacatcggcttcgtctcaaatgatgtgggactggatgccgacaactgcaaggtcctcgtcaacattgagcagcagagccctgatattgctcagggtgtacacggccaccttaccaaaaaacctgaagaaattggtgctggtgaccagggtcacatgtttggctatgccactgatgaaacccctgaattgatgccattgagccatgttcttgcaacaaa

SEQ ID NO: 224548 - DNA, 549 bp, Glycine max
  unsure (1)..(549): unsure at all n locations
cgcgaaaccctagctgaactttttttttcttctccggccaccgcaatggacttcactacgccgccgatcgaggacggtttcaccgtcgagaagctcttcacgcagggcttctcctacacctacgatgacgtcatcttcctcccccactacatcgacttcgccgtcgacgccgtggacctctccacgcgcctcacgcgccgtctccccctcgccgtgccggttgtggcctctcctatggacaccgtgtcggagtccgccatggccgccgccatggcctcgctcggcggcatcgccgtcgtccactccaacgtccccgccgccgtccaggcggccatcctgcgcagagcgaagtcccgccgtgtccccatcctctccgaccccgccttcgccgctccctacgccgtggtcgagcacgacgacgccttcggggccttccccttcctactcgncaccgacactggcacctncgacgggaaactcctcggctatgtcgcgaggagcgactggacgaatcaaaccgacaggggcttgagagttggtgactacatg

SEQ ID NO: 224549 - DNA, 526 bp, Glycine max
gtcataaccgtcatgtactttaccgttttattaaaggatcaaatcttcttattgacaatgaaggaacacttaagattgctgactttggactggcttctatttttgatccaaaccataagcatcccatgactagtcgtgtagtaaccctttggtatcgacctcctgagttgcttcttggtgccacagattatagtgtgggtgtagacctctggagtgccggatgtattttaggagagttattggctgggaagccaatcatgcctggtcgtacagaggtggaacaattgcacaagatatacaaactatgtggttcaccttcagatgagtattggaagaagtcaaagttgcctaatgctacctcgtttaaaccacgagatccatacaagagacacataagagagacatttaaagattttccaccttctgctctacccctcattgatacacttcttgcaattgatccagtagaacggaaaactgcctcagatgctctaagaagtgagttctttaccacagaaccttatgc

SEQ ID NO: 224550 - DNA, 316 bp, Glycine max
accccacctaccatggcagttttgttttcattcttccagcaactcactggaatcaatggcatcatgttttacgcgccggtcctgttcagctccatcgggtttaaggatgatgctgctctaatgtcagctgtgatcaccggcgttgataatgatgtcgcaacttgtgtctcaatttatggtgttgacatgtggggtaggagagcccttttcctagaaggcggagtccaaatgctcatttgccaggctggagttgcaaatgcaattggagcaaagcttggaactgatgggaacccaggtgatttgccaaagtggtatg

SEQ ID NO: 224551 - DNA, 559 bp, Glycine max
ctctttttcgcctcattccattttcatttatcaatggctccagtagcagcagcatcttcagattcaatcaagccaagagatgtttgcatcgttggtgttgcacgtacaccaatgggtggatttcttggtactctgtcatctctatctgccaccaagctaggctctatagctattgaagctgctcttaaaagggccaatgttgatccatcccttgtggaagaagtattttttgggaatgttcttagtgctaatttggggcaagctcctgcaagacaagctgctcttggagcaggaatatccaattcagttatctgcactaccgttaacaaagtttgtgcatcaggaatgaaagctgcaatgcttgctgcacagagtattcaattaggcacaaatgatgttgttgtggctggtggtatggaaagcatgtctaatgtacccaagtacctggctgaagcaaggaaaggatcacgccttggacatgattcacttgttgatgggatgttgaaagatggtttgtgggatgtctattaggatgttggcatgggagtgtgtgctgagc

SEQ ID NO: 224552 - DNA, 599 bp, Glycine max
  unsure (1)..(599): unsure at all n locations
gtgaaagtcagagatcaaattttgtatcatctgataagctcgccaaaggaaacttgttaaatctggaacaatctcgtagcaaaaatatttctctcgaaaggcgctggagtcttgaggtatctattgagaaagtgattgggcatgattcaagattaggatcaacagattctgtagcagaaaatggagataaagtcccaattttggaacgcgagtatatgcaaggtgtgttaataagtgaattagttttaaataatagtttttcatcaatgtctagaagggcaaaacagctccaaaaaaaacttgccaaagaaattaaaagacctggtgaagcaatcattaaaggtcaccggagctatgatctgatgcttagtttgcagctcggaataaggtatactgtggggaagattaccccaatacagagacgagaagttcgagcatcagattttggtcctagagcaagcttttggatgaattttcctaaagaagggtctcaattgacacctcctcatcaatcagagggttttaaatggaaagattactgccctatggtgttcagaaatttgagagaagtgntcaagattgatgctgctgactatatg

SEQ ID NO: 224553 - DNA, 516 bp, Glycine max
taggtgcgaaccctctccttttcttgttctgtttaatcctttagatactttatcttttttccaactttccactgatttgtagcttgttctacaatctagttttttttttttggtcttttatgtatccaaaaggtgatcactgatgatccaaatatcaacaccaactctttttcttttgtgtttcctaattttggaaaccttctggctggttgcaaagcaaaattccaaggcataacaagggttggaaacttggaatggattcattcaatcagagtgttcagaattccagcttcaggtacaatccaaatttgaacacaaggacacatgcagatgaagaagctgagttctcaagaattcttgatatctttgtccatcatgccaggaatattcataacatatgcatctatgacaaccaggatgtctatgctaagttctctctcacttacaaccctgatgagactctctctacaagaatcatcaatggaggtggcaaaaacccaacattcaatgaaaact

SEQ ID NO: 224554 - DNA, 522 bp, Glycine max
tgaaagcactcagtagggttttcggatatagagtttgtgacgcacgcatccatggccaccaccaccaacgccgccgcagccccgccgcgccagctctcccagaaggaagccgacatccagatgatgttagccgccgacgtccacctcggcaccaaaaactgcgacttccaaatggaacgttacatcttcaagcgccgcaacgacgggatttacattattaaccttgggaagacatgggagaagcttcagttagcagctagggttattggtgcaattgagaaccctcaggatatcattgttcaatccgcaaggccttatggtcaaagagcggttctgaagtttgctcagtacactggtgctcatgctattgctggaaggcacactcccggtaccttcaccaatcagcttcagacttcgttcagtgagcctcgtgtccttatcctcactgatccaagaacagatcaccagcctattaaggaagctgctcttgggaatattcccaccattgctttctgtgacact

SEQ ID NO: 224555 - DNA, 531 bp, Glycine max
caataaaatagattcttcatagattagaatcattagacattatttccttttatgatttggcacaatattcttccttcaacattatgaaaattgctaacatatccaaattctaagtgatatatagcataaatatgataagtgattttatttatgatgctcgtcatcatccttcaagaactgattttatttatgatgctcgtcatcatccttcacaagtaatagcataaattttatttataaaattccaccactgatagaaccgacggtgagtctttacatgcaacatgaaatccagaaaatccagaattcctgcacaagctctcaaattctttctcagttctttcctttccacttgttactaaaaacatgagactatcagcaacacaagtttgcatagaaattttgcttgaatccggaacttctggaattatatagtctataacaatcaccttcccatgttgaggcaaagctttgtggcaattccttaaaaactttcacagtcttcgcttaccaattgtgacatacaagctt

SEQ ID NO: 224556 - DNA, 469 bp, Glycine max
  unsure (1)..(469): unsure at all n locations
cagaatgccccaccactccttttctttttgcattccgccgggtaagcagtgtcccattcctcttccatcttgttctttaattccgattcaacaaaccaatccccccctatccattacccaatggcgttgttcattactgttgttgttgttttgttcctgctgcagctgagttcgagtgtccgagtgaactcggagccgactcaggacaagcaagccctcctctctttcctctcccaaaccccacactcgaaccgtctccaatggaacgcttcggaatccgcgtgcgactgggtgggcgtgaaatgcgacgcgtcacgctccttcgtctactcgctccgtttacccgccgtcgatttagtgggtcgggtcccacccggtacactcggccgcttaacccagcttcggatcctcagcctncgatccaacgccctcaccggcgagatcccttccgatttctccaacctcattt

SEQ ID NO: 224557 - DNA, 483 bp, Glycine max
cggcgatcctagcactctcttttgcattttttcgccgacagcttcattcaccatggctgagcaaaccgagaaggcttttttgaaacaaccaaaagtgtttctcagctcgaagaaaactgggaagggaaagagacccggaaagggtgggaaccgcttttggaaatccattgggcttggatttaagactcccagggaagccatcgaaggaacctacattgacaagaagtgccccttcactggcaatgtttccatccgtggccgtatcttggctggaacatgtcacagtgctaagatgaacaggactattattgttaggaggaattatctccattttatcaagaagtaccagaggtacgagaaaaggcactccaacattcctgctcatatatcacctgctttccgtgtgaaggaaggagatcacgttgttattggtcaatgcaggccactttctaagactgtgagggtcaatgtgttgaaagtgat

SEQ ID NO: 224558 - DNA, 513 bp, Glycine max
cgagcatcatggcctcaagttcagtgttattgttggctatgtgtgtgcttccggcgatggttgtggccattcgcccagcaaagaaccctttttgcgtgaagggtcgtgtctactgtgacccttgccgtgctggttttgagacctcagctaccacctacattgctggtgctgagattatgttgcaatgcaagagcagggttagcaacgaggttgtgtacacgaagaaggggtacaccgactcaaccggagcatacacaatgtacgtggatgaggatcacgcagatcagatctgcagtgccaagcttgtaagcagccctcaccctcaatgcaaggaagtcaccccaggccgcgacgaagccgtcgtgattctcacccgctacaacggcattgcctccgacgataggttcgccaatgccatgggcttcatgtctcaggaggttgcttctggctgtgctgagatcctcaggcaataccaggagtttcgacatgagcattattacgtaattaatttca

SEQ ID NO: 224559 - DNA, 514 bp, Glycine max
aatctccaggctatctatcttgtaagtttgctgttaagaggaggagaatggctgatgatggaagcaggagggaattgatattcaggtcgaaacttccggatatctacattcccaaacatatgcccctgcactcttactgcttccagaattcgagagagtgtggttcacgcccctgcctgatcaatgcccccacgggagacgtctacagctaccacgaggtggacagcaccggcagaaaggtggctagggggctgaagaaagagggcgtggaacagggccaggtcattatgatcctgctcctcaattgccccgaatgcgacttcacgacccttggcgcatcccaccgcggcgccatgggcactgtcgtcaaccctttcttcacccccgacgagattgcaaagcaagcccatgcctacaatgccaagctcctcatcacccaggccttttactacgacaaagtcactgacctccgcgacatcaagctcgtattcgtcgactcttgttccccccatac

SEQ ID NO: 224560 - DNA, 524 bp, Glycine max
gccttcaattcaaagcaaagttttgttctttggagaagagaggcagcatcttcatcctaacactcaccggcgatggcgagcaccgtctcaacccaacactcctcgattccatccaatcctccctccgccgcgtccgccaagaagccaccgcctcctccgccctcgtcaccaccgcgcacggtaaattcttctccaacggttacgacatcgcctgggcccgatcctccgatgaggtcaaagagcgcatgatcctcatggactccctcctccgctccgtcgtctgcgatctcctcaccctcccgatgccgaccatcgccgccgtcaccggccacgccttcgccggcggctacaccctcgccctcgaccacgaccacgttctcatgcgcagcgacaggggattcctctacatgagcgagcttgacatcaacctcgctattcccgcgtggttcgtggctctcctcgaagccaaaatcggctcgcccgcggctcggcgccacgttgtcctaaacgcggctaagctcact

SEQ ID NO: 224561 - DNA, 571 bp, Glycine max
gtcggtgtctgcctgcagttttcaacttatcagagtctataagattcattcatcacatagaccgcaaaaccttcgctcgcgttcacaacacaaaccctagaagccaacgtttttcagggtgagtctctccttcgcgtgctaatccatatagtcgcttgttaatttctcaggtttgggcttcggatcccaactttatgtggctccatggatttaatttatcttgtattttatttatgattcattccagattctcaatacctgtatctcgttttacttttgtagtccattttttattcagcgcttttgtaataaaaattgttaattttcagttataatttctctgtggtaggaagggtgttagagcacgatggttcagtataattttaagaagatcactgtggtgccaaatgggaaggatgtcgttgacatcatgctctctcgcacccagcgtgagacaccaaccgttgtgcacaaaggatatgctattttacggctttgccaattctacatgcgcaaagtgaagtatactcagcagaattttcatgacatgctttccacaataatcgacgag

SEQ ID NO: 224562 - DNA, 562 bp, Glycine max
aaaccataaactgtttataaaacttcgttataaattaaatgcgacttaaaacatccctcagcagcaaaggaaatggactaaaaccctatagctgcttgtgaaattcgaaatatctcatactcttcttaccatcaaaacaaaaaacagtactcatcaaaaacaaacagcaatgaaaattgaccaccgccgatcaagaacctagttttgaaagttacggctacatgaaatcggcagaaacttaaaaatataacttaaacaaaacacctaagactctgcaaggataaaactactattaaggagtaaccacgatgatgatcacatgtgctagcaaaattgcccaaatgcgatcactttttcttgggagcggacttggagaccttggctccggtggggtctttcttctcaacactcttgatgacttcgcagccacagtttgacgcatgtccctaccagaaaacgaccaaggggaggatacttagagaaagtctcaccaccatgggcttggtgggaatcatcttaaccatacctgcataaccattcttcaaaaatttgggctcctttt

SEQ ID NO: 224563 - DNA, 553 bp, Glycine max
ctcgagccgaatcggctcgttttacattttccaacaccaatacgtggacaactaatatctctaaaagagttctttatagtacttgggatggttgcaggatatggaattggtagcttgttcgttgaaactgtagctgggtggcggtatatgtatggagttagtagtcctatggcaataatcatgggacttggaatgtggcggctcccagcttctcctagatggttacttttacgtgctatacaaggaaaaggggatgttcagaattcaaaagacatagtaattcgtagtttgtgccagcttcaaggtcaagcttttaatgattccattccttggcaagtagatgagattctggcagaactttcttatctaggtgaagaaaaagaagctacctttggagaactgatccaaggaaaatgcttgaaagccctctggatcggtgcacgattggtcttgtttcagcagatcacagggcaacctagtgtgctctactatgctggatcaatctctcagagtgcaggattctctcgagcatctgatgcaacccgagtctcta

SEQ ID NO: 224564 - DNA, 386 bp, Glycine max
gtcgagaaatccttaactcttctctttttccttcccaaggttcttgctgactacaaggaagttattgctgaccttaaggcagctggcgcttcatggattcaatttgacgagcctacccttgacttggaccacggatcacacaagtcgcaagcttgcactgacgcatatgcagaactagcacctgctcagtgtgatctgaatgaacttgtggagacctactttgctgacatacctgctgaggcgtacaagaccctcacatgattcaaaggcgtcactggctatacgatctgacattgctccgtggcacccatactcatgatttgatcaaaggaggatatgccacaggaaaaaacctgtacgctgacatggtcgatggaaagaacatc

SEQ ID NO: 224565 - DNA, 587 bp, Glycine max
  unsure (1)..(587): unsure at all n locations
gcaagcgatacaaagaagcctatgtgtttatcgggaacagcttcgaggagctcgaaccgggagcctggaacgagctgcagaaggaagaacaagggaggcctccggtttacgcggtgggaccgcttgtaagaatggaagcaggtcaggccgactcggagtgcttgaggtggctggacgagcagccacgtggaagtgttttgtttgtttccttcggaagcggtgggacactctcgagtgcacagatcaacgagctggctctcgggttggaaaaaagtgagcaacggtttctgtgggtggtgaagagcccaaacgaagaaatagccaacgcgacgtacttcagcgccgagagccaagcggatcccttgcagttcttaccggaagggttcgtggagagaacaaaaggaagagggtttttggttcagtcttgggctccgcagcctcaggtattgggccatccatccacgggtgggttcttgacccactgcggctggaactctattctggagagcgtggtgaacggngtgcctttcatagcctggcctctgttcgcggagcagaggaccaacgcctttatgctcacgcatgac

SEQ ID NO: 224566 - DNA, 518 bp, Glycine max
gggatgttcagtttagtcctttggtgtattattttgccagctcgtcacatgacagaactgctaggatttggtccatggacaggatacagcccttaagaataatggcagggcacttgtctgatgttgattgtgtgcaatggcatgccaactgcaactacattgcaactggttccagtgataaaacagttcgactatgggatgtgcagagtggtgagtgtgtccgggttttcgttggccacaggggtatgattttgtctttggcaatgtctcctgatggtcgctatatggcatctggcgatgaagatggcacaatcatgatgtgggacctctctagtggccgctgtctcacacctttgattgggcacacatcatgtgtctggtccctcgctttcagatctgaaggttctgtgatagcatctggatctgctgattgcactgtaaaattgtgggatgtaaatacgagcaccaaggtttttagggctgaagaaaaaggtgggagtgctaacagacttagatcg

SEQ ID NO: 224567 - DNA, 256 bp, Glycine max
attcaacctttctcttcctttttactttatacttcccctctctacgccgttcctcccaaatggatgcaccaatggagttttggggtgttgaggttaaggttggtcagaccgtgacagttgacccaatggatcctgtggattcatacatacacatatctcaggttgcgctcggagaggcgaaaaaggagaaacctaatgagtctgtggttttgtatttgaaagttgtggaccaaaaaattgttttgggaaccttttt

SEQ ID NO: 224568 - DNA, 585 bp, Glycine max
  unsure (1)..(585): unsure at all n locations
gggaacctcttctgcggcgttttaatttacactccaacgtttggaattctcacccaaaaaactacggtcctggttctcgcacttgccgagtgtgtgggaatccacatggattgatcaggaagtatggccttatgtgctgcaggcagtgcttccgtagcaatgccaaggaaattggcttcatcaagtatcgctaaaagagctgttgtcacctacggaccaatattatgttctggcactaggatgttttgaagatgttatgtttgaagaaacttgagacttgtttttttcatctattttattatcagacataatgtgtggaacgaataatacttttatataaattgttttgcactattggcctctctgtttgatcctttaataattctgcattgcatgtgcatgcgtatcacacaggtgcaagcttatgctaacttgcattcgcattgtcggttgcttttgtgggtgttggtcaaactagaatcatacgattttangttaactggtactactgctcanacaaatttaagccgatggcaaagctnttttcatcttggtattttacggtaaaaaaaaaaaaaagggcgg

SEQ ID NO: 224569 - DNA, 481 bp, Glycine max
aaccttaaaataacaagatgaaaaaaagcttttgccatcggcttaaattttgtttgagcagtagtaacagttaaactaaaatcgtatgattctaatttgtacaacacccacaaaagcaaacgacaatgcgaatgcaagttagcataagcttgcacctgtgtgatacgcatgcacatgcaatgcagaattattaaaggatcaaacagagaggccaatagtgcaaaacaaatttatataaaagtattattcgttccacacattatgtctgataataaaatagatgaaaaaaacaagtctcaagtttcttcaaacataacatctttaaaacattctagtgccagaacataatattggtccgtaggtgacaacagctcttttagcgatacctgatgaagccaatttccttggcattggtacggaagcactgcctgcagcacataaggccatactttcctgacaatccatgtggatttccacacac

SEQ ID NO: 224570 - DNA, 535 bp, Glycine max
atgaacaaagctagctaatcttgtttacaaggcatatatacaatttttacattcagagttggccccgttggcatttatgtatatttacaaatttacaattctcaagtgaaatgtttgtcccaacagcagcaggacagaacaggttaatatggagatagaaggggcaaaactagtgaccattgggcaagttaacaccttctctgaaaaggatgctagctactgaagatgtccatgtagggctgctagtgctagcattctggctatctgtataatgactttcactctccattgcagtaacattaatgttcctcccaaacttctttccaattgacattcctagtttcacagcagtaagaaggccaaatgcaagtagcacaggtctaactgcccagtggtgatcctctacatgttgatacttctctatcatctttggacaattcttaaaattaacgacatcaaccttggagggatcaaccaagacggtgcttggtgcatccaaaaagttcaacatgcctggaaacttgacactagacat

SEQ ID NO: 224571 - DNA, 613 bp, Glycine max
  unsure (1)..(613): unsure at all n locations
ggacccccgntttaacgtagacagactacttacgtgatgcacctccgtaagctcggttttctcttattttcttttttgttctgtattgtaattttttctggcctatgancaaagttaaccaacattcgattccattctttctgtttcctttcttcttccaatatctgtccttgtatcttgttttgcaagtaaaacaagaacagccttatttgtacatattttggaaacttcattatttgacagtatattcacacagttgaatttcaatggggaaaggaggtggttgctttccaagcaagacaaaggcaccaatttctggagcacaaaaggatccagttagcgttgaaagtctaatcccaagagatgatccaagtaacacaagtcaagaggtgccagcaccagcacctgaagcagtgaaaaagctgaaagttttcattgtgttctactcaacttatggccatgtggagtcattggcaaggtccttgaagaaaggggttgattcaattgaaggagttgaaggggtgttgtaccgtgtgctggagacactgccaaaggaggttctggaactcatgaaggcacctgagaaggatgagacagtgccactcatatctgc

SEQ ID NO: 224572 - DNA, 601 bp, Glycine max
  unsure (1)..(601): unsure at all n locations
gttcattccaacctacccttattcttcttcttcaattccatacccaccatggaccgttttccgatcctctttctcctcgccaccctcatcaccctcgcctccggtgcccgccacgatattctccggttaccctccgaagcatccacttttttcaaagcacccggtggcgatcaaaacgatgagggcacgaggtgggccgttttaattgccggttccaatggctactggaattacaggcaccagtctgatgtttgccatgcgtatcaactactgaggaaaggtggtctcaaagaagaaaatattgttgtatttatgtatgatgacattgctttcaacgaagagaacccgcgacctggagtcattattaacagtccacatggaaatgatgtttacaagggagtccctaaggattacattggtgaagatgtaactgttggcaacttttttgctgctatacttggaaataagtcagctcttactggtggcagtgggaaggttgtggatagtgggcccaatgatcatatatttatatattactctgatcatggcggncccggagtgctagggatgcctactaatccatacatgtatgcatctgatc

SEQ ID NO: 224573 - DNA, 623 bp, Glycine max
  unsure (1)..(623): unsure at all n locations
ggaatatatcttcttgagatttgtctttattgtttgatatatgttggagactctgtgaatccagacattgtgcagaaactgtttggtgttgctacagttgacaaagttcctaccctgtttgtattgcagcagtatgacaatccactatcaaagaagttaaatgaagtgataaatgagatacggcggcaaagatgttgctacctccggttcaagctctgcaggaaaggagatccatcaggaatgttattcttctcatatatgatagaagacaagagcgcaggtggcttctcctatgtagaatttcttatccatgttcataggcaaattcaaaataaaatgtcatcataacgagtatatggcagcttcatttttgcaagcttttagacctaaatgatagagcaagccccaaagtataggtgcgattctgcataattatgtgcattcaaatgccttgagtttgtcaaaggaataccagacgacacangtttttgacaagttttgttgatgtacatgtataagttaattaatgttggtgatagttggattcttctgaggagttttntacttttttggntctctagtacctgacaaataaattttataagccatgtgttttatgcgag

SEQ ID NO: 224574 - DNA, 559 bp, Glycine max
aattcatatttcgaaggtgtttttgttataagtgtccagtgctaaattcatggccaccgccgccaccgaacctctcccttccaccaccgaaacgcctccggcaccgcctccaccgaagcaacccccgcctcccgcgccgcaacctccggcggcggcggcagtgaagccggaggctccattgcccgattcgaaaacttcggcggaggcgaacgtaatcgtggtgccgagctactctcggtggttctcgtgggattcgattgacgaatgcgaggcgcgtcacctccctgagttcttcgaatcggcgtccaagagccctagggtttacaagtactacaggaactccatcgtgaagtacttcaggtacaatcccacccgcaaaatcaccttcaccgatgtccgcaaaaccctcgtcggagacgtcggttccatccgcagagtcttcgatttcctcgaaacttggggtctcatcaattaccacccctcttcgtcgctcaccaaacccttgaagtgggacgacaaagagaccaaatccgattctgcatccaactccaccgaatct

SEQ ID NO: 224575 - DNA, 417 bp, Glycine max
attatttttttatatttttgctttattgaagcaagagatttagaaggggacgcaaaacattacctacccattagcaggccaattatatatgacatttccagaacaaccccattttcaagcattgatacaataataaagagtaagaaaagaaaaaaataaaggggattgccacaatcatatgaacatgtggtgaagtctaaaatgaccttggctttgccacaatggtggaatgcttgagtatgtgcaagctaaactggcctcctttctcactggtgtcaatctgggactggccagggggaggcaagagctaaaagttttggaccaaacgtgccatagtgatggcaagaataagcaatgcaagaatgattccggtgcaactccttatgccaaccccaaagggaagggacctaaagtcat

SEQ ID NO: 224576 - DNA, 585 bp, Glycine max
gaaccccatttccaaccccattttgatcttataaaagcaatgtcacctccaccattttccccccctctctctatttcccttctctttgtcttcctgttagcaccattactcttagctcaatctccaccttctccttctccttcttcttcttcttcttcttctgttgcctgcaaaggcacactatatccaaaactctgccgttccattctctcagccattcgttcatccccttcagacccttatggctatggcaagttctccataaaacaaagcctcaaacaggcaagaaaactagccaaagtctttgaggactttctccaacgccaccaaaaatcaccttccctcaaccatgctgagactgcatcacttggtgactgcagagacctaaaccagctcaatgtggactacttggcgtccatatccgaggagctcaaatccgcaagctcctcagactccgaactcatcgagaaaatcgagagctacctcagtgccgtggccaccaaccactacacttgctatgatgggttggttgtgaccaaaagcaacattgccaatgcacttgccgtgccactcaggatgtgacac

SEQ ID NO: 224577 - DNA, 614 bp, Glycine max
  unsure (1)..(614): unsure at all n locations
gaaagaaggaaaatattgaatctctttctattctcatgaactgtggagtcgtgttgggtttctattgttggggttgggagttcttaactgcccttcttctcttctcttctcatcaaccttattgatcattctcttcatcctcctcttcttcttcaaaaaccaatttctttttatatatatacaaataaggaagacatcaaagaaaaaaatagcaaaatatttttttaaaaatatggaaggaacaagtgaaaaggggttgtgggaatgtggaaggaagtgcactccaccaccgtttttgttgaagacttatatgctcgtggacgatccggccacggacgacgtcgtttcatggaattccgaagggacggcgttcgtggtgtggcagccagcggagtttgctcgtgatctcctcccaacactcttcanacacagcaacttctctagctttgtgcgccagctcaatacttatggctttcgtaaaattgcaacaagcagatgggagtttttcaatgacaggttcaagataggtgaaagagaacttctacatgagaattcgcgaggaaaagcttgaccagcaagcaacaccaaagcactaaccaagcacactccagact

SEQ ID NO: 224578 - DNA, 518 bp, Glycine max
gctcaaaccatgatttagagctccctaacagaaagagagagaaaacaaagtgctgatttgtagtatcaagcatatcaagaaattaagcttgtgcaagatcatggctggttggggccactctctatttccttagccaattctcttgtcagcttgtcagcacgatcatcatgtccaccagcaaatgtatagacccgaaatgccaattggaaagccctccaaagcaacttagcatattcttttctttttccatcactaatgtttgatcctgaacctctggcagcagcatcattgcgcctttccttagtgctagctccatgcaattggaggaaacatccaccattgcttctttgatttttataaggatgtggaagtcgaattcgatgttgtggcctttgaatttcttggattcttcatctttggttcgctccaaaccatctaattctgtttttatcttattgaaataacgttcaaccttgtcaaggaactgacccatgggagtcactatattccaattttga

SEQ ID NO: 224579 - DNA, 534 bp, Glycine max
atgtaaccttaattacttgattaagtaccagtcacaccttattgaaatgatgattatgaatacataaaaagcaactgcgatggcaagacactactattgtatatgatgattatcttaattaagaaaggagtttagatgcaacgccgatccttgcaagtggaacacaaacgagactatgtgcccttggaactgtgaggccagctctctcttccatgctaactttggcatcatcacctttcaatatttgtccttgagggcccagcacttgcaggtcaaagcattggataagagatgcaagaagtgttgccattcctgaagtagccaaattgacaccagggcacatttcttctcccagacccaaatgggaggagttggaaatgcttgcccctaaatcaagaagccctgctttctcttcaacaccagtttttaagaacctctcgagacggaattctgatgggctgtcccagtatttggggtcccttcctacttgccaaacattgaatagaacccaagctccctttgggaacacatacc

SEQ ID NO: 224580 - DNA, 491 bp, Glycine max
acattgataaaaaaaatatatatatatgtaaaacaccggatacccaattaatcatagcagtacgtaagggaacatagaagaagttttgtaacataaagttaccacaaattgatcagtaatgtgaaacataaatgttgtactcaatggtagacctatcagcatcaacatagagagtgctggtttcaacatacccagtggcaaatttaaaaaccccacttccttcaatcacaggcatctccctaatcttgagggagaggcggttccgccccaccacggtgatggtgctgccattatactttccttcggtcaaggcaaaattcacaacaatcaataaattgaactccgattgtgaggtgcccgcgtacaacccctcgatctttccgaccaccttggacccgggttcgggtcccacggtcaaggcgttgtcggtgatccccaccaacccgaagttggtggtggagttgtactggcgcagcggaggaacgacggtg

SEQ ID NO: 224581 - DNA, 538 bp, Glycine max
  unsure (1)..(538): unsure at all n locations
ccagtgccttgcatgtgcctctattctctttttctcaatccccaatcccaatgtcttccaccaccattcacgaaaacaaccaccacaacggctcccacatacccaaaaaacccaaactctcttccaccttcataactccgtcggaaatcgaatccgaattcggccaccacgacgctgccgtcgcgcgcatcaacaacggcagcttcgggtgctgcccggcctccatcctcgccgcgcagcgccgctggcagctccagtacctccgccaacccgaccacttctacttcaacgatctccaatccggcatcctccaatcccgaaccctaatcaaggacctcgtcaacgccgaccacgtcaatgagatctccatcgtcgacaacgccaccaccgccgccgccatcgtcctccaacacaccgcctggaacttncgcgaagggaagttccaaaaaggcgacgtcgtcctcatgctccactacgcctacggcgccgttaagaaatccatggaagcctacgtcacgcgcgccggaggtnacgtcgt

SEQ ID NO: 224582 - DNA, 537 bp, Glycine max
aagaaatcaggcggctatataccatcacttcttttagctccaagaatggataacactgaaagttcggtgcaaacacaagaattaattgttggaagtaaacctcaactgtgcccagaaccatccaatgctgtaaattactcccttggtactgtatctgggccccaggatacagggataactccagagaaccgaacatgcaatcctaagagatgtagattttttggctgtacgaaaggagctcgaggtgcttcggggctttgtatcgggcatggtggtggacagagatgtcagaaacctggatgcaacaaaggtgctgagagccgaactgcttattgtaaggcccatggtggagggaagaggtgccaacacttgggatgtactaaaagtgctgaggggaagacagattattgcattgcacacggtggtggtaggcgatgtgggtatccagattggtgcacaaaagctgctcggggtaagtcaggactttgcattagacatggagggggcaagaggtgtagaatagaaggttgcacccgg

SEQ ID NO: 224583 - DNA, 635 bp, Glycine max
cttcaatcttcctgaaaaaacaaaaacttgtaaaatcatccaccctctcacattctctctctctctcctttcaactaatatggcaattgaaaaccaagacaacactgtcagagaaatcaagccaaagaacaggagaatcatgggtgctggaggccctgatgatgacgacaatacgtggccaccgtggttgaagccactgctgaaagagagcttctttgttcaatgcaagttgcatgctgactctcacaagagcgaatgcaacatgtattgcttggactgtatgaatggccctctctgctctctctgcctcgctcaccacaaggatcaccgtgcaatccagattaggaggtcctcataccatgatgtgatcagagtctctgagattcagaaggtgttggacatcactggtgtccaaacctacattatcaacagcgcaagggtggtgtttttgaacgagaggcctcaaccaaggccaggaaaaggggtcacaaacacttgtgaagtctgcgaacgtagccttcttgattctttccgcttctgttctcttggttgcaagaatgttggaacatctaagaacttccagaagaggaagaaacagtcaatggtaatgtcatcagattctgaggactcataca

SEQ ID NO: 224584 - DNA, 532 bp, Glycine max
cagacactcattgaaaatggactagagatagggttattctcagagttgatggtgggtttagaagtggagtagatgtcatgatggcagcaatcatgggtgctgatgaatatgggtttggttcagtggcaatgattgctactggatgtgttatggcccgcatttgccacaccaataattgcccagttggtgttgccagtcagagggaagagttgcgtgcacgctttcctggtgttcctggggatcttgtcaactactttgtgtatgtagctgaagaggtaagaggcatattggcacagctggggtatgagaagttggatgatgtgattggccggactgatttgttccaaccaagagacatatctctagcaaaaactcagcatctagatctgagttatatcctctctaatgttgggttacctaaatggagcagcacagaaattaggaatcaggagcctcataccaatggtcctgttctggatgatgttttgctagcagacccagagattgcctatgccattgaaaatgaaaaggt

SEQ ID NO: 224585 - DNA, 325 bp, Glycine max
gcttggagaaaacaatattttttcattaatcaaaggagagaaaagatgactaggcatatcaagccccaactaatttattttcaccgtccacaaaaatcccaatcagattcgaatcaactgcattttatatacagttttgctttcacatggctatacaaaaaagaatgctaatgctttaaatggatgtatacggggtgcaatcgtctgttggcaaaaatgatcttgaaaatcaatgccgcgaccattggttcaagggattgtttaatccccattttttggctagcatttccaccttattgataggctattccaattcctgtacaaa

SEQ ID NO: 224586 - DNA, 606 bp, Glycine max
  unsure (1)..(606): unsure at all n locations
cttcactccaacaccaacaccaacacctctttctcgtcacagcaccattctctaaaactcctcagttgcttgtgcttcgtgcttgttcttcttttgtctgcatttgtacctcttgatttgagccacagcacaccctttttcataaatattaatattaaaataccaacaaaaaagagggtggtgggagaagaaaactagaaaaagtagcagcaggggcttacactgtaccattaccaaagccactttttgtctcttgaatttcttttcctttttcctttttctttttgttttttcattgacttgttgttgagtgaggggtcttctttatctagccgaagaaacaaataatggttgctgctgtctagttctgtgaaatccaaccccatcatggatcttgagtctgtgatccacaggaacacaattaaggaagaatcatggaagacggtgttgactttggcctatcaaagcttgggggtagtgtatggagacttgagcactctcccactttacgtntacaaaagcgcttttgctgaggatattcagcattcagacaccaatgaagaaatctatggagtgttgtcttttgtgttctggacactcacactg

SEQ ID NO: 224587 - DNA, 495 bp, Glycine max
ggaggggaagggggggaaccgatttgatattgcatgttttttagggtacaaattcatgtatttggaaattatggagcaacataatattgttgcatatattttgaaagaccaaaatagaaagataccctacacagcagtttttgagaacttgtaactatgatgaaaattggtcaatgctcacatcaaccgacatttcctgaccaattcatataattatttgacaacaatgacacctcatgggaaccattttattcttccacacttcacaaagttttggacttggctggggcagaagcaactgataacaagatattagagacgaaacaaatccaaatgccccagtcacgcgaggagtaactgtcttgggtgccaattgaagcagtccaactgctaccactgtataaattcctgctttgataagagatagagttctctcatttgacttgtttagtttggcacggtattgctcattatcatatttattcttggtcttga

SEQ ID NO: 224588 - DNA, 484 bp, Glycine max
agtaggggaacgacgatgaaagtcaacataattcataacagggaacaacctcaaagatgtaaatccttgtgtgttatttagggtacatttaagaaaataaaatgagcaaaggcaaatgaaacagagaattcctttttaatgactaatatggcagcaacgtgccatattcaaattcttccactagttgcccatttcattttgtactcctttaacagctacagcttgctgaaagcatgacaaggcgtattgcacatcacttgctgatatttggtgatggagaacaactctcattcttgatgaactctcttgcatcacaaggataccacgttcttccatgtacttgcatatcttttctgctctagtctttgtaccctcttcaatgtcaataaataccatattggtctccacagaacaggcattcactctcaattctttaacttcgtttatccatcagccaaaagtctagctttcttgtggtcacttt

SEQ ID NO: 224589 - DNA, 507 bp, Glycine max
  unsure (1)..(507): unsure at all n locations
atcctgagtgcctacaagcttaaaatatttgatgtcattgagaagggtcaagagcaaccaaatctcactgttggaattgttgtagccgttgtggttgtcatcgtgtcagttttcttgaggctcatatttggtgggaagaagaagcccacaagggtggagaagacaaacgtagaaccagcagaaactgcaactagccaaggcagtggtgagaatgaggaaaacaaagagaaggaggaatcatctgcccctgcacgtcggaggccaacaaggagagataattgaagaaatgattgaaacttaacagacaggggcggccattaaagaacactaccgcacataaattttgagcttagtttgggcattaggccaattctgtagtagcaggttgttgtaatttttcccttcaccttttgaaagatgatattgcgtaaggagtgtagatcagatacacaattatttttctttatttttctggtaatgtaacacanatcaactcactgttacatt

SEQ ID NO: 224590 - DNA, 454 bp, Glycine max
ggaaatggaacagggagttgatttgtgttacctttcccgaaaaattaagaaaaatatttgggtttctgatctacactccttacgcaattttttttttcaaaagggggagggaaaaattacaacaacctggttcttcaaaattggcctaatgcccaaactaagctcaaaatttatgggcgggagtgttttttaatggccgcccctgtctgttaagtttcaatcatttcttcaattatctctccttggtggcccccgacgtgcaggggcagaagaatcctccttttctttggtttcctcattctcaccactggcttggctagttgcagtttctggtgggtctacgtttgtgttttccacccttgggggcttcttttttccaccaatatgagccttaagaaaactggcacgatgaccaccacaacggtttcaacaattccaacagtgagatttgggt

SEQ ID NO: 224591 - DNA, 634 bp, Glycine max
cttcacgcaggctcgatcttcttgattttatcctcccttcgagatctcaatcgaagccctcaatttccgcatcgacatcgaggctcacgtcatccaaccgtgcctcaccgcacggatacttgctgaaccgcgtcgccgagtacgccaccgccgcggctgctgctaccgctcctccctctcctcctcctccggggaagaaggagctcggcggcggcgggaagatcaccgatgaattcaccgggaagggcgcgatcgggcaggtctgccaggtcattggtgccgtcgtcgatgtcagattcgacgagggtttgcctccgatcatgaccgcgctggaggttctggatcactcgtcgaggcttgtgttggaggtggcgcagcatttgggtgaaggcgttgtccgaaccattgctatggatgccaccgaaggtgtcgttagaggctggcgcgttctcaacactggctcccctattaccgttccagttggtagggctacccttggccgtatcataaatgtcattggagagcctattgatgccaagggagacatcaatactgagcattatgtgcccattcatagagaagctcctgcttctgatgagcaagaaactgcacagcagattcttggtactggaat

SEQ ID NO: 224592 - DNA, 608 bp, Glycine max
ctcactttttctcgctttcaaccttccttttctctggagcattttccgctatggccgaagaatttgtgaagggctctgttcatcaaaacggcgtcgctgtcataaccctcgatcgccccaaagctctcaacgccatgaacctagatatggatgtaaagtataaaagttatcttgatgaatgggaatctgacccaagggtcaaatgcgtactggttgatagcagctcgcctcgagccttttgcgctggtggtgatgtgaagcagataacaatcaaaaaccatctatcagatatgattgaggtcttcactgctgagtattctttgatatgcaaaatttctgattacaagaagccatatataagcttcatggatggaataactatgggttttggaattggtttatctggtcatggccgctatcgcatcataacagagagaactgttcttgcgatgccagaaaatggaattggtttgttcccagatgtaggttttgcttatatagcggctcaaagtccaggggaaggatccgttggtgcttatcttggattgactggaaagaggatttctactccctcagatgccatatatgctggccttggaacacattat

SEQ ID NO: 224593 - DNA, 446 bp, Glycine max
gaacaaggaatgagtttgcctctgtttggtccagcttaaaacatatcatgcatgtcttgtcaggctaatcaagctggaagggatgtcaaatatgatgacctgtgccattagtgaagtgtgcatcccttatatatctggaactgatcaagcagtctctcgtggagatggaagttccctatgccggaatagcttcagtattgctctacgttcacaatccttgaacatatatagcctgatatggtctctctggattcattctcctaagtttcaaataggtttaagcaaagcttagttgatcacgagatgtaaatcgatcaacttcgttgaaccaaagacatgaaaaataaatttgacattgggggatggtgccctgattatgaaagaaccctcaggaacataactcggaagaggaacatttggctttgatgggtaacccttggggaggc

SEQ ID NO: 224594 - DNA, 596 bp, Glycine max
  unsure (1)..(596): unsure at all n locations
cacgagactcatacattgtgctgccatttttagtaactctctatttctctttccatctctcaagttctgaagaagaaacatgtgtggaggtgctatcatctcagacttcattggtgtgaagcgtggccgcaacctcgccgcgcaggaactatggtctgagcttgaccctttctctgacttccttggcttcgataccaccaattccaaaaaccaaccacccctgcagaaaattccagacaaaaaagtggtgtcatcatgtgagaagaagaagaaaagcgtggtgggtgcagaaaagaagaagagtgatagtgggcgagctcgtaaaaacgtgtacagaggaatcaggcaaaggccatggggcaagtgggccgcggagataagggacccacacaagggtgttcgtgtctggctcggcaccttccccaccgccgaagaagccgcccaagcctacgacgacgccgccatacgcatncgcggcgacaaggccaagctcaacttcccggncaccaccatttncgncgncgncgncgttccgncacccttcaaaaagcaacgctgcctcagccctgacatcatcactgaagaaagcagcagca

SEQ ID NO: 224595 - DNA, 577 bp, Glycine max
ctcgagccgctgaaaccagccgtaggttgtcatccttccaccctgaaatcgaagaactcctttacagctcagtggagaatgaagaacacatatgtgtgctgaaggaccgcagcaagccaattatcttcaccatggcaaggttggatcgagtgaagaacatcacaggacttgtggagtggtacggtaagaacgcgaagctgagggagctggtgaaccttgtggttgttgctggagacaggaggaaggagtcaaaggacttggaagaaaaggccgagatgaagaagatgtacggcctgatcgagacctacaagttgaacggccaattcagatggatttcatcgcagatgaaccgtgtgaggaatggagagctctaccgcgtgatctgcgacaccaggggtgctttcgtgcagcctgctgtatacgaggcttttggtttgacagtggttgaggccatgacttgcggcttgccaacattcgccacatgcaatggtggtcctgctgagatcattgtgcacggcaagtctggcttccacattgacccttaccatggtgaccgtgctgctgatctcttggtgac

SEQ ID NO: 224596 - DNA, 530 bp, Glycine max
gttttcgttaatccttaactggttactatgatctaacgcttgaatgcatgtcctgagttaaagaaacaaaagaagaacacacctagtacagcctggcctcgaaccaagaacttctttctgttgaagtctttccctagccaatggccaccgatcgtttgacccgggttcacagtctccgtgagaggcttgatgaaaccctcactgccaacaggaatgaaattttggcccttctgtcaaggatcgaagccaagggcaagggcatcctgcaacaccaccaggtcattgctgagtttgaggaaatccctgaggagaacagacagaagctcactgatggtgcctttggagaagtcttgagatctacacaggaagccatagttttgccaccatgggttgctctggctgttcgtccaagacctggtgtgtgggagtacctgagagtgaatgtgcacgctcttgttgttgaggagttgcaacctgctgagtacctgcacttcaaggaagaacttgttgacggaagttctaatggcaac

SEQ ID NO: 224597 - DNA, 504 bp, Glycine max
gaagaaggcacggcttaaaattgaattgatgggtaaaactaccccaattggaagcttttccaatcaagatccaaatcatgcaacaacaaaaaaaaaagcaactttttttttccttctctttctctcctcttatcgaaagcttaatcacaaaactaaaatcacggacattatttataaaactcaagtgcgacaaactccaaatgagaaagaaaaagccggttcctccatttctttatccaactctttatcctcagtttactcagcagcaaggggcacagactcagccaatttgcggtacttgagagcatagaacatctcgagatagcggcggctctcacggcggtcaaggttagacacatgcttccagaagccatagacaccggtgagagtgagaagcctctgagagtaaatttgccatgtgtacttctcttcaatacgctggagaccagcctttgagatcttgtcccagtgagttgggtcaagcttgcacttttcaaagaagtc

SEQ ID NO: 224598 - DNA, 482 bp, Glycine max
aatcaaatcaaaattttttcgcagggggaatcaaccaaaatatattggtatatcttacatcttcacaaaaaaaaaaaaaaagttgttcccaggggggaatttgacaaatactatactatctcacgcttaggcatttaagagttttctgattcctgctttttgctcttcagggagcctagttgggaacttgatgttaaactttatcctcaaattccccttctttgatggatcttttggaagtggcattccttctcttgggacaaccttttcataagtgggatgaataacattgttgattggtatggttaagtttctaccatctagggtagtgaggtgcactgtataaccagttaatgcctttgcaagagaaatcttctgggtgacaacaaggtcatttccggcacgagtgaagacgccatgcggttttttcgtaatgatgaaaacaagggcctgaggcatcacgtttgggtgttcatttccct

SEQ ID NO: 224599 - DNA, 507 bp, Glycine max
atgattaacgaaataattttggtgtgtagattaaataaacacacgaagtacaaataaacattggtctctttaatcacaaaggagattaagtccattgtggggtgccttcatgactgaattataccaaagtactacccttaacatactcagtaaaagccagagcaatcaaacccaacatagcaaatttcccattccacagttttgcatttgaggacatgaaccctctggacttagactccacgctgacaccttggaagagtggaatcaaggaagcaagggtaaggaccacacttgtccccaagaaccatgggatgccaccattggatatttgttctaacacaccttgccctttggctacttccactggcattgcagccacaaacccaatcatggccaacctttcattgatcctttcaggtgctggcccactgaatgccaacacattaaaaaaacttagtgctcacttttggtgaaggagcaaaaactggctgtggcttgggttctact

SEQ ID NO: 224600 - DNA, 520 bp, Glycine max
agcacaaaatgtctcaccattaaaatcggaataacaagtcgaagttttaagtaacttaggacagaacttaaaaaaaaaaacttggtaaaatgagagttgataacttggtacattttgtcacttagcacttaacctcctttaaggcatatgcaaagtataagaatgttggatcagcagcaccattcttgtagtatgcaaagaccaagcaagcatcatcattcatgctctccccaacaaaaaactggaattcttaattttaaaagccggtttttagttgctccctcaaagtgcttcttaaacaacttttgtttctctgcatcgagcttgggagtcaaatttttgatatacctttttatgaagggaacaaactggttcttatcaaaagcgggttgcttctgaagtctgaatgtatcaacaatgtcaacaaccttaacagctggggtattgactccctcatttttctcaccctcaacagaagggtttgcccaaagtaacattaactgttctttacaacccagtt

SEQ ID NO: 224601 - DNA, 610 bp, Glycine max
gctctcttctgctctatttttcgtttctgactcagcctttcgaatcctctcacccagaggtacgattcgtaccatgtagttgtgggatttcggctttgccacttcttgattccaataattttggtttctttttttcccctaatttgatttccccagttagggtttttaactctattcgatcggcgatttcgaatactcggaggctcgaatcgtgttgggggttttccgttttgattaaaaaagtttccgtttttggtgttgggtgatcaagggttgtttgattttttcttgcgatcgagaatgggtgaggcttcgggagctggttccgctgattgtttcagccagatgatgtcgtcgatgccgggttttcgcttccatcccacggatgaggagttggtgatgtactatctgaagcggaagatttgtgggaagaggctgaagctcgacgtgattcatgaaaccgatgtgtataagtgggatcccgaggatttgcctgtgcaatctatattgaaaacgggagataggcaatggttctttttctgtcacagagataggaaatatcctaatggtggaaggtctaaccgagcaaccagacgtgggtattggaaag

SEQ ID NO: 224602 - DNA, 580 bp, Glycine max
cgagaacaaaaaaaaaaaaaaaaaatatttcgcgattcgctcttctcttggaaaagtgaaaaccagaagtacgaacgaaagagaagagcgatttagaagtgagagaagatggggttgtcgttcacgaagctgttcagcaggttgtttgcgaagaaggaaatgaggattctgatggtaggtctcgatgctgctggtaagacaaccatcttgtacaagctcaagcttggagaaatcgtcaccactatccccaccatcggatttaatgttgagactgtggagtacaagaacatcagcttcactgtgtgggatgttggtggtcaggacaagatccgtccactgtggaggcattatttccagaacactcagggtctcatttttgtggttgatagcaatgatagagatcgagtggttgaggcaagggatgagctgcacagaatgttgaatgaggatgaacttagagatgctgttttgcttgtttttgccaacaagcaagatcttcctaatgcaatgaatgctgcagaaataactgacaagcttggacttcattcactccgtcaacgccactggtatatccagagca

SEQ ID NO: 224603 - DNA, 476 bp, Glycine max
agaacaaaacgcatggaaatatattcaatcaaaaatcaaacaaacaagatgtaagcaacacagcacgcacgcacaagagggtgcaagagttccaattatagctaaaagtattagctaatttaagcaatcatacaaacccaagttacacaaaagagaatacttctagcaagcattctgctattacaacattcgctagaaaagataagcatctttctccaagaaccgccagactcgcatgaaatcaccagacaagaccaaaatttttcaaatgtctcatgctttgctggcaatgttgttagaaagccagtccaaaccctcatagagaccctctccagaagttgcacaagtgctctggatataccagtggcgttgacggagtgaatgaagtccaagcttgtcagttatttctgcagcattcattgcattaggaagatcttgcttgttggcaaaaacaagcaaaacagcatctttaagtt

SEQ ID NO: 224604 - DNA, 551 bp, Glycine max
atggaacttaattttaagtaccaactttttcttttctgtgtcacactgctcttacctgccctgtgtacctctcaagactcttttacgtgctccagagcaacctattatggtagcccagattgttatggaaatccaaggggagcttgtggctttggagaatatggaaaaacggtaaacgatggtagtgtcgcaggcgtgtcttggctatggaagaatggatctggctgtggagcatgttatcaggttaggtgcaaaataccacaattctgcgatgagaatggagcatacgtggtggttacagattatggcgagggagacagaacagactttattatgagtccacgtgcctactcaagattggggagaaatgcagatgcatctgcagaactattcaaatacggtgtgatggatgtagaatacagaagggtaccctgtagatacggtggctataacctcttggttaaggtccatgaacacagcagaaaccctcactacttagccattgtcattctctatcttggtggaacttacgacgtaactgctgttgaatt

SEQ ID NO: 224605 - DNA, 484 bp, Glycine max
cttatgacattagctgagcatcacttttatttattcatattctgtgatgattcatacgggaaatatatgaatccccacagttttagtccccaatacaaagagcactagatcgactcaccacaaaggaacattcttagaatagcacaaaccataaacaataaaacactagtaatctagtcactatctatattcctgaaatcagaaagtgccttttttcattttaaccaagctgaatttcggagtcaaagacagctccaccctcccaatcactagagataacattctcggattgcacccaatacttctctgcattaccactcaattggaacctcaactttatgtcaccccttggagggttctcagcgtcaaacacagtcccaaatgccctgcgcattcgcctccactcttggcaatcttcctgccacaattcaacagcagttacgtcgtaagttccaccaagatagagaatgacaatggctaagta

SEQ ID NO: 224606 - DNA, 588 bp, Glycine max
gtgaggtgccaaaatggtgaagataactcttggtactttcgatgactcttttggtgttgcctctcttaaggcttatttggcagagttccatgcaactctgattttcgtgttcgctggtgttggttcagccatcgcttacaacgagcttacaaaagatgcagccttggatccaacggggctggtggcagtagctgtggcccatgcatttgcactgtttgtaggtgtctccgtcgcagccaacatctcgggtggccatttgaacccagctgttacttttggattggccattggaggcaacatcaccctcattactggtttcttatactggattgcccagttgttgggttccattgtggcatgcctcctcctcaatttcatcaccgccaagagcattccaagccacgcaccggcaactggtgtgaacgattttcaagctgtagtgtttgagattgtaatcacatttgggttggtttacactgtgtatgcaactgcagcagacccaaagaaggggtcattgggtatcattgcacccattgctattgggttcgttgtgggtgccaacatcttagcagcacgcccattcagtgg

SEQ ID NO: 224607 - DNA, 476 bp, Glycine max
ccaacaatgcacgcgtcaagttcgaaatatgatttacattaatgacacaagcggagagtaatggataaaggttccggtaaaaatgccaaatgccatgaatctttacacataaatccggggacaaatatgaatcttgaagggacttgattcacaagtgaatagtacaagttgttgtatttttcaagttgaagcttaagggcgggtttaaaaggctgggacagcccccttttaaccaatgatgacttctccattaattaagcctgccaaacctcctccaatcaatgtgccaacccaataaatccagttagtagcgaaatctccactgaccacatcttggccgaatgagctatctgggttcattgacccaccacttaatgggcctgttgataagatgttggcacccagaactaacccaatactattgggtgcaatgatgcccaatgaccctttttttggttcttgtgcccttgtttcgg

SEQ ID NO: 224608 - DNA, 531 bp, Glycine max
gtatgaaaacacactaacttcaatttgattgtccaaacatatacagcaatacacaagcatactataaacaacacacattattctctctttctctgcatcagtcatcagatgagaagagatcaacacacaaaaggagcatcaacatggtgatcactgcaatagagtccaggtttttgtgtgaaaccggagttcttcagcttctctcttgccctttgaacaagttcttggtttgtgattgcaccatcagtctcctcaattatagcctgtatcgcattgctaaaagcaccataagcactggcagcgttgcctgcaggacttgcatctgcagaagtttggtcagtctgacatccactcatcaatatcccaccatccggaaggccgcgtttggttggtccagcgtatgcctcatgcttactttccacttttgtctccagtgcaggctttgcatatccctcatcattgtcatcaagcttttgcttgagaaactcttgggcaagaccacccaccagccccatattccacccccacttt

SEQ ID NO: 224609 - DNA, 486 bp, Glycine max
agcacaaaaatcaattatttgaaatatttaagatctgctgcgtctaaaactagtttcaatttaagtatgtacatgaagaaaagtggaccattagaagaaacaatcacagtccaatgtatataacctacaccatttcagctctgaccactataatttggacagatttctgattttatttaatattcaacaaggcacttgaacaccactgatttcatagtgaccaaccgtggaaatcgacagaagagaacttgccaacattgtctgctactgaccagagttccccaatagccgttcaactgcggcatgaacattacctgaagtggcaataagggctctaatgttctcttgtgaatcaaagaatcccatctcttgaagctgtgaaagttgggaggcatacagctgctccgggggctcatttgatctatttggaacagctaggctaccagctccaagttcaccaaacatgctcgataacatctccatccc

SEQ ID NO: 224610 - DNA, 577 bp, Glycine max
  unsure (1)..(577): unsure at all n locations
attcttttgcaggtgctgaaatcaggnatcctggacattgattaccttgcaaaaattctcgagttttcactcgtcagtttgcagaagctctcagctccagcgaatgaggagatgatgaaggccgctcacaagaaactatttcatgaattgagtgaaatttgtcattcaagggatgagtcaaacaattcatgtgttgtagccttggtgaagggcttgcaatttgtcttcggacagattcagattcttaagaaagagataagcaaagcacgaataagattaatggagtctttggtgaaggggtctgctggtctggactaccttaggaatgcctttgctaacaaatatggatctccatctgatgccaatacctctctgccttcaacattgagatggatttcatctgtttggaattgcaaagatcaggaatgggaagaacatgtgagttcctcatcagcattggcttctaattcatcccaagaatggcttccttcaactactctcagaactgggggaagtattctgctcanaacaactggcagtccgatggccttttctcctgatagtgcanatgctaaag

SEQ ID NO: 224611 - DNA, 539 bp, Glycine max
  unsure (1)..(539): unsure at all n locations
gcaggcagtgtcatctctcctttgacgtttagatgagcatcccaattccccatcggcagttattcatagacggagactggaaagtccccgtcctcaagaatcggattcccatcatcaacccttccacccaacacatcatcggggatatcccagcagctactaaggaagacgttgatctcgctgtcgctgccgccaaagctgccctctcccgcaacaagggcgccgattgggcctccgcttccggctccgttcgggctcgctacctccgcgccatcgctgccaagatcaccgagaaaaagcctgaactagcaaaactcgaagctattgactgtggaaaaccgctcgatgaagccgcctgggacatcgacgatgttgctggttgctttgagttctatgctgaccttgctgaaaaattggacgcacagcaaaaggctcatgtgtctcttcccatggacacattcaagagttatgttcttaaggagccgatnggagtcgttgctttaataactccttggaattatcctctggtgatggctacg

SEQ ID NO: 224612 - DNA, 452 bp, Glycine max
aagtcaaatctattgatgcatgattcgtaacttaagcgcaagaaatgcttcaatataatgtaatgatggaagtcttccatgatgaaattcaaacattaaaagcatgtggtggagccaaccttaaacaaatcaaataaaaacactaccaacataatcttgactgcaaagtgcaaaccatttcaatgttatacatagacatcatgttttctcgactttggggtcataatcataatttgatattacccacaacttattaatgttagcttttggatacctatcacagccttgaaggagactggtaccagccccacggttcatcaaagatatattgggtcacttgcttcacactcaagtaattatcaagtccccatttcttctaattcacgaccaaaaccactgcgtttaatgcctccccatggggcttgagtgaagcatggttgagagcatataat

SEQ ID NO: 224613 - DNA, 583 bp, Glycine max
ctctttcttcctcttcctcagtagtgcttttttcgattctcttctctgcaactatgcctaaccctaaggtcttcttcgacatgaccatcggcggtcaacctgccggccgcatcgtgatggagctctatgccgacgtgactcccagcaccgccgagaacttccgcgcgctctgcaccggcgagaagggcgccgggcggagcggcaagcccctccactacaaaggctcgtccttccaccgcgtgatcccgaacttcatgtgccagggcggcgacttcaccgccggaaacggcaccggaggcgagtcgatctacggcgccaagttcgccgacgagaacttcttgaagaagcacactggtcccggcatcctctccatggcgaacgccggtcccggaaccaacggatctcagttcttcatctgcacgacgaagacggagtggctcgacggaaagcacgtcgtgttcggacaggtcgtcgaggggatggacgtcgtcaaggagatagagaaggtcggatccagctccggcaggaccgccaagcctgtcgtcgtcgccgactgtggtcaactctcttagatagacgacgt

SEQ ID NO: 224614 - DNA, 498 bp, Glycine max
aggcgattaatagaggtcctaatttttattgaagggggctcatgatatttttttatgattcacataacaaactccatttactctatgaacgaaccacatgatactgatattttagaaaggaaaggaaggattcaaaggggaagggtttcgaaatgatatccataacaccgcaatcccctaaacgacatgggaaagagaaaaaaaaggcaaaaacgacaccgaaagaaacgacacattcagagccaccgacacagagataaaagcctagggtcaacgtcgtctatctaagagagttgaccacagtcggcgacgacgacaggcttggcggtcctgccggagctggatccgaccttctctatctccttgacaacgtccatcccctcgacgacctgtccgaacacgacgtgctttccgtcgagccactccgtcttcggcgcgcagatgaaaaactgggatccgttggttccgggaccggcgttcgccatggagaggatgccg

SEQ ID NO: 224615 - DNA, 578 bp, Glycine max
cttgtattcacatttcaacaactatagttatggctttctccacctcaaaggcactacttgtccttgcctgctccttctgcctatttgcatcttttacttttggacgcgatttctccattgtgggctattcatcggaggacttaaagtccatggataagctcattgaactctttgaatcatggatatcaagacatggcaagatttaccaaagcattgaggagaagctgcataggttcgagattttcaaggacaacctaaagcacatagatgagagaaacaaggtggtcagcaactactggcttggcttgaatgagtttgctgatttgagccaccaagagttcaagaacaaatatctggggcttaaggtggactactctagaaggagagagtcccctgaagaattcacttacaaagatgttgaattgccaaagtcagtggattggagaaagaaaggtgctgtaacccaagtcaagaaccaaggttcatgtggtagctgctgggcattttctactgttgcagcagttgagggaataaaccagattgtgaccgggaaattaacatcattgtctgagcaagaa

SEQ ID NO: 224616 - DNA, 583 bp, Glycine max
ctctagtcctgttatttctcagcgctgttatcatggctttgttggtggagaaaaccacgggtggtcgctagtacaaggtcaaggacctttcccaggccgacttcggccgcctcgagatcgagctggccgaggttgagatgcccggcctcatggcctgtcggaccgagttcggcccctcccagcccttcaagggggcccgcatcaccggctccctccacatgaccatccagaccgccgttctcattgagaccctcaccgcccttggcgccgaggtccgctggtgctcctgcaacatcttcttcacccaggaccacgccgccgccgctattgcccgcgacagtgccgccgtcttcgcctggaagggtgagaccctccaggagtactggtggtgcaccgagcgcgccctcgactggggccccggtggtggacccgacctcatcgtcgacgacagtggtgacgctacccttctcatgcacgaaggcgtcaaggccgaggagctctatgagaagaccggcgaactccccgaccccaactccaccgacaacgccgagtttcagatcgtgcttaccatcatcagagatgg

SEQ ID NO: 224617 - DNA, 555 bp, Glycine max
caacaaatggttcttaatctcgtgatcttttgaaaacacgaaaaaaagcactgaaattttcattgcacatgacataattggtacagaaaaattggtcaagtactgctctctggataattatttttttaacaaaaaattcttcgttgtgaaatgacaagtacctataaaatttgacacggcacattctgcttaaccatctgaatcatagatttacgttctccaagtaccacttgtaggtatcagcaagcccatccttgagtgagacttttggtgtccaacccaggcttgcaagtttggagctatccatcagcttccttggagtcccatcaggcttagtagaatcccaaacaagatccccttcaaatcccaccacttccttcatcaactcagccaattccttaatagtaaccttctttccactccctacattcaaatgctccagtccgctatacttttccatcatgaagacaaccgcgtctgccaaatcgtcaacgtgcaagaactccctcaatggactttcggtgccccacaccaccaccttcttagcaccattga

SEQ ID NO: 224618 - DNA, 499 bp, Glycine max
agtaggggaacgacgatgaaagtcaacataattgataacagggaacaacctcaaagatgtaaatccttgtgtgttatttagggtacatttaagaaaataaaatgagcaaaggcaaatgaaacagagaattcctttttaatgactaatatggcagcaacgtgccatattcaaattcttccactagttgcccatttcattttgtactcctttaacagctacagattgctgaaagcatgacaaggcgtattgcacatcacttgctgatatttggtgatggagaacaactcttattcttgatgaactgtcttgcatcacaaggataccacgtgcttccatgtacttgcatatctattctgctctagtctttgtaccctcttcaatgtcaatatataccatattggtgctcacagaacaggcatccactctcaatcctttaactgcgttaatccatcagccaaaagctagctttcttgggtcaattttcacttcccacattttc

SEQ ID NO: 224619 - DNA, 344 bp, Glycine max
  unsure (1)..(344): unsure at all n locations
tgtgnacagctcctgatctcatttccggaaacgaatctatggattcacgagctcactagcctactagccggctgccgccctttttttgaaaggggagcgcaggatgaaaacaacattttatcattcatcagaggaaagaacagattactctgcatatgacgccccaactatttcattttcaccggtcgatcaaattccctactgacgtaaataaacattatggcacactcagacatgctttgccatggttttactaaacagaatgctcttgcgggggctggatgctataccggactcctgggaattgctggccttcattgaccttgagaatcgctgctgccccc

SEQ ID NO: 224620 - DNA, 596 bp, Glycine max
gggagatgctactgtgttaaagcccactcttttgacagcagaccagctattcttgatcggattcgagatggagttgtaaaaaaggttgagcaaaaagggggccttgtgaagaatcttttccattttgcatacaagcgccgactgggtgctgtaaaaggaagctggctaggagcttggggattggaaaagttgatgtgggataccattgtctttaaacaaattcgtactgcacttggaggccagctccggtttatgctttgtgggggagctcctttatctggagattcacaacacttcatcaatatctgcatgggggctcctattgggcaaggatatggcttgactgaaacatttgctggggctgccttctcggagtgggatgactacagtgtgggacgtgttggtccacctcttccttgttgccacattaagcttgtttcttgggaagaaggagggtatctgacatcagataaaccaatgccaaggggagagattgtagttggaggaattagtgtgacagcttgttactttaagaatcaagaaaaaactaaagaagtgttcaaggttgatgagaagggaatgcgctggttttatac

SEQ ID NO: 224621 - DNA, 458 bp, Glycine max
gtatataagtattttttttcaagaaaaattactgctcataaatcaactatatctattgctagccgcttggttggcttcactggcaagaatttcatgttgacagccaagtattatttggagtatgattttattatgtcagattagttacatgctcaataatattattgtataaaaaagagacctgttacatattacatacattgaacatacaccaaccataaattgaagagggtagaaacttcatttcatgcatacaacttctgaagctcatctttgaatttggctttcagctgctctctctttatcttgagagctgcagtgaccaatccagattcaggagtccatggatccggcagcaacttaatctttgcagggatttcagttttctccagctttgcagattttgcaaccttggaaatagactgaagaacctcagtgacagtttcaggtttgttaca

SEQ ID NO: 224622 - DNA, 620 bp, Glycine max
  unsure (1)..(620): unsure at all n locations
ctacggctactacattacattcttttttttctttcccaaatgggttccatcttttcacccttaaccactatcttcctcctactcctactcgtactttggggtggcgaggcacgtgacccttttgcttgtgaccctaagaacaccgccacaaaaaacttaccattttgcaaggcttcgttggcaacaggggcaagggtgaaggacctcattggaaggttgacactgcaagaaaaagttaacttgctagtgaacaatgccgcggcagtgccacggcttggtatcaaagggtatgagtggtggtcggaggcactacatggggtctcaaatgtgggccccggaaccaagttcggtggccagttccctgccgccactagcttccctcaagtcatcaccaccgctgcttctttcaatgcttctctgtgggaagcaatcgggcgggttgcctcggacgaagcaagagcaatgtacaatggtggaacggctgggctgacatactggagcccaaacgtgaacatctttagggacccacggtggngccgcggacaggagactcccggtgaggacccaatactagccggtaaatatgcagccagttacgtgagggggcttcagggaactga

SEQ ID NO: 224623 - DNA, 610 bp, Glycine max
gagatgacagtttttacagaagttagtgtttgagagagagagagagagtacagatctgtttgaccaaaacccctcacaacacataaatcagacagacaaaagaaagaaagaagagaacaacagagcaatggaaggaggaggagctgctccgccggccgacaccgtgatgtccgacgcggcgccaccgccgcagcagcctccggtggcgatggggatcgagaatattccggcgacgctgagccacggtggcaggttcatccaatacaacatattcggcaacatattcgaagtcaccgccaaatacaagccacccatcatgcccatcggaaaaggcgcatacggcatcgtttgctcggctttgaactcggagacgaatgagcacgttgccatcaagaagattgcgaatgcatttgacaacaagattgatgcaaagaggaccctccgtgaaatcaagctgcttcgtcacatggatcatgaaaacgttgttgcaatcagggatatagtgccaccacctcaaagggagatattcaatgatgtttacattgcatatgagttgatggacactgaccttcaccaaatcattcgttcaaatcaagcattatcagaggag

SEQ ID NO: 224624 - DNA, 482 bp, Glycine max
atcagttggctgcagccaatgaattggacaataatatgaagcaaaaagccaatacaaataccttatgattgtttcagtctaccaatcatgcctctgatggaaataattcaactccaagatcacctggtttcagatgatagatatatatacacaatgaaatcttttgatctatggacacagacatcacacgatccaaatccaatgataacaagtctatcactactgctgatactcgaggttaaatgctagagcctctcggtatatcagttctttcatctgttcctcagtcaaagcatgttgttcaaagtcaaagctgaagggagtcaagcacacaggttcatcactgatgtcatgcaaagatgtcaagtatgggtgcgccagtgcatcttcaacagtaattctttttctaggatcaaaagttaacattttttctacaagatctattgcttcaggatggacatgtggaaacatttcctggaaag

SEQ ID NO: 224625 - DNA, 560 bp, Glycine max
cttttgtgcagcggttcatgcgctttttggacacaatggaatctttgagatccatgagagccaagaagatcatgaactaacatatgctctaacccctgcatcaaagcttcttgtcaatagtagtgatcattgtctatctccaatggttctagcgtttaccgatccacttcggaacgttaaataccatcacttgggggaatggattcgtggggaggacccctcagtatttgagacagcccacggaacaagcgcttggggacttcttgagaaaaatcctgaatattttagtctcttcaatgaggctatggcaagtgattcccgaatagtagacttggcactcaaaaattgcacttcagtttttgaggggctagattccatggtggatgttggtggtggaactggaaccacggccagaattatctgtgacgcatttcctaagttgaaatgtgttgtgcttgaccttcctcatgttgtagagaacttgacagggaccaataatttgagttttgttggtggtgacatgttcaactctatccctcaagctgatgcagtgctactaa

SEQ ID NO: 224626 - DNA, 372 bp, Glycine max
aaagacgtaaagccataccaaaactttgtatatgggtcgcatccattacatgtttattcaatttattttggccaaataggaatgagaaatcctgtcacagaacatttaacaacatagcggggaggaacataatgtaaattcaccaaaagttgataatgctatgtcatcatagcttttttcagcaaacaacactcaaaccactatatacaattacaacgatgaccgaggatgttcataaatataaacgctaagtgtgacatccacatcattaaaatgttcaaggttagacctcaatcttagatctaaaaccaaagatgggaaatattttgtagtgtttgaatcctgcttcgatgaaaaattgattccattttt

SEQ ID NO: 224627 - DNA, 541 bp, Glycine max
ggcaaggagagtcccatataacataagaactaaaattttgatgacaagatgaaagccaataatgttaaatgtgtactaaccagagaaagtttacaaattaacaatgcaaaaacacacacacaaaaaaaaaaaaacataatcacaaatattatttatgatatgattcatttggagcctcaattcaaagcatgccatcaacacaagatggcaaccttttgaagaaattactaggcatcgagggtagcttgcttctgaacctggggtgcctgagccagaaaatgccagcaactgaagccacaaccttgaaaggtgtcacatacaatgccacagcaacaacaaggcaaaaaatcacaaataggcttgtggctctagggtctctccaactaagcaatgcatgaaacctctcaccttgtgttgcaatatctccaaccacagtttgtatcctcccagccacactcctaagcctatcatacctcattctgatcacatcttgagcctttgaggtgggaaaagtataaaactcctcattaagttcatttgg

SEQ ID NO: 224628 - DNA, 531 bp, Glycine max
ggacgtagtttacagacttattatatttaaataggacattaagtaacgttcctcagtggcagaacacagacgagtacaaactacaaaatgataatacaacttacatactagcattcaaccaagaaaacaaaactaaaaaacccaaactaacaacaaaactgcagttctgagaaatctgaaaatgattcgaagtgaaagccataattgattttaagttctaattgctggaacgcaactctggacgaacaaagtctgcatctggtggcacagaaatgtctactgtgggtctcagttcaacgcaaactttaatggctccatgcactgggtctgacaggaagttgctgattaagtcccggttaataggtgttccattgtccaccgccaccatggcctgctgggttaggatgtagtcaaatcgaggagccccatttctttgacccaacctaaccgtggttgaacagttttcaaccatgaaagatacaccacgagcatgcatgaaaggattcaaagaggtaacagcctcaatgacac

SEQ ID NO: 224629 - DNA, 568 bp, Glycine max
gttataataatcatccaaaataatcaggaaaaaccctgccaaagagtgaactttacaaaataattcacaatttagatatgtacatttagaaaagagacaaattgagaatgaagattgaataagaatatatatacatacactcgcacacaggatatttttattcaattctatccatcagattatttgtcgtttcccattccactgacaatggtcatttgtgagtcattttctaccgccttcaaatctacagatatcgtaaattccactgcctccttttaacttaaatcaaagccagcatcagcatttatggcatacagtaatttggtttccaattgctccttgcttgtataaggcggaagctttagtagattcatacaagtagccgatgttggtaatcggtcaagtgattcttcaacggcattaccggaagccctttgtatgcaaaacataggttcaagatatcggaaaccaagcaaaggcccacgagagcaacctgtcacaaactttaaaaatttctttttgttttccaatgaaaagccttgagaacttcccaaaacatttcataaca

SEQ ID NO: 224630 - DNA, 544 bp, Glycine max
  unsure (1)..(544): unsure at all n locations
atgcccaaaaacttgaacctantcatnnaannattanngnnannncnaaacngaaanaggtnagggtcattaacagaaggacggaagcaaataaattctaaataaaatcgcgcttattagggtggttttaagaaagaatggcaaattcccacaatctttgagtgaacacatgggccaagattccttatgttgggttaggcactttggaagctgagcctggtgttgaattcaaagctgtctccacagtcattctggttggatacaggcatattgattgtgctcaatcgtataacaatcaagcagagattggttctgcttttaataagctttttgatgatggagtggtgaagcgtgaggacttatggatcacctacaaactttggtgttcagatcatgcctcagaagatgtgcccaaagcatgggatataacattgcaagatttgcaacttgattaccttgacctttatatgatccactggacaatgctcatgaaaagcggatcagttggattcaaaaaggaatttttcgatcaaacggacatttc

SEQ ID NO: 224631 - DNA, 415 bp, Glycine max
gtttgtccgtctgtcacgagactcatatagtgtgctgccaattatagtaactctctatttgtctttccatctctcaagatctgaagaagaaacatgtgtggaggtgctatcatctcagacttcattggtgtgaagcgcggccggaacctccccgcgcaagaactatggtctgagcttgaccctttctctgacttccttggcttggataccaccaattccaaaaaccaaccacccctgcagaaaattccagacaaaaaagtggtgtcatcatgtgagaagaagaagaaatgcgtggtgggagcagaaccgaagaacagtgatagtgggcgagctcgttacaacgtgtacagacgaatcaggcaaaggccatggggcactgtggccgcggtgataacggacccacacaagggtgttc

SEQ ID NO: 224632 - DNA, 555 bp, Glycine max
  unsure (1)..(555): unsure at all n locations
gtgtgtcgttgggagcgaacaagttctttggagacagccattgggacgggggcagagccaagacgacggcaaggactaccaggagccggcgccggcgccgtgttgacccgacggagttacgtcatggtcgttttacagagcagggatagcagagtttgtggccacttttctgtttctctacatcactgtcttaaccgttatgggagtcgccggggctaagtctaagtgtagtaccgttgggattcaaggaatcgcttgggccttcggtggcatgatcttcgccctcgtttactgcaccgctggcatctcagggggacacataaacccggcggtgacatttgggctgtttttggcgaggaagttgtcgttgcccagggcgattttctacatcgtgatgcaatgcttgggtgctatttgtggcgctggcgtggtgaagggtttcgaggggaaaacaaaatacggtgcgttgaatggtggtgccaactttgttgcccctggttacaccaagggtgatggtctnggtgctgagattgtggcactttcatccttgttaca

SEQ ID NO: 224633 - DNA, 503 bp, Glycine max
aaagagatgcatatatatgactctggtgttatttttgattttgcaaattaaattacacaatcacagccgtacatcacacatgagttgggcctcttccaacttaaaagcagaggataacattggcccatgacgcgacacatgcaccacctaataatcataattttacatctttacatacaaaatacaaagactttaaattttaaaaagaagaaaagagataaacagatcatcttaatgaaatgaaaccaaaacccacaaacattggcttgatttttgttgttgttgttgttcccaacttgattaagcatgaaccgtttgattgaatcacttggacttgaagggaatggccctaattacgacctggtggtagagtgctgcaagagctgcaccgatgaatggtcccacccagaagatccagtgttcatcccaaccaaggtccttgttgaagatgatagcagcaccaagactacgagcagggttgataccagttccggtgatgggga

SEQ ID NO: 224634 - DNA, 522 bp, Glycine max
  unsure (1)..(522): unsure at all n locations
gggccaaagaaaagcaagttcaacgcatttttgttattccaccgcagttgtctgttccccttgctggtatgagttcaacaattactgcctataagacttgggagatggaacaaggaagtcttcaagatgttgaatcncattgatttggttgatatttatcctcatgttgcggcttcataccagaaggccttggagatgtataatgctcgttttcatcttgaagaacagattttgagcccgaatatttcagattcagaaagattacaacactacatgaactatttgaaatttgagcagtcttctggaatgccagccagaattcaagttctatatgaacgagccattactgactttcctataacacctgatctctggctggattgtactcgcaatttggacaacactttgaaggttggtaatattgtcagcaatgtttattctagggcaactaagaactgcccttgggttggagaactttgggttcgatatatgctttcgttggagcgtggtcatgcttcggag

SEQ ID NO: 224635 - DNA, 554 bp, Glycine max
  unsure (1)..(554): unsure at all n locations
ctccattcgtgctttcagctccggctttctctcttccggcgccgccgctatctcggccgcgcaccagatcttcaatttgattacttgggtcaacgatttctgtcattctcaatcatggcaactagacttcagtttgaaaataattgtgaagttggagtcttctctaaacttaccaatgcctactgtttggttgccattggtggttctgaaagcttctacagtgtatttgaagccgagttagcaggtgttatccctgtggtcaagacatccattggcggtactcgtattattggtcgtctttgtgctggtaacaagaatgggcttctcttgccccataccaccacagaccaagaacttcaacatttgagaaacagtctacctgatcaagttgttgttcagcgaatagacgaaaggttatctgctctgggaaattgtatagcatgtaatgaccatgtggccctcacacacactgatcttgacagggagactgaagagatgattgcagatgttcttggagtagaagttntcaggcagaccattgctggcatattctt

SEQ ID NO: 224636 - DNA, 448 bp, Glycine max
gggggggaacgcaagaacccccttacatgcatttgatttgttgggaacaaaaatcagcccctgttattttacgatttcccaacttaggaaaagagctcaacatggtgggaacatttttgcccacacaacaacagaaacttttaccaaaacttaacttaaaagatctcaacaatgagcagggcaatattttgcataaaacaaaacactttttctaccacagctcaaacattggttttaatgagagatttcctcatctcatccacaaatgcgcttgggtgggcttctcttagcttgaaaacactttcgatcacagaaagctctggtgctggggggtccgaaccacaaaatgcagtccaatcattaactggaattccaggtgctattacttaactaccccggttcacggtcccagccaccaaaggaacctgaaaaagtgtagaaagttcat

SEQ ID NO: 224637 - DNA, 544 bp, Glycine max
caatatagcaagggagactttattgtgcaattgtgtattacaataaattctctctctcttgattctacttcttattaacaccataacatgatttccattcaaacctagtaatcactcccaaccctttctcgcatcacttggaaaaacaatcaaatcatatggtatctcatatatcaagacaccataggcctagcatagaataagttacacagaaaagtagacatacaaaatgcacttagatggtcattatcaaagagattcttagttattaactcgtgcacaatgtttccttatctctccttcagatccaagcttgacattaattcgtcccattttctccatagacttggcaaattccgcaaagaatccttgagttgactgaagttgactagcgataatagaccttgtgataggactagtaagcaattcagcatctgattggaacaaaccccttctcttaaccacttgtttgtaatatccaagatcaaatgtatcacgacttccagggtccatctcaataagtgagttatcattaatgttctta

SEQ ID NO: 224638 - DNA, 578 bp, Glycine max
gagaatcaatttctaaaaataggctgcgataattattgcagcacgtccattaagcagccaaaatacattcaagccctcaccgatcttccgaaacaacgaaaaccacatccttcaaaacggcgttcatttcgaaaatcagaaaacaatagccaaaaaacaaagaatagtgtgaactgttgttcttcaaattgcggcaaacagagcggaaattagggaacgatatgatcaaattgacacaaccccacactcctcttatctattatacatcttaagagtcaatccaacaaccctaaccctaatcaccgcccaaaccataaacaaaaaggacgaaaaagtaatccacagtcatgcaattataattattcaaacgaaaccttccattaacaactgttcagatcattacatctacaaactaatttttaagaaaagaaatccacagaaaaccctagatctgcaacacaaccgcctaacaaaccctaattcaagagctggttaacttggtaaccgccttggtcccttcagaaacggcgtgtttggcccattcaccaaggagcacgagacgcacggcggtctggatc

SEQ ID NO: 224639 - DNA, 549 bp, Glycine max
atatgactctggtgttatttttgattttgcaaattaaattacacaatcacagccgtacatcacacatgagttgggcctcttccaacttaaaagcagaggataacattggcccatgacgcgacacatgcaccacctaataatcataattttacatctttacatacaaaatacaaagactttaaattttaaaaagaagaaaagagataaacagatcatcttaatgaaatgaaaccaaaacccacaaacattggcttgatttttgttgttgttgttgttcccaacttgattaagcatgaaccgtttgattgaatcacttggacttgaagggaatggccctgattacgacctggtggtagagtgctgcaagagctgcaccgatgaatggtcccacccagaagatccagtgttcatcccaaccaaggtccttgttgaagatgatagcagcaccaagactacgagcagggttgataccagttcccgtgatggggatggttgccaagtgaaccaagaacacagcgaacccaattggcaagggtgccaaaatgggga

SEQ ID NO: 224640 - DNA, 562 bp, Glycine max
aatgttaccttataaagcaacacgctctctttggctgagattgatctggtttgtcgatctttctctcgcaatcttcaccacattcaccgagcctttgcattcacattgaatatggctgaggctacacaatctaatgctgagctgttggagtggcctaagaaagataagcgccgcttcctgcatgttgtgtatcgcgttggtgatcttgatcgcaccattaagttctatactgaatgttttgggatgaagctcttgaggaaaagagatattccagaggagaaatatgccaatgcttttcttggatttggccctgaacaatcccattttgttgcggaattaacatataactatggggtgacctcatatgatattggaactggattcggacattttgctatcgcaactccagatgtttacaaattggttgaagacatccgggctaagggtggaaatgtcaccagtgagcctggtccagctaacggtgggaaatctgttattgccttcgagaaggatcctgacggctatgcttttgagctcattcaaagaccttcaatccctgaac

SEQ ID NO: 224641 - DNA, 573 bp, Glycine max
  unsure (1)..(573): unsure at all n locations
gttcaccaagacacactgacgtacatgtttgattttgagctgtacgacttcgttgctgatccaaattttgatcagttcatcaatttgttccgaggagagaatgaagatgctaactgtgatcacttcggttctgaccttatcaatgattgttttgctaacaatcagcagcagctactttcatgtccagcaaacccttttgatcagaacaataataataatgctgtgaatgtctatgatccaagctccacatttagctccttctcttactatgatagggagctcaagggggaaggaggagaagaacttgatgaagaacattcttctgggacgatgacaacgacaactaacaatgctgttggcaaaccaaaagtaaaaactgatatgtccaagactctcatttctgagaggagaaggagaggccgaatgaaggagaagctttatgcattgcgttctttggttcccaacataactaagatggataaggcttctataattggagacgcagcatcatatgtgcatgaccttcaagctcgagctangaagcttgaggctgaggttgcaggacttgaagca

SEQ ID NO: 224642 - DNA, 562 bp, Glycine max
  unsure (1)..(562): unsure at all n locations
aaagcatgaggatggtattaatggcnttgntggctttcacgatgcttttatctaagggtgaaggccaattagtagagaatttctacagtttatcttgtccaaacgtggaatccatcgtgaaagaagcagtgactaacaagtttacacagaccattacaactggacaagcaactctgcgtctctttttccatgattgctttgttgagggttgtgatgcctcagtgataatctcgtcgccaaatggggacgcagagaaggatgcagaggagaatatttcactaccaggagatgggtttgacactgtcatcaaggcaaagcaagcagtggaatcttcatgtcctggagtggtttcatgtgcagacattttggcacttgctaccagagacgttataggcttgcttggaggtccttcattcaacgtagagcttggacgcaaagacgggcttatttccaaggcatcaagtgtagaaggaaaccttccgaaagcaaacttcaatttggaccaactcaacgcgcttttctcaaagcacggnctcagccaaacggacatgatagcgttatc

SEQ ID NO: 224643 - DNA, 494 bp, Glycine max
cagaaattaacccatatatttatatgaaaaaaaatttagtatatttcatgctaaaacttatttcttataggttaaagcaatatgattcaagaattgaatgtggtgcaatctgtccgaatctctccatcattcccagtcttgaccccaacccttgcaagcttcctgatggctgcgacaaaggcatcgttaaaatccgcaacgttgttggcgaacctaacaacagttggttgtgacgtggcatcctcgaacagaacctggtctgaggttagcaaccctttccccgacagcaggttttggtaatacaagttgtcgaaggccgcaggggattgtgggtccagggcaaccgctacagtggcgtcggggttcctagggcaccccgccattaggtcctgggcgtaactggggtccagagtggggtccaccgtgttggaggacgagaaggaatataaacggttcgcgaactggtcacagtgcgagaagcccactgtgtgggc

SEQ ID NO: 224644 - DNA, 595 bp, Glycine max
gtcgttaactctctccgatttgatttttattcgaattcgggatatgattcactcctgtctctctctctctctctctcgctttcgattccacgcctgaacaagtgaacatggaccctaatcacctcttcttcacgcattttcgcgatggtgctattgcctcacgcattgagggccaacacagaggagctcttccttctgttattgtgattggggctggaatatctggacttgcagcagcacgaagtctctatgatgcatcttttaaggcgactgtactggagtcacgagataggcttggtggtcgcattcatactgacttctcatttggctggacagttgacatgggagcctcatggctacatggagtttgtaatgagaatccattggctccattgatacgtggcctgaggctttcattatatcgtaccagtggtgacaactctgtcttatatgaccatgacttggaaaggtatatgcttcttaacatcgatgaggagcaagttccacaacaaatggtcattgaagttggagacaccttctagataattctggaagagacagggtaagtgagggatgagcataccgaggacatttc

SEQ ID NO: 224645 - DNA, 512 bp, Glycine max
aaagacgcaaagccataccaaaacattgtatattgattgcatgcattacatgtttattcaatttattttggccaaataggaatgagaaatccgtacacagaacatttaacaacatagcggggaggaacataatgtaattccaccagaagttgataatgctatgtcataatagctttattcagcaaacaacacgcaaaccactaaatacaattacaacgatgtttgaggatgttcataaatataaacgctaagtgtgacatacacatcataaaaatgttcaaggatagacctctatcagagatctaaaaccaaagatgggaaatattttgtagtgtttgaatcctgcctcgatgaaaagttgtttccattattttttccgttctctcttttgcattcttcgccaacataataatgtgcaaactaaactttgtttgtgtcatatccgggtcatctagcttttcatttattacggcatctatgataatcacttttgcactgttgcctttgcttga

SEQ ID NO: 224646 - DNA, 629 bp, Glycine max
  unsure (1)..(629): unsure at all n locations
gctttgtctctatgctgcagacttttgttattgcgaggagactttagcagagtttctttcaaaggccactggaactgctgtcgagtgggtccaaatgcctgggatgaagcctggtccggattccattggaatcgttgctatttctcacggttgccctggagtggctgcacgtgcttgcggccttgtgggtctagaacctaccagggttgccgaaatcctcaaagataggctctcatggtttcgtgattgccgaactgtggatgttctaaatgtgatgtccactggaaatggtggaactattgagctgctttacatgcagttgtatgcgccaacaactttggcacctggtcgtgacttctggttgctgcgttacacatcacttttggaggacggtagttttgtggtctgtgaaagatcacttaacaacactcagaatggtcctgctatgcccccagtgcagcattntgttagagcagacatgctgccaagcgggtatttgataagaccctgcgaaggagggggatccattattcatattgtcgatcatatggttctagagcccttgagtgtacctganagtttgcgcccactgtatgagtcatcaatgctgctagctcaaaggacaacta

SEQ ID NO: 224647 - DNA, 354 bp, Glycine max
gggtaataggggatttacaccttcatgaatagaaagaaccctggtttcaaccaaataactgaaggtgcatcacaaacccattaaagcaaagggttttagagataaaagtactgtaccgaccgccctttctaacatgtgctcttacagaaatggccaaagggtcacgacataaaaagaacgcataggggaaaaaagactaaggaaaacccgcagcggaaccgtctctcttgacagtgccctagcgtcccctccattagttaaatataccacctttattaccaagtaaaccggcctttcccgtcaagctttaaataaggggccccctttatggtttcaatttaatgcaaaaaagta

SEQ ID NO: 224648 - DNA, 570 bp, Glycine max
tgcaaatcgatcaaaacagaaacatatatttagagaacaccaaatcaaacgcaactcgagatattaataagcttcttcttcgtcagttattaccattcgtggaagagaaaaagaaaaaagtaactaaaaaaataaactgtaataaagagtccaaaatgaaagccaaaacggtgaaaggaaattggagcttgaggacgaacaagctcagcttcccttacgtcttcctcgtctgcatcttcttcttcctcgctggattcttcggtttcactctcttctctcactctcagggcgatggagatggcttgaggccgaggcagaggctgcttgaaccggggaacgaggcggagtacaatttgatgcctgttagagatcttggcgatgattccattacatcgattccttttcaggttttgagctggagacctcgagcactatattttcctaattttgcaactgcagaacaatgtgaaaacattattgatgtggcaaaggatggcctcaaaccatcaaccttggcgttacgccagggagaaacagaggagaataccaagggaattagaacaagctctg

SEQ ID NO: 224649 - DNA, 539 bp, Glycine max
gaagggtaatgactaatgtgggtctcaatttaatgggcagctagtagtgcgttcatgctatcaaattttgtactagtgttacataatttcagcatctaattgaatttagcccttgattattcatctgaccatataaaaataaactgtatggaagatgacgaccttgcttatgagacagaattgctacgatggatgtcggaattcgaatctcgattgcaggtgccaatcatctaatcatcctgttcttgatctcttatccactttgtagccacccacttttccccttttatcacggggcagctcccatggagtgatgtcggatcaattgtaccattagtgagcaatgaataaaatagaagaccatccccttggcgtggctttacttttaaaccaatgcagtcctcatacccatagttaccatccatgttcaagccattctcaaatggaaacatagttttcccacctttcttaacatcaggttaatttagcaaaaatgacgccatcctttggctcttttgtggaccatatttcacaggatt

SEQ ID NO: 224650 - DNA, 588 bp, Glycine max
gcacaccacacacccactcaaataatattatctgagatgaatcctgatcagtttcagaagaacagcatgttcgtagaaacccctgaagatggtggcaaaaacttcgacgatgatggacgagtcaaaagaactggtacatggataactgcgagtgcccatatcataacggcagtgataggttctggagtgttgtcacttgcatgggcaattgcacaaatgggttgggtggcaggccctgcggttctctttgccttctctttcatcacatacttcacctccactcttcttgccgactgttatcgttcacctgaccctgttcatggcaagcgaaactacacctattcagatgttgtcagatccgtgttaggaggtaggaaatttcagctgtgtggattagctcagtacataaatcttgtcggtgtaactatcggttacacgataacggcttcaattagtatggtggcggtgaagaggtccaactgttttcacaaacatggtcatcatgataagtgctacacgtcaaacaaccctttcatgatcctctttgcctgcattcaaatcgtgcttagtcaaataccaaatttccat

SEQ ID NO: 224651 - DNA, 517 bp, Glycine max
aatcttagaattgttcttgacattttatacaatgcagctgagtgctatattctttctttaataagcacttgataacaatacattatccatgaacatgctgaaacttattaaaacaaagtgacttagggaagaaagcaatttagaacactttggaacaaatttaattattgctgggctttgaagggctgatatttcttgagatcttgagcgaggccttggatggagccagcagctgagataatagaaacgatcaagcaagcccagctcaatatcttgagccatgtccaagtgaaggaaaacttttgcatctttgactgcttaatggacatctctatggggaagtaaaccgttaatggccaaaatgacagtgaaccaatcaggcctaggaagtcattgaagaatggaaacatcatatctatcaaagcagtgatgatgacataatgtggtctccataccaccctgaaaaagttcacagggaaggttccaaatagtggaaactttaaagcgtgttctccat

SEQ ID NO: 224652 - DNA, 597 bp, Glycine max
tctgcatcattgaagcaatacttgaaattcatcaaagcagaggaaagaaacataaacaaaggtgcattgcaaattaatcacggagatgggtggaagaaagtggagcatcttggtggccatcttcatcttacttcttgctatggaagctgtcattgctcaaggtcaaggaaatggaaatggtaatggtaatggtaatggtaatggcaaggataaggataaggaagagaaggagagggagaagagggagaagaaggagaaaaaggaaaaggaaaaggagaagaaggaaaaagagaaaaaggacaaaaagcaacgtgatgaagccacaaattatgacaagctgtcatctctgccaaccggccaagaaagagggttctgccgaacaaacactacctgtgagtttaagaccatcgtgtgtccatccgagtgcgcatccagaaagcccaagaagaacaagaagcagaaggcatgtttcattgactgcagcagcagcacatgtgaagccacttgcaaggttagaaaagccaactgtgatggatatggtgctttgtgttatgatcctcgttttgttggtggcgatggtgtgatgttctacttcca

SEQ ID NO: 224653 - DNA, 528 bp, Glycine max
  unsure (1)..(528): unsure at all n locations
cacagtttcggaggagaagaaaatagtttttcgagatggcccgtacgaagcaaactgctcgtaagtccacaggaggaaaggctcctaggaagcagcttgcaaccaaggctgcacgtaagtctgcaccaactactggtggtgtgaagaagccacatcgttaccgtcctggtaccgttgctcttcgtgagattaggaaataccagaagagtaccgagcttttgatcaggaagctccccttccagaggctggttcgtgaaattgctcaggacttcaagactgatctgcgtttccagagccacgccgtgcttgcattgcaagaagctgctgaggcataccttgttgggctctttgaggacactaacctgtgtgccattcacgctaagcgggtaaccattatgcccaaggatatccagctggcaagaaggattcgcggtgaacgtgcttgangtggtggttgtgaaaatgaagatgaaaatgggttgctgcgggtggtggtttttgttgtcagattccttttttttttttttt

SEQ ID NO: 224654 - DNA, 558 bp, Glycine max
aattaatgcccctttcattttctctgcttctgtagtatctatcaccaatcaattccactgttcttcccatcaaacaacaaaaaatcaatctgggaaacaaaaacaaaatgccggcattagaggaggaactcttcccatcaaccccaggaaagttcaagatcgagcggtcccaccacatgaaccgccaactctatcgctgtttcgcctccaccagcaccatgttcctgtgggccctcttcttaatcgccctcaccgcttcctatctcagcttccaaggcttcgtcgattccggcagccgctacctcaccgactcctggggcgggatccagtgggagaagcaagtccgcacctacgtccatatccaccgtcaaggcggcatgtccgtcctcgtcaccggcgcagacggcttcgtcggctcccacgtctacctcgccttaaaacgacgcggagacggcgtcgtcggactcgacaacttcaacgactactacgatccgtccatataaaaagcccgaagtgctgctcgcccgcacgacgtcttatcgtcgatgcgatgtaacg

SEQ ID NO: 224655 - DNA, 560 bp, Glycine max
cccacccttaagcctctctctctctctttcttgctctctctctctctattctattgcttgcttttttccgctattttctggaacaaatggctggagtgacaaaggaggaagagaggggtagtcctagttgggctgcttcattttttacgcagacaacagaggatgtggctagagctgttgccactgctatgaattctcagaggccatctgtggtatattcattgaaaaatgatcatggtggcagccaacttcaaaggctgcagtatcaagttacgaaaatgataaaaggattttctagccctccagaagttaaatatacaaattacaatccggaaatcttgacaactcagaagcgtcaatgggctgcaaactttcagttgcagtacacggaccataagtcttggaaggagccaacaaagctgtttgaaagcatggtggttgctggacttcatcctaattgtgatattcaggcactgcacaggcaatgttcttaagaaagtctgaaggccctgtaaaatgagaagtgcactctgttatcagaatcagtcccgtgtggaagt

SEQ ID NO: 224656 - DNA, 486 bp, Glycine max
cggaatcagctagaattttctaatatcgtccaatgacgacgagcaggttacagagcagggtgaatacttcgcgaaggattaccatgacccacctgcggcgccgttgatcgacccagatgagcttactaagtggtacttgcacagagacgacatagctgagttcatagcatcactcttttggctttacataacggtgttgatcattattggctacacgagactgagtgacaccaatatccccggtaacaccgaatgcgacggctttggcattaagggcatcgattgattcatctgcggcatgatcgtcattcttgtctactgtaccgccggcatgtctggctgacacataaaccctgcggtgacattacccttgcttctgggacgcaaggtgaccttgttgaggaagttgatgcatatgatagcgcagtgcgtctgagcactgtgcattgctcgattgtgatagagactccagatgttgtgctacta

SEQ ID NO: 224657 - DNA, 539 bp, Glycine max
aggcctgtctctattgcaatcagagacaattaagggtttatcctagagcctaagaccctttgcccctccccaatcgttctcccgatttaatgtttttctaaaagatcttttatactgggtccgatttcaaagttcgtactatacatatgacccgcattgaggaaaagaattgcgatagctaaacgatgatgtgccatatcggttagccataaactttgcgtttgtggatggaatcccccaagaagggttagaatggcagttccggatccttgggaggtaccaaataaatgactactcgagtcggggttttgagcataaagattccactgaccctgaaaaagtgggcctaacccttggggatgcggtaatacatttaagaaattattccatctgaacatattcctccctggatgcaggaatagctacctggactaattgacctgttcaagcaaatgagcttaccccgaatagtcctgacaaatgatgattcagacaagaatcatctttttttgaaccaccaaactcttggtttccatttt

SEQ ID NO: 224658 - DNA, 436 bp, Glycine max
aaaaaaaaaaaaaaaaaaaaaaaaaataataataaaaaacaaaaaataaaaaaaaaataaggggaattttaaaaaaataaaaaatgtatatacccatgctagacgcttatgcctaatgtgctttacaaatcgggggtttttggcatgaacattaatgcctgcaagggctggtatgattgtcttaagtccaacctggggtcgaaaggaaccatctaaatgctcgttggtggtgctgttgatattaagcttaccattagatggtaattctgtgttgaaagagatgcgttccctatacccgactgcttattatggatgctatatcggctttggcgcaggatgatgctcggggtgttttcaccactactactgtgatcttcattgtcgatcttttgatacaatcatacccgttcattggtgaatgtttgctttctcctct

SEQ ID NO: 224659 - DNA, 590 bp, Glycine max
  unsure (1)..(590): unsure at all n locations
ggagtctccaaaatttcccatttcattgttcaccttaccctaatcacgcatccgattcctccggcggatcgccaccgtcgccggcaataaaccagccgtgccactccctcgccggcgattaaccaagactaagaaaaagtagagcgagaaccagcgaagactcttagcttcactttcttcagctcgcagtttcaatcacttgcccaatcgaatctaacggagtcctggaaacagtggcaacggctttcgctccatcggtgttatggagatatcattgttaaaaatgattgtaaatggcatatcctcatttttgcatttatctttttctggaaacatgaactctgcacctgtcccaaagtattaccagaaggcagaggagatacttaagttattgaagccaatcattgatgcaattgtttattctgagttagcttctgatgaagttcttaataagatattggaagaaattgatcttgctgttaatgaattaaaggagcatgttgagaactggcacctattgtctagcaaagtatactntgttatgcaagttgaacccctgatatcaagaattcgcacttcagggctcaata

SEQ ID NO: 224660 - DNA, 545 bp, Glycine max
  unsure (1)..(545): unsure at all n locations
ccaaccttcaacgtctcttcactctcnttcntttttccctaattgcaccctctttggctcgagcaatccttcagacccagagccctcgttgtcccagttaaaaaagacgcttccaccctgcaatatattactcaaatcaaacaaagaacaccactcgtcccagaaaacctagtacttgacatcggtggccaattcctgtgggtcgattgcgacaacaactacggctcctgcacttaccgccccgcacggtgtggctccgcccagtgctccctcgccagatccgacagctgcggaaactgcttctacggcccaaaacccggctgcaacaacaacacgtgcggcgtcacgccagacaacaccgtcaccggcaccgccaccagcggcgagctcgcgcaagacgtcgtctccctgcaatccaccaacggtttgaaccctatacaaaacgccaccgtttcgagcttattattgtcctgcgctccaacctgcttactccaaggccttgccaccggtgtcagcggcatggccggtctcggcagaactagaat

SEQ ID NO: 224661 - DNA, 535 bp, Glycine max
  unsure (1)..(535): unsure at all n locations
ggtcattatgcaagagaatgcccgattttttaatttgccacaactgtggcctccctgggcacattgcttctgaatgtaccacaaagtcgctgtgctggaactgtaaagaacctggccacatggccagcagttgtccaaatgagggcatttgccacacctgtggtaaagctggacaccgtgctagggaatgctcagcccctccaatgcctccaggggacttgaggttgtgcaacaactgttataagcaggggcacattgccgcggaatgtacgaatgagaaggcttgcaacaactgtaggaagacaggccacttggcacgtgattgtcctaacgatccaatttgtaatttgtgcaatgtttctgggcatgtggctagacagtgtccgaaagccaatgttcttggagaccgcaatggtggcggtggtggcggcggcggtgctcgtggtggcggcggcggtggctaccgagatgttgtttgcaggaactgccagcaattatgtcacatgagtanggattgcatgggccccttgatgat

SEQ ID NO: 224662 - DNA, 523 bp, Glycine max
  unsure (1)..(523): unsure at all n locations
cttgcttttgtttcttctcttctcattttctaacacggtgtgtgtccttcatcctggattagagccacaaacataacacattccgctttgactttggaggctaagggcctaaggcaggttcccaatcactgtgatatcatggaatccccacaatccgttgtgtcaccattcaagagctctgtcttgggtgaagctgagaagtataggtctgatgttttcacacaaagctcgggtcctttgtctaaggacattgaagtcaatggaaaggaagctgccgtggttaatccagaggaatccatcggtgttgttgatgtttacattcatcaggctagggacattcataacatctgcatataccacaagcaagatgtttatgctaagatttgcttgactagtaatcctgagaattctgtctctacaagactcaatgngaggaggaagggaccccgtgtttaatgagaatcttcgtctaagtgttaggactgttgattctgctgtcaaatgtgaaaattggatgctgagc

SEQ ID NO: 224663 - DNA, 643 bp, Glycine max
  unsure (1)..(643): unsure at all n locations
ctcctctcctccatcacctctagtttttgtataacccccgtcactctgctcccttaattaattagccaccatgctctccgccctcactccttccgaccccttctctcccttctcccccttctccgccggcttcacgccgtgggatgacaacgacgattcccacgccctcttctcccccaaaccggtctctgcttctagctccgcctctgactataaatccgaaccgaacccaaccgaacacgtatgcgcctcgtcctcggtgatgatggacgagcggaaacggcgccgcatgatatcgaaccgggaatcggcccgcaggtccaggatgcggaaacagagacacctggagaatcttcggaaccagttgaacaagtgcagggtcgaaaaccgggaactcggtaaccggttgcagttcttcctgcaccacctgaaccgcctccgaaccgaaaacgaatggctccgctccgagcgaaccctgctacgccaaanagtcgccattntaacacanatnttgatttttcaaccaattcaaaccaccttctccctgctgcatgaccacatgcaccaacaacaacacacctngctcatgacaaataatccagtantantaaanananattatatatatatatatattatatat

SEQ ID NO: 224664 - DNA, 553 bp, Glycine max
cagtcaatcaagtcggtcacatgcttgattcacaatcactatggagcaaaagaatggtgatgatgtcttgtgtgcaaaactacatttggtcgaccttgctggttctgagcgtgcaaaaagaaccggtgcagatggcatgcgtttaaaagaaggcattcatatcaataagggtttattagctcttgggaatgttataagtgcactgggagatgaaagaaagcgaaaagaaggtggccatgtgccatatcgcgatagcaaattaacaaggctactacaggattctcttggaggaaacagcacaaccgtcatgatagcatgtgttagtactgctgacaccaatgctgaagagacattgaacactctgaagtatgctaaccgtgctcgtaacattcaaaacaaagcagttatcaatcgtgatccagtgggagctcagatgcagagaatgcgaagtcagattgagcaattgcagtctgagcttctattatacagaggtgatgctggtgaggcatctgaggaacttcagattcttaacacataatatccttacttgaac

SEQ ID NO: 224665 - DNA, 549 bp, Glycine max
  unsure (1)..(549): unsure at all n locations
tccatttccatttcctctctctcaganttcaagaatcttaagctatgggaaagtcttacggaaccgtgagcgctgattaccagaaggccgccgagaaggcgaagaagaagctcagaggcttcatcgctgagaagagatgcgctcctctaatgctccgtttggcatggcactctgctggaacttacgacgtgagctcgaagaccggtggtcccttcggaaccataaagcaccctttcgaactcgctcacggcgctaacaacggtcttgacatcgctgttaggcttttggagccactcaaagcggagtttcctattttgagctacgccgatttctaccagttggctggcgttgttgccgttgaggtcaccggtggacctgaagttcccttacatcctggaagagaggacaaacctgtgccaccaccagagggtcgcttgcccgatgccactaagggttctgaccatttgagagatgtgtttggcatagctatggcgcttagtgaccgagatatcgttgctctgtctggaggtcacactattggagctgcgc

SEQ ID NO: 224666 - DNA, 544 bp, Glycine max
gcaaattaatcaaacatggctagggtcttcgctttgtttcactctttgctcttgatttcttcccttgtattggcttctcaaatccatgtctcctctgggaaactagtccctggactatcatggaattactatttgttgacatgtcccaagcttgagaggattataaggaagcatcttgaggatgtcttcgagaaggacagtggagtcgctcctggcatacttcgactcttcttccatgactgctttcctaatggatgcgaagcgtctatattgttgaatggagacggtgacgagaagcaacaccgtgctaactttggtttaaggcaagaggccattgacgccattgaaaaccttcggcttctcatttacaagcagcgtctaccagctgtctgatgctcagacatacttgctatcgcatcacgtgaagctgttcgccaattaggaggccctgattttgacgtgccactgtgaagataagacggtctatgaccatacgccaccgttgccgacaacctaccggcaccattcttccgaaccgacgatc

SEQ ID NO: 224667 - DNA, 557 bp, Glycine max
agaaaaaagtttcatagtttattgcattttaaataagttgcaactgaattataacatgagcatcacaataatatatgttcatataccactttacacaagatttgtaatcaaactaaacattatgcaaactgacgttaaataaataataaaaaatgcattcatttattactagctagagtggaacaatgtggtgttgcctatggatttcaggatcagctgctcaatcaaagagatcattcttatttggaagcattgaaatgctaatcaagctggtacctggtaattctgccggaacagttacagcctactatgtaagttcaccggatctaagagatctcaaagacaccaaaacacgcacttttgaacaaccaaatctatcaaactcccattactaaatgaagtgtccatgtttttcactcaaaatccatacagttatcctctgcaggaagccaacatgacgagatagattttgagttcttaggcaacagtacaggacagccatacactgtccacactaacatatacacacaaggaaaaggaagccgagagcaacaatt

SEQ ID NO: 224668 - DNA, 545 bp, Glycine max
atcggaccttaaaataagagaaagagattttcgaagaagttgttgtgtcttaagaaagagagagatggcggcggagataccgtgctgtggaacaaagttttcactgtacgttttggtgatcataggtttggtctgcttcgcgggactaatggctggtctcactctcggactcatgtctttgggactcgtcgacctcgaagttctcatcaaatctggtcgtcctcaggatcgcatccacgcttcgaaaatttatccggttgttaagaatcagcatcttctgctttgcacgcttttaattggaaactccttagccatggaggctcttcccatttttcttgattcactggtgcatcccgctgcggcaatcttgatttcggtcacgctcatcctcatgtttggagagatattgccccaagcaatttgtacaagatatggattgacggttggagccacgctggctccacttgttcgggttcttctatagttttcttcccgctttttatcctatcagcaaggttcttgattggatgttgggtaaagacatg

SEQ ID NO: 224669 - DNA, 583 bp, Glycine max
gtccttcttacttagtagacattctcatgccatgacttgtaaacttgtgatctacttcactttcttcttctgcttgctttttaccttggttccttatgttcatatgtatccctcgtacccctatagtggaaattaccagcttgacctcaatttctatgatagatcatgcccaaatttgcaaaggattgttggatatggtgtttggttagccttaaaaaatgacaacagaatggccgcgtccctccttcggttgcactttcacgattgcatagtaaatggctgtgatgcttctgtacttcttgatgatacaccatattttacgggcgaaaagaatgctcttcctaatcgcaattcacttcgggggtttgaagtcattgatgacataaaagaacatcttgaaaggatatgtccatcaacagtttcctgcgctgatatattagccttagcagctagggaagctattgatcagattggagggccttcttggcaagttcaattaggcccgagagatgcaacaacaacaagtaaggaagcagctgagcaacaaattccctcaccaattgagcctctagaaaacattact

SEQ ID NO: 224670 - DNA, 582 bp, Glycine max
aggagatagtgaaagagcttcttccttttattcgagtgtacaaggatggcagcgtggagcgtcttctaagctctgaaaacgtggcagcctcccctgaagatccccaaactggagtctcatccaaagacatagtcatcgcagacaacccctacgtctccgctcgcattttccttcccaaatcccaccacactaacaacaaactccccatcttcctctacttccacggtggcgccttttgcgtcgaatccgccttctcctttttcgtccaccgctatctcaacatcttggcctcagaagccaacataatagccatctccgtcgacttcagactcctcccacaccaccctatccctgctgcctacgaagacggttggaccaccctcaaatggattgcttcccacgccaacaacaccaacaccaccaacccggagccatggctactcaaccacgccgacttcaccaaagtctacgtaggaggtgaaaccagcggtgctaacatcgcacacaacctgcttttgcgtgcaggtaacgaatccctccccggggatctgaaaatattgggtggattactatgctgcccct

SEQ ID NO: 224671 - DNA, 602 bp, Glycine max
  unsure (1)..(602): unsure at all n locations
atttccagaattagtagcactagtgcttttttttgtttcgaaaaaaatggttcaacaggaagtgcgtaaaggtccttggacagaacaggaagacttcaaattggtgtcctttgttggattgtttggagaccgtagatgggactttatagctaaggtatcaggtttgaaggtggcgggagaaagtaaaataggcattagacaaaaaaaatcaaatgcttatttgggcatcatgctacaaaaaaatatagattatggaagaagaagcctttaaccacctcattttgttgtaggtttgaatagaacaggtaagagttgcagattaaggtgggttaattacctacatcctggcctcaagcgtggaaagatgaccccgcaggaagaacgccttgtcttggaacttcactcaaaatggggaaataggtggtcaagaattgctcgcaagttaccagggcgcactgacaatgagatcaagaattactggaggactctgatgaggaaaaaggctcangagaaaaagcgaggagaagctgcatcgtcatcaccaacaccctttagcgttgattcctcaatatcctcaaacaaccatgcagtggatccacatg

SEQ ID NO: 224672 - DNA, 544 bp, Glycine max
ctttcctttgacgcttctgacactgcttcttttctttctctccgtgtcctaatggctctccccgactcttcttcctgccgcaactccctgatcccctccttcatctactcctcttcctccaaaacgctccctctacaccacatgctcaactccgcctccgccgccgccccctcccagccgccggaaaacctccacgccggatcgcgcggcctcatgattccctctcccagcgagtcacgcaagatcgagatgtactcccctgccttctacgccgcctgcaccgccggtggaatcctcagctgtggcctcactcacatggccgtcactcctcttgacctagtcaagtgtaatatgcagattgatcctgctaagtacaagagcatctcttctgggtttggagttttgcttaaggagcagggattcaggggccttttccgtggctgggtgcctaccttgcttggttacagtgcccagggtgcttgcaaatttggcttctatgagttcttaagaagtactattctgatattgctggcccagagtatgc

SEQ ID NO: 224673 - DNA, 293 bp, Glycine max
ccaaaaaaaataatcaagtaaagggagtaaaaattattttattctaaacatttgcaaatgcgtctgtgcttatgcccacacaaaaaaacaaatgatttttcccgtttgacaatggcatgtaaagaacctatcatgcaaaattatttcattcctacctacaaagttttcagcaagaggaggattcgagcaaaaccatcctcctaaaaattcaaaatcctcaaatttaaaaaaaatggaaacacgatgtctgaactctaaaagaatattttatccaaccaagctcgagttccact

SEQ ID NO: 224674 - DNA, 599 bp, Glycine max
gttttcattttctaatctctctctccctcatctttcacactctgtttttcctctcccttgctcatccttctcaacacaaaatacaccctcctacatggcgactgaagctgagttcgaatatgaagaggcgagtgaagctgagatcaaatatgatgaggaatacgtacagaattctcgaggcttgaagctttttgcatgccgatggcttccggcgaatggaagtccaaaagcgttaatcttcctgtgccatggctacgccatggaatgcagcatcacaatgaaaagcacaggaacaaggctcgcaaaagcgggttttgcagtgtatgggattgattatgaagggcatggaaaatcagaaggggttcctggccttgctatgaattttgattttgtcatcgacgattgctcccaacatttcactagaatttgtgaaaaagcagagaacaagaaaaagatgaggtacttgatgggggaatccatgggaggagctgtggctttacttttgcataggaaaaagccagaatactgggatggggcaattttggtcgcacccatgtgcaagattgcagaagaaatgacacccaacacaatggtgatta

SEQ ID NO: 224675 - DNA, 625 bp, Glycine max
ccgaatatcgccaacatggttccactatatgacaagaccaagtattcaggaaccggggcggccattgaatatgcagtcttacatttaaaggtggagaatattgtggtcattgggcacagctgctgtggaggtataaagggcctaatgtctatcccagatgatgggaccactgcaagtgaattcatagagcactgggtccaaatttgcactccagcaaagtccaaggttaaaacagaagcaaacacattagaattctctgagcaatgtaccagctgcgagaaggaagctgtgaatgtatcacttgggaacctattgacatatcgatttgtgagagatgcagttgtgaagaaaactcttgccttgaaaggtgcacattacaatttcgttaagggcacatttgagctgtgggatctggacttgaaaatctctaactctgtatccgtttaagaaagtgttcttaaccctgcgctggtgtgcgtgatgatgtacatgacctagcttccctttgcaagtgtgtcacaattgtataagacccccccttcccctagttgtttccttaaatcccaagaaaataaacgacactaactaaaatatggtctagtctgtaccactcatgagtatgttt

SEQ ID NO: 224676 - DNA, 557 bp, Glycine max
gagacaaaaaacacatttaagtcatatattaataaatttattcacagtgcattccagctccaagaaattttaggagcatttaggaaaaacgatttaaaacatcttgtactaaatgcattgctcaagttcgatgactagatcagtactattaaagtttgccgaaagaaaaccactatgtaacagaaaacgatacaaaaacataactcattgagttggtacaagactaagaccattattttagcttagtgttcgtttatttttcttgggatttaagggaaacaactaggggaagggggggtcttatacaattgtgacacacttgcaaagggaagctaggtcatgtacatcatcacgcacaccagcgcagggttaagaacacttttttaaacggttacagagtttgagattttcaagttcagatcccacagctaaaatgtgcccttaacgaaattgtgatgtgcacctttcaaggcaagagtttttttcacaactggctctttcacaaatcgatatgtcaataggtttccaagtgatacattcacagtttccttttcgca

SEQ ID NO: 224677 - DNA, 603 bp, Glycine max
attccattctctctgtgtatttccctacttttcccttcaagatgcagatcttcgtcaagaccctcaccggcaagaccatcacccttgaggtggaaagctctgacaccatcgacaacgtcaaggccaagatccaggacaaggaaggaatccccccggaccagcaacgtctcattttcgccggaaagcaacttgaggacggccgtacccttgctgactacaacattcagaaggagagtactcttcacctcgtcctccgtctccgtggtggcatgcagatcttcgttaagacactcaccggcaagaccataaccctagaggttgaaagctccgacaccatcgataacgtcaaggccaagatccaggacaaggagggtatccccccggaccagcaacgtctcatcttcgccggaaagcagctcgaggacggccgcaccctcgccgactacaacatccagaaggaatcaacccttcacctcgtcctccgtctccgtggtggcatgcagatcttcgttaagaccctcaccggcaagactattaccctagaagtcgaaagctccgacaccatcgacaacgtcaaggctaagattcaggacaaggagggaa

SEQ ID NO: 224678 - DNA, 496 bp, Glycine max
aaaacaacacgatatgacaattaatcatttcatatgtcacacattcataacaaacgtaggggggatattagagttctattattaatgggacacaattgagttcaacacaaaccgaacttattttcaagggacattattacagacccattaaacatcaaagttcttcaaatgttttgggaacacatccaacattacacaacgagcttaaaaccccccacggagacggaggacaaggtgaagggttgattccttctggatgttgtagtcagcgagggtccttccatcctcgagctgtttgccagcaaaaatcagcctttgctggtccggcgggatgccttccttgtcctgaatcttggccttcacattgtcaatggggtcagagctctccacctcgagggtaatagtcttacccgttagagtcttcacgaatatttgcataccaccacgaagacgcaacaccaagtggagagttgacttcttctggatgttgtagtca

SEQ ID NO: 224679 - DNA, 399 bp, Glycine max
ctgggttatagatctttgcgaaggaggatatctgcgctcaaccaaagatgcagaacgaggagggacagatcactgaactttacattgctaggcagtgctccgacacaaacagatggattaccgataatgaccatgcttcgggtcagatcaacattgggcatgtcgatgacaaaggcgtttacaacggccatttctccacttttgccctctgtggattcatccgtgctcatggagatgctgacagtgctctagaccgattgtggcaaatgaggaaagttgaagttaaacaacagtggacacccatgagagtatgatgcgtggttatgtattaattactactcttgcgagacatcccagagcactatgaatgtcgttccgggccacatcttcttttggaat

SEQ ID NO: 224680 - DNA, 330 bp, Glycine max
cagaatgagtatttgctcaaaacgacaatcatagtactcaaatatctctagcaagagtagaaattaatacataacgacgtaacaaactatcatgggtgtctactgttgcttaacttcaacttttttcttttgccacaagcggtctaaagcactgtcagcatcaccctgagcacggatgaatccgcagagggcaaaagtggagaaatggccattgtagacgccattctcatccacatgcccaatgttgatctgaaccgaagcatggtccttagcggtaatcaatctgtttgtggcggagcacttcctaggaatgtaaagctcagcgatctg

SEQ ID NO: 224681 - DNA, 569 bp, Glycine max
  unsure (1)..(569): unsure at all n locations
ctcaaaaagttgcaagagtttatgcaaaaaccaaagtgagagagaaaatgatgaagccatcgatgctcagatctcttcactctgccgccacccgcggcgcctcccacctctcccgccgtggctacgcctccgagccggtgccggagcgcaaggtggccgttctaggtgccgccggcgggatcgggcaacccctctcccttctcatgaagctcaaccccctcgtttccagcctctccctctacgatatcgccggaactcccggtgtcgccgccgatgtcagccacatcaacaccggatctgaggtagtggggtaccaaggtgacgaagagctcggaaaagctttggagggtgcagatgttgttataattcctgctggtgtgcccagaaagcctggaatgactcgtgatgatctttttaacatcaatgctggcattgttaagacactgtgtactgctattgctaagtactgccctcatgcccttgttaacatgataagcactcctgtgaactccactgttcctattgctgctgaagttntcaagaaggcaggaacgtatgatgagaagaga

SEQ ID NO: 224682 - DNA, 352 bp, Glycine max
tttcttttttttttttttttttttttttttttttttttttttttttattttttaaaggggccaacaccctgcaattacatttcgtgaaaccctacacagttaaaagggaccttttttaatggattgggcaaaacctaaacccggttttaaaatcgttgaatttttttaacaacaaaaagccttcaaacttaaattattaaattatgggggttccctactttaaataaaaaaacaaagtctccacaccactggcgggaacaatacaacaatggttttgagattgcaaaaattgatttggtttttggaggaataacattaacattagcctaccaaacacgtttgtgaaaacatg

SEQ ID NO: 224683 - DNA, 547 bp, Glycine max
  unsure (1)..(547): unsure at all n locations
cgcatgcccttcgatctagtgaatacctttatcgcaatgcccagtattactggattcaagaggacatgggtcttaaaaaagttcttatctatgaatttagccggttgaatatggtctacactcttctgagcaaacgaaagcttttgtggtttgtacaaaatgggaaagttgatggatgggatgatgcacgatttcctacagtgcaaggaattgtgcgtagaggtttgaaaattgaagccctgatacagtttattgttgagcagggggcgtccaaaaatctcaatctcatggaatgggacaagctctggaccattaataagaagattattgaccctgtctgtcctagacacactgctgtcattgcagacagacgtgttttgttgactctcactgatggtcctgagaaaccatttgtccgcatcatacctcggcacaagaaatatgaagctgctggagataaagctacaacatatactaaaaggatatggcttgaccttgctgatgcagtgtctntatcagcaggcgaggaagtaacattgatggattg

SEQ ID NO: 224684 - DNA, 320 bp, Glycine max
aaaaataacaaagacgaattttccaattactagtaaaaaatccagatataatggtttgcatataaacagtacaatgtgatggtaaacataaaagtagttccacaaacttgttatcaccattaccaactattctgagtgtgaatgtggcccaaacagtttcaagaccaaaaggattacttcaaacttgtctgttgcctgccatcagggattgcatatagcacgattggttgtgaggggcgaatgaagggtaaatcacacctgaaatatccctttctctccagttgcaatacatctccacgctgaagatttcgcatgttggg

SEQ ID NO: 224685 - DNA, 559 bp, Glycine max
  unsure (1)..(559): unsure at all n locations
gccccactcaaccaccacacctctcctttttcacgctacccctttctgctcttcttctacctttcaagttttaaaagtataaagatggcagagacattcctatttacctcagagtcggtgaacgagggacaccctgacaagctctgcgaccaaatctccgatgctgtcctcgacgcttgcctcgagcaggacccagacagcaaagttgcctgcgaaacatgcaccaaaaccaacttggtcatggtcttcggagaaatcacgaccaaggccaacgttgactacgagaagatagtgcgtgacacctgcaggaacatcggcttcgtctcaaatgatgtgggactggatgccgacaactgcaaggtcctcgtcaacattgagcagcagagccctgatattgctcagggtgtacacggccaccttaccaaaaaacctgaagaaattgtggctggtgaccagggtcacatgtttggctatgccactgatgaaacccctgattgatgccattgagccatgttcttgcaacanaactcggtgctcgtctcaccgaggttcgcaagac

SEQ ID NO: 224686 - DNA, 595 bp, Glycine max
ggttcacagagctggatgtcaatggtgtgtaatgagcctacatattcggatcttctttcaggctttggggccagtggggatccttctcatttatccttgaaggatcaaatgagccctgcttattctgctagaaagcaatcattggatcatgaaggcaaacttcacatgcctcatccatggcctgtaatgccctctagtctgtcactgagcatcttggactctaatacaaaaggtcctgcacatggtggtgatacaacttacaaagctcgagggaatttgaggtacagtgcatttggtgaataccctgcactccatggtcataaagttgagcattcacatggaaacttgatgccacccccacctgcactcctaactcaatatcagagtccttgttcaagagagcttatgtcaaaacaagtgtcagcaaaaacttgtgaggctgtgaaaccaaaagatggtgactgtaagctatttggcttctcacttatcagtggccctactttaccagagccttctttatcacaaagaaatgtgagtgaggctgctgatcagatgcatcttacagcacacccacaaagaacatctgaaaatgatg

SEQ ID NO: 224687 - DNA, 354 bp, Glycine max
  unsure (1)..(354): unsure at all n locations
ccccaaccgaattagaacgactctacgctcnatatcctaacaagaggaaagaatgaacggggctattttaagagggtaaagcgaagtgagccccacgattttaatagaacacgatcttggactttttttagtaagcaggcttaatgtaccagagactgctaatgataatttcacttttgtggacgaaaactccttatggtcaccttcaaaaccagtcaaccaacgtgatgctgatctcatccatttttgggataagttccgcaaagcttgtgaaggctctgtcaagaaaaatgcaggtcagaaacaagttttggaagcaatgtctcatagaaacggcaacacataccatacctt

SEQ ID NO: 224688 - DNA, 603 bp, Glycine max
ggaaaaaccccagtttctctctttcactttttccgttcaagttctaaccaagcactcacagtacttttgcttctctcgaagatgtctctacgagtgctgaaccctaacgccgaagtgctgaacaaatcggcggcacttcacatgaacatcaatgccgccaagggtttgcaagatgtcctcaaaaccaacctcggtcccaaaggaaccatcaaaatgctcgttggtggtgctggtgatatcaagcttaccaaagatggcaacactctcttgaaagagatgcaaatccaaaacccgacggcgattatgattgctagaacggctgtggcgcaggatgatgctagtggtgatggcaccacttctactgtcatcttcattggcgagcttatgaaacaatcggagcgttacattgatgaaggtatgcatcctcgtgtgttggttgatggttttgatattgcaaagcgagcaactctgcaattccttgaaaagtttaagactcctgttgtgatgggtggtgagcctgataaagagattctcaagatggtagcaagaacaaccgtcccgactaagttgtacgaatcacttgcagatcaattgacagatata

SEQ ID NO: 224689 - DNA, 195 bp, Glycine max
  unsure (1)..(195): unsure at all n locations
atgagagtccctagcgttcctctgnatgatcacttcccattgggtttgccgtcttcagtggttcacttggctacaatccctgtcactggaaccggcattaaccctgcaaggagtttcggaccagctgtgatcttcaacaacgacaaagcctgggacgaccaatggatttactgggttggaccgtttgttggagct

SEQ ID NO: 224690 - DNA, 195 bp, Glycine max
agctccaacaaacggtccaacccagtaaattcattgttcgtcccaggctttgtcgatgttgaagatcacagctggtccgaaacttcttgcagggttaatgccggttccagtgacagggattgttctcaagtgaaccatgaagacggcaaacccaatgggaagtggtgctaacagaggaacgctagggactctcat

SEQ ID NO: 224691 - DNA, 397 bp, Glycine max
  unsure (1)..(397): unsure at all n locations
ggagggtgtaggtttggttgatttgnatgntgtgcatccatcgttaagctagtggcgaggggatccagctacagcatagagatcaaggaccgaaggaaggaagatgttgggtgttataaggcacaagagtattcgccctgccttctccgcaatcagacacttgtcttctgcagctaaagagattactgtcagggaggctctgaactccgcactcgatgaggaaatgtcagctgatcctaaagtgttcttgatgggtgaagaggttggggaatatcagggtgcatacaagatatccaaggggctgctcgacaagtatggccccgagagggttctcgatactccaatcactgaggctgggtttactgggattggagttggcgctgcttactatggtcta

SEQ ID NO: 224692 - DNA, 554 bp, Glycine max
  unsure (1)..(554): unsure at all n locations
cggctcgagctttaccttcttcttaatataacaagctaaaagcgcttctaacttaagtgatggctaacgctgctgaagtttcagcgttgaaacgcatcaagttgcatcttttgggtgaactctctccactggccactccccaaaacaaatttgaccaaacaaaccctagcccctctgaatcttccaattccgaatcttcttctatttctcttaaccactacttcactgacctcctcgaacccgaaattgaatttcctctcttcgaattcgattccaaaccccaagtaatcgacctcgaaaccccgaaaaccctaatttcagctgagaagaagcctcaatttaatcggaaaccgtcgctgctaatcgctgttccgaagaagaccgagtggatcccaattcgaaaccctgaggtggcggcgccggagaaccagcctgagaagaagcactacagaggtgtccgtcagcggccgtggggcaagttcgccgncgagatccgcgacccgaacaagcgcgggtctagggtttgggctcgaacttcgacaccgccatcgaag

SEQ ID NO: 224693 - DNA, 569 bp, Glycine max
gttcgtgcctagggcggtgctcatggttctggagccagggaccatggacagcgtcagatctggtccctacggtcagattttccggccagataacttcgtctttggacagtccggcgccggaaacaactgggccaaaggtcactacaccgaaggcgctgagttgattgactccgttctcgacgttgtcaggaaggaggcagaaaactgtgactgccttcaagggtttcaggtttgccactctctcggtggtggaactggttctggaatgggaacactgttgatctcaaagatcagggaagaataccctgaccgaatgatgctcacattctctgtgttcccatcccctaaggtttctgacactgttgttgagccttacaatgcaaccctatcagtgcaccagctcgttgagaatgcagatgaatgcatggttttggataacgaagctctctatgacatctgcttccgcacgcttaagctcaccactccaagctttggggatctgaaccatctaatttcagccaccatgagtggtgtgacatgttgtcttcgtttccctgggcaactcaact

SEQ ID NO: 224694 - DNA, 556 bp, Glycine max
gtttcttccgggttcacgtttcacattctctttttgcgcttctctcactcactcactcttcttcttcctcttcgtgtggttttctttctcgaactcgaacgaagatgcgtgagattcttcacatccagggagggcaatgcgggaaccagatcggagccaagttctgggaggtggtgtgcgcggagcacgggatcgattcaacggggaggtaccaaggggacaacgagttgcaactcgagcgagtcaacgtctactacaatgaagcgagttgcggaaggttcgtgcctagggcggtgctcatggatctggagccagggaccatggacagcgtcagatctggtccctacgggcagattttccggccagataacttcgtctttggacagtccggcgccggaaacaactgggccaaaggtcactacaccgaaggcgctgagttgattgactccgttctcgacgttgtcaggaaggaggcagaaaactgtgactgccttaagggggtcaggtttgacctctctcgcggtggaactggttctggaatgggacactgctgatc

SEQ ID NO: 224695 - DNA, 559 bp, Glycine max
  unsure (1)..(559): unsure at all n locations
gatccatcgttattagcgtcttgatttttttattttcatttgtcatataggtctttcatagatctgatgcatggaggctcagatctactgtacagaggtgtgcgattcatgttcgtctctcttttggaatctgtttcgtagaaagtcgtttggtcttccatgtcgcatggctcttgaggtatttttttttgcagatactgtagataatcgatgagaagaacgcagatccagccgcttccgcttgttcgatcactacagacgcttgtatcggattattcatgattgattcataagcagcatgtcttcctccggctatagttgttgcagatctcggatgttgtaaaattagtgtatgatgtgaagctatgggctggaaaatgtggatgtaggagatttcgggacgaaaggcctcaaaacgcttcgtcgtttgtggttactgagtcctgagtgatcttgtcatccgacctttgccatgacaggtgcgcttgcttggcaggtcaaaatatgttaataaaaaaagttttattggtttanggagagatcgcacgggagttgcccg

SEQ ID NO: 224696 - DNA, 589 bp, Glycine max
  unsure (1)..(589): unsure at all n locations
gcctggtcttggcatctccgcagcattatccaccctggaccaggtcttcaacagagagaaagagaaggaaaaacacacacacacacacacacacacgttaaactaacattttttattagtaagaagacatggctcaacccagttccaacggggatctgaataataaccagcagggtcaggttcagcaacagcagcagcagtgggcggcggcgcagccgcatcagtatcagcagcaatggatggccatgcagtacccggccacagccatggccatgatgcagcagcagatgatgatgtacccgcagcattacatgccgtacgctcacccccattacccgccgccgccgccgcctcctcagtcgtctcaccatcaccaccacaaacagggccgcagccgcggcggcggctgcggcctcctccgacgagatcaggaccgtctggctcggcgacctccaccattggatggacgagaactacctccacaactgctttgctcacaccggcgaggttgtgtcggccaaggtcattcgaaataagcanactggtcagtctgagggatatggattcgtggagttctattcacgagcga

SEQ ID NO: 224697 - DNA, 590 bp, Glycine max
  unsure (1)..(590): unsure at all n locations
tcaacatatggggctgcagcttgtttttattggtaccatagccctgtgtttggttgtttcctcggcagtgcttgagcggtttgaacaagcacttaaacaagatgggtcacttagcttcttggtcattggagattggggaagaaaaggagcttacaaccaatccaaagttgcattccagatgggagttattggacaacaattggacatcgattttgtgatttccaccggcgacaatttttatgacagtggcttgacaggcatagatgatccagactttgatactgcttctagcttgcaaaagcaatggtacagtgttttgggaaaccacgactataggggtaatgttgaggcacagctgagtcctgtcctcacaaatcttgacaagagatggctttgcctgagatcttttattgtaaatgcagaagttgcagagtttttctttgtagatacctactcgtttgtggacaaatacttcatagaacctaaggaccatgtttatgattggagtggcatattgccccggaaacaatacatttccaacctactcaaggatgtggatntagctttacaacaatcaaatgcaaaatgga

SEQ ID NO: 224698 - DNA, 594 bp, Glycine max
gttagattcacactgaacaaatgctctcaatctatttctattttgtaagacatcagatctcctcacgaatgctggtgcccaaagccaaaacgcacccacaaagcagataacggcgtcgtatgcaaccctcaaatgaagtgcaagaaacatacctcagaccttagcagcaccgtcggcgtctgcgcctcctgtctaagggaacgcctcatatccctcgccgccgcccaggcccaagcccaagcccatcacccgcaggcccaattaacgcgagtcatctcacgcgcctccgacgattattccagaaactcagaccctaaccctcccccaccgttaatcttccctcgctctgtttcgccctacgtctctcgccggaagtctgactaccccgccgactggctcgacgaccgccgcgagaggctgttctacagcactccgcagctcggtcccaccttctgcgccggcgattccgaataccacgccgacgcgaagtcgttcaagaaacgcttcaacaagttccgcatattcgcgaagattttcaggacaagatcggagaagttccagtcggatccgtcgtgcgagcaggcctcgcacgca

SEQ ID NO: 224699 - DNA, 611 bp, Glycine max
gaactaatgaagtaaatgaagatattatactcattgattaccagggagaatctcctgatgaacaagctctagtttctgcggcctctgcatatggatatactctttttgaacgcacatctggacatattgttattgatgtcaacggtgagaaactcagattggatgtattgggtctgcatgagtttgatagtgtgcgaaaaagaatgtctgttgttattcggtttcctgacaacgcggtaaaggtgttagtcaaaggtgctgatacttcaatgtttagcattttggaaaatggcagtgagagtaacaataacatatggcatgcaactcagagccatttgaatgaatattcttcacaaggtttgcgcactcttgtagtagcctccagggatctttctggtgctgaacatgaggagtggcaaagcaggtatgaagaggcaagcacttcgttgactgacagagctactaaactacggcaaacagcagctcttatagaaagcaatttaaagttacttggagcaactggaattgaggacaagctacaagagggtgtaccagaagcatttgaggctctactgcaagctggaatcaaggtctgggttcttactggtgat

SEQ ID NO: 224700 - DNA, 510 bp, Glycine max
aagatggcttcttttcatatccaatttttattccttgtgcttgtgcttgctatggtgatcacattgatgaaccctaccaatgcaaccctctctccccatttctatgataaagtttgccctcaggcattgccagttataaagtcagtggttcaacgagcaattatccgtgagcgacgcatcggagcatctcttctgcgcttgcatttccatgattgtttcgtaaatgggtgtgatggatcaatattgctagatgacacccgaaacttcactggcgagaagactgcattgccaaatcttaattcagtcagaggtttttctgtggttgatgaaatcaaagctgcggtggacaaagcctgcaaacgccatgtggtctcatgtgcagatatcttggccattgcagcccgtgattctatagccatatatggggggtccacactactggtaccaagtattgttgggcagaagagatgcaagaaactgcagcaaagctgctgcaaactccaaatcttc

SEQ ID NO: 224701 - DNA, 611 bp, Glycine max
  unsure (1)..(611): unsure at all n locations
cattctcactctcgtttaccaagagtgtgatatctatttagatctctgaaaaacagagtttcatttcaattcagtcttattattagggtttgccgattgagagagaaagagaaatgggagaacgaaaaggaatcccaatggctttggggctcttggcgatgatcctcttcttcattgcttcctcttcctctcacctcgttcgcgcttccggtgacgccgacgacgcgatcttctacgagtcgttcgacgaggattttgatggacggtggattgtatccgacaaggaggattacaatggtgtctggaagcatgccaagagtgatgggcatgatgattatggacttcttgttagtgaacaagccaggaaatatgctatagtcaaagaacttgccgagtctgtcagtcttaaggatggaacagttgttcttcagtttgagactcgccttcagaaatggcctcgatgtggtggtgcatatattaaatatcttcgaccccaggaaagcgggatggaaccaaaggaatttgacaacgaatctncatattctatcatggttggtcctgataagtgtgtgctacaaacanggttcacttcattttcaagcataagaacc

SEQ ID NO: 224702 - DNA, 321 bp, Glycine max
aattatggaaaggtagctaggcattaatctgcgttaaaaacagaatccattaatagaaaaataattgtacaacttcaactagctcaaacactcgagtctccaaaaacaggagaagatctacacccctgaagcaaataatcttttccttttcttaaaaggaagaaaaaagaaaatactgaaaacagagtgcacctaaaatgaaactaagcccaaaatttatctgtggtgatgatgatactaaacagggcgccactttaaaataaagattcaaccatttcaagtttctcgccttggcctccgacgcgcagcattagatgcttc

SEQ ID NO: 224703 - DNA, 607 bp, Glycine max
tttcctatcctctcctctccgaaacttttagaaacaactacaacctaccgctcatttttccggttccgaccctctttctgccctctcagtaaccttatcagatcgatcaaggtaaccaaataatatcacaagttattcttcttcacttatttatattattttccttttggatttgataatattaagaggaaccaggatagataggtaggttctagcctttctgttatcattttcgaaacaaaccaaattgaaactgtttgagttttgtttagaaggctgttatgaatgaaactttgaagcttagaaaagcggttaggtagctaggtttcagtttcagatctggtagagagcttcatcatgaagccattaccggcggagcaaaccggtgaatcagcgccgacggagttgcagagatccattccgacgccttttctgaccaagacgtaccagctcgtcgatgatccctccgcggatgacctaatttcctggaacgaagatggcaccagcttcatcgtttggcgacccgcggaattcgctagggatttgcttcctaagtacttcaaacacaacaactattccagtttcgtccgtcagcttaacacctatg

SEQ ID NO: 224704 - DNA, 334 bp, Glycine max
caagaatacataaatccttatattacaaattttggcgctcaagcaaagctttgactttgacacttttcatcccatccgcgagttacatacaaggatggtcatccgccctttccatctagcgtaatgttacattacatacatggcccaatcaatggcagcgtcgcagcgctaatagtacagcgtgtccccacccaagtcacgtgccttctgtcattttcaccaaattagaagaaggaggagcatcatttcatttacctagctccaaccaacgaggatcatgatcctgatcatccgagtcatcgccatcaagcggttcagatttcacatctgaacc

SEQ ID NO: 224705 - DNA, 523 bp, Glycine max
  unsure (1)..(523): unsure at all n locations
gccagctatctgctatcgcaaggctagtatcaggtagtgcttgtcgcagcttatttgggggatttgttaagtggataatgggaaaagacgataatggcagtgatagtcttgcagttcaacttgctgatgaaaagcactgggatgatcttgttattgttattgccgtggttagctcacggcagaaggaaacaagtagcacctctggaatgtgtgagagtgttgaaacaagtttgcttttacaacacagggcaaaggaaattgtgccaaagcggatactgcaaatggaagaagccattaaaaatcgtgattttgcatctttttcgcaattgacctgtgctgatagcaaccagtttcatgcagtctgcctggatacatccccccctatattttacatgaatgatacatcccacagaataatcagcattgctgaaaagtggaaccgttcagaagaaagctcccaggtagcttatacatttgatgcanggcccaatgctgttctaantgcacgtaatangaaagctgc

SEQ ID NO: 224706 - DNA, 602 bp, Glycine max
tccaaaaccatccaactctcatgttttttgaaaacatacacaatctcttcaaactctaattttcttttcctttcatttaatttcctcaatggcggcttccgtcgaccagcgtccgtaccccggcctccacaatggcgtcgttcggcccctcaaaccaggcccggatatcccgcgtcccaagaagctaccccagccgccgccgccactctcggattcctcaagcgacgaagaagaagacaccaccttgaacttgaaggacctgattcgcaagggaacaacggaagttgaatcctccattttcgacccgcgcgacgatggaacctctgaccactggatccaacggaactcttcccttgtccgtttaacgggaaagcacccgtttaactcggagccacccctccctcgcctcatgcaccacggcttcatcaccccggtccccctcactacgtccgcaaccacgggccagtcccccgggcccgctgggaggactggaccgtggaagtcacgggcctggtcaccaggcccacatgcttcaccatggagcaactcctccacgatttccccagtcgcgagttcccagccacactcgtctgcgctgggaa

SEQ ID NO: 224707 - DNA, 320 bp, Glycine max
aatagaatccattatttatatataacaataaactactatatacacatacaatgtattctagtttagtcccctaaaacacgagcaagttattctgggtgtcgtagcccaacttctccaaaatcggctggactgcaaattgaatcataggtgggggtccacaagtcaatgccaaggtatcaggagatgcatttggaatatgctccgtcaggatactttcagtgatgaatcccacactgtattcccacccttctcttatgctttcttggatcacgtaccacaccttcaacctatcatacttcttagcccactcatcaagctct

SEQ ID NO: 224708 - DNA, 570 bp, Glycine max
  unsure (1)..(570): unsure at all n locations
tatattccctccaatctgcacccacttttacttacctaccttatctctctctctctctctctctcaatcgttcttcacgagagagagagacatggacgccgtcgttcaaaccagaggccttctctctctccccaccaaccccaaaaccagggtttcgcatcatctgcatccatctcacggcctcaaacaccgttttctctctctaaaacccaaacccctctccgccccttctctctccgccgccgccgccaaatttcacccctttggcccaaagccccaaaatttattcatctgccgggccgaggccgctgctgccgcagatgggcctgcccagcccgccttcggggaagccgaggtcgccgaaaaacccaaacttttgggaatcgagatcaccaccttgaagaaaatcatccctctcggtttgatgttcttctgcatcctgttcaattacacgattctgagagacacanaggatgttctggttataactgccagagggagcagtgcggagattataccctttctcaaaacgtgggtgaaccttcccatggccgttgggttcatgttgtt

SEQ ID NO: 224709 - DNA, 604 bp, Glycine max
  unsure (1)..(604): unsure at all n locations
actccccttgctgcggttgctccacctcctaatcacttcccctgtaaatcaagtttagttcgcacaaggttttaaaaaatggctgatgctgaggacattcaacctcttgttgttgataatggaactggaatggtcaaggctggttttgcaggtgatgacgctcctagggccgtgttccccagtattattgggcgaccacgccataccggtgtaatggttgggatgggtcagaaggatgcttacgtgggtgatgaagctcaatcaaaaaggggtatactcaccttgaagtatcctatagagcatggcatagtcagcaactgggatgatatggagaagatttggcatcacacattttacaatgagcttcgtgttgcccctgaagaacaccctgtacttcttaccgaggcacccctcaatcccaaggccaacagagagaagatgacccanattatgtttgagactntcaatgtgcctgccatgtatgttgcaattcaagctgtcttgtctctgtatgccagtggaagaactacaggtattgtgcttgattctggtgatggtgtgagccacacagttcccatatatgaagggtatgctcttcctcatg

SEQ ID NO: 224710 - DNA, 599 bp, Glycine max
  unsure (1)..(599): unsure at all n locations
atgcgatctcatacattattgtctctaatcttcgagattcttcggttcttagttaaaaaggatcgttagggttttctattttcatctaattgcatggaaccaatttgatggaactagataatacaattgattaattaattgctgcatcgaatggagaaatctgtttaactccttaaatatttgtttcgaatcagttgatttttcactatgcgtatttcaggatcgaaaagtctagtttaaccacacgtttgtggttgtagtggaagcgtaacgaagatgaatggcattgggaaactcaaatcgtcgagttctgaattggaccttcacattgaagattacctaccttctggatccagtgttcaacaagaacggcatggcaagctccgactgtgtgatttgctagacatttctcctagtctatctgaggcagcacgtgccattgtagatgatacattcacaaggtgcttcaagtcaaatcctccagaaccttggaactggaatggttatttgtttcctttgtggtgctgtggagttgtggttcgatatttgattttgttccctattangattctagtgttggcattaagatggattatatt

SEQ ID NO: 224711 - DNA, 516 bp, Glycine max
ccatgtaagatctacaggtgtataatagtagtaagtggagaacaaacaagggttggaaaaaattatttctgaaaaagtaaaaagattgacttttttttttctgaaagggccgaaacacagactcagggaatatttgtggctttccttttctgggcttgggactagggcgagaatacttaaaatatccatcccaaggaacctttttaagcccagcccgatgggagattatgtctctaactctttctgcaaattcaatgggggtctctcctggcttaaaattttgtggctccaagtaccaaacattacaaattacagcccaagatgtgtttaattgcaagaaatgagtggagaatgattgttttctactattccaaaaagcatcgacgaaaattttatttgacttgatcgcacctgggcaaattgtgcagccaagttaaaatgcgccctttttgaacatgacagagttgtgattttttacacaagctccttcatgaaatatagaggagggtttttgtt

SEQ ID NO: 224712 - DNA, 601 bp, Glycine max
gcaactgtggcaatgcaaactagcgagtctctctttgactcattaccggtgcgaaggtcaagtcctttgagtctgaggtgttcggccgcgccctcttcttccaagccgacgcgctcctacagcatcactctcatccccggcgacggcatcggccccgaaatcatctcggtggccaaagacgttcttgtcctcgccggttatctcgaagggattaaatacgacttccgcgagatgcttatgggtggagctgcattggatgccacgggactccctttaccccatgaaaccctttctgccgctaagcaatctcatgccgttctccttggtgccgtcggaggttataaatgggataggaacgacaaacatctcaagcctgagactggcttgcttcagatacgtaaagagcttggagtatttgcaaatcttagaccggctaccgtatactctccgttagttgatgcttctactttgaagagagaggttgctgaaggggttgatatcatgcttataagagaactcactggaggtatctattttgaagaacccagggctctggcaccaatgataatgtgaagagattggcttatactgagattatgct

SEQ ID NO: 224713 - DNA, 562 bp, Glycine max
aacaagacaaactccattaatcattattccaccattacaagcgacctcgcatgcaagggaaactagaatcccgggtacaagaatacaagataaacaaccttgctactttctaaaattcaatcatacataggctgggtgtgttaaccgaaatacatgatacagaaggaagccagaacttaatagactagggagactttctcggctttggcagtcatagtggcctccaacctaaaccagaacccaaaatgctatggcgagttggtttcaaaatcacactgcagcagcaccagcaggaacgttagattcaactgacttcagtatctcctcacctagctgtttgcatcctaccagcttcgttccagcagaatatatgtcaccagttcgaaatcccctgttcaaagtgtccatcactgcattctctattctttcagctggcttttcctctcctaggccatatctcaaaagcatagcagcacttagaacagtggcaaatggatttgcccttgtctgtccagcaatatcaggtgcagaaccatgtttgggttcaaaaagtccaggtccc

SEQ ID NO: 224714 - DNA, 564 bp, Glycine max
  unsure (1)..(564): unsure at all n locations
gcaannnnaagcattatactatctganctcgtgnnangttgaggccacncccaagctcgaattggctcgagaacttctaagtcccttgacacactttctcaaagaaattcnaccaccaccaagtggacaacacttcccatcataggccacctccaccctgtgggctcagtcataccaaaatcattccaagccctagctcgcctctatggccctctcattcagctccgtttaggtgcctcaacatgcgtagttggctccaacgaccaagttgccaaagaagtgatgaaaaccaacgacctcaatttctgttaccgaccccactttggatcctccgagtacttcttgtacaaaggctctgattttatcaccgccccatatggcccttattggcgcttcatcaagaagctttgcatgacgcaacttctatccagctcgcagctagggcgcttcgtgcacgttcgagagcaagaaattataaactcttgaaatctgttctagtgtgttccagtgaaggtaagggcattgatttgagctttgagctcacttctttgaccaacaatatct

SEQ ID NO: 224715 - DNA, 299 bp, Glycine max
aaaccaaaaacactttgggattatcccttggaaattgcattgagctgaaagttaaaaaggattaaaacgagttatagggtaacaaagaagaggctttgccaatcctgtaaagaaggatgaggctttttccatacaaagcttctctccggctttgattttccattgaaaacattggataagcgatgcaagcgtgacttgtttgagcgttaatgcaagggaagatccagggcacccccttctgccaaacccaaacggaagatagctgaaatcagcggggttgatcccattcaaaaaccttt

SEQ ID NO: 224716 - DNA, 594 bp, Glycine max
  unsure (1)..(594): unsure at all n locations
agttagcctataaaaaaaaactcttttgtagtcttattttcccttgtttttttcgtggtgattttattaatttgttactattggcaccccatgctatcttcctccacatataattttgattgttgttagtgctgcaactgttggtggttaaaaatcttcaacaaaaaggaagaaaaaaacgccaaaaataaacagaaatcgcgtgtttttgttcctgagcttttgcttccattgagcaaagcctttccaattgctgaaagtgatggttgcctttggaaagaagttgaaagacagacaaattcaagaatggcaaggatattacataaactacaaactcatgaagaagcgagtcaagcagtatgcccaacaaattcaacttggagcactagatcggcggcatgtactcaaggatttctcacgaatgctggataatcagattgagaagattgtccttttcttgttggagcaacaaggactcttggcatgccagataacaaagcttggagaacaacgtgatgctcttcaggaggagcctgaaataagcaaataattgaatacgagaagctatagagcattgngacagatctattaagc

SEQ ID NO: 224717 - DNA, 618 bp, Glycine max
  unsure (1)..(618): unsure at all n locations
caaatgcaaccgacaaaaggtttatttccttgcctgctgcggagacactcccgcgcaatgaggtgcttggaggatacatctttgtctgtaacaatgacacaatgcaggaagacttgaaacgtcagctatttggtttgcctccaaggtatcgagattctgttagggctataacacctgggttaccattatttctttataactatactactcatcagctgcatggtatttttgaggcagcaagttttggtggctctaacatagatccaactgcctgggaggataaaaaatgcaaaggcgaatcaaggtttccagctcaggtaagaatccgtgtcaggaagctctgcaaggcattggaagaagattctttcaggccagtattgcatcattatgatgggccaaagtttcgtcttgagctgtcagttccagagactctggatctgttggacctatgtgaacaagctggttcagcagcataagcaagaatcgcacaaggaatgaatgtgcanaataggtagtaggttttggtgtgccagctgtgtgggtttggcagatttttcgtgaagcgtaagcttggaaagtggatcatcatcttcttggggaaagtaaagggagcgtgtg

SEQ ID NO: 224718 - DNA, 580 bp, Glycine max
atggccgtcacgaaaagcctctccattttcctcttcatcgccataagctgcgtggccgtagctcatgcagcgaacttcaacatcacaaacaattgcacctacacggtgtgggccgccgccgtgcccggcggcggctcaaggcttaaccctggcgaatcgtggaacatcagcgtgacgaacggcacgacaggaggacgcatctggggtcgaacaaactgcaccttcgacaacgcaggacgcgggaagtgcctcaccggcgactgcgacggtgttcttgagtgcaacaaaacaggtacacctccgaacacgttggtggaattcgcgttgaaccagtacaacaacctcgacttctacgacatctccctcgtcgacggtttcaacattcccttgcaggtgagcccgacctacaactgcagctccgtgaaatgcgccgccgacatcatcggagagtgtcccactcagcttcaggttcccggcggctgcaacaacccgtgcacggttttcaatacgactcagtactgttgtagcaccggtgctgcgggttgcggtcccactgattattccaagttcttcaggagag

SEQ ID NO: 224719 - DNA, 329 bp, Glycine max
aacgatgtaaaagtttattagttattttaggagaaagagagcacatcccgccagagagatgcgcgcacaaagcccccaagaactcttttatttggtgataaaataataacacacaaaccaaagtatacaacaataagacgaataggaatcacgaaatttaaaagcagttgatgatgaattaattaagggcaaaacacaagcctataatcagatcctcccatgcaagtgaacatgctgcttgcgtcatccatagggtaactaaaggcatctggacacctctccttgaagaacttggaataatcagtgggaccgcaacccgcagcaccggt

SEQ ID NO: 224720 - DNA, 570 bp, Glycine max
aaaatggatgctactacacccaagtatttcaaggccaggtatgatgaaattgtgaaggaagtctcttcctacttgaagaaagtaggatacaaccctgacaagattccttttgttcctatctctggttttgagggagacaacatgattgagaggtccacaaaccttgactggtacaagggtccaactctgcttgatgcacttgaccagattagtgagcccaagaggccctctgacaagccccttaggcttccccttcaggatgtgtacaagattggaggtattggaactgtgccagtgggacgtgttgagaccggtgtcttgaagcctggaatggtggtgacttttgcaccaactggactgacaactgaagtcaagtctgtggagatgcaccatgaatctcttacagaggcacatcctggtgacaatgtgggattcaatgttaagaatgttgctgttaaggatttgaagcgtggttatgttgcctcaaactcaaaggatgaccctgcaaggaggctgctaacttcacagcccaagtcatcatcatgaaccaccctggtcagattggaaatg

SEQ ID NO: 224721 - DNA, 572 bp, Glycine max
  unsure (1)..(572): unsure at all n locations
aggtcgctgtcgcgctacctcgcacatagcctcgataggccaaagcatattccaaacaaccatcaattggtgggacctccgttcctgcatgcttcttccccgtttctcctaccttctccgccaccctcctcctctccacgccatggcgcgtgccgtcacgtgcgccactcagccctctcatttccacgcctcgctcggcatcgccacctctcgccaccccgtctctctgccctccaaatcctcgcttttctgccgcacctttcacgccctcgcgcggtgccagagcgaagagatgacgcggcggcgcgtggctggagtccgcgccgggcagagggagtacaggaaggcgaggagaagagcgccgcccaagagcaaaggcaaggagctgcaactctgtgtcgacatttgcatcgaagaagatttgcctgacgatcctgaaattttgagcattgcagagttgcttcgactaaatgttccaatggcgatgaactagtgtttgatggtttgaaagggtcgaggtataaaacacgagacactgnctatagtgatgttggtgggttttgatagtgtga

SEQ ID NO: 224722 - DNA, 330 bp, Glycine max
gatacaaagtcatttaagattcatcttattataagaattggtgggtaaccgaattgtatcaaatcgtaagattcgaataatgaaacgtaaaattctaataactacgcttttctcgtgttcaactttttgtgaaagaaaataaatggggaaaagataattaatcagggttgatagcttaaacccctacagaatttgaatgaaatgcttattgtggccttctgttgctcagaatgcataccggtagatggcatctgctgcaccatcttcatcattgctcaaaccaattacgttagcaacagatttggtcttttctgatccattactaagtgc

SEQ ID NO: 224723 - DNA, 510 bp, Glycine max
cttcaattcagtaaaccgcaccaatttctatggcggcgtcgcggcggctccgggacctccaatcccaaccggcgaacaagatctgcgtcgactgttcccagaagaacccgcaatgggcctcggtttcctacggcgtcttcatgtgcctggagtgctccggcaagcaccgcggcctcggcgtgcacatctccttcgtgcgatccgtgacgatggattcgtggtctgaaatccagatcaagaagatggaagccggaggcaacgacaaactcaacgcgtttctcttgcagtacggcatccccaaggaaaccgatatcgtcgccaagtataactccaacgctgcctccgtctaccgcgaccgcatccaggccctcgccgacggccgcccctggcgggatccccccgtcgtcaagggaagccgtccgttcctcctccgctgcattcaagggcaagccgccgctctcggctagcagcaacaacaacggcggatgggataattgggacgccgacgac

SEQ ID NO: 224724 - DNA, 590 bp, Glycine max
ctcgagccgggcaaagttggctgatgatatgattccagccttaactgacatagttggagatgaagataaagcaaaggagattgcggaagccgccaaagcctgcatgggacaggatttgtcccagtgggcttgatcaacgtacatcaatttgcacagagggtaatggacctatctgagtacagaaaaaacttgtatgagtacctggttgctaaaatgaatgatattgcaccaaatttggcctctttaataggcgaaggtgttggagctcgtttgatttcccatgctggtagcctcacaaatttagctaagtgcccctcttcaactcttcaaattcttggtgcagagaaggcttcgttcagggcattgaaaacaagaggaaacactcccaaatatggtttgatattccactcttctgttattggtcgggcatctgccaaatataagggtagaatggcttggtatcttgcacacatatgctcaattgcatcacggattgactgcttttctgataagggtactactgtttttgggcagaaacttcgtgagcaagttgaggaacgacttgacttttatgacacgggagttgcccc

SEQ ID NO: 224725 - DNA, 377 bp, Glycine max
atcgatcaattaatatccaatggccttttaggtcaccgactaacagatctctgtgttgaaggaagcctttagcctattcaacaaggacggcagacggatgtattaccaccaaagaacttgggactgcgatgcgggcgctagggcagaacccaactgaggctgagctgcaggacatgataaacgatgtcgatgctgatgggaatggaaccattgacttgccagaattactcaatctcatggcgcgcaagatgaaagacactgattcaaaggaagagctgcatgaagctctgcgcgtgtctgacaaagatcagaatggtgggatctctgccgcagagctacgccacgtaatgaccaatataggcgagaagctgaccgat

SEQ ID NO: 224726 - DNA, 638 bp, Glycine max
gtcgttggaagaaacctgagattggttgggtgaagctgaacgtggatggttcacgcgacccatacaaaagttcctccgctggttgtggtggtgttctgagggacgcatcagcaaagtggctccgtggctttgctaaaaaactgaaccctacttatgcagtgcaccagacagagttagaagccattctcacgggcttgaaggtggcttcagagatgaatgttaagaaactaattgtggagtcagacagtgactctgtggtgagcatggtggagaatggggttaagcccaatcaccctgactatggtgtcgtggaacttataaggacgaagcggcgtcgttttgactgggaagtgaggtttgtttctgtctccaacaaggcgaatcgtgtggctgataggctcgccaacgatgctcggaaattggcttgtgatgatgtttgtgaggagtatcttcatcccccggctaactgtaaccagttgctcttggaggatgagataggctgtgagagcttttagtccttttttttttttcttcttctttcaaaaataagaaaagaaaattactatgacaagtttttgaaggacaccatgggctacttaataaaattggcatcatggaagataagtgccttaattggg

SEQ ID NO: 224727 - DNA, 601 bp, Glycine max
  unsure (1)..(601): unsure at all n locations
gcaaaattctcttccgtttcaggatttgggtttcaccgttacagtgaaacatggcaaaaccaaagcgaatctctctgcgtctctttgcgctgctcctcttgatttccacctcttcgtttcagcttctccgcgcttccgatgacgccgatgatgatgcgatcttctatgattcgttcgacgaggattttgaagaccgttgggttgtgtctcagaaagatgagtacagtggtgtctggaaacatgccaagagtgagggacatgatgattatgggcttcttgtcagtgagaaagcaaggaaatatgctatagtaaaagaacttgatgaggccgtgagtctcaaggatgaaacagttgttcttcagtttgaaactcggcttcagaatggccttgagtgtgngtggtgcatatctaaaatatctccgaccacaggaggctggatggaaatccaaggaatttgataatgaatctccatattctatcatgtttggtcctgcaagtgtggtgccacaacaaagtacacttcattttcaagcataagaatcccaagagtggggagtatgttgaacaccatcttaagaatcccccttctgtcccgtctgac

SEQ ID NO: 224728 - DNA, 312 bp, Glycine max
ggaaatgtaacagtgagttgatttctgggttacattaccagaaaaataaagaaaaataattgggtatctgatctacactccttacgcaatatcatctttcaaaaggtgaagggaaaaattacaacaacctgctactacagaattggcctaatgcccaaactaagctcaaaatttatgtgcggtagtgttctttaatggccgcccctgtctgttaagtttcaatcatttcttcaattatctctccttgttggcctccgacgtgcaggggcagatgattcctccttctctttgttttcctcattctcaccactg

SEQ ID NO: 224729 - DNA, 620 bp, Glycine max
  unsure (1)..(620): unsure at all n locations
caaactttaaacgggttttctttgattttccgcaaccttctactaaaatcctccttcacttcaatctttttccactttccaccgaatccaagtcaagtctagaatttccaacgaaccgaacaaaggaaaatcccctcttagatccaatccaaattaatatttgtacatctagtcaagacccaagtccaacgcgtggtcgatcgaatttctcatttggggttctcttttttatttttgatcagctcattaggggttctcaatggatgcttcatcttcctcgtcgagtcaacctgaattcgattacttgttcaagcttctcttgattggggattctggggttggcaaaagcaccctgcttttgagcttcacctccgataccttcgaggatctttctcccacatcggtgtagatttcaaagttaaatatgttacaattggagggaaaaagttaaaacttgctatttgggacacagctgggcaggaaaggtttagaacacttactagttcatattacagaggagcacaaggaataattatggtatatgatgtaacaaggcgggaaacctttacanatctatctgatatatgggctaaagaaaattgactatactcaacaaatca

SEQ ID NO: 224730 - DNA, 536 bp, Glycine max
ctcgagccgctcgagccgaatcggcttgaggatatattatggcattctctatcttcaaacatgttctgtcgttattccttctttgcattctcttgcaggaacctaccaatgcccttagaaagacctacattgtgtacatgggaggacattctcatggtccagaccctttgcctagtgatcttgaaacagccacaaattcccatcatgatttactcgcttcttacttaggaagtcacgagaaggccaaggaagcaattatatactcgtacaataagtacatcaatggctttgctgccctacttgaagaggaagaagcatcacagattgcaaaaaatccaaatgtagtttctattttcttgagcaaagagcgcatattgttcactaccaggtcttgggattttcttggactggaaaaaaatggaaaagtcactgcaaactccgcttggaggaaagcaagatatggagaaaatataatcattgctaatattgatacaggggtttggcccgaacaccccagtttcagcgacaaaggatac

SEQ ID NO: 224731 - DNA, 569 bp, Glycine max
  unsure (1)..(569): unsure at all n locations
cttggaacccttctacgtgttctccattccctctctcactcctccatctacgtttcttaaatcattttcttctttctctctttctttatcttctcatttttctcattacactcttttttttttctctcaacttttctcttattaaccatagttcacatattatatcatcacatatcatagtgatatattatatcatatcacaatgtgtggcatacttgctgtgcttggttgctctgattcatctcaagccaaaagggttcgcgtccttgagctttctcgcagattgaagcaccgtggtcctgactggagtgggctccaccaatatggtgataactatttggctcatcaaaggttagccatagttgatccagcgtctggtgatcaacccctcttcaatgaagacaaaactgtagtggttacggtgaatggagagatctacaatcatgaagaactcaggaaacagttgcctaatcacaccttccgtacaggaagtgactgtgatgttattgctcacctgtatgaggagcacggagaaaactttgtggacatgctngatggtatattttccg

SEQ ID NO: 224732 - DNA, 335 bp, Glycine max
gcattcaaatttaactgaacattttcttggaaatccagtacatcatgattgtgctcacatgacataaatagaaaacgaacactagatgtggatggaacaacacttaagacagctagatagagagccttatctatttatatatagccttgcctgaataaactacacagcaggccaaattttcatttatgatgattaatgagtcattgatgactagtataataatatattttggttctagggcaactactagtttttgctatggctcatactagctctatatggcacctcctagtggagaaacttccatctttgggatgatcttctctggttctaca

SEQ ID NO: 224733 - DNA, 566 bp, Glycine max
  unsure (1)..(566): unsure at all n locations
cacaatttacgaacagaaactctgcttttacaatataaattggttaaagagaggactatatctggagattcatactatggctctcacgtgatgcagtatggtgatgtacggcttagcagtgatgttctctttcattatttgggtacagatcctgctaatgataatttcacttttgtggacgaaaactccttatggtcaccttcaaaaccagtcaaccaacgtgatgctgatctcatccatttttgggataagttccgcaaagctcctgagggttctctcaggaaaaatgcagctcagaaacaagttttggaagcaatgtctcatagaatgcatgtagacaacagtgtaaaacttattgggaagcttttatttggtattgaaaagggtccagaagtactcaacgctgttagaccggcaggatcggcacttgttgatgattggcactgccttaaaaccatggtgaggacttttgagaccattgtggatccttgtctcagtatggcatgaaacatatgaggtcctttgcaaacatctgcaatgtanggattaagaatgagcaaatggct

SEQ ID NO: 224734 - DNA, 334 bp, Glycine max
gaaagttgtaaatgctttttcagaaatagatttatacaaaggtgtgctgcgtatctatttgccaaactaaaaatgtaaagacccttcttcccaatcctagtagggtcccaaatgtatttacaaaggcgggacaaaatgtgtatatacaagtgcaatcatatagcataatggaacaataatcatactttggtctttactggtgcacattacaggaattattatgcactgaaacccctttgcagagaactcccaggattggaaggaatagagacacaagcttgtgcagaggcctcagccatttgctcattctttatccctacattgcagatgtttg

SEQ ID NO: 224735 - DNA, 586 bp, Glycine max
cttctatctttcgctctccccctctgtttttctgacagtgttactgtgtgtgttttccgcggaaaatcaaaatgggtatcattgaaaagatcaaagaaattgaagccgagatggctcggacacagaaaaataaagccacagagtatcatcttgggcagctcaaggctaaaatagcaaaattaaggacacaattattggagcctccaaaaggttctagtggaggtggagaaggatttgaagttacaaaattcggtcatggacgtgttgcactgattggatttccaagtgtggggaagtctactcttttgacaatgttaacgggcacacattctgaagctgcatcttatgagtttactactttgacctgtattcctgggattatacactataatgatactaaaattcagttactcgatcttcctggaattattgaaggtgcatctgaaggcaagggacgtggaagacaggttattgctgttgctaaatcttcagacatagtattgatggttcttgatgcttccaaagtgagggtcataggcaaatattgaccaaagagctcgaagctgtgggctttgcgttaaacaag

SEQ ID NO: 224736 - DNA, 520 bp, Glycine max
  unsure (1)..(520): unsure at all n locations
atgagcccccggccttccccttgacccctgntcagtctanntncacggcaggccngaggagaggccccccttttgttttttttttttttttttttttttcttaaacctnaaacgagcttgaatttgacgagacttttttcaaaaataatcgcatttcaaccccacatgagcaatcaaaccgagtcttaattatttcaaccggggggggttctcaaacttcaagattataagctgttggcatgaaatgaaacaaccaaaatgaaaattcttgtttccaaaactatgatttctacgtatcaaggacctaaatttgggaaaatatcaataccaatatttctcatccaaaattatttaaattacaagggaatcggcatgattatcccacaaaattgttgtaatcatattatccacctccaccagatccgtatttttttccgaacaaaaacaagctgcagcttgttataaccagcaagcacaccaacacctgcaaaaacacgcaatatttttgcaccaccacctt

SEQ ID NO: 224737 - DNA, 563 bp, Glycine max
  unsure (1)..(563): unsure at all n locations
aggggnaannnnnnnncctgggccnnnnagcctttctttcagtttctnttgcctaatanagtggnaagccagcccctagncggnggccgncctttttttttttttttaaaaaaaaaccttttgtttatttcattagccaaaactacaaagcacgggatgcacaccaaaaacaaattacaaaccacactatgttaaagccacagttgcaggcacgcttgtaaaactaagttattccactacacactcttgaagagtaagtgggtagctttaggctatggagaacatgtactaatgtgcctcactcttttaacacaaaccttaaatcacagacagaagcatgtagattgtagcggagcttatgcatgttcatggaatgggatagacaactatttttccagttgctctgtttgttttcagatgggcaaacgcttcaacagtctgagaaaatggaaacgggctcttcgggtcaagtattggcttcagcttaccactctcaaaataggggcttagtttctctaagatcgccccatcagtatagagtatgaaaaggatagctggatgaa

SEQ ID NO: 224738 - DNA, 299 bp, Glycine max
gcgaaatcaatcaagttttgagaccttttttctggtagaggtgtaagtacaagatcttgataataaggattttgtacaaaggaaaagttgagaataagatgggggaagatggttattcttggattaggaggacaaaattttcacacactgtctgccatcgtttggatcctgctaggttaggctctattcctatcagtgttcagtcagagcaaaaatcaaggcctgctgcctcaaaggctcagagacaccccataacaaacaagcagagatctttggcaccattggcttggaattatttt

SEQ ID NO: 224739 - DNA, 526 bp, Glycine max
  unsure (1)..(526): unsure at all n locations
gtaagagtgagcaacttccaacaccatagttaaatggcttccaaggctgcacttctcttgtgtttcaatgttctcttcttcaccgtggttagctccacatatgtgccatgcaacccaccccccaaaactccactcccctccacgtcgtcacgctctccgagatggctgccatcgtctccctcatcgcctccttcttctacctcatggccttcttcggcattaccttcatcctccacccattccttaattaccgctcttcccccgaggacgacctcgacctccacattcccaaacctgtccccactccctcatgccctgctgccctcccccaccacgacgaggacatcatccttgccgtcgtgtctggctccatcccctcctactccctcgagacgcggttcgacgatactcgtcgagccgcattaattcggcgcagggcggtggaacacatcaccgngaggtctctggaaggcctcccggtagaaggctttgattatgattccattctcggtcagtgctgtgagat

SEQ ID NO: 224740 - DNA, 616 bp, Glycine max
  unsure (1)..(616): unsure at all n locations
gctggtcaaggcttcaactggaagagtagttatggggaaagccagcagcatgtcaaagaagaagacaagagcttctcaagtttctcctttcaaacacaaacacaccctcctcttccatcttcaaatggatttcaatcttcaaccggcatagttcaaaccggatggagttttccagaaattgctaaacaagatggttttgcctcaagaatgagtatgagcatggtgaaaactgaaaccacttctgcgatgcagagtttcaactctgagaataataaccacaggaatggttttcaatcagatcataaaaattaccaaccaccacaagttcagaccttaagcagaagatcagatgatgggtacaattggaggaaatatggacaaaagcaagtgaaaggaagtgaaaatccaagaagctactacaagtgcacataccctaattgtccaacaaagaaaaaagttgagagatccttagatggacaaattactgagatagtttacaaaggcactcataaccatcccaagcctcaagctgcgaagaggaactcattgtctgcctcatcacttgcaattcctcattcanatcatggcggcattaatgaactaccacatcaaatgg

SEQ ID NO: 224741 - DNA, 547 bp, Glycine max
attgaatcgaacgaattcacaaaccctagttttcgaggatgggtcagatccagtactgcgagaagtacttcgatgacacttacgaatatagacatgtggttcttcctcctgaagtcgcaaaactgcttcccaagaatcgtcttctctccgaaaatgagtggcgggcaattggggttcagcagagccgtggctgggttcattatgcaattcatcgccctgagccacacataatgctcttcaggaggcctttgaattatcagcagcagcaggaaaaccaggcccagcaaagcatgcttgtcaaatgaacactatctatgcaaatctgaaagtgggattacaatgttatataggttttaattttgttggtaatatggatgttatgaagaatgaagaaccctggtggaattctctttttgtggagaattttcatgtgggttcaactgtcattttaatgtgttgttgacatgatgatgtgtcatggatttttattggtgtacctctcgtgtactcttatgctcggtggattatataatagtcattatcggtt

SEQ ID NO: 224742 - DNA, 396 bp, Glycine max
aaccgataatttttttttcttaatccaccgagcataacaggaggcgagaggtacttcaataaaaatccatgacacatcatcatgtcaacaacacattaaaatgacagttgaaaccacatgaaaattctccacaaaaagacaattccaccagggttcttcattcttcataacatccatattaccaacaaaattaaaacctatataacattgtaatcccactttcaaatttgcatagatagtgttcatttgacaagcatgctttgctgggcctgtttttcctgctgctactgataattcaaaagcctcctgaaaagcattatttgttgctcaacactataaatttcataatgaacccagccaccgctctgctgaaccccaattgcccgccactcattt

SEQ ID NO: 224743 - DNA, 569 bp, Glycine max
  unsure (1)..(569): unsure at all n locations
attgcataaagagcagtgtttttctttagacgctttctttgtattaaagtcgtatattgtaatgcatgctgtcgagcttttgttactttgtgacaaatggagggtccttagttctgtttctctttcttctctctgttctctcaaccaagttctcaattcaatcttcttcacccttttgatctgctaattctcaaggtattcaaaattgggaggttttcgtttgaattgtgatgtccaagccactgctaggcataggggaggaggaaggtcaaagcaatgtcactttgttggtttcttcctcagtcatcatggaaagtgtgtgcctgaatagctcaaaattgaaagagcgcaactacatggggttatctgattgttcatctgtggacagctccgcgccgtccttctcagatgagactaaaagcaatctgaaccttaaggctactgagctgagactggggcttccgggattgcagtctcccgaacgagattcagatctttgcttgagaagttcaattcagtttgatgaanaaccactgtttcctttgcatcctgctactgatgatcaccat

SEQ ID NO: 224744 - DNA, 526 bp, Glycine max
  unsure (1)..(526): unsure at all n locations
natgatccccnngagcagnnnnaattccccgtgagtaatnatgnaggacagnccngggagggnggccggcctttttttttttttttcaacaactctttttgttttaccaatagcttcgaagctcttcagaatcgttatactttagcatgtctcaaaaaccatcccccacggaacatcacccactatcatccagtcaccatctatatccttgtacgtaagaacatattctgatccatgaaacaaacccttcaacttgctatcatacagcacctcccctaccagatttccatgagatccacaagaacctatggtaaaacagctgaacatgttctccagcacacaagatagttcggcttacgcagagcaattcttcaagtctactttacttaaataaggagcaccatccatacttacctttacaaacatgacaccagaccccacttttccatccacttattaaacattctttgtaataccgtccattaaactattcctaaatgatcttataggaggccaaccaacaacc

SEQ ID NO: 224745 - DNA, 432 bp, Glycine max
aaagctttgaagggacaccaaaaatttccattccagagaaaaatttggaagagaaacgtgcggcttccaaagtctcaagtatgtttggtggaacaagggaaaaatgtgctggttgtcagaaaacggagtatcccactgagaaggttactgtgaatggaactccttaccataagagttgttttaaatgctgccatggagggtgtgttatcagtccttccaattacataacacacgagggaaaactctactgcaaacaccaccatgtccaattgatcaaggagaagggcaattttacccaacttgaaggtgacaatgagaagagtgcgactaatgggaaaatcaatggtgaagaagtttccgcagagacatgaaggagtcgagtctcagaattttgctttctcaagtatatatttgagcaccatatatttctac

SEQ ID NO: 224746 - DNA, 536 bp, Glycine max
  unsure (1)..(536): unsure at all n locations
aagttttgaagttttaaagagcagggtaaatccagagcctgacttccttgttttgtgtgtctgtgtctcccaagattctgctgaggccttaagggagtatattacatatctccatgtgcggtgtttccaaggggaaaccttctcaaattgatttgatcatggaggagaagtatgcaaaagaagggatgcatcataagatttctgctttgcttgagttttcagcgacggatgatctaattggtttcaaagatgctgtggaaaaggagggtcatgatgttgatggggtggggttttggtatggaaggcgtgttggctcgaagaaaataggttatgaagagaggacacctctcatggttgcttccatgtttggaagccttgatgtatcaacttatattcttggaatgggttgtatcgatgttaatcgggctagtaggtcagatggggctactgctcttcattgtgctgntgctgggggttctgccgcttacgttgaggttgtcaagcttttgcttgatgcatctgctgatgttagtgct

SEQ ID NO: 224747 - DNA, 561 bp, Glycine max
  unsure (1)..(561): unsure at all n locations
ctcagaactgttcggtttttctggaattttttcttctctcagccatctctctctctctgtgcgtccatggagttttggggtgttgaggtgaaaagtggagaatctctcaaggttgatccgggagatgacaagattatccacctttcaaatgcatgcctgggggatgtcactaaggataaagaaggtctaccagtagccctgtatgtcaagtttggtaaccaaaagcttgtacttggaacgctttcttctgaagcttttcctcagatatcttatgatttggtatttgagaaggaatttgagctatcccataactggaaacatggaagtgtcttctttaccggatttaaagctcaatctcagtcagagtctgataatgatgaagattctgatgattttgatgaagatattccagttagtgctgccaatggtaaacctgagattgaggtgaagaatggcatcaaacctgatgcaaatgaagctaaacagaagaagatagcanatggtgaagatgaagattcatccgaatctgaatctgatgatgattcaagtgaagatcagctc

SEQ ID NO: 224748 - DNA, 413 bp, Glycine max
  unsure (1)..(413): unsure at all n locations
ctcgaaccgaatcggctccagcaccttttctttatggctttccttggacgcttctgacgactggtcctttgctttctctccgagccctaatggctctacccgactcttattcctgccgcaactccctgatccactccttcatctactcctcttcctccaaaacgctccctctacaccacatgctcaacttcgtcttcgacgccgacccctcccagccgccggaaaacctccacgccggatcgcgcggcctcatgattccctctcccaacgagtcacgcaagaacgagatgtactcccctgccttttactccggctgcaccgccggtggaaacctcaactgtggcctcactcacatgngccgtgactgctcttgacctactcaagtgtaataagcagattgatcctgctaagta

SEQ ID NO: 224749 - DNA, 508 bp, Glycine max
  unsure (1)..(508): unsure at all n locations
ctgaacccccnnagccgacttttaatttcccatgagtaatnnctgnagngncnggccagagacggnggccgccctttgtttttttttttttcactttattttttttttttngcncccgaaaacaaaaatcagccgagtttaaatatatncaaacacaccgacccttccccacaaaaaacataacaaatgacaattcccaatctccaaactaatatacaaaacccatcatacaaaatttttatattcctacctaacaaacactcaacaaaaacatgttgctaacacaaccttccttctaaaaaaccaaaaacctcaaatttaataaaaacggaaacaacctttctctacatttaaaaaaatatactcatcaaacccacatgaaacaccacttcaaaaacgtctagacaccaatcaatcactaaaagtgcacctaatcacccactttcttaaaattaataaaccaactgaagcatatagcaatacaagaacattttattcctttgctacc

SEQ ID NO: 224750 - DNA, 531 bp, Glycine max
  unsure (1)..(531): unsure at all n locations
ctgattcccccnagccagctttaaaattttgaacgtaatnngtgaaggncagngcggagnncggnggccgcccttttttttttttttttttttttttttttccattggtatgattgggnaaattcttatagatcgggttaattagctgttcaatactgctcacaatcaaaagcatacagatgcaccggaacaaaaagaaccagggcagtcagtgagctaaaattgcttgagacaaacatatgacacacaattctattgcaaataacattgtatggtacaaggttagaaaaacaatgacatacgaaccatactggaatgcctaacaatttttttaagcgcctattatctcaagttaacttaagatcattccctcccatattacggcgaaggcaaacacggacttcattctcttcaggtcccacacgatgttttggcaccaagatctcaagcacagatcctggcccatcgtaatatgcttctatgttggcgtcttcaggaattccggttgaaagagggatttctcggacgaac

SEQ ID NO: 224751 - DNA, 550 bp, Glycine max
  unsure (1)..(550): unsure at all n locations
gggagacaagacagagtagtacagattactaccaatggctaccaaggtttacattgttgattattctacgtatggacatgttgagaagctagctagagagatagaaaaaggggctgcttctgtggagggagtagaagcaaaactgtggcaggtacctgaaacattgcctgaagaagtccttgctaagttgggagcacctccaaagagtgatgttccaattattactcccaatgagcttcctgaggctgatggctttttgtttggttttcccacaagatttggatctatggccgctcaatttaaagcattttttgatgcaactggaggcctttggcgtacacaggcactagcaggaaaggccgcagggttcttctatagcactagttctcaaggaggaggccaagaaactaccccgttgacatctattactcagcttgttcaccatggattgatctttgtccccattggatacacatttggcggtggcatgtntgagttggagaaggtgaaaggtggctccccatatggtgcangaacttatgctggagat

SEQ ID NO: 224752 - DNA, 395 bp, Glycine max
atatgaagtatggcttgattctcttacacttttattttattttcgcccctaacatctcattttatttgacacaaaatatggtgtgggagatatatggaggataaaaatcattgaaaacccttgagcttctttgcaatgcccccaaaatactttccctgatggaaagcttgagccaattccaattcactaggctgccttgagccatctccagcataagttcctgcaccatatggggagccacctttaaccttttccaactcaaacatgccacccccaaatgtgttttcaatggggacaaaaatcaatccatggtgaacaagctgaataataaatgtcaacgggggaatttcttggcctccttcttgagaactagtgctataaaagaacccttcggc

SEQ ID NO: 224753 - DNA, 617 bp, Glycine max
  unsure (1)..(617): unsure at all n locations
ttgatcccccnnaagccttnnnncagttttnacgnaaataatnnntggaggaacagcgcacagncggnggccgcgctttttttttttttttgggcgagtgacttaattctcaaatatagggttagaaccgtatgtggggtttaacatatgttcaatttgaccaacacaaccagattcctacaatgattacagactccacaaacactaaccttccaatgtagcttcatatgatattatagtggtaacaaattaacataataccacgagaaactcttaagggccataaattcaaataacagcagaagggcgataaaccaccaatgcccgggaattcagtcatatcatcatcctttgcttttccctctccggatccaacaataaaacttttatcaaacaacaagcagtccaggatagcctaactccttcttttggacttttccatggccctcggagctaaaccaatggcatcagaacctttcataattttcagccttttgcaagtgttaatgaacatttgccatggtacatcccctacaagcatccaatctccatctttatcttcataagtgagaacatactcaaaaccatgcaaaagatccctcaacttgctttcactc

SEQ ID NO: 224754 - DNA, 582 bp, Glycine max
  unsure (1)..(582): unsure at all n locations
tgatcccccgaccagggatggacgcantcagattnngtgaggacagcncacagcggngccgcctttttttttttttttttttagagtttatttttttattnatttatgaaatactagataggcttataaattgggccttctgcacattgcacttctctatgcacacacaatagagcactagtatagctactaaatgagagtaagagtcaggaaaattggattacatttctagaatgcatatgtcaagctatgatttcttttatgtttatataataatatgcggaaaacttctatacatttctagttgcctgagccaaccctttgttagtttgatgggccttatgagagagaagtcaagatgttcttttagtgagtgaaagaatggtggacaccatcattttgaagtcaattggctttgttaagtaagcatccatgcccacctccaggcatttggcttcatcacatgacattgcatgtgctgtaagagcaacaatgggaatgtgcctgcttgttcccacttctgatttcctgatagcttttgttgcctcatagccatccatctttggcatctgacaatccatt

SEQ ID NO: 224755 - DNA, 608 bp, Glycine max
  unsure (1)..(608): unsure at all n locations
atggccccnnnnagcgggnnnccgttttncgcntaactatnnnttgaagacagnccccagtcggcggccgcccttttttttttttttttgtatgtaagctttatatatttaaattaaactaaaaacacgcgggatggcatcttaatcttaaatcagaagtgggggacaagtacgtacggcaacatgaaaatatccaaaaatgatggtgaagtaacgatcacatttatgattaagaaaagagaatgaaggttcagaaaataaaaaagaaaacaaggtagatagggtgaattaaagagagaaaaaattaatcctgcttcctcaactccttgtaaaacctctttataaaatcttcggcggccttatcgaccaggtggtcgttgtcttgatcggcgtctcgcagagggaacggcgagtccgtaaccctaagctgcctcaccatagggctccgtccaaaccctggcagcgcaggggacgctttaaccttaacggcgtcgttgttgttgttgttgagcatctccatcactgccttcattgcgttcaccgtcacaacgtcatcgtcctgcgtgggaggcgcgtggacacaggcgaagaagtggtggcggtggtgc

SEQ ID NO: 224756 - DNA, 586 bp, Glycine max
  unsure (1)..(586): unsure at all n locations
atgtcccccnnncaccgnnnnccgttttncgnntaatcatnngttnaagacagcccctagncggcggccgccctttttttttttttttgcagacaaaactttgattttagttagttccttcttattgaaggggttgggtgtgatgttcatatacacccataacaagaaaaaatgggcaaccaggcataacagcctctatactaataacattatagtaattataacaaataaatatataagggctggaattcaatataatcgtcccccaccatattttcattgtcttaattatcttctgacactctaatattatgagtccacagtattcattcattatccattgtgctcgtaacttctcttcttgtataatttctacccttctatgctggaatgactttgaaaatgtcatcgaaactgttctggcttgcaaaaatatccagaagagacagtgcctcaggcacactcagctcaagacggaacttatggccgtcgtattggtgaagaattggtctgaaggaatcttcctctagtggctcacaaactttcctagtaatcacttgaacctgagcagggaaacgagattcac

SEQ ID NO: 224757 - DNA, 623 bp, Glycine max
  unsure (1)..(623): unsure at all n locations
natggccccccnccacaggnggccttttgntcatctacnntnngttnaaggcaacgncntagncggcggccgcccttttttttttttttttgattgtcccttttctttttccacagnaaagcagagaatatggagtaggtttacatcacgaaggatttcctcccaactaattatacccaagcaatcatacaaaccaatttacttaactgacattacattaagtgcacaacatgtatgcatacactgatgtttcttgaagccatgaatgtccgaactatcagatatgaagccacagtagcattcgttttttcaatgggaaaagcccaaagatccaatatctcatctgtctcctgtaacacagaaatactagttcgtgcttgcatggaaacattgcgcaagacctttattgtcatcatgatccatttgtttggttctcttctccaagtagctgttcaaaccgagccacaatgtgttttccataagtgtattttttcaaagcatgagcatgaagtcttattcgagaaagtaatgtttctcgctgattttcaaaacatatctcaaaaaccttttggatcacataatttgcaaattggtctttcataattggaaataaatattcattt

SEQ ID NO: 224758 - DNA, 499 bp, Glycine max
attcatcttttcattcactcactctcactcatggctgaagatgggaacaacaacgatgtacccttacacaaattcaaagacagcaatccaaaccctggagagttcgatgcaaagggttacagcctcagcggaaaaatcatgctttcagcaataatccttcttttcttcgtcgtcgttttgatgttatgccttcatatctacgcgcgctggtacctccggcgtgctcgccgccgccagctccggcgccaacgcgagctccgccgcacccagcttgtcttttacaacgacgacgccacccccgcagccgtgtcacgtggcctcgacgccgccatccttgccacactccccgtcttcaccttcgacccggaaaaaaccgggccggagtgcgctgtttgcttgtcggagttcgaacccggtgaaacgggtcgggtcttgccaaaatgtaatcacagtttccacatagaatgtattgacatgtggttccattctcatgcacgtg

SEQ ID NO: 224759 - DNA, 512 bp, Glycine max
gtactcaagcaagctaaggcattattatggtttatcaagtgttgctaatttgtttgggctccaccatagtgtttgcatacatactatggagaaaacaaagcaagaaaaaccttccaccaagtccaaaggccccttcccataattggccacctccaccttgtgtccccaattccccaccaagatttttacaagctctcaacccgccacggacccatcatgcaacttttccttggctcagtcccttgtgtggtggcttccaccgcagaagccgccaaagagttccttaaaacccacgaaatcaacttctccaaccgccccggccaaaacgtcgccgttaagggcttagcctacgattcccaagacttccttttcgcgtttgcacccttcggaccctactggaagttcatgaagaaactctgcatgtccgagcttctcagcggccgaatgatggaccagttccttcccgtgaggcagcaagagaccaagagattcatcagccgcgtgttccgaaa

SEQ ID NO: 224760 - DNA, 519 bp, Glycine max
  unsure (1)..(519): unsure at all n locations
ccacacaggggaaaatgagggagatccttttcgtgcagggagggcaatgcgggaaccagatcggttccaagttctgggaagtggtgtgcgacgagcacggcatagatccgacggggaagtacgtcggaaactcagatctgcaactcgagcgcgtgaacgtctactacaatgaagcctcgtgcgggcgcttcgtgccacgcgcggtgctgatggacctggagcccggaaccatggacagcgtgcggaccgggccgtacgggcagatcttccgccccgacaacttcgtgttcgggcagtcaggcgccggcaacaactgggctaaggggcactacaccgagggcgccgagctcatcgactccgntctcgacgtcgtgcgtaaggaggccgagaactgcgactgcctcaggggttccaggtctgccactcgctcggcggcggaacgggctccgggatggggacgcttcttatttccagatcgagaggagtatcctgacaggatgatgcttactttctccgttt

SEQ ID NO: 224761 - DNA, 573 bp, Glycine max
  unsure (1)..(573): unsure at all n locations
tagtcccccnnaaacaggnnnnnnttttnnnnngtcagtantnaatgaaaggcaggncntagagggnggccgcccttttgttttttttttgcatatatatatttctttctttatttcagattangcaaatgaagttacgcaatctttatcgtacatcacacatcattcccaccttttccaacttaaaagcagaagataacattgtcccatgacgcgacacatgcaccacctaataattataattttacatctttacatacaaaatacaaagactttaaattttaaaaataagaaaagagataaacaaatcatcttaatgaaatgaaaccaaaacccacaaacattggcttgatttttgttgttgctgttgttcccaacttgattaagcattaaccgcttgattgaatcacttcgacttgaaaggaatggccctgattaccacctgttggtataatgctgcaagagctgcaccgatgaatggtcccacccagaagatccactgttcatcccaaccaaagtccttgttgaagattatagcagcaccaagactacgagcagggttgataccatttc

SEQ ID NO: 224762 - DNA, 582 bp, Glycine max
agcagacttaacaacagcacaaagcgtttttactgtctgttcaagctaccatctctctctctctttcttagtgcctccttgccagaagttaaaatggcccaagaaactttcctattcacatctgaatcagtgaacgaggggcaccctgacaagctctgtgaccagatctccgatgctgtgctcgatgcatgcttggagcaggaccctgacagcaaggttgcctgtgaaacctgcaccaagaccaacatggtgatggttttcggagagatcacaaccaaggccaacgtggactatgagaagattgtgcgtgacacatgcaggaacattggttttgtctctgatgatgttggtcttgatgctgacaactgcaaggtcctcgtcaacattgagcaacagagtcctgatattgctcaaggtgtgcacggccacctcacaaagaggcctgaagagattggtgctggtgaccaaggtcatatgttcggctatgccactgacgagactcccgagctcatgcccttgagccatgtccttgccacgaagctcggtgccaagctcaccgaggttcggaagaacgggacatgc

SEQ ID NO: 224763 - DNA, 612 bp, Glycine max
  unsure (1)..(612): unsure at all n locations
atggacccccnnncacaannnnnccgttttnncgntcactatnnngtgnaaggcagcncntaggcggnggccgcccttttttttttttttttgagagaacatttttttttttttcatcatataaaatatatagggtcgggaagaacacatacaagtacacaaaaaaaagggggaaattcataaaaaaatacagaaaaaaaaaaacagaattgagtaagagggaaggaaacatagagaaaattttagcaatcaaataataaaaagccagtagtaatgcaaaagtcccttgccaaaagtgttggaaccccttttagttaaacaggtaccttctcccccttgagtggcttcaccacttcccatgtgaagtcagggtcatctcttccaaaaagtccatatgcagcagtcttaaaaaacctgccatttacacccctcttgaaatcaaggttgatggagatcatgccaggcctgaagtcaaaactcttcttcacaatgctgaggattttcttgttagggatctttccaatgccataagtgtcaacaaacacaaacaaaggctcaggcacaccaatggcatacgaaacttgcacaattgccctcctaacaagcccattt

SEQ ID NO: 224764 - DNA, 596 bp, Glycine max
  unsure (1)..(596): unsure at all n locations
tattattagggtttgccgattgagagttaaagagaaatgggagaacgaaaaggaatcccaatggctttggggctcttggcgatgatcctcttcttcattgcttcctcttcctctcacctcgttcgcgctttcggtgacgccgacgacgcgatcttctacgagtcgttcgacgaggattttgatggacggtggattgtatccgacaaggaggattacaatggtgtctggaagcatgccaagagtgatgggcatgatgattatggacttcttgttagtgaacaagccaggaaatatgctattgtcaaagaacttgccgagtctgtcagtcttaaggatggaacagttgttcttcagtttgagactcgccttcagaatggcctcgaatgtgngtggtgcatatattaaatatcttcgaccccaggagagcggatggaaaccaaaggaatttgacaacgaatctccatattctatcatgtttggtcctgataagtgtggtgctacaacaaggttcacttcattttcagcataagaacccaagagtggggagtatgtgagcatcatctcagtatccccctctgtccatcggacaactaact

SEQ ID NO: 224765 - DNA, 570 bp, Glycine max
  unsure (1)..(570): unsure at all n locations
ntggtcccccnnnaacggannnnccgttttncngttaacaatnnnttaaaggcaacncntagncggnggccgcccttttttttttttttttttgcgttaatttcatattctcattaatagaaaaataattgtagaacttttactatttcaaacactcgagtctccaaaaacaggataagatctacacccctgaagcaaataatcttttccttttcttaaaaggaagaaaaaagaaaatactgaaaacagagtgcacctaaaatgaaactaaacccaaaatttatctgtggtgatgatgatactaaacagggcgccactttaaaataaagattcaaccatttcaagtttctcgccttggcctccgacgcgcatcattagaagcttcctctttctgtttctgcttctctttgatttattcattctctccactaccttggttattgaaagcttctgtgcgtactggattcttctccacctttgcaagtttcttgccaccaaatatgagtctcaagaaaattgacacgaagacaaccacaacagcttcaagaatttcaattgagagatttggct

SEQ ID NO: 224766 - DNA, 500 bp, Glycine max
  unsure (1)..(500): unsure at all n locations
gaagaggagagaaaccgagaaagaagaagaaaactagggttttgcaattgctgcaatggcgcatcaaggagaaccggcgaagctgcggtggggtgagctcgaggaggacgacggcgaggatctggacttcctcctgccgccgcggcaggtgataggccccgacgagaacgggataaagaaggtgatcgagtacaagttcgacgaggacgggaacaaggtgaagatcaccaccaccacgcgcacgcgcaagctcgccaacgcgcgtctcagcaaacgcgccgtcgagcgccgctcctggcccaagttcggcgacgccgtccacgaagacgttggtgcccgcctcaccatggtctccaccgaagagatcctactcgaacgccccaagcctcttggtgccaagtcagaggagccaaagaatgctggagacccattggctcaatttcagaaaggtgctgttcttatggtctgtangacttgtgggaagaagggtgatcactgga

SEQ ID NO: 224767 - DNA, 583 bp, Glycine max
  unsure (1)..(583): unsure at all n locations
naagaccgnnaaacgattttnnaattccccnatgagtatangttnaagncagnncgtagncggnggccgcccttttttttnttttttttttttatttttttttttttttcgacnngagaggatcccactgccaaagagggattttttatacgggaaacgaccccccaaaccaaaaaaccaacattacaactaaaataatagtttactcacaaaaaacaaagaatcctaaaaaaaacatatctgtctaaactaaaacacacaaacgtaaaagcccttcaaaaaccccttataaaaaaaaacgcaaaaacttcaaacatacaattagccctaagggttccccatcaaaatttaaaaaaaaaattgacataaccacccccacataatttgaaaaaagctttataaacatcttaccttttaacaaatgtaacaaacccaaacccttttttaaagcaaagtttttaataaaaagaaaaaaaaacttttaagacagaaccaaaaggaccgaacacctccaaaaaataaagctttttatgagcctcaaaaaaagttgttaccctcaaaaaaaaataacatccctgcccca

SEQ ID NO: 224768 - DNA, 602 bp, Glycine max
  unsure (1)..(602): unsure at all n locations
atggccccccnaccgttttnnnccttttnnnatcatntanactnaagncangncntggggggggncgccttttgttttttttttaattanaacttttacttttattannnnnnaaaaaaacgggcgaaacagaggcttttaagntgaggtgtaaatcctccccaataaccatcctcacttgtcacacaagcctaaatttaaatatttatttacattggcacataggctccttacaaccatatttgccctcaagtgatctttcacctaaaagcaaaccaatcgtttacaaacacataaaaatcatctcctaagatgatctctcataaagaaggaatgcctcaaagcatccctagctgtaagtctttcaaaggagtcatatctaactagcccctgcaaaagatgtataacatctccaactgaatgatcaacatgctgcattataaggttctgtagtcggggaagcttcataacagctttaatactctctcgtgagattgcaccctctggccaatccaacctaccccttcgaacatacttctctgcatgttggtcaactcttttaacattctgtgtggtataggaccaagcaccctctccattat

SEQ ID NO: 224769 - DNA, 511 bp, Glycine max
ccacacaggggaaaatgagggagattctttttgtgcagggagggcaatgcgggaacggggatgggttccaagttctgggaagtggtgtgcgacgagcacggtatagatccgacggggaagtacgtcggaaactcagatctgtaactcgagcgcgtgaacgtttactacaatgaagcctcgtgcgggcgcttagtgccacgcgcggtgctgatggacctggagcccggaaccatggacagcgtgcggaccgggccgtacgggcagatctttcgccccgacaacttcgtgttcgggcagacaggcgccggcaacaactgggctaaggggcactacaccgagggcgccgagctcatcgactcacgtctcgacgtcgcgcgtaaggaggccgtgaactgtgactgccttcaggggttacaggtctgtcactccctcggcggcggaacgggctacgggatggggacgcttcttatttcaagatcagagaggagtatcctgcaggatgatgcatact

SEQ ID NO: 224770 - DNA, 557 bp, Glycine max
tgggttcgtccgtgaagctttcaaggttggctttggaaactgagatgcccgttatggttcagaggcaggaattgcaacgaggagctaagaatgccttgtctttggcccagggggtggtttactggcagctctcccaagcaagcgttggaaaaagtgaaagaacttgtatctgagcctttaattagtcgttatggtaacgatgaaggtattcctgaactcagagcagcattagtcaaaaagttgcgtgatgaaaataatttgcacaaatcttcagtaatggttacatcaggtgccaatcaggcatttgtgaatctagttcttactctctgtgatccgggtgattctgaggttatgtttgctccttactacttcaatgcgtacatgtccttccagatgactggcattaccaatattctagttggtcctggtagctcagacacactccatcctgatgcagattggttggaaagaatattatcagaaaatataccggctccaaagcttgttactgttgtaaatccaggcaatccatctggaacttacattccagagcccct

SEQ ID NO: 224771 - DNA, 622 bp, Glycine max
  unsure (1)..(622): unsure at all n locations
tggggnnnnnnnnnnnnnccttaacccccgagccgtttatgtctatctnctagtcaannattttngtganaagacagncacccagagactagggcgcgggctcgggctttttttttagaaagctacattttttttttntataagagaactaataattcggatagatacaatatatgtggcactacaatattcaacacaagttgcaacagagtactaaaaacagatatttatagaggtaaaacaaggtgactgactagaggcatttggcctcgatctcctctagtgtaagccccttggtttctggtataacaaagtatatgaatacaagagatgccacggctattacacaaaatgtgtaaaacaaaattccagctcccaataatgccttcagtggggaaaaagcaaatgtcaccagggcatttgcaccaaaattgacgagtacagctatacttagtcctcgacctcttaggcgcaaggggaaaatctctgctatcattaaccaaccaattggaccaaaggaaatctgataactgccaacgtacaacaacagaccaattacagcaacaactggtgaattatccaagaaaatgtaatatgaaccgagaaagaataaagagatcac

SEQ ID NO: 224772 - DNA, 573 bp, Glycine max
  unsure (1)..(573): unsure at all n locations
tgagcccccnagcggttttccttttcttntactcatnattnagggaggacagctactagtcgcggccgcgctttttttttttttttgatagttttgtttattcattgcctagcagaatattgcgccagtgaacaaaaaaaaatctacgaaaaatataatcaggaaaaaacacataatatatggaaattagcatataatggaaactaaatcacatcaatggtcaatgactgaaaagcactaaacattactatgcagtattatttatggtagttggaaatattagccatctcttctgacgtcttcaacctaaatgcgtgtgaaaccatttctgcctagcaagacatcatgacatgatcaattgcttgtagtgcttggttnnntttttatcgcacgtcaacatcaggatcctcactgagctcaaccagacatggacgaatagtcttctccacgaccgactgatcaacgatggggaagatggactctaatacctttgccacattgaactttatgttgggcactctgtctttagatgcagcaagaacaaccggtaacaagtttgaacaagtgatttta

SEQ ID NO: 224773 - DNA, 471 bp, Glycine max
gttcctataattttttttctccattatattaccaagctctgcaactttgcttgtgaacgtggagtatcgtctcctacccatttttactttactcaatattgcactggtggcaacccatgctgctttaccccctgaagtttactggaagtcggtgcttcctactacgccaatgccaaaagccatcactgatatcctttactctgattgggtggaagagaaaagcagctcagtgcatgttggaggtggaggcgtgaacgtgcatacaggaaaaggaggtggcagtggcaccactgtcaacgttggtggaaaaggaggcggaggcgtaaacgtgcatgcaggccacaagggaaagccagtgcatgtttcagttggctcaaagtctccatttgattacgtctacgccgccacggaaactcaattacacgatgaccccaacgtggcactcttcttcttgaaaaggacttgcattct

SEQ ID NO: 224774 - DNA, 563 bp, Glycine max
gtggtgccttatcgctgtggttatcatcttcttcttcctctttcttagatctcttctgtctctacgccgcacgccgaaaccatggccggaaaaggagagggtcctgctatcggaatcgatctcggaaccacctactcttgcgtcggtgtgtggcaacatgaccgcgttgaaatcatcgccaacgaccaagggaacagaaccacgccgtcttacgtcggattcactgacaccgagcgtctcatcggtgatgcggccaagaatcaagtcgccatgaaccccatcaacaccgtcttcgatgccaagaggttgattggtcgtagattcagtgattcctctgttcagagtgatatcaaattgtggcctttcaaggtcattcctggtgctgctgacaagccaatgatcgtggttaactcaagggtgaagagaagcaatttgccgcagaagaaatctcttccatggtgctcatcaagatgcgtgagattgctgaggcttacctaggctccacagtgaagaatgctgttgtcaccgtccctgcttacttcaatgattctcagcgtcaagct

SEQ ID NO: 224775 - DNA, 440 bp, Glycine max
ggagagaccaactcatgggtaggtaatgatgggaaggtgtaccatagccacgaggggcgggcgccgcattctcacgaacccatttactcccccggctacttcaccagaagagctccaccgcttctcaacagaaacttcaacgaaagagccttcaccgtcggaatcggtggacccgtcggtactggcaaaacagctctcatgttggccctttgtgaactcttgcgcgaaaactacagtctcgcagctgtgacaaatgatatattcactaaagaggatggtgagttcttggtgaagcacaaagcacttcctgaggaaaggatacgcgctgtagaaactgggggttgcccacatgctgctattcgggaggacatcagtattaatcttggaccgctggaggagctttctaacctcttcaaagcagatatacttctttgtgaatc

SEQ ID NO: 224776 - DNA, 541 bp, Glycine max
  unsure (1)..(541): unsure at all n locations
atgggcccccaaacaggttttaattcccatnatactaaatgaaaggangacagggagtagtcgnggccccgcttttttttttttttttttttttttctgntggaacatgnnnatgaactgggggctgtgtcattttgaacagacacaacatacgaactcgaatccacgtcttgaacatcatgtttctggagttattactaaacatgctaagaaaatatacaacacaaaggaaaccgtttttcaaaaaaatgttaatgacgcttattccctgtggctgctttccatgcctgcaagacaagattcccaattttttctactacaatcttatgcttcacctgtgcaaaaacaaatggccctccatcttttatccacataacattccgctgcatgactgtcaaatcaaccccaattgcaggaacaaggtcagtcttgtttatcacaaggagatcagcttgcgtgattccaggaccaccttttccaggtattttatcaccgtcagacacgtctattatgtaaataatatagatcaaccaattccctg

SEQ ID NO: 224777 - DNA, 415 bp, Glycine max
  unsure (1)..(415): unsure at all n locations
cgcactttatctgaaagcaaattccctacctagggtcaaccgtgacgccataggggctcttgcgcgtttgaacgccttcaacatctttgcaacgggatcaggtgctctgatggtcggaacctgagggagatgtcaggcagagggcggggacggcggggacggcgaggatagagaatgnacaactaccaagggaacataaccgcgccgcattacgaaggatacactgacaccgcgcgcacgatttgtgatgcgaacaaaaataaagtcaccgtgaacgccatcaacaccgattctgatgcccagaggatgattgttcataaaggcaatgatttctctgttcatactgctatcaaagagtggactttcaaggccatttctggtgttgataacaagccattgatcactaggaactaca

SEQ ID NO: 224778 - DNA, 530 bp, Glycine max
  unsure (1)..(530): unsure at all n locations
tggaccccnnnaagcaatttttaagttcccctgagtaatnaatganaggnangccccagggaggagggcccgcccgcgcttnnnnnnnaanncnccactttttctttattaacgcnacaagccgcaccacagcaaagactatttaaaacaacaattcccgaaacaccccaaacatattattatatataaccacaaacaccttccagatgccaaattaagaatcaaacacaagaacagcccaggatacaactttgaatgccctactagtacctgaccaaacaaaacacatgaaccaattacaacacacacagtatccaccaccaaaatcaaaaccaatccactgccaacaattacaaacccaccaataccttaaaaaactcaaaaatgccaaccgcaaaaaatcatcccaatgggccaaacacaaatcctcaaagaacacacactcataaataacaaaacaggcgaaatttgattcctcccacttccacactagaacttattcaaaacccacacaacttcaccacaaatcc

SEQ ID NO: 224779 - DNA, 500 bp, Glycine max
ctcttgttggttttttcactaccagctctgacttttaattaacatgcagatcaacgcctcaatgatgttgttggcagtgcttactatgttgcacctgaagtgctccatagatcttatagtgttgaaggagacttatggaagtattggggttatatcatacatattgttatgtggaagtagaccattttgggcacgcacggaatcaggaattttccgatctgtcttaagagcaaatcctaactttgatgattcaccttggccatcaatatcacccgaagctaaagactttgtgaagagacttctgaacaaggaccacaggaaaaggatgactgctgctcaagctttagctcacccatggttgagaaacgaaaaaaatgctattcctttagatattttgatatacaagttagtaaagtcatatgtgcgtgcctcacctttgagacgtgcagcattgaaggtagtcatctgttatgcttccatcagaacaaatgcatattata

SEQ ID NO: 224780 - DNA, 556 bp, Glycine max
  unsure (1)..(556): unsure at all n locations
agatactgtacaatattctggtgcttatgctattttaggagttgataatagtgtgcgtttggatagcttctgcgaaaacttcaaggttgaagtgaagcgacttacggatagcgatatagaatttgatatgattggaatcgatccggcaattgccaatgcatttcgaagaatccttatagcagaggttccaacaatggctattgaaagagtatatatcgcaaacaatacatcagttgtacaagatgaagttctttcccatagattgggtctcattccaattcgtgctgatcccaggctatttgaatatccagaaaatgcaggagatgacaagaatgaaaagaacaccattgtcttcaagctacatgttcgttgtcaagtgggtcaacctcgtattactgtaaaatcagataaacttgaagtggttacctaatgngggtgagcttccctgtgaagatgtcaaaccaaatgcaggttcaaaaccaaaaacatttacatctttcacttgcagccaagattcacttcctgaattttccaacaattcaattggtcttacata

SEQ ID NO: 224781 - DNA, 556 bp, Glycine max
ggtcttaattttccatatgttgcaagtagttgggacaggatcctaactcatttgcctatcaatcccagtactcaagatattttatctaaagattcaagttaaggtgggaaaaatgatcctcagaaagcaggagtccttgaggatgatactatataggaatgcctgaagttcacaaacatcctcacatcatgattagtgaatttctaatccttcattgattaggattccatctatcaattcagaacaatccggctctcatttatgcgctacatttatggaattagtgcgactgtgcctccagtaggatgttggtggccacattgacatcatttctggcctgcactaaggcttgtctggcagaattcctgtcaaagcccatagagacaagggtagtgatcgagtcctccgttggctctactgcagcttgcattggagcagggtaatttctctccatttggtgagttggataggaaggtaaattcctgacaacattccttgctgatgatggtgcacgtggactccccatagatggcaacgaaattcttgaaaataatga

SEQ ID NO: 224782 - DNA, 451 bp, Glycine max
aataaagcaaaatgcagacatgccccaaacaaaacaagccttattcaacccaaattggtttcatatcacagaaaccaacaggatgccgccttcctccttactggtcccacccactcgaacaaaagttctacagaaataaaaatggctacaattcttctaccacaaatctgaaaagtctaacaccaaaaatcaaaaaaaggaaaattaaacaatcaaatccgattgataaaaccgatttttgtctttccctcactcacttttcagttgatcatctcaatcacttagtacctgtagtgagcaggcttgtatggaccctcaacaggcacactgatgtaatcagcctgggacttgctaagctgggtcagcttagctccaagtttgcccaggtgaagtgcagccaccttctcatcaaggtgcttgggcaaaacgtaaaccttcttctcgtacttgc

SEQ ID NO: 224783 - DNA, 563 bp, Glycine max
  unsure (1)..(563): unsure at all n locations
atgagcccccaaccgtctttaattttnnncaactataaatncagggangacagctactagtcgcggccgcgcttttttttttttttttaaatttgaattattcttttgcacaaacaacaatatgaattgtaaagttaatatcatttattcaaacctaaacaaacacagtaacacaccatcacaaactcatgtaaccctgccaataaaccatcacccctaaactccagcaccagcagcttgctcacttcaatacacaactcccagaatttctcatgtcaccacgtggcaagcacgctgatgtggagccaagtgttgtgcttacacgtaggtgtaccctccataatacaaccaaagacttaagcatcatataataatattaataaagtaaactaaagaaataaaaagaaaaaaaaaaaagaggcttttcaacatggcatgcaaaatggtagacctgatccccacaactaggaccatttttaaacttgtttttctcactcacactgtccataggtctaagcttcagtcttctcaacaggaacctctactggggtttcaactgactc

SEQ ID NO: 224784 - DNA, 461 bp, Glycine max
  unsure (1)..(461): unsure at all n locations
ctcgagccggaaagtaaaaggttcgtttttacccttctttcttcccagaagcgatctctaaagccgacccatttcggaattcggaaaacccagtgctgatcgctctctgggtgttcccaaaatgaagcttcggagatcttcgctgtgcgtctttctagggtttctggcgctgttcctttcgccgccgccgtcaatggcgaaattcgtggtggagaagaacagcttgacggtgacgtcgccggacaacatcaagggcacgcacgatagcgcgattgggaacttcgggataccccaatacggaggcagcatggctggnaacgtgttgtacccaaaggacaacnaaaagggttgcaaggagttcgatgagtatgggatttccttcaaatccaaacccggtgctcttcccactatcgtttgctcgatcgaggaaatgcttctttgctttgaagtatgggatgcac

SEQ ID NO: 224785 - DNA, 501 bp, Glycine max
  unsure (1)..(501): unsure at all n locations
tttnttnnnnnnnnnaanggtttctttttcctgtactaaaaaaaacacgatgggttggaatcacaagtgtggaactcaagaagtcacataaacagaaatcctagaatctagtgaaatgaaataacttaaaaaagtctggcctaaattaagtatacaatttgctacatccccaataaaaagcgtaggataactatctaattctgaaccttttattgtccatatgatacagagtctatcaaattcaaatgctcagaatctgaactcaaaagggtacacagggtaagccacacccaggcttcacacacaatatccaaagagactgacaattcacgctctttcttcgtgcacgtgatttacaacttctccttggctgtccaagggcatatactgtgccatgatggctctgatttcagaatccatatatgaccttattctgtatttgtacacaaggtatgcccctgcagcagccacaactaagccaactaaaataacccaaaaagc

SEQ ID NO: 224786 - DNA, 523 bp, Glycine max
ggagagaccaactcatgggtatttattgatgggaaggtgtaccatagccacgggggggtggcgccgtattctcacgaacccatttactcccccggctacttcaccagaagagctccaccgcttctcaacagaaacttcaacgaaagagccttcaccgtcggaatcggtggacccgtcggtactggcaaaacagctctcatgttggccctttgtgaactcttgcgcgaaaactacagtcttagagctgggacatacgatatattcactaaagaggatggcgagttcttggtgaagcacaaagcacttgctgatgaaaggatacgcgctgcagaaactgcaggatgcccacatgctgctattcgggaggacatcagtattaatctaggacccggggaggagctctctaacctcttcaaagcatatatacttctttgtgaatctagaggagataacctggctgtcaatttcagcagggaataggctgactatattatttacataatagacgtgtctggcggtgata

SEQ ID NO: 224787 - DNA, 513 bp, Glycine max
  unsure (1)..(513): unsure at all n locations
cttaacaacagcacaaagcgggttactgtctgttcaagctaccatctctctctctctttcttagtgcctccttgccagaagttaaaatggcccaagaaactttcctattcacatctgaatcagtgaacgaggggcaccctgacaagctctgtgaccagatctccgatgctgtgctcgatgcatgcttggagcaggaccctgacagcaaggttgcctgtgaaacctgcaccaagaccaacatggtgatggttttcggagagatcacaaccaaggccaacgtggactatgagaagattgtgcgtgacacatgcaggaacattggttatgtctctgatgatgttggtcttgatgctgacaactgcaaggtcctcgtcaacattgagcaacagagtcctgatattgctcaaggtgtgcacgggcacctcacatagaggcctgacgagattggtgctggtgaccaaggtcatatgttncgctatgccactgacgagactcccgagctcatgcccttga

SEQ ID NO: 224788 - DNA, 531 bp, Glycine max
  unsure (1)..(531): unsure at all n locations
agggcctggagcccatatagtgaagcctaatatgatagagcgtgaggatcatgcccatggaatgaagtaactaacccagtcccttgacttggctcgctagttcgattcgattcgattctcggagatgaagaagggcttgtgttggctttgagtttgtgtttgggttcatcatcggagcaattaaattcgcgagaatgcgagaatctcggtttcatcggacttgtcttgtgctccgactgcaacactctctctgagtacgtcaaggacaaagtgattatttgaatcgtctaaatcaatatcgccagagggtttggacttgtaaaattactggaaaatctggcttgacttatngaagaggctctggtgtcagagaagcatgctgctgagaaagttcaacagattccggaagaaatagtggcacctgctctaagattatccattacaatagggatagaaagatcagagtcatgacaccggcaagaaagaaaatcgtgagttcatgcacagaactatcatctcatatatgcactg

SEQ ID NO: 224789 - DNA, 667 bp, Glycine max
  unsure (1)..(667): unsure at all n locations
ttgtccccccnaccaggccccttccccngttcgtctanatncagggccgacagcgactagtcgcggccgcccttttttttttttttgcatttttacttttaatatatcctttaaacacatggggatagtcaaaggaagaggagaagtttattcaaacccaattataatttgattttctagccttgcttaaattgctgtagtattccttttactttgacactactacaggattataagcagcagaggccatcaaaagagcttgttgccaaagacctgccggctgccaagtaaatgtgtgtgcctatcatcaataggtagaacaaccaacctgccggcacaaacatagatatctgtgtggatgacccaattgctactcctaaggaaatgtcaagtttatctttcatggcaaacattatagcactggcatgttcagttgcattccccactagtggaagcaatatgacactaataaatgctactggaatttcccatgccatagatgctccctcgttcacagagacgtaaagatttctttgactttttaactgaaaaaataggtatgcaacataagccacaagcataatgcagctgctgaatcttgaaagtgacaactctgacttccaacatggacctcactgtgagtgtagtgtagaacagcaaggaaaag

SEQ ID NO: 224790 - DNA, 565 bp, Glycine max
  unsure (1)..(565): unsure at all n locations
ctagggttatcatttctccatttccattttctctctcacttttcaagaatcgtgagctatgggaaagtcttacccaactgtgagtgctgattaccagaaggccgttgagaaggcgaagaagaagctcagaggcttcatcgctgagaagagatgcgctcctctaatgctccgtttggcatggcactctgctggaacctttgacaagggcacgaagaccggtggacccttcggaaccatcaagcaccctgccgaactggctcacagcgctaacaacggtcttgacatcgctgttaggcttttggagccactcaaggcggagttccctattttgagctacgccgatttctaccagttggctggcgttgttgccgttgaggtcacgggtggacctgaagttccattccaccctggaagagaggacaagcctgagccaccaccagagggntcgcttgcccgatgccactaacggttctgaccatttgagagatgtgtttggcaaagctatggggcttactgaccaagatatcgttgctctatctgggggtcacactattggagctgcaca

SEQ ID NO: 224791 - DNA, 498 bp, Glycine max
cgatatatcactatcattatcgctgaacgggggtgtttaacaaaagtatcaaccacaaataaaaacaacaacccaacttcccaatcatcgtcacgtccagcaaaatacattcaaaagctatctaaaatctggggaacccacattggcattaaaaaccatgaccatacaattttttagagaaatattatgggcaccatgcctcttcaacaatcccctaaacgttgcttaggcatcagcaaacccaagctcggaaagcttttggtgagcctcagcgtaatcagcaaagaaggcatcttcgtccgctgcatatttatcaacgagagggcggaatacagggtcagacaaaagagccttgtcagaaggtagctgaaggagaccttccttctcaccactcaacaactccgtgaagtatgagttgtcgaaaataagaggattagaagtccagggaccctcaaatccaaaacgcttcttgtgtgcaagctccatagtgtgaccccc

SEQ ID NO: 224792 - DNA, 405 bp, Glycine max
  unsure (1)..(405): unsure at all n locations
gcggcgatggagaagatgccgttgatgaaatccgtggtgtacgaggcgttccgaatcgacccgccggtggcgctgcagttcgggagggcgaagagagacttgatcattgagagccacgaccacgcgtttcaggtgaaggaaggggagatgctgttcgggtaccaaccattcgcgacgaaggatcctaggatcttcgagagggccgaggagtttgtcggggacaggccgttcggngangaannnnnnnannnnnncangnncaanngatcaaggagaagggcagtttatcccaacttgaaagtgacaatgataaaagtgcgactaatgggaaaatccatgctgaagaattttctcgcacagacatgaaggagtccagttttataatttttttttcttaagttttat

SEQ ID NO: 224793 - DNA, 472 bp, Glycine max
ctcgagccgtgttgacacacaaaaaatgatcaccttaacagacttctaccatgtgatgactgcaatggtgccactctatgtggccatgatactagcctatggctcagtgaagtggtggaagattttctcccctgatcaatgctctggcatcaaccgttttgtggcactctttgcagtgcctcttctctccttccacttcatagcctccaacaacccttatgagatgaacctgaggttcctagctgctgacacccttcaaaagatcataatactagtcctccttgcagtttggagcaacatcaccaaaagggggttgtttggaatgggccataaccttgttctctctctccaccctcccaaacactatggttatgggcatccctttgctcaagggatgtatggtgacttctcagggagcctcatggtgcaaattgtggtcctccagtgcatcatttggtacaccttgatgctc

SEQ ID NO: 224794 - DNA, 495 bp, Glycine max
  unsure (1)..(495): unsure at all n locations
atatcaccttttaccaggggggtccccatgatgaggcattaataacacaaccaaagtaatgtttacatgtctgagagcatgaaaaaacgtgaattactacaaaccaatattatttttcatctactttgttaaaccagcaatgaacattaggattacgtacaacaacaccaaaggcctgcaaattgcaaaagaaccgagactggggggggggaatggcaggccgttgctaggccattgctgttagagatagatgtgaaatcatgccaccgcagtcaggcatggatgaaatgcagtaccacatgctatccactgtcgttttctcccacgtggcaccacacacccaggaaccttcagccattctttctttgctatgttgtaagtaaccaatcggttcatttgttttgatctcaaggacaacatgagcaagcctttgttccccaagcaagtcattctaacgtgcttcccatanaagtccaagcaccatatgtttggcat

SEQ ID NO: 224795 - DNA, 563 bp, Glycine max
attgccatttcaatccccagtttctttttcaacgtcctcttacgagcagatccgaatggtccttcccagtttcaaaccctaattccctcattcccatggcctcagaagagcccactgtcgcggtggaacccgctcccgaacctgccaccgccgagcctcccccggaggagaaggaggagcccaaacctgaagccaaggctaagaaaaccaaggaacccaaacctaaaaaggtttccagaccacgcaaccctcccactcatccttcctacgaggagatgattaaagacgcaattacctcgctgaaggagaaaaccggttcgagccaacacgcgattgcgaagttcatcgaggagaagcacaagcagcttccaccgaacttcaggaagcttcttctctaccatttgaagaaacttgtagccgctgggaaactcgtcaaagtcaaaggctccttcaagctcccacctacccgaccttctgcatcttcttcttcttcgccggcgaagaagaagaagcccgcacctggctagccccaacccaagcccaagcctaagcctaagcccaag

SEQ ID NO: 224796 - DNA, 529 bp, Glycine max
catatattataggatcatctgtgacccgaactactccaccaagaggacaaagaacttcacaaaactaaccctaaaaccactctacccaccacattctcacttcctaccccctctcttagccgtagcctttttcgctggagactttacactctttggtttcacactcttcactggcgctttcttagcaggcgctactttcttcgctgccggcttcgcagcaggagctgctttcttccctggtgaagtccgtgtcgacgtccttgaagccttggcgggcttcgctttgggctttgccgcgggcttggcagcaacagcctttgttttagcagcgggcttgggcttgggcttggcagctggcttagtccctttgggcttggcggcagcaggcttgggcttggaagcagcagcaacagcagcctttggtttaggggcggacttgggcttggctggagctttggctttaggcttagcaactgccttgggcttagctggtgcctttgacttaattgccttaatgtccttggcttta

SEQ ID NO: 224797 - DNA, 543 bp, Glycine max
gagagaaaagcgtgaatcatgtcggtcgaagagcatcacttcgattctcaggcggatgcgggagcgtccaagacgtatcctcagcaggctggtaccattcgcaagaatggctacatcgtcatcaaatccaggccttgcaaggttgtagaggtctctacgtcaaagacaggcaagcatggacatgcaaagtgtcactttgctgcaattgatatttttaatgggaaaaagcttgaagatattgttccatcatcccacaactgtgatgttccacatgtgaatcgcactgactatcagcttattgatatctctgaagacggctttgtgagtctgttgactgataatggaaataccaaggatgatctgaagcttcctactgatgaggcattgcttgctcagattaaagatggattttctgaaagaaaagatcttgaggtttctgttatgctctgcatgggagaagaacagatctgttcactgaaggacactcgtcccaacaattaatatgatgctatggctgtagctatagctgatagcacgcttttt

SEQ ID NO: 224798 - DNA, 360 bp, Glycine max
caacaacaaaaacaaataaaacgcattatcattattaatggcctctcattctcccagtagagaaggccattatcttaatattgtactattccttgcctttctcatctccatcatcaacccttcacaacaagacccttcttcccctcttcccccattaaacccaagactcaccaaagcttacacagcactccaagcatggaaatacaaaatcacctcagaccccaaaaacttcaccttaaactggtgtggccccaatgtttgcaactacactggcatatactgtgcacctgccctagatgaccctcacatctacacagttgctggagttgacctaaaccatgccaccatatctggttcatt

SEQ ID NO: 224799 - DNA, 419 bp, Glycine max
atcagaagacaggccgttccatgtgatttgggtttgtttattttcggaatcagcaggaggctcaaagtgctataaatgatttgactggaaaatggcttggaagtagacagattcgttgtcattgggcaaccacaggggccagtgccagtgatgaaaagcagacttcagattcgataagtgtcgtggagttgaccaatggatcatctgaagatggccaacagacaaccaatgatgacactcctgagaagaatcctcaatataccactgtttatgtcggcaatcttgctccagaggctacttctgttgatctccatcaacattttcattctcttaatgccagaactattgaagatgtaagggtgcaacgagacacaggttatgggtttgtgagatacagcacccatgctgaagcagctctt

SEQ ID NO: 224800 - DNA, 516 bp, Glycine max
gcttatattaattcattagaatttttggagacaagattatgatttattgtctgtgtggctggaactcccgttaactcaaaatacacaatgtggcatgaagagttaaaagctggcattctgcatattaactttgttctattgatttttcagcacgtcaaaatataaaacccgggtcctattcatgtttggcgtagttcctttttattacctgtacaaaagaaactcaagcaacttgatctgcttctgacttctgcatgtttatacatttgcatttagcccgtttatcgttcagagtcttgaattctttctgaagatcttttatgtagtctacagccaagtccaacatctctgctgtgctagtttgcttgtccatgtttggaacaagctcttgcaattttcttattcgttcactgatccgacttcttctcaccctttcggcaatgcttcgaggatgtgtagcaaagcctctcttaactctgattttacaaggaacagaatctgaaaactgaagcaaac

SEQ ID NO: 224801 - DNA, 674 bp, Glycine max
  unsure (1)..(674): unsure at all n locations
natggtcccccnnaaagcggnnaagcttttgacnnntcagtntanaattaaaggcangaccagcggagtagtcggcggccgcgctttttttttttttttttttatttatacttctattaattnattttaaagcataggggtatgaaaaccttaatcattgacgaaatgccattcccattatcaacgttcactcctgatcaaggagagacatgaagaaataaaaattgggaaacttcttgtctttcaagctttccacagtctcccaaagacttacttccaaaggaataaattcaatccccaagctccattcaaattcaagggaccaccctaaaaatgcctctttttctaccttaaagatatagaaatttccacaattgtaaatgcaaagcaaagtcataagttcaaaacaaattcaatccgacttgtatattttgattaatacaagccttatttcgcattaataatttccccttaagcatggagtttctgaaaccaaaatcactgactagacaaagttagtgttatcaatatttattcttcaaggagatatcacgaactagaagtccacaaacttcttttcttttaaactttcaactgtctccctgaggctcacttccaagggataaattcaactcccagctctttgcctttttttggaaacctgaaatgtggca

SEQ ID NO: 224802 - DNA, 534 bp, Glycine max
aattaataccttttgtggttttctattctggagaaatgcgggcggagaatgataaccaaatggtatacttttctactatcaagcatgtcttatagtaccaatacccttaaaacaaagtaaaagatgaagttttttttttttttcaaaaaaaaaaagtggggggaagcgcaaaagcattttctatacgaaagcaagttgcttttctcacatggccctaacagcttggaatcttggttccttgggaaggaacttctgctcagcatagacagacatgtagtcaccaaaaacaaacttaggataagtttcatctacttgttggtcttctttctccacaagttgtggtgcaggacatatggtggccttgaatgaaggattatagaaggaggcaattgatcttctgttcccatctggtgtggccagaaccctgtgccagcaactcttgtatctaccattgctcaagaccttaatctgatcaccagtgttgatgacaatggcatttggaaaggctgcacatcaatccattgcccttttttc

SEQ ID NO: 224803 - DNA, 563 bp, Glycine max
  unsure (1)..(563): unsure at all n locations
gtggtcccccnatacagnnaagcttggagcgntctntctanattnacggcacgacagctactagtcggggccgccctttttttttttttttatttttttttttttttttttttttttttttttttttgtgttggtggggacaaatttgtatcaagcacaaagcatgatcagcaaaaatacaacatagttggaaaacaaactatcaagcaattcagttggaaataatataaataaaacttcaccacgttggggctttgtaaactcaactcagcatacagtctgagcaaaaaacatttcatttattaggaaaatcctgattggttcaaatacagtaatctaaattctaaactgtttggcaagcttgaaccactcaatatgggaagacccctttatgtcaaccctttcatatgtatgaacaccaaagtagtctcgttgagcttgcaccaaattagctggcaacctttcccttctgtaagtgtcaaaataagcaagactagcagacatacctggagtgctgataccagaattgatagcaagggaaacaactctccttcaagcaaatt

SEQ ID NO: 224804 - DNA, 482 bp, Glycine max
  unsure (1)..(482): unsure at all n locations
gttcagccatcgcttacaacgagcttacaaaagatgcagccttggatccaacggggctggtggcagtagctgtggcccatgcatttgcactgtttgtaggtgtctccgtcgcagccaacatctcgggtggccatttgaacccagctgttacttttggattggccattggaggcaacatcaccctcattactggtttcttatactggattgcccagttgttgggttccattgtggcatgcctcctcctcaatttcatcaccgccaagagcattccaagccacgcaccggcaactggtgtgaacgattttcaagctgtagtgtttgagattgtaatcacatttgggnttggtttaccactgtgtatgcaactgcagcagacccaaagaaggggtcattgggtatcattgcacccattgctattgggttccgtggtgggtgccaacatcttagcagcaggcccattcagtggcgggtcaatgaac

SEQ ID NO: 224805 - DNA, 473 bp, Glycine max
ccaagaatcgatgcattaagttcgaattataatttacataattattacaagcggggaataataaataaaggtccagttaaaaatgcaaaaagccatgaagctcgagacatcaaacggggaacaaaaatgaaacttgaagggacaggacacacaagtgaatagaacaagaagtcatatttttcaagttgaagctcaagggtaggtttcaaaggctgggacagccgcatatgaaccaatgaagacgtttccataaataaagccagccaaacctcctccaataaatgggccaacccaatagatccagttagcagcgaagtctccactgaccacagctgggccaaatgagcgagctgggttcattgaacccccactgaatgggcctgctgctaaaatgttggcacccacaacgaacccaatagcaatgggtgcaatgatacccaatgaccccttctttgggtctgctgcagttgcat

SEQ ID NO: 224806 - DNA, 540 bp, Glycine max
cagaagctagtgatcaatcatcaacacagagctgagtgtgttgctctgtgaatccaccttcttcttccattggaggaccatttcctcctggaatagaaatactaccacacttttcttttttcacttctctaagttgctaagttaattgctccttcattttttcactcttcgttctcgcgtacccgtgtcacggtaactcgtggtgaagtgttcgaaaatgactgtcacacctaagatctcagttaacgatgggaaacttgttgtccatggtaagaccattctgactggagtgccagacaacgttgtgctgactccaggttctggaaggggtcttgtgactggtgcttttgttggtgccacagcttcacacagcaaaagtctccatgtgtttccaagggtgttttagaggggctccggttcatgtgttggttccggttcaagttatggtggatgactcagagaatgggaacttgtgggagggatgttcctctggagactcaattcatgcttattgagagcaaagagagtgaaactgatggg

SEQ ID NO: 224807 - DNA, 528 bp, Glycine max
ggtctataacgacaagagaggatatgtcacgctaagacatcattatttctcaatttatatagctctttaaccataattccctggatacaacatgtatactagtgtatacaccatattcaaagatagctaataaatacttgactgtataattaatatcacacaaacgtaaagtggcaatatatagtgtaaatatatataagcttaatttatacacagaaaccatgagtataaagcatctttatacaaaatattcaacaagaatttactttattaccacatcattatagtaaaatgtcatgataaagtggtgaaattctattgaatgcttgtgtcaagatgtttttataggatcaaagtgtgtatataaattaaactatattttttaatcaatatatatatattgttcacacattttatatatatatatatataagaggtgcttaacaagttggataggcaataccacaagaactaacggtttttttggcattaggagagttaacatactgcttcaagctagggttttga

SEQ ID NO: 224808 - DNA, 381 bp, Glycine max
gttactgctttgtcaagctatgaggacaaggaggacaagttcaaagaggaggttgctcaattacggcagcgtttcttccattctatagcgcctggaggtctggctggtgatcggcgtggtgttgtgcctgcttctgccttttctattagtgcacaacaaatatggaaagtcattcgggaaaacaaggatctcgatcttccagctcataaggtaatggttgcaacagtgcgttgtgaagagattgctaatgaaaaacttaaccgactacgctctgcaagggttggttggaattggaggaagctattgaattgggtcctgtacgaggttttggggaaaaagctgagcttcattatttgatgcctgcctttcacaatatgatga

SEQ ID NO: 224809 - DNA, 401 bp, Glycine max
tccgtctctgcaattacgatggcgcctagggacaagactagtgccgttaagcctagcggtaacgccggggtgaaggacctgcattttcgtggagtcaggaagagaccgtgggggaggttcgccgccgagatcagagatcccgccaagaagacccgcgtctggctcggaaccttcgacaccgcggaggaggcggcccgtgcctacgacgccgccgcgcgggagtttcgcggccctaaggcgaagacaaacttccctctcccttcggaaaattttaagaacgcgagccctagccaaagcagcacggtggagtcctccagccgcgaccgcgacgtcgccgccgattcctctccgctcgacctcaacctcgcccccggtcgccgtctccttcgctcgattcccct

SEQ ID NO: 224810 - DNA, 432 bp, Glycine max
tccgtctctgcaattacgatggcgcccagggacaagactagtgccgttaagcctagcggtaacgccggggtgaaggacctgcattttcgtggagtcaggaagagaccgtgggggaggttcgccgccgagatcagagatcccgccaagaagacccgcgtctggctcggaaccttcgacaccgcggaggaggcggcccgtgcctacgacgccgccgcgcgggagtttcgcggccctaaggcgaagacaaacttccctctcccttcggaaaattttaagaacgcgagccctagccaaagcagcacggtggagtcctccagccgcgaccgcgacgtcgccgccgattcctcttcgctcgacctcaacctcgcccccgtcgccgtctcctccgctcgattccccttccggaaccagttcccggttttccccggcgcg

SEQ ID NO: 224811 - DNA, 496 bp, Glycine max
gggaaaaataagtttaaagcaatatattgctattgtttttaatacacaatagcatgcaaggaaattcttacaaaggcaagactaatcagctattctatcgctaataaaattgaaattaaagaaacaaaaatagcttcctagagccaaaatttacaacttgcttctccactaaattcaacagaaaaataaccctagaaaaacacttcaccatatatattttaaacctattttagaaatcctctggtggatatgcacatggagtagattgctgtacatcttgaggcactccactccatcaaaacgagtctaggtaattatagtgacgttttctgttgaactctaacaagctaccataggttcggtcagcaatacccacaaatagagcttctgtgtctgggctaaaggatatgccagcaatctcaccaaataggtcaatctcttgaccttgttcataacctgaatgtgagtcaaaaatatggacgaagtctgcaggttc

SEQ ID NO: 224812 - DNA, 575 bp, Glycine max
  unsure (1)..(575): unsure at all n locations
aaaaagaatccttaagattaaataattagcataaaaaggacaatacaatctccaatattcagtaaggaactcaaattacgctggccatggaccaggtggaacagttgcagagtttttaacattaatgcatccaacgttctcaaccagaaagtaaaaaatgtacatcctcttgcccttttccccttattaaataacacaacttaaaaacaggggggcagtttggccacagacattgaccgtagttcatctcacagtcggcaacattaaaatggaaggaaggaataacctgatacattttcatatccaaaaaatggaaaattttgttgtttggcattgccaagagttcctaaattattaaatttagcaattacaaaaaaaaagggattaaaatgagaacagggctgtgtgtgattaagacgctgcagattccttagcaattttctcggccttggcaatgacctcctcaataccgccaaccatgtaaaacgactgctctggaaggtcatcgtattttccatccaacacaccctgnaagctgcaacgttctccttcaactcaacatattttctggggca

SEQ ID NO: 224813 - DNA, 509 bp, Glycine max
aaaacaaaggaactcgagacaaaacttttctctaataccttttagctacatataaatacacgtatgatttagacaacacttctaattaaaaacaagaatgaaatacacgcactttgtaattgatttaaagttacagacagcaccgagaaacatatatctacatcattattgagcatctagctgtagaaaacccgaagtaaaattgtcacacaataatagcatcactagaattatgaactaagtactttgttgatcagagactttggttaaactggaaccgtcctagcagaccctgccatctctatagcctcagcaccatcatctttattctgcccacttaactcttccagtgattttccctttgattctggtactaacaaggtgaataccattccaaagaagttgatcacaccaagcacaatgaggggagttcttaaccccaataccagttgggtaaccatgatcaaccttgttggggatcgtactttgtgcagcatacaagaatccaa

SEQ ID NO: 224814 - DNA, 504 bp, Glycine max
aaagaagaatcattttcagtacatggcattcagtatgctaagaaattatgacaattaggcgttattataatgccaaataatacaattgcagactaacaaactcatatgttgttagcaatacatcaaaaataaactgatggtgaggtaggggaatttataagaaattatgtaaaacagaaaataaaagatgaatcattattgacattattttgccatgtatacatgtaagttaatagaagcagactcaaaggctagaagagccccagctggcatcaacagcatcaatgatctttgcatgtagtgtggctccagaacaagcaactatgccacgatcaaggccttctaaatataagccttttgagaagtctaggggaagtcctccagcatctgttaccatcccaccagcttcttgtatgatgataacgcctgcagcatgatcccatattttctccttgtaaccggcccttgcaaacttcatgaaaacctcagcatccccacgagcta

SEQ ID NO: 224815 - DNA, 410 bp, Glycine max
agcatcacaatttaatcactttacaaagaacgtaatactacaagcagtcgaacctcaacaaaatctgtctacaagagcacaactgcatccatggtgccaataacggcaaaaatggcagtagtgaaatacagccagggacaacaaaagtcaatggattttttttttccaaataagatataacacacctgtccaggatatttatcaaatattctaacaaaaacaatatataaacaaaaactaaaagaaaaaacaaaatttaaaacacattaacccatgagaagagtctcaatggcttcgaagaaaagtgcagacatttcagggcttggagtcttgattgcacatttgacgccagggtttccagtcaacgtggtaagttcaattaagaatggtatcccttagggagttagctg

SEQ ID NO: 224816 - DNA, 497 bp, Glycine max
gggatgagaagatttggaaatatcttgattaagtgatatacaaaaagctattttctaggtgcatttccataggctacaatttctttttaaaaaaaaacagcacccaaaagaacttcaccacaccattttggtcccccacacgtcacttttgaccatgtcctacaacaatagatacttcaagtaagaagttttttatgccttcagctaaggaaaaaaaggatcacaatgctaagagctctcaaagacttttaaaaatctgctacactgatctcaacgtgcttctgcagatgcaatctcaatctctgcccaccaaagtggagaaagttttggaaccgcagattcaggtgatatttttgttatctctctcaggctctcactcacatctttcattgatggtctcttctgtggatcagggtggacacaagatgtaatcaatgatgcaacttgttccagctgatcttcttggtaagatactagaattggatccactatttctt

SEQ ID NO: 224817 - DNA, 471 bp, Glycine max
  unsure (1)..(471): unsure at all n locations
aaacataagaaatcaacttttgacatggacaattctgaaaacatgacagaggtcgcaaacaacaggtcctaaaccaccaaaatagaagcataatgatgatatcacttcacagtttgaataatggagaactatatcacacaggagtaaaaacaaaaaggaacgaacaatactggttcagggtaatgtaacgaagcatataccctttttactcgaaacaattacattgataataaaaccttcatttatgaatagtcctctccttcctcatcatcttccgctccttcagccccaacctcctcatagtccttctcaagagcagcaagatcctcacgagcttcagagaactctccttcttccataccctcaccaacataccagtgaacaaaggccctcttggcatacatcagatcaaatttgtggtcaatgcgagagaacacctcancactgcagttgttgtgctgatcatgcata

SEQ ID NO: 224818 - DNA, 432 bp, Glycine max
agaaacgtgcatatgcccaacttagcatatgataaataagcaaaatcatgtcaaaatacaaacagttaatagaactgtgttgctattattttctgctgcaaatacagagtgttatttgaggatgccaggaatatcaatcaacattgatgatgaatgcaacaattatcataaaaaatcaaaatcacacatctaggacattttattgcattttttccctgtcatttaacattgagactacaagtctaatccatccgttagcatgtattttaatacacccgagccttgggagggaatgattcaacctcatcatccaatacattcaaatgcaccggcctgtagtccaaccggacctttttgttctcccagaaatccacagtgtgtttcatccagttcccatcatctctaactttgaagtcttcacgggcatgagct

SEQ ID NO: 224819 - DNA, 320 bp, Glycine max
aggcataatataagtttctttattatgtaacaagaataaatatatttacacatatctctctgcaaaattttggtgggggttcagaaagagcagcagaagaacctaattctgttgccactatgaactgtaattacaatatttatatacatacatgattcgcctcacatctcagacaaaagattgctaattttcctaagctctttgagagctgtcatggcagaaacttggcctttgcggtcttgttggaaaacagattccattatctgaatatggtcaagcatagactggccaatattcttcaaagggcccatcacattttt

SEQ ID NO: 224820 - DNA, 406 bp, Glycine max
acaaataagataaaatcaactcagcccgtcattaacaaggccatggaacaatttcagtgttatacatatgcacattattttctcgaattaagatcatcatcacaaattaatgtcccccacaacttattcatgccagattttagaacagcaattcatatcacagctttgaaggcgactgataccagccccacggttcatcagatatgtacttggtcacttgcttcacacttaaatagttctcgagtccccattctcctagttcacgaccaaaaccactacgtttaacgcctccccatggagcttgaatgaagcttggttgagcacaatttatccatacaattccagcctgaatagcctttgatatgcgctcgcatctttctagatcttttgacattacagcagaccc

SEQ ID NO: 224821 - DNA, 556 bp, Glycine max
caaagagccaacctgacctagcaatacttgcagtgaatacatttgtgaaggactcacaagatccaaatcctttaatccgtgccttagctgtacggacaatgggctgcattcgtgtagataaaattactgaatatctgtgtgatccccttcaaagatgcctaaaggatgatgacccatatgttcgtaagacagcagctatttgtgttgccaaactttatgacataaatgcagaattagttgaggacaggggctttttggaatccctgaaggatttgatatctgataataacccaatggttgtcgctaatgctgtggcagcacttgcggaagttcaggaaaacagtagtagacccatctttgagatcaccagtcacacactgtcgaagctccttactgctttaaatgaatgtacagaatggggtcaagtttttatattggacgctctttctagatacaaggcagctgatgctcgtgaggctgaaaacatagtatgaagagttactcctcgcttacagcatgccaattgtgcagttgttctatcagctgttaagatgat

SEQ ID NO: 224822 - DNA, 563 bp, Glycine max
cttggacaacaacaagccaccacagggtggtttgtctgagagaactggctctggtgttcccaaattcaagtccacaccaccaccttctctgcctctctctccccctcccatttctccttcttcttactttgctattcctcctggtttgagccctgctgagcttcttgactcgccggttctccttaattcttccaacattctgccatctccaacaactggagcatttgttgctcagagcttcaattggaagagcagttcaggggggaatcagcaaattgtcaaggaagaagacaaaagcttctcaaatttctctttccaaacccgatcaggacctcctgcttcatccacagcaacataccagtcttcaaatgtcacagttcaaacacaacagccatggagttttcaggaggccacgaaacaggataatttttcctcaggaagggtatgatgaaaactgaaaactcttcttccatgcagagtttttcccctgagattgctagtgtccaaactaaccatagcaatgggtttcaatccgattatggcaattaccccccacaatctca

SEQ ID NO: 224823 - DNA, 464 bp, Glycine max
ggaggaagaatataaatgacattatgagcccaaccaaaccaatggtacaatattttattctaaggcaagattttatctaccatcctaacattaacattcccaaccacacaacatgttacataacattgtctcaaaagattggaccagctgcgagaatctcttctgtcaggttgttgttgcccttgccaatcttgtagttggtgaaggtttcaaaaatgttcttgaacaatccagccaacttcaatagtgtctccttgtagccctttttgtttgaccaaatgttcacagggtctagaatttctgaagggacaccctccactttcggtggggatctcaagcccaaaaattttagtcttcttgtactctgcattcagcagacttcctgagtgaatagcatcaatgatttttcttgtgtatttgagattaatgcgacttccatagccatagctgcattttgacatgtg

SEQ ID NO: 224824 - DNA, 298 bp, Glycine max
gtgcaggactgaacttgctgagaccgtgaaagagcttattaatccaggtgtggagatcaagatggtggagaacactcctgatgatccgcgacaaagaaaaccagacatcacaaaagcaaaggaattgttgggctgggagccaaaggtcaagttgcgtgatggtcttcctcgtatggaagaggattttcgtctgaggcttgaagttggcaaaaagaattaatttgttttcgctcttttggtgacatgtcaaagtagagatatattaggtgagatgagtcttggccaatttcaaaaattt

SEQ ID NO: 224825 - DNA, 340 bp, Glycine max
ttggaatccaaaaatgagagaaatcatcagcattcacataggtcaggccgggatccaggttggcaactcctgctgggaactctactgcctggaacatggcatccagcccgatggcatgatgccaagtgactcctccttcggtgtagcccacgacgccttcaacaccttcttcagcgaaaccggatccggcaagcacgtccctcgcgccgtcttcgtcgatctcgagcccaccgtcatcgacgaagtccgttgtggcacttaccgtcaactcttccaccccgaacaactcatctccggcaaggaagatgccgccaacaactttgccagaggccactacacc

SEQ ID NO: 224826 - DNA, 421 bp, Glycine max
cataaaagttaaaattcaataaaaaagcatcaaataagttttaaacagataaatggatgaaagcaactacacatttagtccacttactcaatcttggggccagcaccacttccaccagaaggagcagcataatcatcctcggctgccccagcaccagcaccacccatgtcaggaccagcaccaccttggtacatcttggcaatgataggattgcagatgctttccaattccttcattttgtcctcaaattcatctgcttctgcgagctggttgctgtctagccactggatagcttgctcaattgcgtcctcaatcttcttcttgtcagtaggatcaagtttctcaccaattttgtcatccttcacagagatcctcatgttgtatgcatagttttccaaagcattcttggcctcaaccttct

SEQ ID NO: 224827 - DNA, 514 bp, Glycine max
  unsure (1)..(514): unsure at all n locations
gatccacctccaatcactcacttggatctcacttttatagattcttctctagtggggcgaactcttcgtacaccgtggtggatcatacttatgatgctgttgtcgttggtgctggtggcgcgggattgagagctgctattggactttcagaacatgggttcaatactgcttgtattaccaagctcttcccaactcgttcacacactgttgcagctcagggcggtataaatgctgctttgggaaatatgactgaagatgactggaggtggcacatgtatgacactgtcaagggaagtgattggctaggagaccaggatgccatccaatatatgtgtagggaagcacctaaagcagtcattgagctagagaattacggattaccattttcccgaacagaggatggaaaaatattncaacgtgcatttggtggtcaaagcttaaactatggaaagggtggtcaagcttaccgctgtgcatgtgctgctgatcgaactggacatgctttattgcacac

SEQ ID NO: 224828 - DNA, 531 bp, Glycine max
cttcttcctctctttctctacacaaacaaacttattattctctctctcttaagcagccaatacatactcacacacacacagtaacatgcaactgtgcaaatcattgggtttctctgcacaaaaccaccccaccccaattcatttcacatcataaattcacctcctttctccactctccatactcaatttgaaagttcgcgtctttctggattttcgctgcgttttaccatctggggttgccgcccgatcatgcctccggcgctgtcggatccgctgtcggtgactccggcaagctccgacgctgttctgcagcgatcggcgccgccggagaatcggcgattcggtgatcttagagggttgcagtggcggataaatcttggggtgctgccgtcttcgtcttcgacttcaattgatgatcttcgtcgagtcaccgcgaattgtagaagaaggtatgctagcttgagaaggcgccttctggttgaaccacatgttccaaaggatggagctaattcacgcaatcttgtcattgac

SEQ ID NO: 224829 - DNA, 360 bp, Glycine max
agagtgagaagtgagaagagaaaaatggcaatctccatacccagtagacaacttttcatagatggagagtggaaagtccctcttctcaacaaccggtttccgatcatcaaccccgctactgaagacatcatagggcatattccagccgctactaaggaagatgttgaccttgcggtggatgctgctaaaagagccttttcccataacaaaggcaaagattggtcttcagctcctggctctgttcgtgctcgctatcttcgagccatcgcttcaaagataacagagaaaaaggatgaactaagaaagcttgaagcaattgattgtggaaaaccactagatgaagcactggcagactggatg

SEQ ID NO: 224830 - DNA, 398 bp, Glycine max
cctcgaatgacatgaaatttgaccattagaatgattgtattttacataacctgttttcccaccgcattgcagagatgaacagctcacaaatacatacaatgtagaatggaattttatttggaatatcaatgcacaacagaaaaaggatcgtgtcactccagcagggtagacaatcagacacagtggcgagacttgtttactcctgaatttgaacaggctcaaaacccctctggatagaagccttcacagcatccaataccagctgtgttttgctagtaattgttggccacttcttgtcaggcttagagtttttgaatttgatttctgcgaccaaccgggcaaattctctaatcaaaagagcctcctgagggagatcagtggttactgtatgcttactt

SEQ ID NO: 224831 - DNA, 562 bp, Glycine max
gcaacgcaacaacgtaacgttgctaattgcttgcacttcccatggtcgcttcttttgtttcacattagctgtttttgtttttgtcttagttttacacctttcctcatttccgcagtagcaacctgcgaatcaactctctgagaaaaaaaatggcgtcgaacgggaatggcagcgttgcgaacggtaacgggagcgctaggaacggacttgcgaagattcagacgcagaagaagcatgacgggatttgtcacgacgacagcggtccaacggtgaaggctcagaccattgacgagcttcactcgctgcagaagaagaaatccgcacccaccacccccgttacggggtttcaggctcctttcgccaccctcaccgaagaagaacgtcataagcaacaactccaatccatcagtgcatctctggcatcactgaccagagaaactggaccgaactggtgaagggagacccagctaggaagtcagatacccagaggttactcacgtgcaccatcatgtcagcactcccaccattgttgtcagcgacagttctttgaaaattacccatg

SEQ ID NO: 224832 - DNA, 562 bp, Glycine max
aaaacgccaatacaagaggagccatcatattaagactatatgatagaattagcactcggcagttgcaacttattcagcacatcaaaattttgataaagtaactgatcaaattccactcaagtgcccatagcaaaggctgcaaacaaccaacactagtgttcggccatccgtaagaaactgaacaaagaagaaatgactgggagaaacttcaggatctaaccaccttccacctgtatgtgttcatgtaatgactgttggagcggatcgaccagtgaattcttccatcttcgaaagtttcaatgcaacttccacaagaggagcaagggcttcatttgaaagtctcccaatctttgatggatccttctcatattgctcaatgtatagtcgaattgttgcaccttctgatccagttccagataggcggaaaatcaatcgtgatccatcctcaaacaaatatcggattccctgatgtgatgagatggaaccatccacaggatcattgtactcaaattcatcaccgtgaacaacattcgaaacatctgaccttatccccttaatatct

SEQ ID NO: 224833 - DNA, 366 bp, Glycine max
ccagcctggtgtgttgatccaggtctttgaaggtgaaagagcaaggactaaagataacaatttgttgggcaaatttgaactttctggcattcctcctgcccccaggggtgttcctcagattactgtgtgctttgacattgatgccaatggtattttgaacgtctctgccgaagataagaccactggccagaaaaataagatcactatcaccaatgacaagggtagactgtcaaaggaagatatcgagaagatggttcaagaggctgagaagtacaaatctgaggatgaagagcacaaaaagaaggttgaggccaagaatgctttggaaaactatgcatacaacatgaagaacactgtgaaagatga

SEQ ID NO: 224834 - DNA, 428 bp, Glycine max
  unsure (1)..(428): unsure at all n locations
gcaaggaactgtaagaaacatgaaattaagatcgtaaaatccttaatccgtctcaccctctaatgtgactcgtctgtggacgtagtttacagacttattatatttaaataggacattaagtaacgttcctcagtggcagaacacagacgagtacaaactacaaaatgataatacaacttacatactagcattcaaccaagaaaacaaaactaaaaaacccaaactaacaacaaaactgcagttctgagaaatctgaaaatgattcgaagtgaaagccataattgattttaagttctaattgctggaacgcaactctggacgaacaaagtctgcatctggtggcacagaaatgtctactgtgggtctcagttcagcgcaaactttaatggctccatgcactgggtatgacangaagttgctgaataaat

SEQ ID NO: 224835 - DNA, 419 bp, Glycine max
tcttcttcgtctcaaacttcttcgttccttcgattcattccatttcttccaaaatggccaaagacccagttcgcgttctcgtcactggagccgcagggcaaattggatatgctcttgtccctatgattgctaggggagtgatgctgggtcctgaccagcccgtgatcctccacatgcttgacattcctccagcagcagagtcgttgaatggggttaaaatggaattggtggatgctgcattccctcttcttaaaggtgttgttgctacaaccgatgtggttgaggcatgcactggggtcaatattgcagtgatggttggtggattccctagaaaagaaggtatggagaggaaggatgtgatgactaagaacgtctccatttacaagtcccaggcttctgcccttgaaaagcatgctgct

SEQ ID NO: 224836 - DNA, 464 bp, Glycine max
atatcaaatttctagtataattgttttcattgctagtaaacataaggcaagttatatcattcaaaatatagctacaatgacgaactttattcttctcttccacgcacaattatatgacgtcccaggcccttcatgaaacgatgaagtgatggtaaaaagacaaagacaacttaggagaacaaacaagacagaatctaaaggacccaattattatgcataataaagaaccacttccttagttcaaacttcaaagctttgatgtttccctcgggtgatgcacgacaatgtaattataagcatccagagtgagaaaatcatcaagcattggtgacgtgcattggcgagtgaagatcttgcaagcctccttgtacattcccttcttgaacttctctgtccccacttccttttcaatcctagccatctcttcttaacaaccctaccaaaagttctttgttcactttcac

SEQ ID NO: 224837 - DNA, 500 bp, Glycine max
ggaataaacatttttgtaacatatactgagacatgataaaccattccacagtggcttaggcgagacataatggttccatatacaataatgatgaggacaataaaaatgacaaccaaattgcctcttgagataattatagccggtatgcactggacaacactgatatgcacaaccagttagaagccacaataactacaaataataaaaaaagctatcattacatgattacagcacacagcagcagctgcaactgtataggcccgtatcaaagtatattaacatggctgtgaatcgaaagtgtgcagattcctcaacatggctgctaaaaacttccctgacatcgatcttctacacttcctcttgactgagggtgttactttttaagatgttatacttgcagagggggcatgtagcattaatatacagccatttatccacacagacacagtgaaaatggtgaccacaaggaagttctcttagctcaaccccatcatcgtaag

SEQ ID NO: 224838 - DNA, 448 bp, Glycine max
  unsure (1)..(448): unsure at all n locations
ttgtaggatcaagagccttgcttcaattccaagatcctcctcctccctcaaccgcacctttttcttctcatgttcctttagcgccggcgctgttcgtcatcggagattcctccgttgattgcggaaccaacaattttctgggcaccttcgcgcgcgccccgatcaccttccttacggaaaagatttcgacacccaccaacccgccggaagattctccaacggaaggatccccgtcgattatcttgctcagcgtcttgggcttccttttgtgccaagttatcttgtgcagacggggttgtgggggatatgataaaggggtaaactacgcttctgctggtgctggcattattctctctagtggctctaattgggacagcatatctccctcaggcaatcagcaatntacagacacacttcagcagtttatattcaaaatggcgaggatgct

SEQ ID NO: 224839 - DNA, 381 bp, Glycine max
atgatacatatttttattcaatcgctaatctcaaaatttgaaagaaagcgttatttggcaaaacctgaaaacagtgcataggagaaaaaacaaaagttccctcctaaacttatagcgagcacatgcaacgggaaattgaaacattaggggaagaaaacgaaatcatgcttgcacttttgcattttgccaaaagattctatgacccccctttgatcagttgcagtgcagcctactatttgggaagggccggaattgctcccttttgggaagaagtaatagctccacatgcattggcaaactttagaacttattttaaccattgttcatctttaagtatggactgatcatcgacaatcttgggcgataaagcaccaacaaagg

SEQ ID NO: 224840 - DNA, 427 bp, Glycine max
accactcactcttacatcattgtccctaaatggcggaaaccctgatccaaatcggcgtggttgggtgcgccgacatagcccggaaggtctcccgcgccatcacgctcgcccccaacgccgccctctgcgccgtggcgagccgctctcacgacaaggcagccgcattcgccgccgccaacggcttccctctctcagccaaagtgtacggctcctacgagtcccttctggaggaccccgacgtggacgccgtctacatgccactccccaccagcctccatcttcactgggccgtgctcgcgggccagaacaagaaacacttgcttctggaaaagcccgtcgcgctcgacgtggcccagttcgaccgcattctcgaggcctgtgagtccagtggggtgcaggtcatggataacaccatgtgggtccataa

SEQ ID NO: 224841 - DNA, 552 bp, Glycine max
gaaaaatgtccgaaaacggagaagagaaattactcgctgtggcgcggcacatagccaaaacgctgggccacaacaacaccatgtctgatgacatattccaaatactatcgaacttcgatggaagattctcgagagagaatctttctgagaagggcgcagatgtggatcccagaggctgcgccgcactggatcattccctcaaatccctagaccgccggatctctccctacgtctcctccgaccgcacaatctgggccgacgccgccgattctgctgccttcctcgacgccgtggacgagctcgtcgccgtcgtcgccgagtggaaccacctcgcctccgacaagtccgtcgccgcctgcctcgtccgcgccgaggacatgctccagcacgccatgttccgactcgaggacgagttccgctcgctcatggagcgcggcggcgaggccttcgacctcactcggagccaccggaaaggcgactcacggggaaattgcccgtcgagtcagacgaagacgtcgacgaagaagaagaagaagcgcggaacgttggaat

SEQ ID NO: 224842 - DNA, 566 bp, Glycine max
  unsure (1)..(566): unsure at all n locations
tttacttcttcacaaaagaatgattcttctgagtcccaacaacaacattccctcaggcacttcattgatgactctcccaaaccacagtctaatcatcatcatcgttcgtcgtctatatggcctgaacttgacaacatgcagtcagacaggactcagttatcaatctccataccaatatcttcctcagatcacttcatgtcattcactacttccttgccctcgaacgagaaactcacgttgtcaccacttaggctttcaagggagttagaccccattcaaatggggttgggagtggggaagtgcccccaatgaagcaaacactaggcaagccaattggattccaatcacttggnagagttaatggngtggtcctctggagaggttttgaaccttagtaacaataacaacagcatgctagtgatcaatgtggcaagaacaacaacaacacttcagctctcaacctcatgaaagatggatgggacaataatcctccatcagggtcatccccaactggggtgcttcanaaatctgcatttggatcactttccaatagcagtgcttggagc

SEQ ID NO: 224843 - DNA, 407 bp, Glycine max
  unsure (1)..(407): unsure at all n locations
gtgattatataaaattgatgaagtcaatttttgattttgaatctatcaggaaactgctgtcatctcctaaattcacattctgttatgatgcactacatggggttggtggagcatatgcaaagagtatatttgtggatgagcttggggcacaagaaagctctttactgaactgtacaccaaaggaagactttggaggaggacacccagaccccaatttgacatatgcaaaagagttggttgctcgtatgggattgggcaaatccgaaccacaagatgatcccccagagtttggtgctgcttctgatggtgatgcagatcgcaacatgatacttggaaaaggttttttgtcactccttcagattccgtggccattatcgctgcaagtgccgntgaagctataccatact

SEQ ID NO: 224844 - DNA, 574 bp, Glycine max
  unsure (1)..(574): unsure at all n locations
ctgataactatgagaagatattgtctcacatgaagccaaacagtatacttgggctttcccatggttttcttcttgggcatttacaatcattgggacttgactttccaaagaacattagtgtaattgctgtgtgcccaaagggaatgggtccatctgtaaggaggctctatgtccaaggcaaagagataaatggtgctggaattaatgcaagttttgcagtccaccaggatgtggatggcagggctactgatgttgctttgggatggtctgttgcccttggttctccattcacttttgccactacattagagcaggaatacaggagattttnntttggggagagaggcattttacttggtgctgttatggnngtttgtggagtccctgtttaggagatacactgaaaatggaatgaacgaagatctggcctataagaatactgntgagtctattacangaattatatctaanaccatctcaactaagggcatgctagctgtatacaatgctntatctgaagatgagaaaagggaatttgagaaggcttatagtgcttctttttatccttgcatgg

SEQ ID NO: 224845 - DNA, 546 bp, Glycine max
atttcaggaagaaagaagtgcaatggacatcggaacctatggctatcctacaccagcagtgaaaaagattgagtcttactatgatgtgccagagggagtggatattcggggaagatatgatgcagagtttgcaaaaatcctcacaaaagatgctttgaaattcgttgctgacttgcaacgtgagttcaggaaccatatcaagtatgcattagagtgcagaagagaagcaaagaagaagtacaatgaaggggctcttccagagtttgatcctgccacaaggtacatcagagagcaagaagtgggtgtgtgcacctgttccaccagcagttgctgatagaaaagttgaaatcactggccctgtggatagaaagatggtcatcaatgctctcaactctggagctaaagtctttatggctgattttgaagatgcactgtcaccaggctgggaaaatcttatgagaggccaagtgaacttaaaggatgctgtggctgggaccataagcttgcatgacaaagcaagaaacagggtttacaagctcaatgatc

SEQ ID NO: 224846 - DNA, 374 bp, Glycine max
cagtgttccaaaatccaaacacactctctctccccatggcgttgaacaatggcgtgcccgccaccggcaccggcctcatcgtcagcttcggtgagatgctcatcgacttcgtccccaccgtctctggcgtgtccctggccgaggcccctggcttcctcaaggcccccggcggcgcccccgctaacgtcgccatcgccgtgtcgcgcctcggcggcaaagccgccttcgtcggcaagctctgcgacgactagttcggtcacatgctcgccggaatcctcaaagaaaactgcgttcgcgccgacggcatcaactttgaccagggcgcacgcaccagccttgggcttcgagaccctacgcgccgacgggtagcgtga

SEQ ID NO: 224847 - DNA, 561 bp, Glycine max
  unsure (1)..(561): unsure at all n locations
ctcgagccgattcggctcgagataaaaaataaacatatattgagaatggagggttgtgtgaagaagttgctatgccttgttgggtttgtggtgcttgtgagtactattggtggggtggagagtgctggtgaatgtgggaaatctacaacccctgataatgaggcttataagcttgcaccatgtgcctcagcagcacaagatgagaatgctagtgtttctcagagttgctgtgctcaggtgaagaaaattgggcagaaccctagttgcctctgtgcagttcttctctctaacacagccaaaatggctggcgtcaaccctcaagttgctgtcaccatccccaagcgttgtaacctggctaatcgccctgttggttacaagtgtggaccttacactctgccttgaaagagttaagggttgttgctgaaaacaaagatgacagggcgtaaatgcactatggatgttagctactacaaactgtgactacantgttgttgtattgtcttgtaacttcctagtgaataagaactagcagctcactagtgtaccctataataaacatgt

SEQ ID NO: 224848 - DNA, 530 bp, Glycine max
  unsure (1)..(530): unsure at all n locations
gctttcttgaaagaggaacctcttgggccagaagacatgtggtactgtcctaactgcaaaaatcctcagcaagcatctaagaaactagatctttggagattgcctgaaattcttgttgttcatttgaagaggttctcattcagccgatacttcaagaacaagctggaaacatttgttgatttcccaattaatgatctggacttgtcaacatatgtagcccacgggaataaccagtcttccaaccgctatgtgctatatgcaattagttgtcattatggagggttggagggaggtcactatacagcatttgtccgttatggctatgataaatggtatgattntgatgacagcagggtcgaatctattagtgaggacatgataaagactcctgctgcttatgttcttttctacaggaaaatttagatggaaattttagatgcatttgtgtnattagtgatatagcaacatgggatgcttgaggctnttcagaccttttgcctatcatgcagntgtctgatttctcaaaatgc

SEQ ID NO: 224849 - DNA, 497 bp, Glycine max
caaccttgggagctggcgaacaagcatacgatgttaattttgaatgggacagtgacttcggaattcccggtgcattttatattaagaacttcatgcaaaatgagttctacctcaagtctctaattctcgaagacattccaaaccacggaaccattcacttcgtatgcaactcctgggtttacaattcaaaaaactacaagactgatcgcattttctttgccaacaatacatatcttccaagcgagacaccagctccacttttgaagtacagagaagaagaattgaagaatgtaagaggggatggaactggagagcgcaaggaatgggataggatctatgattatgatgtctacaatgacttgggcaacccggatagcggtgataaatatgcacgccccgttcttggtgggtcagccttaccttaccctcgcagaggaagaaccgcgagaggaaaaactagaaaagatcccaacagtgagaagccgagcgattttgtt

SEQ ID NO: 224850 - DNA, 379 bp, Glycine max
  unsure (1)..(379): unsure at all n locations
atgagctcagtgaagatgataaattgactgttgcccgtgcccgtaagattcagcgattcttaagccagcctttccatgttgcagaagtcttcactggtgccccaggaaaatatgttgagttgaaggagaacatcaccagtttccagggtgtgttggatggcaaatacgatgacctcccagagcagtcgttttacatggttggcggtattgaagaggtcattgctaaggctgagaaaattgctaaggaatctgcagcgtcttaattacatacaacagccatgttctcattttaatcctttttttgtaattgctaaatttaataatttaggaactcttggcaatgccaaacgacaaaattttcaattttttgggttnnnng

SEQ ID NO: 224851 - DNA, 442 bp, Glycine max
  unsure (1)..(442): unsure at all n locations
agaacaaagaaagagagagagaattgaatgtgaatggggaatcagaagcagaagtggacgcaggacgaagaagatgctctcatcgccggcgttgaaaagcacggccccggaaagtggaagaacattctcaaggatccccaattcgcccctttcctcacttcccgttccaacatcgacctcaaggataaatggcgcaatttgagcgtcagcaacggtgctcagggctccaaagaaaaatctagggttcccaagcttaaagccctccctgctcctcctgctcctaccgccactcctcagaacgccggtcctgctctgcaaaacgcagcatctgatgtcactcccccagatgcttctcagaatgaccaagatgccaaaaaccctccaaggtataatgcagtgatttntgaagctctatcaacgctgaaagatagtgatggatctg

SEQ ID NO: 224852 - DNA, 557 bp, Glycine max
  unsure (1)..(557): unsure at all n locations
ctcttcctcaccgattgctagaatggaatttcgatgctcagtcatctcttttaccattctcttctctcttgctcttgcaggagagagccatgtccatgcatcgctacctgaggaagattattgggaagctgtttggccaaacactcccattcccactgcactgcgagagcttctaaagcctctccctgcaggtgttgaaatcgatgaactccctaagcaaattgatgatacacagtacccaaaaacattcttctataaagaagaccttcatccaggcaaaacaatgaaagtacaattcaccaagcgtccctatgcacaaccttatggtgtatatacatggttaacggatattaaagacacctctaaagaaggatatagttttgaagagatatgcatcaagaagaaagcgtttgagggagagaagaagttttgtgcaaaatccttgggaacagtaattggtnttgccatttcaaagctgggaaagacattcaagtactntcaagttcctttgtcaataagcaagagcaatacactgtggaaggagtgcagaatcttgg

SEQ ID NO: 224853 - DNA, 506 bp, Glycine max
  unsure (1)..(506): unsure at all n locations
ctagctctgtgcattcttctctcgctctctgccttccatcacactcggcatttcctttcccaagatagtagaagatggcagacactgaggatattcaacctcttgtttgtgacaatggaacaggaatggttaaggctggatttgctggagatgatgccccacgtgctgtgtttcccagcattgtaggtcgtcctcgtcacactggtgtgatggttggcatgggccaaaaagatgcatatgttggtgatgaggcacaatctaagaggggtattttgactctcaagtaccccattgaacatggaattgtgagcaattgggatgatatggaaaagatttggcatcataccttctataatgagccttcgtgttgccccagaagagcatccagttctcttaactgaggcccctcttaaccccaaggcttatcgtgagaagatgacccaactcatgtttgagaccttcaacacccctgctatgtacgtagccatccaagctgntctttcact

SEQ ID NO: 224854 - DNA, 519 bp, Glycine max
  unsure (1)..(519): unsure at all n locations
cggacggaagcactgagttaactcagagcgagtgaaagtgttgctgcgtgatgtctggtggtatcgcccgtggacgcctcaccgaggagcgcaagtcgtggcggaagaaccatccccatggttttgttgcgaagccggagacgctgcccgatggaaccgtgaacttgatggtgtggcattgcactattcccgggaagactgggactgattgggagggtggctacttcccgcttacgctgcactttagtgaagactacccaagcaagcctccaaagtgtaaattcccacaaggtttcttccaccctaatgtttatccttctggnactgtttgcttgtctatacttaatgaggatagtgggtggagaccagccataacagttaagcaaattcttgtgggcatccaagacttacttgatcagccaaatcctgctgatcctgcccagacagaaggctatcatctattcatccaggatgcagcagagtacaagagaagggtcncgcagcaggcaaagcaatacc

SEQ ID NO: 224855 - DNA, 565 bp, Glycine max
  unsure (1)..(565): unsure at all n locations
caaattacaaataggaaaaaaatgaaagtaacagttgtgtgttgtgtattggttgtgcttggtgcactaccattctcttcggatgcacaactagacccctccttttatagggacacatgtcccaaagtgcattctattgtacgtgaagttgttagaaacgtttcaaaatcagaccctcgaatgcttgctagtctcataaggctccactttcatgactgctttgttcaaggctgtgatgcatcaattttgttgaacaacacagccacaatagaaagtgagcaacaagctttcccaaacaacaactcaataagaggtttggatgttgtgaaccagatcaagactgcggtggaaaatgcttgtcctggtgtagtttcttgtgctgatattcttgcccttgcagctgagatatcttctgttctgggtcatggtcctgattggaaagttccattgngtagaagggacagtttaacagcaaacagaacacttgcaaatcanaatcttncagctccattcttcaaccttactcaacttaaagatgccttttgctgtcaggtctcaatactac

SEQ ID NO: 224856 - DNA, 467 bp, Glycine max
attgcacctagactggcgcgtacaggtggtgtggacgagccttttgcatgggaaagcagagaggttctgaggaagctctgcatagggaaggaagcgactttcagagtggactacaacgtgccgcccataagtcgggactttggaacctgttttgccggggacaagaatgttgccatgcttggtgcttctcagggatggggtaaggtcagggaacaggggcagcagaaaggagaagttagtccgcacctggcacaattgctgcggttggaagaacaggctaaacaagaaggccttgggcggcggagcaaggatcccggtgctgcagaagcttcaatcagaaatttaccaccttctgcccttggcgaccctagaaactccgatgctatgacttttttaaatgcacagaagggattgcccatggaggcacgtgttgagcaggatcgcgatggcagcacactacgtatcta

SEQ ID NO: 224857 - DNA, 502 bp, Glycine max
ctttgttgcatttcacacaccaacttcccatagaagagagaagagagaagagactcttccttccatcctgcaactcaaatcatcatgcaagactccagctcaatgaagatctcccctctggatctcatgtccgccatcttcaagggcaagctcgacccctccaacgtctcctcctgcaccaacgccggcgccgccgccgtcttcctcctcgagaaccgcgacttcctcatgctcctcaccacctccgtcgccgtcctcatcggctgcgtcgtcgtcttcatctggcgcagatcctcctcccccaaggccaagcctctcgagcctcctaaacgcgtcgtcgagaagcttcccgaaatcgaagtcgacgacggcaccaagaaggtcaccatcctcttcggcactcataccggcaccgccgaaggctttcgccaggccacagctgaagaggccaaagcgcgatacgagaaggccacgtcagagtcgtcgatatgatgattatgct

SEQ ID NO: 224858 - DNA, 488 bp, Glycine max
gtttatcaggacaacattgaagcaagtgtttcagttctggagaagctttctgatgattggaaggagttatcaacaaaattgtctcctcatgatccactgagggataccataaagaacttgaagcaaaagaatgagaaagtattggactctgagactgatgctgctcgtcatgcacacttcaaggacgccgataaatattgcaagataatcttaggaagagtttcgcgaagccatgggtgcatgacttgtttaacctttacagttcttgctttggctgtgggtgctgctgtttccttgtcccccaatttggaatctttggattttaagaagctctctgaacttttcaacgttcagcactgagtactctggagaatattccgcattaccgcagttggttgcttccaaacggcaattttcttttcagcccatctcattcacaaatcacaatgggtacagtaaaccaatagcctcataataaggtgcttatg

SEQ ID NO: 224859 - DNA, 499 bp, Glycine max
  unsure (1)..(499): unsure at all n locations
aacacattgttaaggctaattatggctgatattgagggttctccaggaagctccatgcatggagtaactggaagggaacaaaccttcatagcctcagtggcttcccctatggtccctacagacaccacagcaaatttcgctttgccagtagattctgagcacaaggcaaaaattttcaagcttttttccttagccaaccctcacatgagaaccttccacgtgtcttggatatccttcttcacttgctttgtctcgaccttcgcggcggcgccacttgtccccatcattcgcgacaaccttaacctcaccaaaggcgacatcgggaacgncggcgttgcctctgtctccggcagcatcttctccaggctcacaatggcgcgggttgtgacctacttggccgcgtacggctgtgccttcctcatcatgctctctgcaccaccgtgttctgcatgtctttngtgaatgatgctgctggttacatagcagtgaggttcatgat

SEQ ID NO: 224860 - DNA, 554 bp, Glycine max
aaaggagttaaagagtaaaagcaccgtctccgtctccactctcggcttcttcttcgttgcgctttttcccaaaaccaattgcatcactctcgtccgttaccgccgctgccctagaccaccgcaagcgacgtcgcacaccgccttcatccgttagggcaaaaatgagtcgaggaagtggaggtggatacgatcgtcacatcactattttctcccctgaaggacgtctctttcaagtggagtatgctttcaaggctgtgaaggctgcaggaatcacctcgattggtgtccgaggaaaggattcaatttgtgtcgctactcagaagaaggctccggataagcttttggacaacacaagtgttacacacctctttccaatcaccaagtaccttggattattggctactggcatgacagctgatgctaggacactggtccaacaagcaagagatgaagcagctgagtttcgctttacatatggatatgagatgcctgtagatgtattagctaaatggattgcagataaatcacaagtctatactcaacatgcttatatg

SEQ ID NO: 224861 - DNA, 547 bp, Glycine max
  unsure (1)..(547): unsure at all n locations
tagattgtagatccatccactccctcgcacaggcatcaggtgagtttgttgtgatttgaatggagggaagtggaggtggcggtggcagtggcggtggttcaccttctgcacctgtgaagcaatacttgcaggaattctcgaagctttttcagtactatctggataaatccactccccatgccctctacagatggattgggactttcgtgattgcatccatctacgttctgcgtgttgtttatttgcaggggttttacattgtctcctacggcctcggaatctaccttctcaatctcttgattggctttctctcccctttggttgatccagagctcgatccctccaacgcccctatgcttncaaccaaaggctgcgatgagttcaaacccttcattcgccgcctacctgagttcaagttctggtattctttcactaaggctctctgcataacggttgtgatgacctttttttccatgtntgatgttcctgtcttttggcctatattactctgttactgngttgttctctttgtccttacaatgaggcg

SEQ ID NO: 224862 - DNA, 519 bp, Glycine max
  unsure (1)..(519): unsure at all n locations
gccatttgggagttaggttctgcacgctctgcttccagcgagtgttctttcttcgtttcaacaccttaatttgcacacgctgcttcttcagcttgagaaatggcacaagaaacctttctattcacatctgaatctgtaaacgagggtcaccccgacaagctgtgcgaccagatctctgatgcagtgctcgatgcgtgccttgaacaggaccctgacagcaaggttgcctgtgagacatgcaccaagaccaacatggtcatggtctttggagagatcacaaccaaggccaacgtagactatgagaagattgtccgtgacacatgccgcgaaattggattcatctctgatgatgttggtcttgatgctgacaaatgcaaggtgttggtcaacattgagcagcagagccctgatatcgcccanggtgtgcacggtcactttaccaagcgcgcagaggaggttgctgctggtgaccagggtcacatgtttggctatgccactgatgaaacccctgagtacatg

SEQ ID NO: 224863 - DNA, 542 bp, Glycine max
  unsure (1)..(542): unsure at all n locations
gtaaaatccaacggattttcctatgctatagttgtagtaggagagcatccgtatgctgaaatgcatggtgataacatgaacttgacaatcccagaccatggtcctgagaccataacaaatgtctgtggagcaataaaatgtgtggttatcattatttctggccgtcctgtcgttattgaaccatatgttggttcaatagatgcactagttgctgcatggcttccaggtagtgaaggccaaggtgttgctgatgttttatttggtgactatggtttcacaggaaagcttccaaggacatggttcaaaactgttgatcaactcccaatgaatgttgaagatcctcactatgatcctctcttccatttgggtttggtctttctaccaaaccaactaagggcttttatctgagtagntatcatcttcatctctctctctctctctctctatatatatatatatatttaatgtacaaatgaaaacaatanaatagtgaggttgcaaacatatttnttatgtttgggattttttttcttccttcagct

SEQ ID NO: 224864 - DNA, 490 bp, Glycine max
cacttttgtcttcgttccattatctagttctcaattctcttcaccctttgcctctgaaagaaatgggtagtcttgaagcgaaataacaacagtaggattggcagcaagagacccttcagggattctctccccatacacctacaatctaagaaacacaggccctgatgatgtttacattaaagttcactactgtggagtttgccattctgatctccaccagattaaaaatgatcttggcatgtccaactatcccatggtcccaggacatgaagtggttggtgaggtactggagggtgggatcaaacgttagcaggttcagagtgggagagttggtggggaagttggactcctcgtaggttgctgcaaaaactgccagccatgccaacaagacattgagaattactgcagcagaagatctggtcttacatgatgtttatgtcgatggaaaaccccacagggtggctttgctgaaacccatgatcgtgacaaa

SEQ ID NO: 224865 - DNA, 485 bp, Glycine max
attcattctcatctttctctcttctctctccacccaaaccctaactcccgaccctgttcccctctcgtatccgtcatgaaaggaggaaagtccaagaccgaatctaagagagccgatcccaaacttgctgtgaataagaagggagccgccaccaaggctaggaaacccgccggcaaggggaaggcagcgaaagaccctaacaagccaaagaggcctccaagtgctttcttcgttttcatggaggagttcaggaaggtattcaacaaagaacatcctgaaaacaaagcagtgtctgctgtgggcaaagctgctggagcaaaatggaagaccatgtctgatgctgaaaaagcaccttatgtggcaaagtctgagaaaaggaaagtggagtacgagaagaacatgagagcctataacaagaaacaggcggaaggtcctactgtgggggagaaaagaagaatctgagaagtctgtatctgaggtgaatg

SEQ ID NO: 224866 - DNA, 456 bp, Glycine max
ggcgaaggagatagtgaaagagcttcttcctctaattcgagtgtacaaggatggcagcgtggagcgtcttctaagctctgaaaacgtggcagcctcccctgaagatccccaaactggagtctcatccaaagacatagtcatcgcagacaacccctacgtctccgctcgcattttccttcccaaatcccaccacactaacaacaaactccccatcttcctctacttccacggtggcgccttttgcgtcgaatccgccttctcctttttcgtccaccgctatctcaacatcttggcctcagaagccaacataatagccatctccgtcgacttcagactcctcccacaccaccctatccctgctgcctacgaagacggttggaccaccctcaaatggattgcttcccacgccaacaacaccaacaccaccaacccggagccatggctactcaaccacgc

SEQ ID NO: 224867 - DNA, 556 bp, Glycine max
  unsure (1)..(556): unsure at all n locations
gagagaatgggttcctcggaagccgaaaacgaggctctccgtggcgccgaagaagaagagggttctacttctaacaagaaatgcgggcaaggcagacattgtttttaactcaccagaagataattcaactctcaatcttagtgatgttcaaggacttgtaacttgggtgctcagtgaaggatttatgccgtcatgggtttttattaagaataaacctcttattcccaaagtggttatgctctatgtgccaggcctggatgcagctttgttcttgtcacagtctaaaatgcttccaagattaaaaaaattctgtggcaaaccaagggcactcctagctcttagctgtgtgtcagatggtatgcagacgatagatgcactcctaacatgcaagatgaaaaggaaaagggacgagaatagttcaattatggggaaatttgctcggacatctcacaaggttttcattattcaactaatatatgaaaatctctttcattanggaaaaagaggttgttgtgatacagacagtctatcatttaggagcttacanaagacatac

SEQ ID NO: 224868 - DNA, 437 bp, Glycine max
gttctttacttgttgggttgttctgatcttctctcatagcaatcaaatcacactcccatcttctcatctcgtaaaccctaaaccccgttttcagtgacatcgagatcgatcgaacatggatgaggagtacgatgtgatcgtgttgggcacgggtctcaaggagtgcattctcagcggtcttctctccgtcgatggcctcaaggttctgcacatggacaggaatgactattacggaggagaatccacttcgctcaatcttattcagctttggaagagattcaggggagatgacaagcctcctccacatttgggagctagcagggactataacatcgatatgaaccctaagtttattatggctaatggcaatttggtgcgggttctcatacatactgatgttactaagtatctctctttcaaagctgtggatgggagct

SEQ ID NO: 224869 - DNA, 525 bp, Glycine max
  unsure (1)..(525): unsure at all n locations
agccactctaaagaaaatggcggtgcctctactctcgaagaagatcgtgaagaagagggtgaagaagttcaagaggcctcagagtgacaggaaaatttctgtcaagacaaactggcgcagaccaaagggtatcgattcccgtgttaggagaaagttcaagggatgcactttgatgccaaacattggttatggttcagacaagaagacccgccactatctccctaatggttttaagaaatttgttgttcacaatgtgaaggacttggaactgctcatgatgcacaacaggacttactgtgctgagattgcccacaatatatccacaagaaagaggaaagatatagttgagagagccgcgcagcttgatgttgttgtgacaaacaaaacagccagattacgcagccaggaggatgaatagtctaaatgactaaaaaagtcacttatctgtagtgattcagtagttcaatatcaaatntgcagtttaattttaaattgaattctgcttcaatgtattttgcttattga

SEQ ID NO: 224870 - DNA, 519 bp, Glycine max
  unsure (1)..(519): unsure at all n locations
gtggtttcagtgagtgatcggtgttcacttgatccttcataagtcgtcatcatcatcatcatcatcaccgttgattgaagaagatgccgatcagaaacatcgccatcggaaggcctgaagaggctactcaccccgacacgttgaaggcggggttggctgagttcatctccaccttgatcttcgtgttcgccggttcaggttccggcatcgcctacaacaagctcaccgacaacggcgccgccactcccgccggcctcatctccgcttccatcgcccatgctttcgccctcttcgtcgccgtctccgtcggcgccaacatctccggcggccacgtcaacccncgccgtcaccttcggcgccttcgtgggcggcaacatcaccttactccgcggcatcgtctacgtcatcgcccagctcctcggcttcatcgtggcctncctcctcctcgctttgtcactgcctcccctgttccagcattcgggctttccgtggagtcggagttggcaacgctttggtggt

SEQ ID NO: 224871 - DNA, 499 bp, Glycine max
cagcaatagcctctgatttcttctttcactttctttaggttatggttttctcagaagattgaacttaaacaaaaacaacaagaaagaaagaaagaaagaagatgggaattgcagtgggaggtgttgatttgctgagtgaaaaagcggcgatgatgagagagtgtctgcagaagagtgaaaccatcacagacaacgtcgtcaccattctcggttccttcgaccaccgtctctccgccctcgaaaccgccatgcgtccaactcagattagaactcactctattaggaaggctcatgagaatattgataggactttgaaggctgcggaggttatattggctcacttcgatcaatatcgtcaggcagaggcaaaaatacttaaagggccacatgaagacttggaaaactatcttgaagcaattgataagttgagaagcacattcagtttttggtagtaagaagggtttaagagtagtgatggcattgtcgtgcatgctaataa

SEQ ID NO: 224872 - DNA, 477 bp, Glycine max
ctttacaaagcaggggagaagaaactgggaactgatgaaaagacttttatccacatattcagtgaacggagtgcggcgcatttggctgccgtcagttcttattaccatgacatgtatggtcattcactgaagaaggcagtaaagaatgaaacatctggggcctttgaacatgcacttttgacaataatccaatgtgctgttaatccaggaaagtattttgcaaaggtgttgcataaggcgatgaaaggcttggggactgatgattccacactcattatggtcgttgtgacaaggactgaggttgatatgcagtatatcaaagctgcatatttaaagaaacacaagaagactctgaacgatgaagtacactcagaaacatccagtcactacaggactgttcttctctcacttttgggccctaatcactagccaagatgttcaatgatgtaagtggaataaattacacttgatgtgtaa

SEQ ID NO: 224873 - DNA, 512 bp, Glycine max
  unsure (1)..(512): unsure at all n locations
gattcattaacttcacacacagacacggtgtttccaccacaccatagcatatagtactagtagattaaacgccaaagaaataaattactcactttcacgtaaaccataacgtgcttccaccgcaaccaaccacaatgggtgccgttaggtccataacggtgttgctactagtgttatttatggccatgagctccggcgtgcgctcgtgtccgccgtcggacagggcggcgctgctggcattcaaggcggcgctccacgaaccctacctgggaatctccaactcgtggaccggcgccgactgctgccacaagtggtacggcgtgagctgcgaccaggagacccgccgcgtcgccgacatcaacctccgcggcgagtcggaggagccgatcttcgagcgcgcccaccgcaccggctacatgaccggctacatctcgcnggcgatctgcaagctcgcgcgcctcttcagcatcaccatcgncgactggaagggaatcntcgcgagatcccgcgct

SEQ ID NO: 224874 - DNA, 509 bp, Glycine max
  unsure (1)..(509): unsure at all n locations
aggatatatatacttctctgtggctgctctttctcacctaacatttgtggttggccaaatattgcaaaactcatggatggccgctagtgttgacaatcctcaagtcagcactttgcaattgattcttgtttacttgctgattggagttatttcaacactattcttgttgatgagaagtctttttgtagttgctttgggccttcaatcatcaaagtctttgttttcacagttactgaactccctttttcgtgcccccatgtcattttatgactccactcctttaggaaggatacttagtagggtctcctcagatctcagcattgtggaccttgatgtcccatttggctttgtttttgctgtgggagccactatgaattgctatgctaatctaaccgttttagctgttgttacttggcaagtcttgtttgtctccataccaatganttattttgcaatcagcctgcagagatattacnttgcctctgcaaaaaaactgatgcggctgaatg

SEQ ID NO: 224875 - DNA, 428 bp, Glycine max
attcattctcatctttctctcttctctctccacccaaaccctaactcccgaccctgttcccctctcgtatccgtcatgaaaggaggaaagtccaagaccgaatctaagagagccgatcccaaacttgctgtgaataagaagggagccgccaccaaggctaggaaacccgccggcaaggggaaggcagcgaaagaccctaacaagccaaagaggcctgcaagtgctttcttcgttttcatggaggagttcaggaaggtattcaacaaagaacatcctgaaaacaaagcagtgtctgctgtgggcaaagctgctggagcaaaatggaagaccatgtctgatgctgaaaaagcaccttatgtggcaaagtctgagaaaaggaaagtggagtacgagaagaacatgagagcctataacacgaaacaggcgga

SEQ ID NO: 224876 - DNA, 449 bp, Glycine max
attcattctcatctttctctcttctctctccacccaaaccctaactcccgaccctgttcccctctcgtatccgtcatgaaaggaggaaagtccaagaccgaatctaagagagccgatcccaaacttgctgtgaataagaagggagccgccaccaaggctaggaaacccgccggcaaggggaaggcagcgaaagaccctaacaagccaaagaggcctgcaagtgctttcttcgttttcatggaggagttcaggaaggtattcaacaaagaacatcctgaaaacaaagcagtgtctgctgtgggcaaagctgctggagcaaaatggaagaccatgtctgatgctgaaaaagcaccttatgtggcaaagtctgagaaaaggaaagtggagtacgagaagaacatgagagcctataacaagaaacaagcgggaagtcctactggtggggatga

SEQ ID NO: 224877 - DNA, 428 bp, Glycine max; identical to SEQ ID NO: 224875

SEQ ID NO: 224878 - DNA, 430 bp, Glycine max
  unsure (1)..(430): unsure at all n locations
ctgccatgacagtaataacaatgtctcctttcttatcttactctcttctttccctcgtgttcttcttcactctcaagtaccttttccaaagaagcagaaaagtacgaaacctgccacctggtccgactcctcttcctataatcggcaaccttaacctcgttgaacaacctatacaccgtttcttccaccgcatgtcccaaaaatatggaaacatcatatccctttggtttgggtcacgtcttgttgtggttgtttcatcacccacagcgtaccaagaatgtttcaccaaacatgatgttaccttggccaacagggtacgctccctctcgggaaaatacatattctacgacaacaccaccgtagggtcttgctcccacggcgagcactggcgcaacctccgncgcataacctctctcgacgttctatcgac

SEQ ID NO: 224879 - DNA, 411 bp, Glycine max
gttttggagtgttgctgctagagatagtcactgctagacagaacaacaggagcaaagcatcagaatattcagacagcttagttacagtggtcagttgcagatttctacaatgaagtcaacataattagtagtgtggaacacaagaatctagtcagactgttgggatgcagttgttcgggacctgaaagcctgcttgtatatgaatttctacccaacagaagtcttgatcgctacattttcggtaattactgaactgatgcagtaggcttgactgctattttcacctataacacctcattctgatcactataagtgattatcaattcatcataatgtgaactaaatataatatttctcaatttatacatggcagataaaaacaagggcaaggaatttgactgggaaaagaga

SEQ ID NO: 224880 - DNA, 437 bp, Glycine max
  unsure (1)..(437): unsure at all n locations
ctcgagccgcacaaacacaaacacaaacacacgtgtcgagtgaattcaaatcaatttaggcagaaaatgaggtgttttggtttcatagtgataggtctagtggctgtgcttggagggttacccttctcctcaaatgcaaaattagaaccctgtttttacaagaagacttgtccccaggtgcattttattgtatttaaagtcgtagagaaagtttcaagaacggatccacgtatgcctgccagtctcgttaggcttttcttccatgactgttttgttcaagggtgtgatgcatcaattttgttgaacaacactgccaccatagtgagtgagcaacaagctctgccaaacaacaactcaataagaggtttgngatgttgtaaaccagatcaagacagagttggaaaaagcttgccttggcgtagtttcttgcgctgata

SEQ ID NO: 224881 - DNA, 329 bp, Glycine max
ctctctttctctagtcctgttatttctcagcgcgtaaagcatggctttgttggtggagaaaaccacgagtggtcgcgagtacaaggtcaaggacctttcccaggccgacttcggccgcctcgagatcgagctggccgaggttgagatgcccggcctcatggcctgtcggaccgagttcggcccctcccagcccttcaagggggcccgcatcaccggctccctccacatgaccatccagaccgccgttctcattgagaccctcaccgcccttggcgccgaggtccgctggtgctcctgcaacatcttcttcacccaggaccacgccgccg

SEQ ID NO: 224882 - DNA, 404 bp, Glycine max
actgatgctggtggcataatcctactgttccaagatgacaaggttagtggattgcagcttctcaaggatgatcagtggatcgatgtcccaccaatgcgtcactccattgtaatcaaccttggtgaccaacttgaggtcataaccaatggcaagtacaagagtgtcatgcaccgagtgattgcccaagccgatgataccagaatgtccatagcttctttctacaaccctggtgatgatgctgtcatttctcctgcaccggctttggtgaaggaattagatgagacaagccaagtgtacccgaaatttgtgtttgatgattacatgaagctctatgctggtctcaagtttcaggctaaagagccaaggtttgaagctatgaaggccaatgcatgcgtggttgatgt

SEQ ID NO: 224883 - DNA, 373 bp, Glycine max
cacaaactaattttatctgaaatatctctttcatagaacggagaaagacacgatgcaggaagcgacgaaggtgataataatcggtgccggaacttctggtatcgccaccgccggttgcttaacgaagcaatcaataccttacataatgctcgagagagaagactgtttcgcttcgctgtggcagaaatacacctacgatcgtctccaccttcatttgaggaagcaagtttgcgagttaccgcacttaccgtttaccaagtcttaccctcactacgtgcctcggaagcagttcatagactacttgggaaactacgttaaccactttgagatcaagcctctgtaccagcgtgcaatggaagttgtggagtatgat

SEQ ID NO: 224884 - DNA, 401 bp, Glycine max
attaaaggttatctctaaggtcctaaacaatcctctttcaaaaacataccgagaaaagtgtggaaatgacgacaccatcattggtagagtctctagttcttcaactccatgagatctcagctgtcaaatttggcaacttcaagctcaaatctggcatcttctcaccaatctacatagacctccgcctcatcatatcttacccttctctcctccaacagatctctcaaacccttatttcttcagtctcttccacttcctttgacctcgtatgcggtgtcccttacactgccttacccattgctacatgtgtctctcttgctcagaacattcccatggtcatgcgccgcaaagaaatcaaagattatggcactgctaaagctattgaaggcgatttcaagcct

SEQ ID NO: 224885 - DNA, 509 bp, Glycine max
  unsure (1)..(509): unsure at all n locations
gcatcttcaaactcccttttggcttttctaagtgctgtgattctttctttcatctttttcttcaggtcctaaagcatacttgtgatttcctccattatttcctttgagatttggacagtagttggtcatacacccaattctaaattagagttgggatgtctggaggagtagtttgatacagtgatgcatctccacagatacttgagtaaagctatatgctgtggtgtagatttttactatggagttaaatgcaagttatgacgtcgagcattcacattctacacaaagaatacagcatgagctgtggcctctagatccaattgatccaaagaaggcaaagtttccatgttgtttggtttggaatccaccttctgtggtctcatggttggctcccttcattggtcatgttggcatttgcagggaggatgganttgttttagatttttcaggatcatatcctgtgaatggtgatgattttgcattttgtccagtggcaagatacttgcaac

SEQ ID NO: 224886 - DNA, 553 bp, Glycine max
  unsure (1)..(553): unsure at all n locations
gctccacgtggcggcgacgctcctcgcctctccctcgggcttccttcgccaagcctgcataaaatcgcaccccaattcctcccacccccttcagtgcagagccttggagctatgcttcagcgtggcgctggagcgattgcctacttcgcagaacacgagctcttccatggagccgccaatctccaatgccttgatggctgccctgaagcgggcccaggcccaccagcgccgcggctaccctgagcaacagcagcagccactcctcgcggtgaaagtggagctggaacagctaatcatatccattctcgacgaccccagcgtgagcagggtcatgagagaagccagtttctcaagcccccgccgtcaaagccaccatcgaacagtccctcaacgccgtcccctccaccggtaattcccgattgggattccggccaaccgcggtggcgttcggtgaattccgncccggngcggaatttgtatctgaacccgcgcctgcaacacagcagcagcaggggagtactgcacaacacaggggcgacgaagtaaacgaatt

SEQ ID NO: 224887 - DNA, 569 bp, Glycine max
atgatggctggctagcaactcatgggaaacccaaagaaaccaaatctgatgaggatgagaatttaccttccatggaaagcctagaaatcagcaaaaagggttctattaagcaaattcattcctacatgggagctgaagagggagaagatattccagatatggcagagtttgacgatacttccaatgttgaaaatgatcctgccactcttcagtccacatatctagttgctcatgaacctgatgacgataatattcttcgaactcggacttacgatatcagcatcacgtatgataaatattatcaaacaccacgagtatggcttactgggtatgacgagtcaaggatgcttttgcaaccagaacttgttcttgaagatgttagtcaagaccatgcacgcaaaacggtaacaattgaggaccatcctcacttgccagggaagcatgcatctattcatccatgtcgacatggagcagtgatgaaaaaaatcattgatgtgttgatgtcacgccgagttgagcctgaagtggcaagtacctattttattcctaaattatggctttgaattcca

SEQ ID NO: 224888 - DNA, 508 bp, Glycine max
cagattcaaaagacctgtccccccgctgaaagcgtcgatggcggagaccaacaacaacgttgccgtcgaggtccttgaaaaagaggatcttgccgtgtccctggccaaatacgtcgccgatctctccaacaaattcacttccgaaagaggggctttcactgtttgcctgtctggcggctctttgatcaactatctccggaagctgctggaaccgccttatgttgatactcttgaatggtccaaatggcacgtgttttgggtggatgagagagtcgtgcccaagactcacgaagatagcaactacaagcttgctttggatggacttctctgcaaggtgccaattcccccgggcaatgtttatgcaatcaatgatgccctttcagccgagggagcggccaatgattacgagacatgtctcagacactgggtcaagaacagtattatagcttcatcgccagccaatggatttcaaaatttgatctaatgctgttgggcatgggccctgatg

SEQ ID NO: 224889 - DNA, 516 bp, Glycine max
cagattcaaaagacctgtccccccgctgaaagcgtcgatggcggagaccaacaacaacgttgccgtcgtggtccttgaaaaagaggatcttgccgtgtccctggccaaatacgtgggcgatctctccaacaaattcacttgcgagagaggggctttcactgtttgcctgtctggcggctctttgatcaactatctgcggaagctgctggaaccgccttatgttgatactcttgaatgggccaaatggcacgtgttttgggtggatgagagagtccagcccaagactcacgaagatagcaactacaagcttgctttggatggacttctctccaaggtgccaattcccccgggcaatgtttatgcaatcaatgatgccctttcagccgagggagcggccaatgattacgagacatgtctcatacacttggtcaagaacagtattatagcttcatcgtcagccaatggattttcaaaatttgatctaatgctgctgggcatgggcccttgatggcacat

SEQ ID NO: 224890 - DNA, 565 bp, Glycine max
gaacatttccttatctatcttcacctgcatcttttaacagttcccctcgaaacttctgaagatgggtggcattgcattcggacgcttggatgattctttcagtttaacctcaatcaaggcctatattgctgagttccattcaaccttgctctttgtttttgccggtgttggttcagccatagcctatggtaagttgacatcagatgcagcacttgatcctgctgggttactggcagttgctatttgccacggttttgcactctttgttgcagtttctgttggtgccaacatctctggtggccatgtcaaccctgctgtgacttttggattggctcttggtggccacatcaccatcctcactggcttcttctactggattgcacagcttcttggctccatcgtggcatgttttcttctcaactatgtcacaggaggcttgccaactccaatccacagtgtggcttctggggttggagctgttgaaggagttgtgaccgagatcatcatcacatttggttgggtgtacacagtgtatgccacagcagcagaccctaggaagggatca

SEQ ID NO: 224891 - DNA, 462 bp, Glycine max
ctgggaattgggatttgccctcaacatatgtggagaagtgtgacatttacagtggggagtgggtgccaaatccaaaggcaccatactacacaaacaagacatgtagggcaattcatgagcaccaaaattgcatcaagtatgggaggcctgactctgagttcatgaagtggaggtggaagccaagtgagtgtgagcttcccatattcaacccttttcaattccttgaaatagttaagggaaaatccatggcttttgttggtgactcatctggaagagattataggcaatccatgattggccttctttcaagggtagaatggccaatagaggtatcatacactacctgagaatattttaagcgatggaagtacccaagttgtaactttaccatgtgcagctttaggacactgcatttggctagatccagaattggctgatcacatggaccaagactgactagcc

SEQ ID NO: 224892 - DNA, 532 bp, Glycine max
ataaaagaaataattttattatggcacgcataacaaattttatctttataaaattacaaaaaaatattaccaatgatagtttacaagaaaaattagttaataatacttataaatttagcttattgcagatctcatgccctccatcttcaacatttctagcaagaaatcactccatgtgtctatgggtcctggcaggcaccaatgcacacaatcattatataatgttacgttctcttgtggccaatgtccatatctacttggatgaccatctggtctcaataacattgcttgtgtggtgtcaagtaacttcaatttcaaacccttctttctaccttccttttcagctttcttgaattcctccaattggatcatatatagctccaaattagtgctctctaatcttgtctcattgctcctaaacggcttagttctgacacaattcccaccttgattccattttccattctcaaaatgagatggtgcaaatgttctaaggaatactattcccttgaaattttctaaactatcgata

SEQ ID NO: 224893 - DNA, 519 bp, Glycine max
  unsure (1)..(519): unsure at all n locations
aatgtaaattttcttgatgagtctgacgattaaagattctcagtaaatttacagctttctgtttggctataaaccacctgtcactagactaaacttctatttcgcgatctttatcattgagatttggggtgtttccttcccacaactcaagtagttcccttttcatccaagagatcacaactacaggtcccaaagtagaaggcaccagataaagaagtgcaggttgaggtgagtgagtcaagacaccagcagccaaagcagttaccaggccaatggcatacccgggtagcgcataccatatgtatttgtgcccctttgaggaatgtaactctaagagatttactggatccctgctcttgcgataatcaaagcagaggactaaagccagtagcatgcctgggatagccatgtctcctaaaccaagcatcatgaagtctgtcgcattctctccaggaacaacaccacccaacaaatttctaggaaaaacaatctttacaggcaactctaanttcttagtta

SEQ ID NO: 224894 - DNA, 470 bp, Glycine max
acaagatggcttcttttcatatccttgtgctcgtggttgctatggtcacattgatgatccctacgaatgcaaacctctctccccatttctatgataaagtatgccctcaggcattgccagtcataaagtcagtggttcaacgagccattattccgtgagcgacgcatcggagcatctcttctgcgcttgcatttccatgattgtttcgtaaatgggtgtgatggatcaatattgctagatgacacccgaaacttcactggcgagaagacagcattgccaaatcttaattcagtcagaggattttcggtggttgatgaaatcaaagaagcggtggacaaagcctgcaaacgccctgtggtctcatgagcagacatcttggacattgcggctggtgattctgaaaccatatatgggggtccacactattggtaccaagtattgttgggcaagagagatgcaagaactggaag

SEQ ID NO: 224895 - DNA, 501 bp, Glycine max
aagttggaaatctctcaattgatatttttaataaaaataacaaactaatatctgctcataaaaaaaaagtaaaattggcatgactaagcttataatataatacgatttcttattctttccactgtatgtaccactattgtaatccagaccttgcaatttgcaattctaattaattaattgacccttctgcaattgcatctgatctctcccttcttcccagtgagaggcttcatgttccccatcttgatcatggaagctttaaaatctctagcaaaaaccaaagggcttctactatacagttgcaccaatttgtcactttctgtgccttttcccttgaacagctcttgatcagaatggagaagaccctttttgtgcagcaaattcgtgtaatatgcagtgtcaactctcgcaggagtagcatcaaatggatgcaagttgttgtctcctccgcttcgcggacatgtcttcctcgcagatgcttgcaaatttgggtctattatg

SEQ ID NO: 224896 - DNA, 475 bp, Glycine max
ttgcgtttagcgagacgacctttccggaatgcagctgagtggtaacaaagtgaggaaattggagttcctgatggccgatgccattgcgcaaggcgccgactctatcatcacaatcggaggcattcagagcaaccactgtcgcgccaccgacgttgccgccaagtatttaaaccttgactgttttctcatcctccgcacttctgacctcctcgtcgatcaagatccaggacttactggcaatcttctcgtcgaacgtatggttggagctcacgttcacctcatctccaaacaagaatatgccaaaattggcagcgtggtctgtttagtgttacttcattacttcttcttttctgtcagctatattattattattattattattatagttattcttcttcttcttcttattatttatctattcatctttttcttagacactcaccaatgtcctaaaagaaaaattgatcaaggaagg

SEQ ID NO: 224897 - DNA, 500 bp, Glycine max
ccgcagcctcgacttcggcgagcgcaacggctacctcaagggcgtcgtcaccgacatcatccacgaccccggtcgcggcgcccctctcgccaaggtggcattccgccaccccttccgctacaagaagcaaacggagctcttcgtcgccgccgagggcctctacaccgggcagttcgtctactgcggcaagaaggccaccctcgtggtcggcaacgtgttgcccatccgatccatccccgaaggtgccgtcatctgcaacgtcgagcaccacgtcggcgaccgcggcgttttcgccagagcctccggtgactatgctattgttataagccacaaccctgataacgacacctctaggatcaagcttccttctggtgcgaagaagattgtgccaagtgggtgcagggcgatgattgggcaagttgcaggtggagggaggactgagaagcctcttctgaaggctggtaatgcttaccataagttcagagtgaagaggaattcat

SEQ ID NO: 224898 - DNA, 541 bp, Glycine max
  unsure (1)..(541): unsure at all n locations
gaacaagggtttctctgtctgcttcttcactttctctcgtttcaatcgaaaccaaaacaaaaacatgggcagaaaattcttcgtcggtggcaactggaaatgcaatgggaccactgaggaggtaaagaagattgttactactttgaatgaggctaaagtccctggagaagatgtcgtagaagttgttgtgagccctccttttgtgttccttcctgttgtaaaaagtttgctgcgccctgatttccatgtttcggcacaaaactgttgggttcgcaaaggtggtgcttataccggtgaggttagtgctgaaatgcttgttaatttgggaattccttgggttattattggtcactctgaacggaggcagcttttaaatgaatcaaacgagtttgtgggagataaagttgcctatgcacttcaacaaggtctaaaagttattgcatgcattgnggagactctcgaacagcgtgaagctggtacaacaactgctgttgtttctgagcaacaaaagccattgcagctaaaatatcaaattgggaca

SEQ ID NO: 224899 - DNA, 502 bp, Glycine max
gctcaaggacatcgtcggaatccccacctgcacaaaaacccacgaacaagccctctgcctcgggatccccctctccgatctcgacgcccaccccgccatcgatctcgccatcgacggcgccgacgaggtcgaccccttcctcaacctcgtcaagggccgtggcggctccctcctccgagaaaaaatggtcgaaggcgcatgcaagaagttcatcgtcatcgttgatgagtccaagctcgtaaactatttggggggtagtgggttggccatgcccgttgaggttattaagttctgttggaggttcaccgcggcgaggttgcagaagctttttgaggaggctgggtgcgttgccaggctcataacttttggggagaaggagaaggaggagccttatgtgacggataatgggaactttattggtgatttgtatttcgagaggagtattggggatttgaaggctgctagtgatgctattttgcagcttgctggggttgtggagcat

SEQ ID NO: 224900 - DNA, 536 bp, Glycine max
tttctttcttcaacgtttccatcatacacagatcccaatcctctctcaagccctaatttcccctcatttccatggccacagaagagcccactgtcgcggtggaacccgctcccgaacctgcctgcgccgatcctcccccggaggagaaggaggagaccaaacctgaagccaaggctaagaaaaccaaggagcccaaacctaaaaaggtttccagacctcgcaaccctgccactcatccttcctacgaagagatggttaaagatgcaattacctcgctgaaggagaaaaccggttcgagccaatacgcgattgcgaagttcatcgaggagaagcacaagcagcttccaccgaacttcaagaagcttcttctctaccatttgaagaagctcgtcgccgccggaaaactcgtcaaagtcaaaggctcgttcaagctcccacctaccagacctgctgcatcttcttcttcttcttcttcgccggcaaagaagaaaaagcccgcagctgccaagtccaagcctaagcctaagcccaagccc

SEQ ID NO: 224901 - DNA, 290 bp, Glycine max
cttttctttatgggtcgttatccatttgtaccctttccttaaaggtctaatgggtaggcagaacagaacaccaactcttattgtcatatggtctgtgctcttggcttctatcttttccttggtttgggtcagagttgacccttttgtgttgaaaacaaaagggcctgatgtcaagcaatgtggaatcagttgctgaatctacatctcatttctttacaactatgaagcgtgaaacaaaaacctagatgcacatatgaataatagcagagcaaaatttttgttgatgaaaa

SEQ ID NO: 224902 - DNA, 532 bp, Glycine max
gcgaagagaatggctcccaagggtttaatctttttggctgtgttatgcttctcagcactgtcactgagtcgttgtcttgcggaggataatggacttgttatgaacttctacaaggaatcatgccctcaggctgaagacatcatcaaagaacaagtcaagcttctctacaagcgccacaagaacactgctttctcctggctcagaaacatcttccatgactgtgctgttcagagttgtgatgcttcactgttgctggactccacaagaaggagcttgtctgagaaggaaacagatagaagctttgggttgagaaatttcaggtacattgagaccatcaaagaagctttggaaagggaatgcccaggagttgtttcctgtgctgatatcctcgttctctctgccagagatggcattgtttcgctaggaggtccccatatccctcttaaaacaggaagaagggatggtagaaggagcagagccgatgtggtagagcagttcctcccagaccacaatgaatccatttctgcagttc

SEQ ID NO: 224903 - DNA, 476 bp, Glycine max
gagaaaacatgtcagattttttagaatctggacttattatagacattgaagttgggcttggcccagcaggagagctcagatacccctcttatccacaaagccaaggatgggaatttcctggtattggcgaatttcagtgctatgacaaatatttgaaggcagatttcaaagcagctgtagcaagggctggccatcctgaatgggaactgccagatgacgcaggcaagtacaatgatgtcccagaatctactggattcttcaaatcaaatggcacgtatgtcactgagaaagggaagttcttcttgacctggtattctaacaaattgctgaatcatggtgatcaaatactagatgaagccaacaaagctttcctgggctgtaaagtcaaattagcaatcaaagtatctggaattcactggtggtacaaagttgaaaatcatgctgcagagcttactgctggatattacaaccttaat

SEQ ID NO: 224904 - DNA, 547 bp, Glycine max
gataaaatagtttattaacttcgtgataggaatacacacataaaaagtacacgagagtactttgtagatgtttaggcagtgctacttcatggcattattatcagcattgcagattacagtggctggatgctttatttatattggtagatattatttccagcagattatttaattactcatggcaccaaattgggaaatcaaccatcaactttcatgtctgtctctggaagccaggggaatggcagtgttggtttagttgcttccagaagaacctcaatgggaatctttggtgcagatggcttcaatggtgttatggcgtgattatacttttgagggtttgcacagtaatcctgatctgcatgcatctttagcacaaattttttgaatatattaaaatttgatttttgcagtagatcatctgatagacgaaggtatgttactccgaacatgcttagttttggagggccattgttgttgacaccttgcggtcttgcattcagtatgatttggttgtaagctgtggcatcataccttggaagtgcatttt

SEQ ID NO: 224905 - DNA, 478 bp, Glycine max
attccttcatttttaaacctagctccatctccctccactcaccataacatggcatcagaagcaaatgctgccaacaccaacttctgtgtaaatgttagcaacaatggctacattagtgctaatgaccccttgaactggggtgcggcggcggaggctatggctgggagccacctcgacgaggtcaagcgcatgctagaggagtaccggaggcccgtcgtcaagctcggtggagagaccctgaccatctcgcaggtcgcggcgatcgcggcccacgaccagggggtgaaggtggagctggcggagtcctccagggccggtgttaaggccagcagtgactgggtgatggagagcatgaacaagggcactgacagctacggcgtcaccaccgggttcggtgctacctcccaccggagaaccaaacagggcggtgccttgcagaaggagctaattaggtttttgaatgctggaatatttggca

SEQ ID NO: 224906 - DNA, 389 bp, Glycine max
aaagaaaaaacttccttaaaagggaaggccatgttttgaattttgcacccaaagcttcggaaaacaaagggaatttttttccctttggaattccaagttccttgcagggcatacttaagggaaaacggggaagttgttgaatggggatggattgcccacagccttttttagccaaaccaaaggcttaatttaaccccaaacccgtgtccagaaaaaaacccatttttaaagaaacccgaaattaaaaaaacttaccatttgggaagaggggccccattccactccccaggggtttccaaaaggggatcaaggatcttccttgggcacaaagcagggaacacttgtgaacactttttacccggggggaaaaccttttaaccagttagcaa

SEQ ID NO: 224907 - DNA, 473 bp, Glycine max
cccaatcttcgccttcgcccacaacaactcctccttcaggatcgctgccaacgttactttccatttttacccttcatcctcgagaaaaaaatggcgaacgcagcatctggtatggccgtccatgatgagtgcaagctaaaggttctggaactcaaggcgaagaggacgtaccggtatatcgtttttaagattgaggagaaatcgaagcaagttattgtggagaagctgggtgaccctgcaaatggctatgatgaattcgctgccagtcttcctgctgatgagtgtcgatatgctgtttatgattatgattttgtcactgaagagaattgccaaaagagcagaattttcttcattgcttggtcccctgatacatctagggttaggagcaagatgatttatgccagctccaaagatagattcaagagggagcttgatggaattcagattgagctgcaagcaactgatcctactga

SEQ ID NO: 224908 - DNA, 531 bp, Glycine max
caagaaagtattttagttaatttaagtcataagacattagtaagatggcaactggcaacattacatcaatacctggtcccaaattttcgttcaatcacacaaagaacagttacaaaattaactactaggaataggactaagattacacccaaacacgggttatatgtcgcaaaccacaagatacactggaacaagagaagctttgttgaagctgcaatagacctcatgtcaaaacttggaaaattgagtccaaattagccaagttgaccatccccatcacaactcctatttatgaataatcggaatcatttaattggcacggcttttgaacacatcaagacccatctcagtaggatcagttgcttgcagctcaatctgaattccatcaagctccctcttgaatctatctttggagctggcataaatcatcttgctcctaaccctagatgtatcaggggaccaagcaatgaagaaaattctgctcttttggcaattctcttcagtgacaaaatcaaaatcataaacagcata

SEQ ID NO: 224909 - DNA, 566 bp, Glycine max
  unsure (1)..(566): unsure at all n locations
tattcatctttctcttttttagcttttcttttcctctaaaagtgagtccttccttcttcgatcacttgttaaattcacatatcatagcaatggcagcacgttcctacagccccatcatggttgccctctctttgcttcttttggtcacattctctaatgtagctgaggcttatacacgcagtggaacacttcgtccttcagattgtaaaccaaagtgtacttaccgttgctctgcaacttcacacaagaagccatgcatgtttttctgccagaagtgttgtgctaaatgcctatgcgttcctcctggtacatatggcaacaagcaaatttgcccttgctacaacagctggaagaccaaggaaggaggacccaaatgcccttaaaccccttaattgcctaatatataaataatttaataagcaatgtaatcctatatgactcttcatgagcaattttctatctctacatagatcagcaatgctgttttaattggttagttgatagcacctggggacacanttagttatgttcccttcagttttcagagggaaaactatatttttagc

SEQ ID NO: 224910 - DNA, 458 bp, Glycine max
gcaataacgaactttgcaaggaagctatttccttttatggtgtatttgatggacacggagggaagagcgctgcacaatttgttcgtgatcatctgccacgggtgattgttgaggatgctgacttccctttggaattagagaaggtagtcacaaggtcatttttggagattgatgcagagtttgcaagatcatgttctaccgagtcttccctgtcttctggtacaactgcactgactgcaattatatttggaaggtctttactggttgccaatgctggagactgccgcgctgtattgtcccgtggtggaggggctatagaaatgtccaaagatcacaggccattgtgtattaaagaaaggaagaggattgagtctctaggtggatacatagatgacggttacctgaacggccagttaggagtgactcgtgcactaggtgactggcatcttgaaggaatg

SEQ ID NO: 224911 - DNA, 501 bp, Glycine max
  unsure (1)..(501): unsure at all n locations
aaagaagtgaggaatagcagatgttgttgttgatacaatacaactcatctgtcacaatccattctggcgccctcaaaacaccctctaactgaacaaccaaagaaaaagaaaaagaaaaaaacttgagcactcttcctcttgccagtttcagatctctctgagaaatgataataacaataatgggggtgtgagatgtgatgtgatgtgaaggtgtgtaaggtgtacacaaaagatggagtgttggaattcggtggacggggtggtggaggagataatgaggattcacagatctcttccagcacggcctgggattgatgaagttgaagcggcgagaggtttgatcgggaatgtggagaaggaagaccaggccaggctcgaagccatagcccggcagagcaagggcgttgatgtgccagatgagctctttatggtgctccaagagatgcagaggaacgttctttattaccagagcanggagcagaaaagggaggccgtcaagct

SEQ ID NO: 224912 - DNA, 487 bp, Glycine max
attgattttgggttgtctgactatgtaaagccagatgagaggttgaatgatattgtgggaagtgcttattatgtagctccagaagttttgcatagatcttatgggacagaggcagatatgtggagcattggtgtaattgcttatattcttttatgcggaagccgtcccttttgggcccggacagaatctggtatatttcgggctgtactgaaggcagatccaagttttgatgaggctccttggccttctttatcggttgatgccaaagattttgtaaagaggttgttgaataaggattatcgtaaaagattgactgcggctcaggcactaagtcatccatggctggtgaatcatcatgatgatatgaggatacctttggatatgataatccacaagcttggtaaagcttacatttgctcgtcttcgttgcgcaaatctgctttacgggctcttgcaaagacattaacagtagctcagctagcttatc

SEQ ID NO: 224913 - DNA, 479 bp, Glycine max
cttggatggaagacagtgacagacacaatttacgaacagaaactctgcatcaacaatataaattggttaaagagaggactatatctggagattcatactatggctctcacgtgatgcagtatggtgatgtacggcttagcagtgatgttctctttccatatttgggtccagaacctgctcacgataattttcactttttgtggactaaaactccttatggtcaccttcaaaaccagtcaaccaacgtgatgctgatctcatccatttttgggataagttccgcaaagctcctgagggttctctcaggaaaaatgcagctcagaaacaagttttggaagcaatgtctcatagaatgcatgttgacaacagtgtaaaacttattgggaagcttttatttggtattgaaaagggtccagaagtactcaacgctgatagaccggcaggatcggcacttgttgatgattggcactgccttaaaa

SEQ ID NO: 224914 - DNA, 526 bp, Glycine max
aaaggtaccaaagcatagttgagtcccaatattttacaaataataaatacaatgtcgccattaatattaaacaataactttgacatcataaattcttccaaaataattatacaaaagtgacaagggaaaacccgatctgccagttgcctactgaataaaaacacacatcattactatgtgttggcatacacgcatgaccttgtgccttgtcatgagtgaatattccaaagcaattggtcctttatgcctccttaatccttatgccacaaaatgctatcatcccttgaaagttgtaattgcttcttcagaaatagatttatacaaaggtagttgcaatatctatttgccaaactaaaaatgtaaagacccttcttcccaatcctagtagtgtcccaattgtatttacaaaggcgggacaaaatatgtatatacaagtacaatcatatagcataatgtaacaataatcatactttggtctttactggtgcacattacaggaattattatgcactgaaacccctttgca

SEQ ID NO: 224915 - DNA, 475 bp, Glycine max
ggagaccaattctattctgctgattctctcactgatagccagaaggtttatgtagattcattggtgaagaaagcatatgaaaattgggatcaggttgtggattatgatggcaaatcactcgtgaatgctaaaatttcttctgaaaatgaactttatgtggagtcaattgattatggtagtggtttagatcatcaactgcaactgccggtccttccagtgtctgttccttctgaacagcaaatcaattcagggatacctgttggaggttacaacgataataatatagtaacacgatatccaacccagtcattgattccaaactccagctcccggaatcagttcgatagctcattatatgtgtcgaatgaccaattaatcagcaatgctcaccaaacccaaagcactagtaatgatcatggcaccgttgggttagctcttggtcctcctcaatcatcgacatcagggttccatgctg

SEQ ID NO: 224916 - DNA, 527 bp, Glycine max
gagatgatcaatcttagttatcgtctcaaatatgagaggtgttgcgtaaacacagaatccctaaaaacccaaagccaatggaaagaaaggagcataaacgtgaaaaagaaaaacaaattgacaatcacggtttttcctaagcttcaacaaactgtacagaatactgggacaaacgtgctgctgtcaaatcagatacacagatacatagatcaagaatattaacaccatggactgcacaatttggttggcactgataaagacaactaaatctgcagaatatcagtattatcttatggctaactgttaagcctgcaaccattgtccatacaacttattcatctaactcctctatctgtgcccgcttctcagcggctatcttcctgataaagaagccccacctcattgctgccttgatcttcagccatcccacaacagctctgcctgggcgagagcgatcctcatcatagttcggtatactgggagatggcatgaatgatgggaatgaaaagccatccttagcactcatg

SEQ ID NO: 224917 - DNA, 475 bp, Glycine max
gaaactttgtggcctgagttggatcagttgctccgagatgaggatgatgcaaatactgtctctaccccatatacagctgctattcttgaatatcgagtagtgattcatgacccgactttcacatcatcctatgataatcacgtgacccgtggcaaaatgggaatgctgtgtttgatattcatcatccttgcagggtgaatgttgctgtacaaagggagcttcacaaacccgagtctgaccgttcttgcatacatttggaatttgatatatcagggactggcttaacatatgaaactggagaccatgtgggtgtttatgctgataactgcgacgaaactgttgaagaaactgggaagttgttgggtcagaatttagatctattgttttctcttcacactgataaggaggatggcacttccctaggtggttctctcctgcctcctttccctggcccttgcacactgcgtactgcatt

SEQ ID NO: 224918 - DNA, 544 bp, Glycine max
  unsure (1)..(544): unsure at all n locations
aaaaaaaatacatgtttcattaataaaataattattcgttaccaattcctacacttaataatacatgaccatccactgtaaccggtatttgtttaccgatttctgagactaactatcacagagtcccccgataaataatcccacttcagagggatccaacctatcataataagagaatataaagataacagaaaataaaagaaaaaagggtaaatgtccagaaaagcatttcttctcaaggaaacctgtttaacctccactgttggtgtcctaaatttccggaaaggcagtgactaatctcaagaatatccttcagccaatcctgaatttagcatatcaaatagcaaggataccacaatctgggcagaagaatgatcagaaaaatcaccacacatcccttaggtaacgtccatccatctgaagttttttcactatagcctcagcctttgtcgagtccacattntcctgctgctggacaatggtatgaagagttcgatgaacatctctggccatacccttggcatcaccacagacgtaaagatat

SEQ ID NO: 224919 - DNA, 466 bp, Glycine max
ctaacatggatgtcctggttgcactatgaacatacagcctccttatgactaattactgaatggtgactattctgtgtggagcccttacaggattctggtctccaacatactttgaaacaagctctaatgcttagtaacattggtatttgacgggcaaattcttttgaagttcattgccatgggaaagacctatgatgccataaacaagctagtggaactaacttgtgccacagctatattgcttgccacagataaaggccgttgaattgttaaagaaagggaaatggattccttgctcattcataatgatgacacattaaatgtacttcgtggtacaaacattcctggtgatggcattgatactaggggctcatgttatgagaatgatagcttggtgactggcgaatctatactcgaatcaaatgacgctaatgcatctggtattggaggtacgatcaattagcat

SEQ ID NO: 224920 - DNA, 531 bp, Glycine max
aagaggaagaactatgaacttacaagagcatttacaatgaatcggcagttacaattacaattgcaccccaatgggtgcagcggatctaaaggaaaaatgcacaaggttggacttacaagggtcaaatttatttgcactctgaagtaattctgtatcaattctcgataaattacaactatttcaagttttgaccgcagcatagggttttctatatcttctcaaatgcacagaagagcatacaacgcttacagacgactgagccatgcatgcaccagcatcccatggtggcagcttgatccccaaccaaggaaagataaccccggctgcaactggtatagcatcaacattgtgagccatcgcaaatacataatttaatcgaatacggagaaaggtctttttggaaagatcaatggcagtgatcacatcttccaaggtatctctcatgagcacatagctagcagctattattgcaacatttgtcgcattcccaattgccatacccacatctggagcatctaatgctggagagtc

SEQ ID NO: 224921 - DNA, 582 bp, Glycine max
agcatcctgctacagcactaaagtctattgcaggcagactttaattggagggaactatggccttctcaataccaccacctttgctcccaatcctgactactacagtgcacttttgtggcatcgattaatgggaaagaaggttcttgcggtctcaagtgatgtttcttcaccctttttacgcacttatgcccattgcacaaaagatagagcgggtgtaacgttacttctgataaacttaagcaatcagacagatttcatactcaccgtccgaaacccggtgactgcaagtgttgtagaaaatgaagtggccacaagcacccataaggaaagttcattttttgataaactcaagaagacattctcttgggttggaacaaaagggtcagaggtcacattcagggaggagtatcacctaactccaaaagatggttacctcagaagccaaaccatggtgctgaatggtattccattggagttaacagacgaaggagatctttcaccgttggatccagtgcgcaataacgtgcgatctccaatatacatgactcctttgtgcattggattggttggataccccaactt

SEQ ID NO: 224922 - DNA, 535 bp, Glycine max
ctcgtaagagtagtaactaagaaaataaaggtttctaatttatttcgggcaattctccggcggcaccgcaaccgattccgccaccgcatatggcaaaaggtcgaaaactaacgaccagccggagcgagcgcttcttgggaacctatgcttacagccaaggctccggcgccgtgaacccgtcggagcttcgggaagaggatgtatggggcgccggagatgacgccggcgaacgcgagtgggatccacacttcgccgccatgagcaacggcggcggaagccggcgccggattccgcgtgacacggatgtgcaccggcgcgtgggtgggctgtctctggcttttgaagctccggcgagtggcgcgtcgccgaggatcgtgcaccagtttcgcgcgcgtgaagagatggcgtcgacgccgcgagtgcggcacatggcgacgtcggcgccgatgaacgttgccgactggagcaagatactccgagtcgacttcgtcgattcgctgaacgacgattacaacgacgaagaccaatcggagat

SEQ ID NO: 224923 - DNA, 518 bp, Glycine max
atcataataggtgagcagccgagatctgttgccggtggcatcaaggaaagtaagagtttagagtttgaactctgtttatccaatgcacaaagcgtagatctctgtgtcataatggaatacaggaaaatcaaagactaggatgaagttatggctgccggcgttgaggacgttggaaaatcatttttgctgtcagtcccagataacgatttgacttccgagggagaaaccaacattgacagccacagggagaaagtaaagtggacgcgcaagtcagttgctacacttgcattgactgttcttactaggtcgcaaggcattctaattgtttggtccaagatagctggcaagtatgagtatagtgtcactactgctaactttatggtggagactttaaaatgtgctatatcccttgcggccttgggaagaatatggaaacaagacggtgtgaatgacgacaacaggttgactacaaccttggatgaagttatagtgtatcctattaccgcagcactttacct

SEQ ID NO: 224924 - DNA, 358 bp, Glycine max
ctcgagccgttgaaaatggcggcaaccactgccccaaaacctgcgttcaccgccctcccttcttcatcatcatcatcttcccagaagccctttctgcgtctcgccctccaatttccctccctgccaaacagttgctatcactcccaacgcccttctctcaaaatctccagcgccctctgcgatgcaaccgcgaaaaccaccaccgccgccgccgccgaagattttgtctcccgattcggcctggaggagccccgcaagggcgccgacatcctcgtggaggcgctggagcggcagggcgtgaccgacgtgttcgcctaccccggtggtgcttgcatggagatccaccaggcactcaccc

SEQ ID NO: 224925 - DNA, 476 bp, Glycine max
ttcaagtggaactcaccattctggtgtccttgaaggatggtttggagttcactggtggactgggcgagcttttgttcttttgtttacgacacttgctgtctttgcacctttggtcagctttaagagaattgattcattgaaattcacatctgcattattcagtggactagcagttgtttttcttgtcattgctgtgggaatctcaattttcaagattataatcggaggccttgagatgcccagactcttcccgatcattacagatgtagcatcagtttttgaactgttcactgttgttcctgtgcttgtgactgcctatatctgccactacaacgttcacagcataaataatgaacttgaggactcctcacagatgcatggtgttgtacgcacttcccttgcactatgcgcttcagtgtacttactgacaagcttctttggattccttctatttggtgaaagaactcttgatgatg

SEQ ID NO: 224926 - DNA, 543 bp, Glycine max
gctatgtcagggattttgacaattcataatctgttattgtttaccatacaaagtaggtcaatgagatcttccctagctagttatttcctctctgtaagttaaagaacaaaatcctacaatgaagtaaattaatcaaatatgtattctctatttacattttctattccactcactagagggatacatacccaaatacaacaaaaaaccatatttgaaaaccaaattcattgctgaactaagaatttggcgatcaaactcacccaagagtgacagcggctggaaatatgaatgctacacagacagcagctgttgctccagtaaactggaaaatatcccaaatgctgggtataaaatttgctcccaggaagataacaccaataagtgaaatagtaattgatgcaaatctgaagttatcttgacgcaaaggcctatatgatgaaaatacgagaccatctaggttgacccgcactgcatagaagacaactggaaatacaagcacaagatgcgcaacatagctaaatcgaacagcgtcattgagcacag

SEQ ID NO: 224927 - DNA, 538 bp, Glycine max
gagaaacacatctaaatatgattcagaagggaaagccacataaaaattagaagtaaaaccaaacaagcatggcggaggcattggcttatacaataatacaagtcaggtgcaatgccagcctgctgtacatgtcaaacataatgtcatacataaattccaatttctattttgtgggattattggaaaaacctgataaagtaagagaaaagtattagctataacagttggactgtacaggaagcttgttgtgtcactaacattgaatcttcattcctcaggctcaggcccgactttgatctccaatagcctctcaactggttgtctgcagattggacatctatttgtctggaacctcaaaaccttcgcacatccgctacacatacacatgtggcggcatggaaggacagttgtgtcccgaggctctgacaagcatataacacactcttttcctgggtcattcccatccacatcactctccactgaatttccaataccatatatctcctgcagttcatacctcattccatttacccataag

SEQ ID NO: 224928 - DNA, 491 bp, Glycine max
  unsure (1)..(491): unsure at all n locations
ttgggatcaagaatcatggtgaatcacctatctttctataaataccacaaaattgaagctgaacgcatgagttctaatatatcattcaaaagtttttgaaatgttgtcaccccttcttctatttctatgcctaactcttcctttgtttttgttgtccttcttcaaataccgtaaaaccttcaagaatccaccacttccaccaggtcctagaggccttcccataatagggaatcttcatcaactagatagtccttctcttcatgagcagctatggcatctctcaaagaaatatggtcctttattttcccttcaatttggattaaggccagccatagttgtttcctctccaaaattggccaaagaggtaatgaaagacaatgaccttgagtgctgtggacgacctanattactaggccaacagaaactaacctataatggggtagacatgggattttcctatacgatagttatcggagagaaatcacgaaaat

SEQ ID NO: 224929 - DNA, 350 bp, Glycine max
ggagtgcttacatctttatttaataatcttcgttggaagagtacaatcattaattattttattttatttttttcagcagtagttaccacttttggattttacatatagcacttggccacaacacacagaggattcttcttatgctgggtaactcctggcaacacttcagtatcaatgtcttcctttttcattccttgaggcaattcccagtcaaaggaattaagaagattagcaagtataagatccaatgcactaaatgccatattcataccagggcacaatttacgaccagcaccgaatggaataaactcaaaatcttgtccataaagatctatgtcgcaatttaaaaa

SEQ ID NO: 224930 - DNA, 482 bp, Glycine max
gtgaaagagaatccgaggcgaagagaagagaaaaattaagatggaggggaaggagcaggatgtgtcgctgggagcgaacaagttcccggagagacagccgattgggacggcggcgcagagccaagacgacggcaaggactaccaggagccggcgccggcgccactggttgacccgacggagtttacgtcatggtccttttacagagcagggatagcagagtttgtggccacttttctgtttctatacatcactgtcttaaccgtcatgggagtcgccggggctaagtctaagtgcagtaccgttgggattcaaggaatcgcttgggccttcggtggcatgatcttcgccctcgtttactgcaccgctggcatctcagggggacacataaacccggcggtgacatttgggctgtttttggcgaggaaagttgtcgtgcccaaggcgattttctacattgtaatgcaatgcttgggtgctattt

SEQ ID NO: 224931 - DNA, 336 bp, Glycine max
ctcttaataccaattttctagggtttatacaattttcgatggcttcttgagatgttgagtaccgttgctttgtcggtgggctcgcttgggccactgacgaccaagctctcgagagagccttctctcagtacggcgaaatcgttgaaacgaagattatcaacgatcgtgagactggaagatccaggggttttggatttgtgaccttcgcctcggagcagtccatgaaagacgccatcgaagggatgaacggccaaaaccttgacggccgtaacatcactgttaacgaagctcagtcccgtggtggcggtggcggcggaggcggtggaggtggtggat

SEQ ID NO: 224932 - DNA, 575 bp, Glycine max
tggcgtgttgcctgatgtaccgtggtgatgttgtgcccaaagatgtaaacgctgctgttgccaccatcaagaccaagaggaccattcagtttgtggattggtgccctactggtttcaagtgtggtattaactaccagccacctaccgttgttcctggaggcgaccttgccaaggtgcagagggcagtttgcatgatttcaaactccaccagtgtggctgaagtgtttggccgcattgatcacaagtttgatctcatgtatgccaagcgtgcttttgtccactggtacgtgggtgagggtatggaagaaggtgaattttctgaagcccgtgaggaccttgcagcccttgagaaggattatgaagaagtgggtgctgagtctggtgagggccaggaagaggatgaagactactagaatctacttcagattcttgttcttgtggtctgttttctgctgcgtttgatgttcagatgtgtaccagtaccgatgtggttttaatttggatgcattgcttttattgctcgctgcttctgttacctacctaagcttgatgggcatattggaccttgttgtttt

SEQ ID NO: 224933 - DNA, 425 bp, Glycine max
ggtctttttgcctgatgccccgctgcagcgtgatgcccactaatcccaactgtgctgttgccaccatcaaaaccacgacgaccatgcacgtggtagcttggagccctgctgatttcaagggtaggatgaactaccagacgcctaccgtggacgctgctggcgaccacacccttgtgctgagggcagacactatgattccaagactccaccaccaccattgaagacttagctcgccatgatcacaaagtggatcttatgtgtccctagcgaccttctgtacgctggacccctagtgacggtatggaacctggtgaaccaaggctggcccaacttgaccttgctgacgttgcgatggataatgactatattggtgctgaagctgataagggccatgaacaagatgcagactgctatgatctacttca

SEQ ID NO: 224934 - DNA, 487 bp, Glycine max
gagagatccatcgatcaattaatttccaatggccgatcagctcaccgacgaacagatctctgagttcaaggaagcctttagcctcttcgacaaggacggcgatggttgtattaccaccaaggaacttgggactgtgatgcggtcgcttgggcagaacccaactgaggctgagctgcaggacatgataaatgaggttgaagctgatgggaatggtaccattgatttcccagaattcctcaatctcatggcgcgcaagatgaaagacactgattcagaggaagagctgaaggaggttttccgtgtgtttgacaaggatcagaatggtttcatctttgccgcaaagttccgccacgtaatgaccaatctcggtgagaagctgaccgatgaggaagtcgatgagatgattcgtgaggttgacgttgatggtgatgggcagatcaactacgaggagtttgtcaaagtcatgatggccaagtgaggaccaatc

SEQ ID NO: 224935 - DNA, 547 bp, Glycine max
cacagaaacaatcatataatagcataaagacggttttaacagtataagtcacccatatgtaaaagcactaattgcaaccaattgttccagtttcatagtagtaacccaaaaaacatgaaaagtgaagtacaaatgcatggtgagacacagctaatccaagctactaaaacaagggacagagcaaacaagtagaaaatactaatgagcaataccaataaataaaagcaaacacaaatccgaccaacaaaaactaatgaccccaaatgaagattgtcctaatgaaaatagaattttcatcaaaacttatctgccctgtcccttttctgttcatgtgctttcaaatgtttttgttatggttgattggtcctcacttggccatcatgactttgacaaactcctcgtagttgatctgcccatcaccatcaacgtcagcctcacgaatcatctcatcgacttcctcatcggtcagcttctcaccgagattggtcattacgtggcggagctctgcggcagagatgaaaccattctgatccttgtcaaacacacg

SEQ ID NO: 224936 - DNA, 516 bp, Glycine max
aatccgacatgagttaggaccaatttccatttcattgtaattctaatgttggttgaacgcttgcaaccatgaatacacatcgttggtgaaattttcacctgatatatatactggtcttattgtgagaaaggaaaaagaaaaaaggacagtgcctagcactatccactgtacatgccaaccacctaagtataccttttcacaacccgtatcctctagagtatgtaacagctccttcaacaggttgaataaagggaaaacggtaaaaggaaaataaatatggaaaccatgttaaaaagaagtccaaatgatttaagagagttgtagaaatcctccgcctaactcctgttaccagagccaaggctttcatagaacaaaatgtacccatggtctgtattacttgaatactcctgtgatgatccaaagaacgtctgcacagcagactcgtcaatcatctctacattttcgtcatcaaaaaataaccagtggttatggcttttcacaagactgacataatgc

SEQ ID NO: 224937 - DNA, 476 bp, Glycine max
aagcaaagctcatccttgagttaaaaaatggcagcagcttcttccatggctctctcatccccatccttggctggcaaggccgtgaagctgggcccatcagccccagaagtgggaagggtgagcatgaggaagaccgtcaccaaacagggcttcctaaggaagcccatggtacggcccagaccgagtcaagtacttgggcccattctctggcgagcccccgtcctacctaaccggtgagttcccaggcgactacggctgggacactgctgggctttccgcagacccagaaaccttcgccaagaaccgtgaactcgaagtgatccactccaggtgggccatgctcggagccttgggctgcgtcttcccggagttgctgtcccgcaacggggtgaagttcggagaagccgtgtggttcaaggccgggtcccagatcttcagcgagggtgggctcgactacttgggcaacccaagcctga

SEQ ID NO: 224938 - DNA, 514 bp, Glycine max
gtaaaaagcaagtaacattaagttggattcggatacacaagataattcacattatctgaagtacttcaccaaacacaaatctaaaaactctcaaaagtcatttcgttctttgacgctcactttccggggacgaagttggtggcataggcccaggcgttgttgttgacagggtcagcaaggtgatcggcgaggttctccaatggaccctttccggtgacaatggcctgaacaaagaagccaaacatagagaacatggccaatcgtccgttcttgagttccttcaccttaagctcagcaaaagcctctgggtcatcagcaaggcccaatgggtcgaagctgccacctgggtagattgggtcagtgacctcaccgagggggccaccagcaatacggtaaccttcaacggcacccattaggataacttgtgtggcccagatggcgaggatgctctgggcgtggatcaggcttgggttgcccaagtagtcgagcccaccctcgctgaagatctgggacc

SEQ ID NO: 224939 - DNA, 467 bp, Glycine max
gaagtgcagttcccaaatggcaataatctttctttcaagctccgcaattcttcttccaagtcttgctttctttctcacattatttaaccttgcaagttccgaatcattcatcggcgtgaactacggacaagtcgctgacaacctgccgccgccgtcggcgacggcgaagctgctccagtcgacggccatcggaaaggtgcgtttgtacggaaccgacccggccataataaaagctctggcgaacacggggatcggaatcgtgatcggagcggcgaacggggacattccggggctagcctcggaccctaacttcgcgaaaacgtgggtgaacaccaacgtggtaccgtactaccctgccagcaacatcatcctcataaccgtcggcaacgaagtgataacctcgaacgaccaaaacctcgtgaaccagatgctgccggcgatccagaacgtgcagggcgcgctcgacg

SEQ ID NO: 224940 - DNA, 605 bp, Glycine max
gccaagccattgacttgaggcatttggaggagaatttgaagaacacggtcaagaacgttgtgagtcaagttgctaagaggactctcaccacaggtgtcaatggagagcttcacccttcaaggttttgtgagaaggacttgctcaaggttgttgatagggagtacacatttgcatacattgatgacccctgcagtggaacataccctttgatgcaaaagctaaggcaagtgcttgtggactatgcattggccaatggagagaacgagaagaacacaaacacatcaatcttccaaaagattgcaacatttgaggaagagttgaagacccttttgcctaaggaagtggaaggtgcaagagttgcatatgagaatgaccaatgtgcaattccaaacaagatcaaggaatgcaggtcttaccccttgtacaagtttgtgagagaggagttggggacagcattgctaactggtgaaagggttatctcaccgggtgaagagtgtgacaaagtgttcactgctttgtgccaagggaagatcattgatccacttttggaatgccttggggagtggaatggggcacctcttccatatgttagtttttcttatttc

SEQ ID NO: 224941 - DNA, 481 bp, Glycine max
gtcccaggtgggcagctagaagattcaagagttctcaagggagttatgataaacaaagatgtggttgcccctggcaaaatgaggagaaagattgttaatccacgtatcattcttcttgattgtccccttgagtataaaaagggtgaaaaccaaacaaatgctgaactgctcaaagaagaagactggagtctcttattgaagatggaagaagaatatattgaggagctatgcatgcagatattgaagtttaaaccagacttggtaatcacagagaagggtctgagtgatttggcttgccattatctcagcaagcatggagttagtgcaatcaggaggctgaggaaaactgataataatagaattgcaaaggcttgtggtgctgttattgtgaatagaccagatgaattgcaggagtctgatgttggtactggcgctgggttatgtgaggttaagaaaattggagatgagtactttgcattta

SEQ ID NO: 224942 - DNA, 543 bp, Glycine max
aaaaaaaaaggtacaagacacggatttaatggcaaaatatagaaatactgaccttagctttgcttggtacagttgctatcaatgcagtttttatgcagacatatgttggtggcgtctcatgcccatacatctgtgggaagcatttggatcatggggttcttctagttggttatggtgaaggtgcatatgctcccattcgttttaagaacaaaccttactggatcattaagaattcatggggcgagagctggggagagaatggatattacaagatctgcagaggtcgaaatgtgtgtggagtagattccatggtctcaactgtagctgctatatatccatccagccattaaatacaaagatatgcctgattgtggttgtgatgtgatactggactaaggggagtttgtataaatatttatgttgtgaactttatcatttggtactggtaaaattatctccgtataggatcaggaaactgctaagaccatgttgtttatgtagtatgtaaattctgtatgtatgcttgacatatacaagtgggaa

SEQ ID NO: 224943 - DNA, 369 bp, Glycine max
ctctactggtctatcagccgcatttgcaagtatcagaaggaaatccagagtctggaggaagtggagaagagaatcaaggcccagtagattcttttagtcatgattagtggattgaggctactttagttgagtctagtagggacatgccaacatgatgtaccaaattatagagtgtgatatactcatgtgattcagttctagactttcaaattccaatctttctttatcatactgtttggatctgctcttgacttgtatgttgtttaatggcttttagcctatatcagtgaaatatttttcttttttatatctaaaaaaaaaaaaaaataaaaaaaaaaaaaaaaaaaaaaaaaaataaaaaaagggggg

SEQ ID NO: 224944 - DNA, 546 bp, Glycine max
agaggagggtgttgaaggttatgatgatgaaaggacactacttatgtctcaaaagagcttggagaagcgttttggtcagtctccagtttttattgctgccactttcatggagcagggtggcattccaccttcaacaaaccctgcaactcttcttaaggaagcgatccatgtcatcagctgtggttacgaagacaagacagagtggggaaaagagattggatggatctatggctctgtgacagaagatatcttgactgggttcaagatgcatgctcgtggttggatttccatctattgcatgccacctcgcccagcatttaagggttctgcccctatcaatctttctgatcgtctcaatcaggtgcttcggtgggccttaggttcaattgagatctttcttagcaggcattgtcccttgtggtatggctacaatgggaagttgaagcctctgatgaggcttgcttatatcaacaccattgtctacccatgtacctcaatcccattgattgcttactgtacgcttgctgcattctgtcttctcacaaa

SEQ ID NO: 224945 - DNA, 486 bp, Glycine max
cattcttagtttttttttttttttttctattaaaccaaaccatttgttctctttctctcttcttcttcggtcgcgacactgagaaaaaaaaggaaacaaaatatgactgagttatctttctcaaacacttccaacaagaagaatgagttatctagtaacctcttctctatcttcttccacttctgttcctccattttttctcaccctttatacttctcctacttcatcttcttctccccttacctccttaggatcctctctttcctctcccctttgctcatcaccacaacccttcttttagttgcccttctcactttcactcccaacaatcttgctcaggagaagtgtggatctgagccttctgagtccaagtggggcattgcgctttctgctatgaaatcttttctagcatggctgcattccaaagctgatgagatagatgaagaaatggggctcctaggtgaggttgaagcatatcttgtcatg

SEQ ID NO: 224946 - DNA, 431 bp, Glycine max
agataaaaaaaaaggacatggggaaaaaaaaacaccaaacaaaggggggaaaaaaagggggggaaaaaaaaaaaaaaggggggggaaaaggaaccaagaaaaaaaaaaaaaaaaaaaaaaaaaaaaggggaaaaaccggccccgagaaaaaaaaaaaagggggggggaaaaaaaaagacaggaaggagaaaagggggaaaaaaaaaaaacccccccagaggaaaaaagggggggggaaaaaaaaaaaccgcgaaaaacacaaaggaaagaagaaagggggggcaaaaaaaaaagcgcccgggaaaaaaaaggggggccaccataaaaaaagaggggagcccctatgggggggggaaaaaaaacaacaacaaaaactgggaagaaaaaaggaccccccacgggggaaaaaaaaaaaacacctaagggggggg

SEQ ID NO: 224947 - DNA, 413 bp, Glycine max
cttactattataaatctcccccaccaccttcaccatccccaccaccaccttattattatcattccccagctccacctaaagagcatgtacaccctgcctactactaccactgaccaccaccaccatccccatcttcacccactccttattattactaaatcccctccaccaccatccccttctcctgctcccccctactactatcactctccaccaccaccatctccttctcctcctcctccctactactaccactctccaccaccaccatgcccatcaccggcgtctccatattattaccaatccccttcaactgcattttcatcttcaccaccttcctactactatcaaaggccttcttcaccattttccacttttcaaaccccctatatctacacaagcccttcaccacc

SEQ ID NO: 224948 - DNA, 477 bp, Glycine max
tttttttttttttttttttttttttttttttttttttttttttttttttttttttttttttttttttttttttttttttttttttttttttttttttttggggggggaaaacccaaagggaaagggggggttaaaaaacaaaaaattggggaaaaaaaaaaaggggggcaaaaaaaaaagggcccaagaaaaaaaaaaggcaaaaatcccagccccttagaaaggaagaaaaaaaaaaaaaaaggggaacacaaaaagggggggggcttttgaaaataaaggggggattaaaaataaaaaagttttttccggggggggaatgccccgacttgggaacaaataaaaaccggggggggaaaagggggcctaaaaaaaagggaaaccaccggggggaagaaaaaaaaaggggggccaaaaaaggacccatcagaattttaatacaaaagattttgaggggaaaaaaaagggcccctgggg

SEQ ID NO: 224949 - DNA, 477 bp, Glycine max
ggagtcaaaggacttggaagaaaaggccgagatgaagaagatgtacggcctgatcgagacctacaagttgaacggccaattcagatggatttcatcgcagatgaaccgtgtgaggaatggagagctctaccgcgtgatctgcgacacccagggttgcctttcgtgcagcctgctgtatacgaggcttttggtttgacagtggttgaggccatgacttgcggcttgccaacattcgccacatgcaatggtggtcctgctgagatcattgtgcacggcaagtctggcttccacattgacccttaccatggtgaccgcgctgctgatctccttgttgacttctttgagaagtgcaagcttgacccaactcactgggacaagatctcaaaggctggtctccagcgtattgaagagaagtacacatggcaaatttactctcagaggcttctcactctcaccggtgtctatggcttctggaag

SEQ ID NO: 224950 - DNA, 502 bp, Glycine max
gaagaaggcacggcttaaaattgaattgatgggtaaaactaccccaattcgaagcttttccaatcaagatccaaatcatgcaacaacaaaaaaaaaagcaactttttttttccttctctttctctcctcttatcgaaagcttaatcacaaaactaaaatcacggacattatttataaaactcaagtgcgacaaactccaaatgagaaagaaaaagccggttcctccatttctttatccaactctttatcctcagtttactcagcagcaaggggcacagactcagccaatttgcggtacttgagagcatagaacatctcgagatagcggcggctctcacggcggtcaaggttagacacatgcttccagaagccatagacaccggtgagagtgagaagcctctgagagtaaatttgccatgtgtacttctcttcaatacgctggagaccagcctttgagatcttgtcccagtgagttgggtcaagcttgcacttctcaaagaag

SEQ ID NO: 224951 - DNA, 477 bp, Glycine max
cccactggaagaaggagcttttgccaagcatggagcccgccgcgaccgactcaccagagccatcatggcagagcacactgaagcacgcaagaaatctggtggtgccaagcaacattttgttgatgccctcctcacattgcaagaaaaatatgaccttagtgaagacaccatcattggtctcctttgggatatgatcacagcagggatggacacaactgcaatttcagttgagtgggccatggctgagttgataagaaacccaagggtgcaacaaaaggtccaagaggagctagacagggtaattgggcttgaaagggtgatgactgaagcagacttctcaaatctcccttacctacaatgtgtgaccaaagaagcaatgaggcttcacccaccaaccccactaatgctcccacaccgtgccaatgccaatgtcaaagttggaggctatgacattcccaaagggtccaatgtgcatgt

SEQ ID NO: 224952 - DNA, 525 bp, Glycine max
  unsure (1)..(525): unsure at all n locations
accctcgcaatgagtatttccttagttccttaaattgtgatttcatatgtagttacataaacacaaagataaaagtagtgccacaaggcatttttcttaatgcaacaaagagtagtccaagggaaagaaaagaaagattagatctcagcaggcacacgtttgtataaatgtgaggggagcctaggagaaaccacagcttgtattggagtcctcatgtatgtgactagccctggattctctcccatgtcaatttcctcaggcttcattccttcaggtggggtccaacagaaatggtgcaagaggtggcccaacatggatgctgccaagttgataccaagttgggcacccgggcatactcgtcgacccgacccgaatggaagtagcctaaagtcatggcccttcatgtctacatcctcctcaaggaacctttcgggtcggaactccaatggatccttccacacggtcgggtcgcgggccaccgnccacacattcacatgcacattggaccctttgggaatgtcatag

SEQ ID NO: 224953 - DNA, 545 bp, Glycine max
gtcgtgtcgcagcaaaaccaagccacccactaacttgtttggtccaagacatggctctgatcctgcatgctaccaaaacaaacaagaatgccttcaagactctgattgcggcagagtacagtggcgtccaagtggaattggcccctaatttcgagatgggtgtctctaacaaaactcctgaatttctcaagatgaatcctattggaaaggttcctgttttggaaacgcccgatggtccagtctttgagagcaatgcaatcgctcgttacgttgctcgactaaagggtgacaacgctttgttctcatcttctgccattgataatgcccacattgaccagtggattgatttttcatccttggagatcgatgctaatctcatgaaattgctcctaccaagacttggatttgccccataccttgctgcaggtgaggagggtgcacattctgcgttgaagagagcatttgatgcctagaacactcatctggcctgcaatacttacctggttggccatgctgttacccttgctgacatcataacaacatgc

SEQ ID NO: 224954 - DNA, 607 bp, Glycine max
  unsure (1)..(607): unsure at all n locations
tggatgcagaagaaggcttgcacctgtcagaggctctgatcaagagagaaagaaaggagtcccatggactgaagaggaacacagacgttttctgatgggacttttgaagtatggtaaaggagattggagaaatatctctcgcaattttgtggtcacaaagactccaacccaagttgctagccatgcacaaaagtactacataaggcaaaaggtttctggaggcaaagataaaaggagacctagcatccatgatataaccactgttaatcttacagaaacttctgcatcagacaagaacaagcctgctgtgattgcaccacagcagaagctgaatagcatgtcaaaagtacagctggactggactagtagccactacaatgatggatcactcatggttttcaacccaaatagtgatgacttgtttgtgtcatcttcatctgatgtcacttccatggccctgaaaatgcaagggcaagatctctatgaatgtgccttacgtgaggcttatgccaaggtaaaagttncaggtttcagcatggctcctagagacttcaataatgaagctgtttttggtattcatgcacttgaattccaccctgttgatgta

SEQ ID NO: 224955 - DNA, 620 bp, Glycine max
tggatgcagaagaaggcttgcacctgtcagaggctctgatcaagagagaaagaaaggagtcccatggactgaagaggaacacagacgttttctgatgggacttttgaagtatggtaaaggagattggagaaatatctctcgcaattttgtggtcacaaagactccaacccaagttgctagccatgcacaaaagtactacataaggcaaaaggtttctggaggcaaagataaaaggagacctagcatccatgatataaccactgttaatcttacagaaacttgtgcatcagacaagaacaagcctcctgtgattgcaccacagcagaagctgaatagcatgtcaaaagtacagctggactggactagtagccactacaatgatggatcactcatggttttcaacccaaatagtgatgacttggttgtgtcatcttcatctgatgtcacttccatggccctgaaaatgcaagggcaagatctctatgaatgtgccttacgtgaggcttatgccaaggtaaaagttccaggtttcagcatggctcctagagacttcataatgaagctgttttggtattatgcctgtaattcaaccctgtgatgtaaagaaaaatatgatcatg

SEQ ID NO: 224956 - DNA, 563 bp, Glycine max
cacagagccattctaggatctgttgaacgcatgtttgccatacttttagagcactacaagggtaaatggcctttctggctcagtcctcgtcaagcaattgtatgccctgtgtctgaaaagtcacaagcttatgcattacaggtgcgagatcagatccaccaagcagggtattacgttgatgctgatacaactgataggaagattcaaaagaaggtgcgagaagcacaattagcacaatacaactacatcttggttgttggagaggaggaagctaatacaggacaggtgagtgtacgagttagagacttggcagaacataaggttatgagtattgagaagctacttgaacatttcagagacaaagctgcagctttcgaatgatactttgcatgtgaaaactgtcgaagaaaattttcagccccaaataccttagttgtacacagttgtgtgcatttttattttcaacttaagcaatttatcctgattttatttatgatttgaatgatcactgtatttcgcactagaaacataatgtgaatgctggtcatacctggagcgcactc

SEQ ID NO: 224957 - DNA, 480 bp, Glycine max
atgggatcgactttccattaggaccaactgggagatataccaatggccgaacagaaattgacataatcactcaatttctgggatttgagaaatttatcccaccctttgcaaacactagtggttcagacatacttaaaggtgttaactatgcatcacgtggatctggtatacgcaacgaaactggctggcattatggtgctgctatcggcttgggattacagttagcaaatcacagagtcatagtatctgaaattgctaccaaacttggaagtcctgacttagctcgacaataccttgaaaaatgcttgtattatgtgaacataggcagcaatgattacatgggcaattacttccttcccccgttctacccaacaagcaccatttataccattgaggagtttacacaagttctgattgaagagttatctctgaatttacaggctttacatgacattggagcaagatagtatgccttggctg

SEQ ID NO: 224958 - DNA, 527 bp, Glycine max
aatacatattcaactcacaattatttcaactccatatgaacgactacatgataaccagaacttattcagtggcactaagttgtgaagtggactcatttgtgagctccaattccatcttaatttcatgatcaacaaggtgcttgatatccattggataagtgaaggctgaattagtggtagaattataagatgtcaatgcattgagtaggttccattgctcggtgggatggaaagcatcaaaaaacacatagtcattcctattatagcacggctcttgatcaggaacacactcccctgttaatcccggtaggcagcaaggagtttccggaaccggaaaaccatatttatcgcgaagctcaatggccaatgcttgagtgtttataaagatgaatttggaattagcataatagaaatcattgttgaattgatccactcgagctttaagcttgttattgaaattgaatgcagcgagattttgctcttcagcacatgatccatttgtcccatgagcactcaccatacctggg

SEQ ID NO: 224959 - DNA, 432 bp, Glycine max
tctttgactgcttccttgaggtttgatggtgccctgaatgtggatgtgactgaattccagaccaacttggtcccataccctagaatccatttcatgctttcctcctatgcaccagttatctctgctgagaaggcctaccatgaaccagtttcagtggcagaaattaccaacagtgcttttgagccatcgtccatgatggccaagtgtgatcctcgtcacgggaagtacatggcgtgtcggctgatgtaccgaggtgatgatgtgcccaacgatgtcaacgctgctgatgccaccctcaagaccacgaggaccattcagcttgtggattggtgccctactggggccaagcgcggtgttctctaccaggcacgtaccagtgttgctggacgcgagactgacaaggagctttgggcaattgacttgatttgaaac

SEQ ID NO: 224960 - DNA, 549 bp, Glycine max
acacaactaaaacaacatagttcaatattgccattcagtttaggtacgtaacaggagcagcgaagcataaaagcaatgcatccaaattaaaaccacatcggtactggtacacatctgaacatcaaacacaacagaaaacagaccacaagaacaagaatctgaagtagattctagtagtcttcatcctcttcctggccctcaccagactcagcacccacttcttcataatccttctcaagggctgcaaggtcctcacgggcttcagaaaattcaccttcttccataccctcacccacgtaccagtggacaaaagcacgcttggcatacatgagatcaaacttgtgatcaatgcggccaaacacttcagccacactggtggagtttgaaatcatgcaaactgccctctgcaccttggcaaggtcgccttcaggaacaacggtaggtggctggtagttaataccacacttgaaaccagtagggcaccaatccacaaactgaatggtcctcttggtcttgatggtggcaacagcagcgtttacatctttgggc

SEQ ID NO: 224961 - DNA, 482 bp, Glycine max
ttgcaattgaatttcaatttccctaggggcttaatatctccccgcatttgtgcctagcctcattattatcatagtagatattcattccccttatctttctctcttctctctccccgcccaaaccctaactccctaccctattccgctttctcttatccatcatgaaaggaggaaagtccaagaccgaatctaagagagccgatgccaaacttgctgtgaataagaagggcgccgccaccaagactaggaaacccgccggaaaggggaaggcagcgaaagatcctaacaagccaaagaggcctccaagtgctttcttcgttttcatggaggaattcaggaaggtgttcaacaaggaacatcccgacaacaaagcagtgtctgctgtgggcaaagctgctggagcaaaatggaagacgatgtctgatgctgaaaaagcaccttatgtggcaaagtctgagaaaaggaaagtggagtacgagaag

SEQ ID NO: 224962 - DNA, 553 bp, Glycine max
ggatgataagtcaattatattgatacaaacttaaccagatttcaacaagaaaactctaaatcaaactaaaagctctacaagagataaccatcccttaactaaacagttggatttagaaatacaaataaagagaactcccttctttaaactattcacgttttggaaagacgagcaatttacggaaggaggagcagggaaatattttttggaaagagaaatatgtttataaggaaatgaccagaccacctacacggatgatcaaaatcatcagaacctacataaatgctattatcatcagtccattctctaatcgtcatcctcctcctcgccactgccttcctcgtcatcatcctcatcattcacctcagatacagacttctcagattcttcttcatccccaccagtaggaccttccgcctgtttcttgttataagctctcatgttcttctcgtactccactttccttttctcagactttgccacataaggtgctgtttcagcatcagacatcgtcttccagtttgctccagcagctttgcccacagcagacact

SEQ ID NO: 224963 - DNA, 479 bp, Glycine max
ggggtgtggcagctttcttcgatctgatgcattgttgtttatgtgatggagaactggtactactccatgtatgggcatgttgagaaactagcagaagaaataaagaaaggggcttcctctgtggaaggtgttgaggccaaattattgcaaggtacttgagacgctgcaggatgaggtgctcggtaagatgagtgcaccacccaagagcgatgtaccagtcattaccccgaatgaactatccgaggctgatggctttgtattcggcttcccaacaaggtttggaatgatggctgctcagtttaaagcttttctagatgctactggaggcttatggagagcacaacagcttgcaggcaagcctgctggcatcttctacagcactggttcacaaggcggcggacaagagactacagcgctcactgctatcactcaactggttcatcatgggatgatattcattccaatcggttacacgtttg

SEQ ID NO: 224964 - DNA, 516 bp, Glycine max
cttcaaacacgcaatctttattgtatacgagagaataataaagccaattctcaactcaaattgttcgttgcaaacgttgcaatgtttatgtgcgtaacggggtaatacaaaagataggaacaagtattgtttcagcttaacacgaaaggacaacacacacaaactttcctcattcaacaaattgcaacatccactgcaacatgtaacactcttacaaagcatttccttcacgaagattagaaaagaaaaaaaaaaatacttgcaagctcagaaaaacaaaactcaatatatttcaagactaaaaaatcggtaatgattttcaagcaatattgtggtatggtttaataataatagtataatctatatatatgaaggcaaacattatgcagcttgcttgagcttctttgtgatgccggcaatgtacttgccttggtggaatgcttgctgtaactcgagctcacttggctgtcttgagccgtcacccgcataagttccggcaccatatggacttccacc

SEQ ID NO: 224965 - DNA, 409 bp, Glycine max
cggctcgagagcatcacatgcacccgcgatccctacgatcccttcccatggtttcttccctgcacccgcacccgcaccctcgccgcgccttctagaaccttctctcagatctcaattccccttccccttttcactttcatggaaatgacttcgactccccgcacagtcgaagagatcttcaaggactacaccgaccgcagaactgccatcgttcgcgctctctctcaagatgtggatgaattctacggactctgcgatccagataaggagaacttgtgcctctatggacatccaaacgaaacatgggaggtgactatgccggcagaggaagttccaccagagcttccggagcctgcactcggaatcaattttgctagggatggcatgaaccgcaaggactggctttctc

SEQ ID NO: 224966 - DNA, 469 bp, Glycine max
gccgcccttcgtcttttttttttaatcgacaaaaataaaatgtatagaattctattctataaaattatataacatgcactgatgatcagtcttggtagaagaaattagcttaatctgaaagattatgatcggacatagatactataccgtttacaagaacttttataagagatataacaatattacagtatcttgtccgccatgaaacagcattattcacttcacatcttgccttcggcttagggcctgccccgcctcaagctgcacgaaggacatttgtattgctttatgctttcagcttttgcaggagtaatcttcacacatttcccatggaaccacctctcacatatatcacagccaatccaaaattcatcggcattgtagtttccgccgcagttaccacaaagggtttcactgtgctcatcctcctcttcataaccttcatctgcgaattatgggttgcttttaa

SEQ ID NO: 224967 - DNA, 536 bp, Glycine max
aatcttccaatccaacaacctcagcctcacactcacacatacacacatctgaacgcgtatcgtccctcccatggcttcaaagcgcatcctcaaggagctcaaggacttgcagaaagacccaccaacttcttgcagcgctggtccagtggctgaggacatgttccattggcaagcaacgattatgggtcctgctgatagaccttatgctggaggtgtattcctagtcactattcactttcctccggattatcctttcaaacctcccaaggttgcctttaggactaaggtgtttcatccgaacatcaacagcaatggtagcatttgtcttgatatccttaaggagcagtggagccctgcactcaccatctctaaggtactgctttctatctgctcattgctgactgaaccaaatcctgatgatccacttgttccggaaatcgctcacatgtacaaaactgaccgggccatgtatgaggccactgcacgcagctggacccagaagtatgccatgggctgatttggtttaataatgtata

SEQ ID NO: 224968 - DNA, 516 bp, Glycine max
caaatctaactttcttgaattttagttatgctcctcttgacagtgatggtcttgctaagcttcttgttcactgtcctaagcttcagcgcatctgggttgtggacactgttgaagacaaggggctagaagctgttggatcacactgtccattgcttgaggaactgcgtgtttttcctgcagatccctttgatgagggcattgttcatggggttactgaatcagggtttattgcagtctctcaaggatgtccaagacttcactatgttctatacttttgccgtcaaatgaccaatgctgctgttgctactgttgtgcaaaactgtcctgactttactcatttgcgactttgcatcatgcaccctggtcagccagattacttgacgcaagaatcaatggatgaggccttcggagctgttgttaagacttgcactaaactccagaggcttgcagtatcaggttatctgactgacctaacttttgagtatatagggcagtatgcaaaaaacttggaaactc

SEQ ID NO: 224969 - DNA, 589 bp, Glycine max
ctctgtcactttctacacctgtttctttggactcttgcagtttctcgtcattgctttgctccttgaaagagacgcgcaggcatggcttttccactctggtggagaagctttcactattttatacgcgggagtggtggcatctggaattgccttcgctgtacaaatatggtgcattgacagaggtggtcctgtgtttgttgccgtctatcaacctgttcagacttttgttgtcgccatcatggcttccattgctttaggagaagagttttacttgggcgggatcattggtgccgtgttgattgtagcgggactgtaccttgtcttgtggggtaagagtgaagagaggaagtttgcaagggagcagcttgcgattgcatccactgagcatagcatcataaggcccgcaagccacgccaaagcatgacttgctcagccactcctttcttcatcaacagagaatgtttgaacaagatcaaaattccaactttcaaccacacaccattttcttggtgagaagaagtaaagaaaaaaggggaaaaaagataccagctataccttactaggtactactgctactactacattatgt

SEQ ID NO: 224970 - DNA, 570 bp, Glycine max
cacacttccacgtcaccaccaccgtggaaggtggcgcgtgaggctgtttccggcgacctataccggcggcgctgagtggtgatcaaggaaatgggtcagaggctaagctgcgtgcaacagcagcacgaggagcatggtgtgctcttcccagcacttgcaagtggagaattggaggttgttgaggccatggtggaggaagaccccactgtgttggaacacaccactggctgtgaccgcctttctcctctgcatgtagctgctgccaatggtcggatcgaggttctttccatgttgttggataggtctttcaatgttgacgtattgaatcgccataaacagaccccgttgatgttggctgtgatgcatggaaagactggttgtgttgagaagcttattcatgccggagcaagtatattgatgtttgattctatacgtcggagaacttgcttgcacctatgccgttattatggaaatatagactgccttaaggtcattctttctgctgctcattccacacctgttgcagattcttggggatttgcaagatttggcaacataagagatgggaac

SEQ ID NO: 224971 - DNA, 479 bp, Glycine max
ctgaactgttggaagctgtggttaaaactgtgaatgaatgtctagctgaagcgcctcgatttggagttgaagaaccaaaatcaacccttggaacttcagaggttcttgaaatcattagtcgctgcaactcagtaggagatccttctggaagattctgggcacttagtcctcttgatggagggtcttcatgtggtgatcaacatgttgtagctttatcactcatagaggaaggagaagttgtgcttggagttcttggctgtcctaactaccctatgagaaaggactggtttagatatcatgacagctatcttaggatgatatctaaggtggcttctccaacctctcaaactcggaataaaggctgagtaagtcatgctaaaaggggtagtggctaggcttggatcccaccactgctccatgtggatgataagtatgtgtggacaaaccatgctgaacaagtttctgtctcttgcattgac

SEQ ID NO: 224972 - DNA, 434 bp, Glycine max
  unsure (1)..(434): unsure at all n locations
cacaaacaccaaatcaaacatggccaccacttttctttctctcctcttcctcatcttctctctcctcaccccagccctcatttcctcttcccctgtccaagaccctgaatttgtggcccaagaagttaacaggaaaatcaatgcttccgtagctagaaggaatttggggtacttgtcctgtgcgacagggaaccccattgacgattgttggaggtgtgacccgaactgggagaagaaccgccagaggctagcggattgtgcgattggtttcgggaaaaacgccatcggaggaaagaacggaaaaatctacgtggtgaccgattccggcgacgacgatccggtgacaccgaagccgggaaccctncggtacgcagttattcaagacgagcctctctggatcatcttcgcaggagacatggggatcaagctgaagg

SEQ ID NO: 224973 - DNA, 477 bp, Glycine max
tgggacctctagtcatgcaacatgccatggtaagcatgaaggcactagtcagtcctgttcagctgattataaaagtatcggctataactttattaatgagtggagagcacaagaaccactttttcacagcattgctttacagcaatatattcctcttatgtgcacaggagcacgcggccggactgagagacaaaccgggtaaacgtagagatcactatcacacatgttactgtttaagtggactctcattgtgccagtatagctggtcaaagcacccagattctccaccgctgcctaacctagtattgggcccctactctaatctcttagaaccaatccatcctctctttaatgttgtcttggaacgatatcgtgaagctcatgtattcttctttactgagtcctgaccactgacctggatttagctgccaacatctttatgtatactgtaaaataaattcattggatttggaaaaa

SEQ ID NO: 224974 - DNA, 533 bp, Glycine max
acgaatatacatattcatatcaacaacaacaaagtattatcccactaaatgagataagttacagatcacatcttgccattcggaacagtacatatccatgtcaaattatcaataatcatcaaaacccggagacataaaacctatcaatccaatgctgttttacatttatatgcatttttccaaatccaatgaatttattttacagtatacataaagatgttggcagctaaaaccaggtcagtggtcaggactcagtaaagaagaatacatgagcttcacgatatcgttccaagacaacattaaagaggggatggattggttctaagagattagagtaggggcccaatactaggttaggcagcggtggagaatctgggtgctttgaccagctatactggcacaatgagagtccacttaaacagtaacatgtgtgatagtgatctctacgtttacccggtttgtctctcagtccacccgcttgctcctgtgcacataagagaatatattgctgtaaagcaatgctgtgaaaaagt

SEQ ID NO: 224975 - DNA, 475 bp, Glycine max
gggagaacgtaacaagcttagtcccttcatggcggtccttccccactgctttcgattgttaaaccaagaaattttgcgtgtaaccacgctgatggggaatgcatcagttttaggtcaaagtgggcttgaacatgctagccccctggctaccggtggaatattttcaaatggaggtgccgatgtgaacggatgggcatcacgatttcaatcagaaagacctagcttgttacagtcctcttcaacacaaagctggctgagtccacaaggtagctcatctggtattattgttaaaaagacggtcagagtagatattcctgtggacgcatatcctaattttaactttgttggtcgcctcctaggccctagaggaaattctctaaagcgtgtagaagcaagtaccgagtgtcgtgtcttgatcaggggccgaggtagcattaaggatccagctagggaggaaatgatgagagggaaacct

SEQ ID NO: 224976 - DNA, 479 bp, Glycine max
gaagagctgccaaagacaaacctaaatgggcatgatgaaaaagcacaattcggattttttcatcataaaccaatattcaagaaacatattccaattccagtatataaacctgtaccaaagccatttccagtgtataaacctattccaaagccagatccagttccagtgtacaagcctattccaaagccagtgtataagcctattccaaagccagttccagtgtacaagcctataccaaagccagttccagttccagtgtataagcctattccaaagccagtgtacaagcctattccgaagccagtgtataagcctattccaaagccagttccagtgtacaagcctataccaaagccagttccagttccagtgtataagcctattccaaagccagtgtacaagcctattccgaagcccagtgtataagcctattcaaagcccgttccagtgtataagcctattccaaagccagttccagt

SEQ ID NO: 224977 - DNA, 274 bp, Glycine max
aaatccaaaaccctaccgacaccacactcaatcgaaattcttcattctcttctcatcgatggggcagaagtctctgatctacgcgttcgtgtcgcggggaacagtgattctcgcggagtacaccgaattcagcggaaacttcaactccatcgccttccagtgccttcagaagctccctgccaccaacaacaagttcacctacaattgcgacgcacacaccttcaattacctcgtcgacaatggctacacatattgtgttgttgcagatgaatca

SEQ ID NO: 224978 - DNA, 524 bp, Glycine max
gctgtaactggaatcattaaagaatatgatcaagaaacacatttacatgattcatgaatatgaataaaatggaaatcaaatttcaatttgacaacccaaattatattttcaaaagcatttataagtagatcaaagtgaccaacatacgacctttactatatctatatctatattacatacaaactcatgccattcattagtatcttttctccgataatctcaaggttgaaataacatgataaaaggcctcggagaatggtgctattttccacagttgaacccacgacacacagataggactattatcaggataagtgctatcaatattcccaatacaatcagctttatcttcatgttttgcagccacatttttcgacggattctggttccagaagtcctgaaatcttgtgcctggttatgaaggttctcagtcttgtccaccagaagttctatcttgtcacccctgtccagaaccttttcaatattctccatcatgacacccttaacttcagaaacctgagctt

SEQ ID NO: 224979 - DNA, 470 bp, Glycine max
  unsure (1)..(470): unsure at all n locations
aactcactaacatcacaacttctctctttctacacaaataactccttctcagtgtgagcagttgataagagagatgatgatcaacgtgaaggaatcgaccatggtgcggccggcggaggaggtggcgcggcgggtggtgtggaacttcaaccgtggacctggtggtccccaatttccacacgcccagcgtctatttctataggtccaatggcgcccccaactttttcgacggcaaggttatgaaggaggcactgaccaaggtgctggtgcccttctacccaatggctgggcggctcctgcgagatgacgacggtcgcgtcgagattgactgcgacggtcagggggtgcttttcgtggaggccgacactggcgccgtcatcgacgatttcggcgatttcgctcccacccttgagctccgtcagcttatccccgncgtggattattcacaaggaatagcatcctatcccctg

SEQ ID NO: 224980 - DNA, 531 bp, Glycine max
aatatcaaatcaactgttgttaaagttcgtttacgtttacagattataaaaatttacaacacttaatgtagtccatataaaactgaaaggagtcccattaacagttgcataccgtttgtcaaaagcatcgacagataacaaaggtacgaggggaaagaaaaccccacctagaaacattgtggcgttccatatggcttgaaggcaatgattcttcaaatgtcatacaagaaatccttaaacagcttcatatggtcaggctgaagagctatggccacagataggctcccatcattggttgagcttggaattatgaaagatagcccctcgtatgcaattccaccaggtcccatgaatattggccttccccaaccaaagtcagcatcatggattggaagcctagtccagctagtgataccaaggtttggacacttgaaagtatgagccccacgaaccagcgcttttagatcgggttgcagttctagatagtcaagagccgatctcaaataatcgttgtccattcgtaacaatgca

SEQ ID NO: 224981 - DNA, 470 bp, Glycine max
cttgttttgtgggatctgagacctcttggattgactgggaataaggtggagaaactctgtgatctctgtaacattactgttaacaagaacgctgtttttggtgatagcagtgccttggcccctggtggagtgcgaattggtgcccctggcatgacttctaggggtttggttgaaaaagactttgagcagattggtgagttccttcaccgtgctgtgactctcacactggagatccagaaggagcatggcaaacttctcaaggatttcaacaagggtctcgtcaacaacaaggctattgaagatctcaaagctgatgttgagaagttctctgccttgtttgacatgcctggcttcctggtatctgaaatgaagtacaaggattaggttcaaccataccactttctactaaattgtgtcactcaagttcgacacaaagtgcagaaatggagaaaaaggaaatatgtgtcttt

SEQ ID NO: 224982 - DNA, 496 bp, Glycine max
aaagaaaggcagcacgtattatttcaattgttaaataagaaaaaaaatatgatatcaatcaggctaacaaaattaaacatgaaatcaaagacaaagaaacttcaaacttttgaattgaaacaccatggcgataaaccctatcactcccaggaaaggaagacacatatttcctttttctccatttctgcactttgtgtcgaacttgagtgacacaatttagtagaaagtggtatggttgaacctaatccttgtacttcatttcagataccaggaagccaggcatgtcaaacaaggcagagaacttctcaacatcagctttgagatcttcaatagccttgttgttgacgagacccttgttgaaatccttgagaagtttgccatgctccttctggatctccagtgtgagagtcacagcacggtgaaggaactcaccaatctgctcaaagtctttttcaaccaaacccctagaagtcatggcaggggcaccaattcgcac

SEQ ID NO: 224983 - DNA, 366 bp, Glycine max
ctggtcgagagcaaaaggccatataatttttttttatttgaaataatgtccgggatcatccacaagattgaggagaccctgcatgtgggagggcacaagaaagaggagcacaaaggagaacaccatggtgagcacaaaggtgaacacaaaggagaacaccatggtgagcccaaaagtgaacacaaaggagaacaaccccatggggagcacaaggagggactagtggataagatcaaaggcaagatccatggggaagggcatgacaagggtgagaaaaagaagaagaatgacaagaagaagaaagagcatgggcatgaccatcatgggcatagcagcagcagtgacagcgattagatcttatatgtt

SEQ ID NO: 224984 - DNA, 505 bp, Glycine max
ctgagtaattataacatttattttttcaacctaatgcacaacggccaagccaaaccaaagcgttttacatttatcacataaataaaaagagcagctacagacatgatttccggaatcgctattttatttgtattatatcataaagcaggaagagggattctggctcctcactaccatcgtaccgtacacctgcttaacatataagatctaatcactgtcactgctgctgctatgaccatgatggtcatgtccatgctccttcttcttcttgtccttcttcttctttttctcacccttgtcatggccatcaccatggatcttgtccttgatcttatccacaagtccctccttgtgctccccatggtgttgttctcctttgtgttcacctttgtgctcaccatggtgttctcctttgtgttcacctttgtgctcaccatggtgttctcctttgtgctcctctatcttgtgccctcccacatgagggtctcctcaatttgtggatgat

SEQ ID NO: 224985 - DNA, 437 bp, Glycine max
tggtcaaggcaatatataagaaatgtacagttgatattctgagaagattatggcactgaagggcgtggagggtacttagaccattatggtatcataagatacattatgcctaatgatttacttctaactcaaggactctacgtaatggtaacgcgtgtctggttgagcgccgaagactggatggaatgaaggggctgggatcggcttgcgatgacagctagtgaaccacaggatcatggtatctgaaattgctaccagaccctggaagaggctgacgttagccatagtccagtactctctgaagaaagtgctttgtatgtatcgcagaacagtaggcttgcacatgatatacatagcgcgaattacgttcctttccccgttctacccaacaagcaccatttataccattgaggagtttacacatgttctgattgaag

SEQ ID NO: 224986 - DNA, 433 bp, Glycine max
cacaaaatgcaatgagtacataaattcaaaatcaaaatacattacctaactagattgactgccaactaaatgaaatatttgctcctgtccaaactgtcccaaatcccacatcccaagtagcaacaaaaactcaaaaaaatatcaatgatgtaagagctttattactctactttgaaacttgatgctttaattgctttacatgattatcatgtgaccctggtagtcttccaccagagaagtaaccatctgctgataatatgatgagaaaagaaactgcaagccaagaagaaaccacaaaatagcatgcgtcatagcttacatcattgaggattattggtctacgtctgtcccaaggtcaccccaccggacattgtgtctggctgcaagatagtgagcaccaacaggacccctactaccataaggatagtactct

SEQ ID NO: 224987 - DNA, 478 bp, Glycine max
gtgaaggagaccgaatactatgacgtgctgggtgtcagccctacggcatccgaagccgagattaagaaagcttattacattaaggcacggcaagtgcatccagatcaaaacccaaatgaccctattgctgcacaaaattttcaggttttaggtgaggcttaccaagttctgagtgacccagctcaaagacaagcttatgatgctcatggaaaatcaggaatttcaactgaagcaattattgatcctgcagcaatctttgccatgctttttggtagtgagctttttgaggaatatataggtcagttagccatggcatcaatggcttcaatggacatctttactgaaggagaacaatttgatagtaaaaagttgcaagagaaaatgagggttgctcagaaggagagagaagaaaagcttgcagagatactgacaaatagactcaaacaatatgttcaaggaaacaaagagggttttgtta

SEQ ID NO: 224988 - DNA, 466 bp, Glycine max
gagaaggagaccgaatactatgacgtgcagcgagtcagccctacggcaaccatggcctacagtaacaaagctgattacattaacgcacggactgagcatacagataaaaacccagatgaccctcgtgctgaacaaaagttacaggctttaggtgaggctcaccaagttctgagtgacccagctcaaagacaggctaatgatgctcatggaaaatcaggaatttcaactgaggcaattattgatcctgcatcaatcattgccatgctatctggcagtgagctgtgagaggaatatataggtcaggtagccatggcatcaatggctacaatggacatctgtactgaccgagaacagctggatagtaacaagttgcaagagaatatgagggttgaccagaaggagagagaagaaaagcttgcagagatactgaaaaatagactcaaccaatatgctcaaggcaacaaag

SEQ ID NO: 224989 - DNA, 477 bp, Glycine max
ttgacactacacatgaagataacaccatcttctctttcgagattggaaagggcagtgttatcaaggcttgggaaattgcagtgaaaaccatgaaggttggagaagttgcaaaaataacttgcaagccagaatatgcatatggtagtgcaagatctcctccagatattcctccagatgcaacacttgtttttgaagttgagctagttgcctgtcggccaaggaagggctccagtttgggaagtgtttcagaggagagggctaggcttgatgaactgaagaagcagagagagctagctgctgctgccaaagaggaggagaaaaagaagagagaagaagcaaaagcagcggctgccgcacgtgtgcaagccaagttagaagccaaaaaaggtcaaggaaagggtaaaggtaaagcaaagtaggaagttatcaaacatctacatgagtttggtatatgatgacaatcaaattgttatgtat

SEQ ID NO: 224990 - DNA, 512 bp, Glycine max
agatggataaaccaaagtagcatttcatttatataatgtttcgtacgggacaacggggaagtgagatactgaattgtgtataatacataactatttgattgtcatcatataccaaactcatgtagatgtttgataacttcctactttgctttacctttaccctttccttgaccttttttggcttctaacttggcttgcacacgtgcggcagccgctgcttttgcttcttctctcttctttttctcctcctctttggcagcagcagctagctctctctgcttcttcagttcatcaagcctagccctctcctctgaaacacttcccaaactggagcccttccttggccgacaggcaactagctcaacttcaaaaacaagtgttgcatctggaggaatatctggaggagatcctgcactaccatatgcatattctggcttgcaagttatttttgcaacttcttcaacctttatggttttcactgcaatttcccaagccttgataacactgccctt

SEQ ID NO: 224991 - DNA, 475 bp, Glycine max
  unsure (1)..(475): unsure at all n locations
tcgatcttcttctttttccactctaccaccaccttagcccagtccccggacgcggcaccgaccgacccggccacgcccttcaccgcagccgccccggccccagcaccctccgcacccccgacagacatcataagaatcctcaaaaaggcaggagggttcacaaccctaatccgactcctgcaggccacacaagtctccaaccaaatcaactcccaactcctcaccacaagcggaggcctaaccctatttgcaccaaacgacaatgccttctccagcctcaaaccgggtttcctcaactccctcaacgaccaacagatgaacgagctcatccagttgcactagcttcccacgtacgtttccgtctctaaattcgacactgtatgcaaccctgtgagaacacaggcacgtgaaaaccctgataggtttgcgcatgacataacangcttctgacggaaccaagtgaacatgacaacgg

SEQ ID NO: 224992 - DNA, 464 bp, Glycine max
gggcatttagtgtggttggcaacgccgcatctaaagggcattttatagatggttgctatgcacactgccaaactggaatacaagagacatggctgagaaatgactccccagtggtggccaagacatcaattgcaaaggcagtgggtgattggttatatgatcgaaggcccttacgtgagatagattgtgcctacccttgcaaccctacttgccataatcgtatttttgatcagaatgagcgtccagacgtatagattcatttaaaagagtatgcttatttatttattactacaaactatactttattagttatctagtttttattgaacgagatgtgtcacttgcactcatggctttgtggattgagatctcaaaccatcaaagtatgggttcgattgatgcatcaacaaaaaacaagctgtgattgatgatttaaaaagttccaaagtgtaagggtaggcaac

SEQ ID NO: 224993 - DNA, 491 bp, Glycine max
attagaattacagatataccctttattgataataaaaatgttatgtttacatggtagacaattatcatcctttatcaggttgcctacccttacactttggaaccttttaaatcatcaatcacagcttgttttttgttgatgcaacaatcgaacccatactttgatggtttgagatctcaaaccacaaagccatgagtgcaagtgacacatctcgttcaataaaaactagataactaataaagtatagtttgtagtaataaataaataagcatactcttttaaatgaatctatacgtctggacgctcattctgatcaaaaatacgattatggcaagtagggttgcaagggtaggcacaatctatctcacggaagggccttcgatcataaaaccaatcacccactgcctttgcaattgatgtcttggccaccactggggagtcatttctcagccatgtctcttgtattccagtttggcagtgtgcatagcaac

SEQ ID NO: 224994 - DNA, 467 bp, Glycine max
caagaagcggatcattctcaagagccctagggttcagtacctcgcccttgtcctcctcgaaaccctagtcaagaactgcgagaaggccttctccgaggtcgccgccgagcgtgtcctcgacgagatggtcaagctcatcgacgacccccagaccgtcgttaataaccgcaacaaggccctcatgatgatcgaagcctggggtgagtccaccggcgagttgcgctatctccctgtctatgaggaaacttacaagagtctgagatcgaggggtattcggttccctggccgtgacaatgaaagcttggctccaattttcactcctcctcgttcagtgtcttctgctccggaggctgatgtcaaccttcaacagcagtttgagcatgatattcctgagcagtttcatcatgatgttcccgtgcttagttttacgcctgaacagacaaaggaggcccttgatgttgcaagga

SEQ ID NO: 224995 - DNA, 460 bp, Glycine max
aatatggttggctgcttactatttggcttaatggatatttatagcaagcttgtaaatgccggtgtaagaaccgtgttttcattttgtgacaggatgttgtgatccttgagcatcaatcatttctttctggaatagctgatgttcatgatcgacacggggatatgcgacttgatgttgataacatgtcttatgaggtaaaatctcatttctgcatctggatgcaaatattaatatatctatacaaccataatgtcagtttatcccttgcttgtctttcaagatagtacttcattttagagagttagtttctcatgtgaagtttgactataacaggagttgttggctctggaagagcgcattggaaatgtgagtactggattgagtgaagaaaccctatcgaaactcttgaaacagagaaagcactcggttgaaaaagggtctgagactgatgcacaaccct

SEQ ID NO: 224996 - DNA, 522 bp, Glycine max
gtgcctaggtttccgttgagcataactccaatccgaacaatattaaaaaatttcataaatgtaaaccaagccttgtcaacttgagttaagaagcgctccttcatcacctaaaccgggagacctttggatttagataatgaataaacaaattcgggggagggaggcagggtaggggaaacctctgtcagtcaggttcgacaatttactaggctagaaacagaagacaaggcaccaagcaccagaatttcctgggtaaattgtgccaattttttttttccttcatggacatggtatttgcctgaggacagagagtcacatacatcatgttgccaagcccgttgtcttacaaatgggacacagattctttagcattagccactgtatgatacagctgctatggaaatcatggtcacaatcaagcgttccaatatcattcccatcaccataatcctactgcatacgacgtatatcaagtgatgagaccaatgtgcacaagcatgcgggggatctaaataagtcagc

SEQ ID NO: 224997 - DNA, 505 bp, Glycine max
  unsure (1)..(505): unsure at all n locations
cggctcgagcgaggttcttagtgatccccagaagagagcaatttttgatcggtatggagaaggtggccttaaaggtggaatgccaacaccggatgaaggtgtggcttcattcttccgaactggggatggtccaacagcatttaggttcaatcccagaaacgcaaacaacatttttgcagaagtgtttgggtgttcaagcccatttggaggaatgggaatggggtttggctgcggtggcagaggcagaggcatgggcatggggggtgggtcgtgggtgtcaaggtcctttggtggaatgtttggcaatgacatgtttagagaaagcagaccaatgaatcaagttccgcgccgtaaggcacctnccattgaaaatacattgctttgcagccttgaagagctctacaaggggagtaccagaaagatgaaaatctcagggaaattacacatggcagtgggagatttttactgtgaggaaatattaaacatngaaatccatccggctgga

SEQ ID NO: 224998 - DNA, 519 bp, Glycine max
  unsure (1)..(519): unsure at all n locations
atacctcaatctaatatgtcggatgttatttgcgccaatgatattgttaacgcataacacaaactatgcaagtcacatccatctaaaaaaagtggaaaaatgaagcgaagaatggggacaaaaccaaagagtattttattatacactagatacactctgcaacgcttgtcactcttatggtgccagaaacttcttaattctctggctttccactcaggcaccaactatgtcagggatttcgatgttgaatttgattctaaggttacccttctttgtaggatctttggaaattggcatgccttccccggtgatcacttcttcataatctggattagtcacattctttacgacgatgttcagacccctgccatctagagttgtaagttgaatggtgtagccagttagagcttcagcttctgtaagtgatatcttttgtgtcacaaccaaatcattaccatctcttgtaaatacactgtgaggattctcatcaataataacacangatctgcagcaatgaca

SEQ ID NO: 224999 - DNA, 445 bp, Glycine max
tgaaatgccttcagctgattggtgggtcatcattgctgttctctccacagtaattggttatatcgctaagacatacttcacgttccaacaaaacatggctcagtaccaaaatttgattacacagtcaatgtatgacaaacaacttgacagtggaaagggtacacttcttcatttgtgtgatgatgtcattcaacaggaagtcaaagaggttatagttacattctttattctgatggaacagggcaaagctacaagacaggatcttgatcaatggtgtgaggaactaatcaaagaagagtttgatgaggaatgtaattttgatgtggatgatgctgttgagaaattagagaaatcgggaattggtactcgagattctgttggtcgatatcaatgtgtcgggctaaaacgggctaacgatatcattggcaccaccactgaagagctt

SEQ ID NO: 225000 - DNA, 469 bp, Glycine max
gcttaagatcacccaagagagaacctaagacacacaacacagactcacacaaagagttacaagagaaatcatcatggcatcagcagcatctgggtttgtgttgtcacttaatgttgcagctgccaccacaaactcaagggtggtcatgttcaacaccaagaacaacacttctaggtttgttgtaaaggcttcagatgagcctgcagcggcggcacccgccaccgccacacccccagctgaagctgaagctaaaccaaagccaccacctattggccccaagagaggtgctaaggtgaagattcttaggaaggaatcttactggtacaaaggcaccggttcagtggttgctgttgatcaggaccccaacactcgctaccctgttgtggttcgattcaacaaagtcaactatgccaatgtatcaacaaacaactatgctttggatgagatcgtggaagtcgaatgaatccaa

SEQ ID NO: 225001 - DNA, 509 bp, Glycine max
gagcaactgcacacaggatatagttcatagagaatagagatcaaaggggtcgataacagagagaatatacagattctttttttgtgacatgaaaaatccttaggctagtagtaactgcgatagcatgacaagtatcaaaattacaattaagttggattcattcgacttccacgatctcatccaaagcatagttgtttgttgatacattggcatagttgactttgttgaatcgaaccacaacagggtagcgagtgttggggtcctgatcaacagcaaccactgaaccggtgcctttgtaccagtaagattccttcctaagaatcttcaccttagcacctctcttggggccaataggtggtggctttggtttagcttcagcttcagctgggggtgtggcggtggcgggtgccgccgctgcaggctcatctgaagcctttacaacaaacctagaagtgttgttcttggtgttgaacatgaccacccttgagtttgttgtggcagctgcaaca

SEQ ID NO: 225002 - DNA, 468 bp, Glycine max
aattgctggattaggggatgaagacaaaccattcatctgcacaatggattgtcttggggcaaaggagcttgcaaaagattttgttgtttctgggactgcatctgagtctctgtatggtgcttgtgaggcgatgtttaagcctgacatggaacccagaggaattgtttgagaccatctcccaagcactgctatcatctgtagatcgtgattgtttgagtggctggggaggacatgtctatgttgtcacgccaaccgaagtgaaggaaaggattttgaagggaaggatggattaacttgtaagccacctgagttttctgtttagtttggagttgaatggcatgacatttacaatcctttgttaaagggtacctttgttattgtggctctttagataaatgtatcctgaaaattatttatagacggttcacttgttctatattttagattatcagtgaaaggaggagattc

SEQ ID NO: 225003 - DNA, 467 bp, Glycine max
ctttcttttctctttcctctctctctctctacgctttctcgtttgagatccctcaagggatccactaactgaaggagcaatggggttgacatttaccaagctttttagccggcttttcgccaagaaggaaatgcgaattctaatggttggtcttgatgccgctggtaagaccaccatcctgtacaagctcaaacttggagagatcgttaccacaattcccaccattgggttcaacgtggagactgtggaatacaagaacattagtttcactgtctgggatgttggtggccaggacaagattcgtcccttgtggaggcactacttccaaaatacacagggtctcatttttgctgttgacagcaatgacagggacagagttgttgaagccagagatgagttgcacaggatgttgaatgacgatgaactgagagatgcagtattgcttgtatttgctaacaaacaagatc

SEQ ID NO: 225004 - DNA, 516 bp, Glycine max
aaaagcttaatgggatggcacattgattggtatcaattacagttataaacattgaatccaagcccaatgaaaaaactcaaaagtgttagacattccatgaaacaaattcctgctataatttgagccatcaagatggcctaaaccagaaaacatgaacataaagccaatgtgtctgagaagagaaccaaaaaacaaaaccagataatattcacccctgcatgcacacgacacccaggaagcatcaagccttattggctatgatgaaggaaagccagtccaaaccctgatagagaccctacccagaggttgcacaggtgctctggatgtaccagtggcgctgtctgatagagtggaggcccagcttgtcagtaatttcagcagcattcattgcattgggaagatcttgatcgtagcaaatacaagcgatactgcatctgtcagtgcatactcattgaacatcctgggcaactcatctctggccttaacaactctgtccctgtcattggtgtcaacaac

SEQ ID NO: 225005 - DNA, 465 bp, Glycine max
agtaactccaactccaagtcacattggtgacaaagttagaaacaaggagaaagaaagaagatggcaggaaagaaaatcccagatgtgttgctgaattcaggacacaaaatgccagttataggcatgggaacttcagtggagaatcgtccatcaaatgagacccttgcttctatctatgttgaagccattgaggtgggttaccgtcattttgacactgctgcagtgtatggaacagaggaagccataggcctagccgtggccaaagccatagacaaaggccttataaagagtagagatgaagttttcatcacttcaaagccttggaacacagatgcacaccgtgaccttattgtcccagctcttaagaccacattaaagaagctggggacggagtatgtggatctttatctgattcattggccagtgaggctgagacatgatcttgaaaatcctactgtttttacc

SEQ ID NO: 225006 - DNA, 499 bp, Glycine max
caatcaagggcacttgggaaataaatactaagggcagccaggtccttatatgaagttatagccaaccataatgataataataatacaagacatcttaataacatggaattcaaatcttgcttattttcatagtttatatcccaaaacatagttttatccttgaagaaatacttaaacgtttccatcccaaagtttttccaaggtcttgcaagacccattttcagatagccatatgtcccctgtgtattgcctgcgttgtggaacctgactgatcctctctaaatccttttcactcagcacaaaatcaaatatgtccaggttctgcttcatcctctcgctgttggtgcttttagccatggcacttgacccttgttggtacacccatttaagtgcaacctgggctatggccttcccttttgcctttgctattgcttggaggattggatttttcatgacagtttcagagccccaaaattattataagcaccaaaacttacca

SEQ ID NO: 225007 - DNA, 502 bp, Glycine max
ccatcatatcattcattcagaatcactttccatgcttcccatagccttcaaccctcttggtctcttcttgttacttttcttctccctaacttcatatctctcttggcacatatcagtcaaccacgccccgggactcaccaaaagtaagcttctttgaatgattttggccctctttttgggtcgctgaggaagcttgcaacccttcatggccagaaaatcttcctctttctccttgcttgagagagtgatgtagagcttgggccaaactagggctcgttcttcgccgttgatgccttcgccgccggtgaccttgccgttctcttccgccgaaccccgcgtcgtgtagtaccggtcctccttctccggcgacgccgatttccttgtctcgccggccgatgaccggagaatcgccccgtcggaattccttgtaaggcgattaagttgttgatgatgatgatggtgatgatgttctttttctggcacagtgaggccagagcgatga

SEQ ID NO: 225008 - DNA, 526 bp, Glycine max
ctcgtgccttccaagaaggtttcccgtcatcactgtatgacgtcctccttctttggggggggggggggggggggggggggggcggggggggggggggggggggggggtgggggggggggggggggggggggggattttgggaaaaaactcccaaaaccgaaatccccccggtttagaggtgccccagccccgaaaaattgggaacagagggccccccgcaaattaacacccccagagaatgaccctcccgggccaaaagctaaccccccgggagcgcaaccccaacggaaaacagggagcgcccccaaaagatttcccgggggaaggacctaaactaaaccttttaaggggagtaaaaaatgggtttccctagggcccacccccaaaaacccttggaaagggtgcaacagggcccctaaggattaaaaaaccccccaaattccgcggtaaaaagatctaggtagcgcggtaacatgggttaggaaaaattcctttggggggtttgaaaattggcctttggatcccc

SEQ ID NO: 225009 - DNA, 522 bp, Glycine max
gttgcagaaagaaaagaccatcaaagtttcacttcagccttatccggtttagggtttcggtttttgacccaacctttgacgtatcgaaaccttaagtttcggatcaggtctgagcaatctggttggtagaacctttggtcttagagagtcaagttttatgtctgaattagacgatcaaattcctactgccttcgatccttttgctgatgcaaatgctgatgactcgggtgctgggtcaaaggagtatgtgcatattcgcgtacagcagcgaaatggaaggaaaagcctgacaaccgttcagggattgaaaaaagaattcagctataacaagatacttaaagatgttaagaaagagttctgttgcaatggaacagttgttcaggacccagaactaggacaggttattcaacttcaaggtgatcagaggatgaatgtttctaccttcctggtccaggctggtatcgtgaagaagagcatatcagaatcatggttttgagcggatgagtctcagtgtcagtctta

SEQ ID NO: 225010 - DNA, 378 bp, Glycine max
ccattaaactgttttcatattatgtcttcaaagcaaagaacacacaatgttctgaaatccataatcccacatcacatggtaaaacataagaacacatcagatataccacaatcacatacacaactcagattatatatgcccaacacataggcaggcacgtaagacttgacacttgagactccaaccgctcagaaaccatgaatcttgatatgctccttcttcacgataccagcctggaccaggaagggagaaacattcttcctctgatcaccttgaagttgaataacctgtcctaattctgggtcctgaacaactggtccattgcaacagaactctttcttaacatctttaagtatcttggtatagctgaattctttt

SEQ ID NO: 225011 - DNA, 418 bp, Glycine max
gttgcagaaagaaaagaccatcaaagtttcacttcagccttatccggtttagggtttcggtttttgacccaacctttgacgtatcgaaaccttaagtttcggatcaggtctgagcaatctggttggtagaacctttggtcttagagagtcaagttttatgtctgaattagacgatcaaattcctactgccttcgatccttttgctgatgcaaatgctgatgactcgggtgctgggtcaaaagagtatgtgcatattcgcgtacaggagcgagatggaaggaaatgcctgactaccgttcaaggattgagaaaagatttcagctatgacaggatactgtaagatgttgaaagagagctctgttgcaatggaacagttggtcaggacccagaactaggacaggcttttcaacttcaaagt

SEQ ID NO: 225012 - DNA, 524 bp, Glycine max
ccattaaactgttttcatattatgtcttcaaagcaaagaacacacaatgttctgaaatccataatcccacatcacatggtaaaacataagaacacatcagatataccacaatcacatacacaactcagattatatatgcccaacacataggcaggcacgtaagacttgacacttgagactccaaccgctcagaaaccatgaatcttgatatgctccttcttcacgataccagcctggaccaggaaggtagaaacattcttcctatgatcaccttgaagttgaataacctgtcctagttctgggtcctgaacaactgatccattgcaacagaactctttcttaacatctttaagtatcttgttatagctgaattcttttttcaatccctgaacggttgtcaggcttttccttacatttcgctgctgtacgcgaatatgcacatactcctttgacccagcacccgagtcatcagcatttgcatcagcaaaaggatcgaaggcagtaggaatttgatcgcctaattc

SEQ ID NO: 225013 - DNA, 531 bp, Glycine max
ctgtgtaagcagcaccaaaatagtttttttttttcctttatacaaaatccattaagctagctaaattaaaaatgggcactataatatttagtttatttacaccgaaaccacattattaaataatccaaaacatcacgcatcatcatcatcatcttcttgttcttgttcctcatcatgttctttcagatccgagaggctcctagacttgaagctcccaaatcttgctctcatgtgatcaacataagacttaggaaccaaaacatgatcttgtttattttcttctgatgaataagaagaagaagaagatggtgacacttttttgggcttctcttcctcttccaaaaaattgtcttcatcttcatgaacaggcaaaaggggcatcgattttgggttggaccaagcgtaaaaagaagattttcttgtcaacttcgtggctatttgaaccctacttctcttgttgaaagggttctcttgctcttgaagttcttcactgcgttgagtgagttcacttgtgatagaaccgtgaatgac

SEQ ID NO: 225014 - DNA, 461 bp, Glycine max
agaaaaaaaaaaacccttagccaacacaaccatcatggccacctctgctattcagcaatcagcattcactggtcaaactgctctgaagcagctcaatgagttcgtccgcaagaccggtggcgccggcaaaggtcgcactaacatgcgccggaccgtcaagagtgctcctcagagcatttggtatggccctgaccgtcccaagtacttgggtccattctcggagcagattccatcatacctgaccggagaattccctggtgactacggatgggacactgctggattatcagctgacccggaaaccttcgccaggaaccgggagctggaggtgattcacagcagatgggcaatgcttggtgcccttggctgcaccttcccagagatccttgagaagaatggtgtcaaattcggcgaggccgtgtggttcagggccggtgcacagatcttctcagagggaggcc

SEQ ID NO: 225015 - DNA, 508 bp, Glycine max
agctcctcaccgatgccgttccaaggaaggtttcccgtcatcactgtatgacgtcctccttctttggggggggggggggggggggggggggggggggggggggggggggggccgggggggcccggggggggggggggggggggggggggggggggggggggggggcccaaaaaataaatctgcgggccctaaaaagaaattaaaccctggtggaaataactcccccccgcgggaaaaaaaatacaccttttcctttttttccccccgaaccccggcctttaaaaattttcaggggtcaaaccccattaaccccccatttgccaaaaaaaaacccctaacgttttaaaccggggggccccccaaaccaacatttttaaaagtgtggggaaaaaaaaaaacccccccccctttttaaaaaatctccacttaatcctcttaggccggggaaaaaaatttttatgccgacccctagtgaccccccctcaaaaaatcccccccctggggcccc

SEQ ID NO: 225016 - DNA, 479 bp, Glycine max
agaaggtgaaaagggggcaagtttcactcttcaaggagtttgaagggtgtcaacttgtgttttgagactctgaggttgaagctgcattttttttaagggtggggatgggttctagttgtggttgtggtgtgacacttgttctagtttactgcttatggggtgtgttgatctccctatcttttgctgctaggctcagtgctacaaggcagacgcttgaggttgctaagcatatgaatcgcttgaacaagcctactgttaagaccattcagagtccagatggggatacaatagactgtgtgcctatttcggagcagcctgcatttgaccatcctttcctcacagatcacaagattcactacatggtctaaattgcaccctgaaaggctatttgcagagaacaagttatatgaacagcctgatgcaaaacgcatacccccatcactcagctgtggcatgcgaatggtatatgctctgaggac

SEQ ID NO: 225017 - DNA, 489 bp, Glycine max
  unsure (1)..(489): unsure at all n locations
ccgccctttttttttttttttactttcctctcatcattactcattgacaattaggatttttaccggggcctccatagtaaaagtaatggccccaatccccattactgcctgtttggacatcataacagttcgattgctcagtgaaggtgccaatgcctttgggagccttgagattattggagctatcaaccacttgaatgtttctgaagtagcttgctttgccaaaaccctcttcagggaaatgaccacttcccatttgagttgatgtgtgctgaccatcaggctcagaatttacaacttcacctccccactcaatcatggaagcactgtcagccaaatatgagaacaggaaagaaggccaataccccaatacatagtcatttccaaattgcatccaccagtgtccctctttaggatccttccagataagtatactgatatcgaatagngagtttcggtatgcagaaactgangaaatggttgcaccca

SEQ ID NO: 225018 - DNA, 466 bp, Glycine max
gcctatgactccaggcacaggtggtatggacatgatgtctccagttttaggtggggaaaacgaagggccatggtttatcccagatatattggtcaacgtacacagggctggagaggaatctattggagttataagagaggctctcccggatggctcttacagggtaggtcttggatcaagtggtaatggtgaaacgattacagcccttcctaatgaaatggaggctgtggtaccaagaaaatcagacaaaataaagattatgggtggggcattgcgtggtgcaaccggcaagttgattggtgtagatggtacggatggaattgtaaaggtagatgacacattggatgtgaagattttagacttagttattttggcaaaattggctcaaccatgatataaaaagcttatgtagagaaattactttaatgccatatcttttctcgtgtcaactgttgctaggggtttt

SEQ ID NO: 225019 - DNA, 535 bp, Glycine max
gataatgaatagagaatactacattgctcatcttcatatccacatttgaaaaagtacccatgctcagttccatatttgtgaagataacaacaattctcaagattccatccctattcttaccggttaccctaatgtaaggaaaacgataatttatagtggtatttgttagaagcaaatgtttatctgcagttggaacttgtcacttgggcggacaaaggtgcagggagcgaattatagacagacaaaacccctagcaacagttgacacgagaaaagatatggcattaaagtaatttctctacataagctttttatatcatggttgagccaattttgccaaaataactaagtctaaaatcttcacatccaatgtgtcatctacctttacaattccatccgtaccatctacaccaatcaacttgccggttgcaccacgcaatgccccacccataatctttattttgtctgattttcttggtaccacagcctccatttcattaggaagggctgtaatcgtttcaccattaccacttgat

SEQ ID NO: 225020 - DNA, 465 bp, Glycine max
atccgcttgtgaattactaattaactttccgtcgcaaatgaggaagctgcatccacttttagcagttagaaattgagcacttggcgtttgtagtacctgcagagtcgcatgattttaagcctgaacaactcaccatgcataactagcagaagcagattttagaagatggcagacgctgaggatattcaaccccttgtttgcgacaatggaacaggaatggttaaggcaggatttgcaggagatgatgccccacgtgctgtgtttcctagcattgttggtcgtcctcgtcacactggtgtgatggttggtatgggccagaaagatgcatatgttggtgatgaagcacagtctaaacgtggtattctgactctcaagtatccgattgagcatggtattgttagcaactgggatgatatggaaaagatttggcatcataccttctataatgagcttcgtgtggcccca

SEQ ID NO: 225021 - DNA, 501 bp, Glycine max
ctcaaaaaatcaaaatcaaaatatataataatactgaagaattgcaccgttttgacaaaacaaactcctcgccttctccaaatcattactccagagaataacgtaaacagataacaaaagttagaatagaatgaaagggttacaagcaagcagcacttcttcccgaggaataaaacagctatctttttcttcaataaccctatcaaccaaacaatttagaagcactttctatgaacaattgatggtccagactcgtcgtactctgccttcgcaatccacatctgctggaaggtgctcagggatgccaagatagaacctccaatccagacactgtactttctctcaggaggtgctaccaccttgatcttcatgctacttggggctaaagcagaaatttccttgctcattctatcagcgatgccaggaaacatggttgtaccttctgaaaggacaatgttaccgtacaggtctttcctgatgtcaacatcacatttcattatg

SEQ ID NO: 225022 - DNA, 500 bp, Glycine max
accagacgtttctttttctttcatttatgtattagcatttacaacgagctttgagattctacaaaatgcattatagaacagaggtaaatctcaagtcctatggagagactacttgctcaattaaaagtcaaaaaggaggcaaacgctcgaaccagtcagtttcatctccaagcagaagaggtggccatatgtctgttcatccagccaagataaagagcaccatctctatgttcaagcctataattttgactgaactcctttagaagattttgggtagcaaccatcactgaagaactcaattgacactgtttaaatccagccatggaaagtcttgacctccactttccaaaaagttcatgcctttccaccctctcaaccccctcacaagctatcatgttgaccatgtctcgtgccacgcagtgctgctctgcgctaatcctcttcttatcatctctggggcaagccacatctatagattcaaacattgcagtataataatc

SEQ ID NO: 225023 - DNA, 298 bp, Glycine max
gtcttaaatgatgtaacatctgtactgcaaagcggagttatgaatgtccacgtccctcagctggaaattcggaaatagggaatgggtgtgtaccgtatgagactgatgtgaggtctttgatacatccatgaaatgagtactgtgcagacatactgagatgactacttcaaactcacatacccctgtacacctggtgctgaatactatggtcgtggagctattcccattttctggaactccaactatggtgctgttggagaagctttgaagatcgacctactcagacattcagaataca

SEQ ID NO: 225024 - DNA, 467 bp, Glycine max
gaattcagttcgattatttcaaagcatcaaaatattaggtctacacttgtagaaaggatgccagttttggatgaggcaacttacattggtaggagggctgggtctctgccaggcgcagcttcaactccaactgcaccttcatttaaatcttccaaatggagtagccaaacctgtggctcctcttgtagatctacttgatctaagttcagatgatgctcctgctccgagctcttctggtggaggagatattcttcaggaccttcttggtgttgatctgtcaccagcatcacaacaatctgttgctggccaagcttcaaaaagtggcaacgatgttcttttggatcttctgtctatcggatcaccttctgctgaaagcagctcatctacagtagacatcttatcctccaattcgagtaacaaagcaccagtttcttcatcattggatggtctctcatctctttcacttt

SEQ ID NO: 225025 - DNA, 462 bp, Glycine max
gggtgccatggttccaatccgcgtccacactgtgctcatctccacacagcatgatgagactgtcacaaatgatgagattgcagctgatcttaaagaacacgtgattaagcctgtgattcctgagaagtaccttgatgagaagaccattttccatttgaacccttctggcaggtttgtcattggagggccgcatggcgatgctggtctcaccggccgcaagatcatcatcgacacctatggaggatggggtgcacatggtggtggtgccttctctgggaaggatcctaccaaggttgataggagtggtgcctacattgtgaggcaagctgcaaagagcattgttgcaaatggacttgctaggagggcaattgtgcaagtttcctatgccattggtgtgcctgagcccttgtctgtgtttgttgacacttatggcactgggaagatccctgacaggaaatcctc

SEQ ID NO: 225026 - DNA, 518 bp, Glycine max
caatgtagatacggtataaatacttcacaatcaaagactggatgctaggaagtttaactagtgcatgatagttataagctctggtaacaaaaaagtaactgctgttgacagaaaaaggatggaaatactgaaacaaacaaagggaagtttcaccaccctttctacacaagtctcaactggaaagttgaagcaaatatccactcacaaatctttcacgaagacgatcagttaatgagacgccggacgagtgacccttggcctcaccggagtctttgaaggactcacccttattggctgggtccccaagagcatcccactacagtttagtgcaataatagcactttcagccattgcaaatttcacaaaagcaattcgagttgaatgcacgtggtcccccaagagccttaggcgcataacctcgccacaagctgattcaaaaaaattcttcacttcagcttgagaaacctttttatcaatatttgtacaatagacagtcctggcacacattttacgcttat

SEQ ID NO: 225027 - DNA, 540 bp, Glycine max
gtaaaagcactaattgcaaccaattgttccagtttcatagtagtaacccaaaaaacatgaaaagtgaagtacaaatgcatggtgagacacagctaatccaagctactaaaacaagggacagagcaaacaagtagaaaatactaatgagcaataccaataaataaaagcaaacacaaatccgaccaacaaaaactaatgaccccaaatgaagattgtcctaatgaaaatagaattttcatcaaaacttatctgccctgtcccttttctgttcatgtgctttcaaatgtttttgttatggttgattggtcctcacttggccatcatgactttgacaaactcctcgtagttgatctgcccatcaccatcaacgtcagcctcacgaatcatctcatcgacttcctcatcggtcagcttctcaccgagattggtcattacgtggcggagctctgcggcagagatgaaaccattctgatccttgtcaaacacacggaaagcctccttcagctcttcctctgaatcagtgtctttcatcttgcgcgc

SEQ ID NO: 225028 - DNA, 493 bp, Glycine max
gtcactctagaacatcattatttctcaatttatatagctctttaaccataattccctggatacaacatgtatactagtgtatacaccatattcaaagatagctaataaatacttgactgtataattaatatcacacaaacgtaaagtggcaatatatagtgtaaatatatataagcttaatttatacacagaaaccatgagtataaagcatctttatacaaaatattcaacaagaatttactttattaccacatcattatagtaaaatgtcatgataaagtggtgaaattctattgaatgcttgtgtcaagatgtttttataggatcaaagtgtgtatataaattaaactatattttttaatcaatatatatatattgatcacacattttatatatatatataagaggtgcttaacaagttggataggcaataccacaagaactaacggtttttttggcattaggagagttaacatactgcttcaagctaggg

SEQ ID NO: 225029 - DNA, 561 bp, Glycine max
caaatcaaaactgagaattcaatctataaataaaacgaaactcaacaacatttgtcttatccgccaccatataacccccccggaatgtccaaccatagtaacagaaaaacacaaggaaaaggctacaacgtatgaagaacaacctaaatttacattttaaggcatagaagtcaaaataataacccttctaattcaggaaatccaattaccaaagtttttttcctgcttttaagtccaaatccaagaacccaaaattgacaaaaaaaggacagggaaatgtcagaagggttcaggaaaacctcacttgccacccaaggatgggaagtgcccaggatcctcaattgatggagctggagcattgctgtatgcatttccactgtaacctcctctagaaccacggccacgtccccgaccacgcccaccagggtagtacctttccccttcagctggcttcagaaactcagtgatgttgacagacttcttggatttctcctccttctccaaagcatctttgcgcttatccttgtcagatcccaatttaataaagatctcatcattttc

SEQ ID NO: 225030 - DNA, 442 bp, Glycine max
aaagaacaaaacacaggaccttgttggctttcattaaatattcgcataaacaaatttatattcagtgggaaaaaaatataacatacaccttaacatgactgattattcttgtaaggaacatgtagataaataaatataaataatagaaacagagagggtaacattcccatctatttcaggggttcaatccttcagacaaccttgataggctgaaaattcttgctatatacacgacagcaaccttgtcatgaatcttacaagagaactaacagttgataccacattgaccattggttaatttgttggagtcagaggtgaagggatcaatccttacccacagcaaggagaatattgcagcaagaagaacggaccaaacaataacaatggttggggtacgattttgcctgcccaagagacccttcaagaatgggtatagatgggc

SEQ ID NO: 225031 - DNA, 489 bp, Glycine max
agacccatcataataggacatatatatatatatatatatataggaaaacatacatggaggacactggatctagtaaagtgcctgaaaagtataaatactatatatattgttcaaaacaaaacgacttatttctaattatcagcacatcatatcatatggtggatgtgctgtattgacatttttatatatgtacacatcgacatgcagtcattcatagaaagcccaaatggcactttataatgaatgtgcaaacatgaagagatactagtacataaataaaatttcacttgtagttattaatttatttattgtaagaattgatataaaacacgcagtaccacgtactttgcaacgatactatttgtcatctcagttggatggaaagagtcccaaaacacgtatttggaagcatctgtgcaactgaacatttggcccctgctgcatgcataacccatcttaaacattgcagtagcacaacacgccactgag

SEQ ID NO: 225032 - DNA, 482 bp, Glycine max
  unsure (1)..(482): unsure at all n locations
gatccctacgccatggaaccatttccctcataaaattctctcttcctttttgggttctcctcaatccattccaagcttcaatcttttctctcttctgccctctgcacctcccctcacacccttcctcattcgcaggaggtgaagatgtcgaccccggcaaggaagagactgatgagggattttaaaagattgcaacaagatcctcctgctggcatcagtggggctccccaagacaataatattatgctttggaatgctgttatctttggaccagatgacaccccttgggatggaggtacgtttaagttgacacttcagtttacagaggattatcctaataaaccacctactgtgcgttttgattctcgaatgtttcatcctaacatttatgcggatggcagtatatgcttggacattntacagaatcagtggagccctatttatgacgtagctgcaattcttacctcaatccagtcattgct

SEQ ID NO: 225033 - DNA, 371 bp, Glycine max
gagaaaataaggtggaacattaactcatagagtttgagcaagcacagtgtcaaggactagaaaatcataaaggttctttttgaagtctgctggttattcaatcatatatccttttgacaaccttttgatttgcacagaagccctatcttatctatgatgattagtcagcagtccaactctgtttaacaatctcacgtactcttctgtgtattcacgcttggtttactgaacatccgagcagtttcagaatttgctggtgaatttgggtttggatcacacagcattgactggattgaggtaagaattgcagttccgccataaatagggctcccctgattttgtaaaaggtccaagcttatactgccttcccc

SEQ ID NO: 225034 - DNA, 383 bp, Glycine max
aaggaaaaaacccaacaaactttttattcatataaccccaaaagtatttatttataagccgagattgatgattcaaattacatttttataaaagaccaacaaaacacataggaaaccctttattttaaagttccaaacgcaacttttactttttattattgggggatacatattttacagctatttttggtttaagggtatacattttggccttacttgcagttgcatgggtaaaaggggcagtttgatccacagttggagccaccgttttaagatgcaacacccattttagcaccctccaattgggcctttaaaggcccaacacccaaaactagagtctctgggggtggtttttcaacggaactcaagttaaaagagttctt

SEQ ID NO: 225035 - DNA, 581 bp, Glycine max
ggaccataacataattcattggatggagagctagccatgcacaccccatagatcagattgaaagactacatgccatgtggttcttgtactgagtggttggcattcgcatcactcatcccttccctagctagactttttattagaccactaaacaaagaaaagacatgcatggagcaacaagacacgatgcaactaagaaaaaaataccctctcaaacactcacttaaactgcacatttcccctcttcacgttcttttactctgttggagcctctgtgtccgtgactgtgacctcctccttcttctcagcctcagcttcttcaatcacttcctcctctttcttttcagctgacccttctgtctcaaccttctcctcacttttctctgccggggcctcttcctccttagcttcagcctcagcctcagcttctttctcttccttaatattaacatcttctgcagcttctggtgtcttaatctcagcaggatcggcattttcttttgttccctcagcagcttcttgcttctcaactgtggctctgtgtgatgtctcagcacaacttctttgccactcttagtctg

SEQ ID NO: 225036 - DNA, 437 bp, Glycine max
gtacaataataaatccatatttttataattaaaagtagtagattacagcgatgcacttgagaaacatattaagtggactaattctccctggtcaagcaagaaaaaaaccagctatgacccaaggtagagagagattatacacagaatactagtaattaactaagactggctctgcaattgccaaaaactccattgcagtagcagccacctgagaagacactaagacctagactagaccatacataatgaagattaatacccttacataacaacataggacactaagaaaacacggcttcacagagaatcccagtcgatctcataagaggggtacttctggagattaaaattatccgaatcaccttcccactgcggctcgctgacgtcagcgaaagtcagaaccgaaagcggcgaagaaccttcagaagaggaggaag

SEQ ID NO: 225037 - DNA, 455 bp, Glycine max
tacgcccttttttttttttttttagatgaaattagcagattatacatttgtgttatcccttattcttgacttcttggtgagtaaataattgctctggaagtttgtaaaggcttaaaccattccaggtaacattctataacaattacaaggtaaaatgtttatctatcactggacgggattgatgccatctaatgttaaaagcaccttatatagatctggacgcctatcacggaataccccccaacaatgtctcatggatttgatcttgtccaaatcaaattgtgcaataagaacagcttcgtctttatcgtcagcagttgaaatgatttctccagtatgtcctgctatgaaggagtttccatagaatgatatctcactttttccatgctcagtctcaattatctcctttcctatcctatatgatgccacaagaggtaccaaattaaccccagcat

SEQ ID NO: 225038 - DNA, 479 bp, Glycine max
aaaatacaattgaggtgtccatacaatatctgacatgtacttatacttgacacaattacaacacgacatgacgtgaccactatttagaagtgtccctacttctcaatattattctgaaaaaaaaattaggacatcttttgtacatccttgggccaaagatcttaccatttccaaagtagctagacttacatctattttttcatttcaattcaagagttctcatatgtttccaggccccttggagactccaaaaaaaatggacaaattgcactcttaaatttgtaaatatacaactcattgtacatatcagtatggtgccgatactcttcaactgcttttactttattccttttcttcctcttatttgttttgctaagtgtattttttcttccttgtatcagtctctctgacaaagagcctttagttctcttaattgaacactcccagaacagacatattaagaagccttaaagcagcag

SEQ ID NO: 225039 - DNA, 480 bp, Glycine max
  unsure (1)..(480): unsure at all n locations
aagttggaaatctctcaattgatatttttaataaaaataacaaactaatatctgctcataaaaaaaaagtaaaattggcatgactaagcttataatataatacgatttcttattctttccactgtatgtaccactattgtaatccagaccttgcaatttgcaattctaattaattaattgacccttctgcaattgcatctgatctctcccttcttcccagtgagaggcttcatgttccccatcttgatcatggaagctttaaaatctctagcaaaaaccaaagggcttctactatacagttgcaccaatttgtcactttctgtgccttttcccttgaacagctcttgatcagaatggagaagaccctttttgtgcagcaaattcgtgtaatatgcagtgtcaactctcgcaggagtagcatcaaatggatgcaagtagttgtctcctccgcttcgcggacatgtcttnctcgcagatgct

SEQ ID NO: 225040 - DNA, 478 bp, Glycine max
gcgccaaccgccccacctaccgcccccaaccgcagcaccaccgccgccgccgtagtcgcggatgtgcctccaccctctgctgctggctcctcctgatcctcctcttcctcctcctcctcgtcggtgccgccggcaccgtcctctactttctctaccgtccccaacgacccacattctccgtcacctccctaaaactctcttccttcaacctcaccactccctccaccatcaacgccaagtttgacctcactctctcaacaactaaccctaacgacaaaatcatcttctcctacgaccctacctccgtatcccttctctacggcgacaccgccgtcgccagcaccaccatcccctccttcctgcaccgacaaaggaacaccaccgtgctccaggcttatgttactagcactgaagaagtggtggatagtgacgccgcgatggagctgaagaggagcatgaagaggaagagtcagctggt

SEQ ID NO: 225041 - DNA, 354 bp, Glycine max
gtgttgggttttttttttttaatactttatttttttattttttctatcatttaaaaaaaataaccccccaaaatgagaccaaagggggaaaccaaaaggggacaaaaaggggaaaaacaaaccaaacttattttaaaagggcttcaaaaacccaatacaaaacaaaatgaatctctaaaaaggggggggaaaaacccacaaacgacaacccaaaaaaaacacttgcaaataaaaaccccccaaaaaaacccccccccaaagggaaaaaggcccccctctggaaatcaatacccggggggggcttccaaaccccaaaggggctcccaacaaaaaaaacccctgggggggccgggg

SEQ ID NO: 225042 - DNA, 358 bp, Glycine max
atcgtgaagtatcaggccttccttagaagcagagtacctactagttgccctcaaaaaccttaagctgaccaacactttactcgtgaatagcatcacccatgtagggaaccttgaaccccatcttcttaagactctcaaggaaaggggaatcctcaacaggtatcaagctttcaccagtaatgtatgagatgacgtactgccctaccatcatcctggatgcatacaccttgaggttgattatatgatcaccacttttggtggactgatacctgcgcaattcaccaggtcttgaattgctctgaagattccatggaataccatgttctagaatcttagataaggcttcatacaactagtt

SEQ ID NO: 225043 - DNA, 401 bp, Glycine max
aacgacaaagcaagagacaacgagttgttggctcattcatttggaaagataaacatcaaacaagagacaacgagttgttggctcatgcatagcctaagatcacagtagattggtctgctattttagctatataagtctgcatctatgtaattgttaccagctatggatatgagataatacagtttcatttatgatataatcgacttttattaaagctaggatcttggctcagcttcacattctagacgaggttaagtccattgcgtatgctacaaaggctgcatgttctttggtgaaacacaacgggggtggaaattctgaagacattctcatagtagccacccttaccaatgagtacttctaattcttgtatatggaccattacatgcagcgattcacct

SEQ ID NO: 225044 - DNA, 616 bp, Glycine max
atttaggttacgaggaaattatcatgaatccaattatttctgctgcttctgttattgctgctgggttggccgtagggcttgcttctattggacctggggttggtcaaggcactgctgcagggcaagctgtagaagggattgcacgacaaccggaggcagagggaaaaatacgaggtactttattgcttagtttggcttttatggaagctttaacaatttatggactggttgtagcattagcacttttatttgctaatccttttgtttaatcctaaaaaaatagaaatacatatccttttttccgtggacttgctttaccggtcttgctttttcgaattctatttatattaatatttcactcctataattctttatccgttcggacaagaacacaggggaaggactaattgacaggtgaagaattcacatactgattcgccctctttcttctctttttagtccaatgaccccccttttttttagataattttctcagtggtaaaactgagagatttgcatggatataagactgtatctaatcgataagatcatctttaggcatcttcaatgatgacaatcaatattatgattattattgatgactatcattttatta

SEQ ID NO: 225045 - DNA, 416 bp, Glycine max
actagtcggcggacgcccttttttttttttttttctattttcattcgaattcattttatttatatattaatattatattcaaatgaaataaaaagatattaaaagatactaattataagaatttgaaagtgaaattataaagttattaaatgattaatcaatttttttctacctgttcctgtagtaaaaagagttccatctgttcttgaatagcttccttcaaaaggacttctgcttccccagtgaatgtcttggtagaagatatgatttctttgaattgaggtttattcgtgtttaagtaagcacgtaactcaacaagaaatttccttacctgtccaatttctaatgaatcaagataaccattcgttccagtataaatagttattatctgatcttacacggtaagaagagctgat

SEQ ID NO: 225046 - DNA, 530 bp, Glycine max
ataataagaatataatataaatagtaataatgatagcatcaatatcaataaattggtctataatcttgcattataaaaaaaatatggtaacaaatatgataatcaattaaaactgacaaggaagaaactactccaattgaaaactaaaatccgcaaccataaaaggttcacttggcagcagcagcaccattggttggctttgaaggaacttcttcagatgtgttgttgataagctcatcccaagcttcaatccaagtaaccatggcatctgctagcttgatgaagtaaggatcaacagccccaagcttctccttgacttgcttggagagttcaatgtaacatttttggacagacgtgcactcttttgaaagagtggcactttggaagaatggaatgatttcttcttgccagaagatgcccttgtactcctttttgagattgacaaaagggttgcttgctatgctgtgccagatgtatggaaggccagtcttcactcccaagcccaaatggtcacatattaccttaacaca

SEQ ID NO: 225047 - DNA, 508 bp, Glycine max
cagaaacagatacttttttgaattataaatacagccttttgcaacaactaattaacgttacgtgagatgagaccacaccaaggaactgaaatggaatgacatgaaaccaaagcatcacatatccattaggactaatacttaatctcactaacattaaaacatatatagagaccttaaaccacaccatatatatatatatatgataacaattaacacataattttctttcactctctagtctttggccaaacacttggatagatatcaagatgcataatcaggcagagaaattaaaacctcttccaatttattaacacttagcaccttgggaagggagttccacaagtgctagcaactctccttgcattaggagagtcaacaaacttcttgagattggggttcttgaggtattggcagaggcatggtttctgttctttgatcttggagcagcataagtttgatggaggggttgagaaggtattgcactacacatgcacttagctgcact

SEQ ID NO: 225048 - DNA, 499 bp, Glycine max
agcccaacacttattaggatccagtgatattaatacaacaataatagttctacatattacactcccttacaatttagaaaatgtgtaagggggatccaaaaccatagcaggagaagcatgtaaagaacacgcgaatgaaaatccgaccaaccaaattgcaaatatgaatttgcaggggaagataaggttattaaaaatggaggttctaccctaggatgctacggcattggattcttcatcatcaagaaaggggtagtcagtataaccaagaaccggatcagaagtgtagaatgtctcccggtgatacttgttgagaggggcattgagagcaaatctttttggcaaatctggattagccaagaaccaacggccataagcaacaagatcagccctgttttcagctacagcgttgatcccatcttggcggtcataacctcctgcggctataaaagtgccattgaaggcctttctcataggcaccaggctatgagggcattca

SEQ ID NO: 225049 - DNA, 432 bp, Glycine max
ggaacaaattattattattgctgggctttgaagggctgatatttcttgagatcttgagcgaggccttggatggaaccagcagctgagataatagaaacgatcaagcaagcccagcttagtatcttgagccatgtccacgtgaaggaaaacctttgcatctttgactgcttaatggacatttctatggggaagtaaacggttaatggccaaaaggacagtgaaccaatcaggcctaggaagtcattgaaaaatggaaacatcatagctatcaaagcagtgatgatgacatatgttggtctccacaccaccctgaaaaagttcacagggaaggttccacatagtggaaagttcaaagcgtgttctccatttacaaaatggctatttggccacctttccttaccccagttctttacgaacccaaatatgggctga

SEQ ID NO: 225050 - DNA, 526 bp, Glycine max
  unsure (1)..(526): unsure at all n locations
aggaattctaaaagaccatttttatcaaattgaaattttaccaagcacatacatcacatttttatgaacccaaaacttacattagtatcctaaacttgacaatagaataaaaaggccttgaattgctatctacagcaagtttttattgatttctgctacaaatccaacttcacaaactgtcacaaacaatttgatgtcttccccttaggccgtgacatcacctctccagcataataatgtacactctcattgtctctctcagattccaaatttcatcagaaactttagcacattggaaggtctttgggtggtggaagcgaggactcatggggaccgttcccgttgtctactatgaatgccatcttaagtccccatgtggtgtgtacttctaagtggcaatgcaggaaccaaacacctgggttatttgctctgaatctgattgctgcccatccaccatttggtaccccaatggtgtttctctcaactggatcaacangattaaaactcaatgggtccttctctggat

SEQ ID NO: 225051 - DNA, 373 bp, Glycine max
agacagaagataagaagcatgcattaactttcaaggaaagcaatacatcaaaatggtactgttcatcaagactctcatctcaaagaacgtaaccatagcaaagctagcttaaactacacactgatgatgacactgatacattagggttccagattattttgttaacataattttctggttccccttcgaggccgtacgtgcatgccctcatatggcatgccctggagcttctttctccacaacaggcttcttcagctcgttaatggtggttgcctcctcagggtccacatgaccaaccaccacaatgttgatctgagccttttccttagccatcttgcaaattaacttcgaattcggaagacctaaggtatgc

SEQ ID NO: 225052 - DNA, 546 bp, Glycine max
gagactaattaggctcgagtgctttgcattctccgccatcatcatgcaagcgcttcactctcccaccctccgcgcttctcccttggaccctcttcgtggccccaacaatgccgccgccaaccgccgctcctccagcgccaagcgcgtgttcttcgtctccgccacggtggcgccgaaggtgtccgccccgcagcgacagaaggaccccaagaagcgcgttgtgatcaccggaatgggcctcgcgtcggtgttcggtaacgacgtggagggttactacgagaagctcctcgccggcgagagcggcatcaccgtcatcgaccgcttcgacgcctccaagttccccacgcgtttcggcggccagatccgcggcttctctgccgagggctacatcgacggcaagaacgaccgtcgactcgacgactgcctacgctactgcattgtcgccggcaaaaaggcccttcgaaacgccgaccttgccctcgacaaccactccaagatggataaggagcgtgctggatgtcttgtaggctctggaatgggaggctt

SEQ ID NO: 225053 - DNA, 416 bp, Glycine max
gctcctaggcggcggtcgcccttttttttttttttttttttttttttttttttttttttttttttttttttttttttttttttttttttttttttaaaaatataagctttttgacattttatccggggggggatacctccaaactaataaaattttggggcttttttcaaaagggtctactacaaaaaaggcttatagctaattggcaagtcccaattagggccaaaatggacaacttcatgcctacaggtttttatatatgaaggggggctccgcttggggaaaaaacctcaatggtggtagggggacaaaattttaatttacttaaacccggggtctacaaaaaggggcaacaagcttagctgggcaaaaaagggttggaagccaaaaatgcccccccaaagttgggtcccccc

SEQ ID NO: 225054 - DNA, 513 bp, Glycine max
gataacaaacagtagtaacattaatgggacaatagagttcaacacaaaccaaacttattttcaaaggtcattacagacccattacacatcacatttcttcttaaaatgtttgggaaaatccaacatcgaacatcacacagaaatcagctccagcttaaaaccccccacgaagacgcaacaccaagtgcagagttgactccttctggatgttgtagtcagcgagggtccttccatcctctagctgtttgccagcaaaaataagcctctgctggtccggtgggattccttccttgtcctggatcttcgccttcacattgtcaatggtgtcggagctctccacctcgagggtaatagtcttacccgtaagggtcttgacgaagatctgcataccaccacgaagacgcaacaccaagtggagagttgactccttctggatgttgtagtcagcaagggtacgtccgtcctcgagctgcttgccggcgaagatcagcctctgctggtctggggggatac

SEQ ID NO: 225055 - DNA, 474 bp, Glycine max
catgctataactaccctttatttacttctagatgtgaatttgtgattacaaataaatacatcggactgaggcttcaaaaccaccctaaatgagttgatccaaataacatattttggcagaagaaattcccaaaaattagatataacatggtgtcggactgtcagaaaacaaagcaaaatgagtagcggcacacattcaaatggcaccatattttctttccgttggtctccatgcagcacctgcaccttgagaaggaccaggaggacgttcccaagaggtttcactgccaaatgcactattgatgtcttctggccgtgagtagccttgcccagttccactaactgtctttaagcacgcagaaagaattgtcatgccaggcaatgcatcaattccacgctggcgttccacttttgtcttgtaaatgaaccctccacaacaaaagagtgttgaagagacaaaaaatatgcaagatag

SEQ ID NO: 225056 - DNA, 536 bp, Glycine max
tttttttttttttttttttttttttttttttttttttttttttttttttttttttttttttttttttttttttttttttaaaaaaaaagagggaaaccccgggggcaaattggatttcaaggcaaattagcaaacaagggggcaaatggggaccaaaaatcccccattcttttgggacatttggaacaaacatccaatagcttttgggggcaatatttggaaacaaaggctttggcacccagttttgtgggggcccacttggaattcttttttaccccattttaaaatttttggtaaacaatgaattttggaaaatgaaaaggctaaaggttaccccctttttttaaagaaaattttgaacttgcccccaaaaaattttcaagggacgaggggctttccaggcaaaaaatatgggccttaaaaactttattaacgggtacaagaggaattttccccaaaattcctttaggaacctgggggaaaagacccccttttattttgcagaactgggggaacaaaataactcctagcggggg

SEQ ID NO: 225057 - DNA, 438 bp, Glycine max
accatcaaaacaaaaaacagtgcttatcaaaaacaaacagcaacgaaaatgttaccgccgatcaagaacccagttttgaaggctacggctacatgaaatcggcggacactttaaaatataactggtaaaacaaacacctaagactttgcaaagataaactactgtaaaggaacaagtttttttgaaaccacgttgatgatcacatgtgctagcaaaattgccaaaatgcaatcactttttcttggcggcagcctttgtgaccttggctccggtggggtctttcttctcaacactcttgatgactccaacagctacggtctgacgcatgtcccttacagtaaaacaaccaaggggaggatactcagagaaagtttcaaccaccatgggcttggttggaacccatttaaccataccaggatcaccatttttcaaaaattt

SEQ ID NO: 225058 - DNA, 496 bp, Glycine max
gacaaaaaaacgacattttatttatcatgcattagacaataacagcagcaaaggccctatcattctctacactcaaactcacaagttttcacaaattcaataatcctaaagggatatatatcatatatgaaatttattttcttcttttcacaaccagaaagagaactcagtcccccaacagggaccatgtcatgtcatcattggtctgatatagatttactcccccattcgaatgatgcatctgatggactcccctttcagcatgtaatcaaaagccttgttaatctctgagaatggaactgtgtgagtgatgaatttctccagttccaattccccattcatgtacttctccacaacagaaggaagatcagtgcggggtttgtagtttccgtagaaggtaccctttagagttctctcgttcaagaaattcactggatgtagtttgaatgcatcatctttgtttggcactccaacaagtacagctacaccccaacca

SEQ ID NO: 225059 - DNA, 340 bp, Glycine max
gagtctaattcggcgagggaagaaatctgtaagatattatgcaaaaaataattaaggtgtttttctttaaatgggttggttgattggttcaatgaaccgatcaagaccacagcaggttcatggggatgcgaggattaagacgctttgttttttaatcttccgatgtcactcttgtttgttagtttgtttttttattttttatttcaataagtactgtgcaagtaggttagagttgggtagaagggcatgttcatggtgttaattactatgttatgtatgcatgtgagtgctgctatcgatggcaagatgtcaatgtatgcgtgtagtgctgttatcgatg

SEQ ID NO: 225060 - DNA, 326 bp, Glycine max
catcgataacagcactacacgcatacattgacatcttgccatcgatagcagcactcacatgcatacataacatagtaattaacaccatgaacatgcccttctacccaactctaacctacttgcacagtacttattgaaataaaaaataaaaaaacaaactaacaaacaagagtgacatcggaagattaaaaaacaaagcgtcttaatcctcgcatccccatgaacctgctgtggtcttgatcggttcattgaaccaatcaaccaacccatttaaagaaaaacaccttaattattttttgcataatatcttacagatttcttccctc

SEQ ID NO: 225061 - DNA, 496 bp, Glycine max
caatatcaaaagaaagattgattttatttagtaaacattaaatttaactactacattcaatcaatcacatacacacaaacactaagaatacaatctccatggaattagaggaaatgtatttcatatattttgaaaacaagaccctatgtttatttcttgctaaatgaacaagggctgtagcatagctcaaccctagtcactcctaaaaatgtggaataaggccttatcatacatattacactagaaagaattattaattaatgaatatgttgccgaaaattaacaatctttaaatggatgcactatatggaactccctttccagtgattccaggtcctgaaaatggtttcattagctcataaggcactaacccagctccacatctatttttcaaattatagttaccattccttgagtctataataccttcaatttccttcaatctcttattaaacctttcaaaggacgtctatatagtttgattctcaacccatga

SEQ ID NO: 225062 - DNA, 465 bp, Glycine max
agcataaatcttgagagaacatttttttttgtttcatcatataaaatatatatgttctgaaagaacacatacaagtacacaaaaaaaaagggggaaattcataaaaaaatacagaaaaaaaaaaacagaattgagtaagagggaaggaaacatagagaaaattttagcaatcagataataagaagccagtagtagtgcaaaagtcccttgccaagagtgttggaaccccttttagttaagcaggtaccttctcccccttgagtggcttcaccacttcccatgtgaagtcagggtcatctctgccaaagtgtccatatgcagcagtcttcaagaacctgccatttccacccctcttgagatcaaggttgatggagatcatgccaggcctgaagtcaaaactctccttcacaatgctgaagatttccttgtcagggatcttcccagtgccataagtgtcaacaaaca

SEQ ID NO: 225063 - DNA, 414 bp, Glycine max
  unsure (1)..(414): unsure at all n locations
cggctcgaggcaacaaaagaactaaacttgacaagcaagttgatgattagtagagcctatcatgattcattgtttatggccaggctgtctccaatgggcatgattttcattccatgttacaaagccataagcctgaagagtttgccaccattcaagatatgtcaaatggtgtaaaagtattaacactcaccctagccaaattgtccagtcactaacatcttctgtagtgagttcatgtgaacttttgtaggaaaaggacatgtaatttacttctgttacagcctactgattaaatcatttcaaattttggatatacccccttcaatctatcagaatgaggggttgaaccatacaanttgaaacgtggttctantagaaccactttttacaggagtaaaatgataactgcctgtg

SEQ ID NO: 225064 - DNA, 409 bp, Glycine max
agaaaataaccctttttaatttataggaacaattcaatacattgacaccaccaatagtatgatttaccaacaaaagctaaaacgctagtcattgagaaaaataaacaagtaactacacttctttgatagcagttccccttcccatcttaacaccattgccataatcatcattcttcacgaatctggaccaaaaggggtgtgccttccaaacctgggtcattttttcaatgggaatgcccttggtttcaggcaagaagaagtagatgaagaatgtcatgatcaacacgaaaaaggcaaagaagatgaacaagccgaactttatgtggcaaagcattgtcaagaagacttgtgcaatcaagaaagtgaaaaacatgttcaccgacacatttatactttgagcagccgaacg

SEQ ID NO: 225065 - DNA, 420 bp, Glycine max
agtatcaaaagtttaaaaaatagatagagattgcaatcgatgaaatgagcaaaatagttttaatttctcaataacaaggggttgcaaaataataaaatataactagcataaaaaattcagagagaaacaaaacattccaacattgctgaaacataaagctttaaatcctaattctcaaactagaagagtgatgttcccttgcccttcttggcaccaccaatctcaaagggcttgcacctcttaatagcgtgttgggagacatgcttgcaaccctggcattgcaacctcagaacaatcttcttgggggttttagccttcttgtggaagacgggcttaatttggccaccataaccggattgtttgcgaacataacggcgtttttcttgggcagcaatgctatccttacccttcttggattgg

SEQ ID NO: 225066 - DNA, 544 bp, Glycine max
  unsure (1)..(544): unsure at all n locations
cacaaaccacattaaaaaaagactaccacgtattcttctctctccgtctctctctctctctctctctcttcacagtgccaatggcggatccaatcgcgaaggttctgatcgcgtttgcgctcttagcttccctcttgctgtgttcgcacgcttcctccgacgttcccttcatcgttgctcacaagaaggcctccctcaacagactcaagtccggcgccgaaagggtcttcgtcaccatcgacatcttcaaccaaggaacctcgacggcctatgatgtaagcttatcagacgatagctggccaagtgatgcttttgatgtaatcagcggtagcacttcaaagtcatgggaaaggcttgatgctggtggcatcctttctcacacattagagctggaggcaaaatcaaagggagtatttgccggtgaaccagctgtcataaagttccgtgttcccacatagtctgctttgcatgaggcatattcaactnccatatggccttggacgttctttctgatagacctcctgagaagaagtttgaatgggct

SEQ ID NO: 225067 - DNA, 447 bp, Glycine max
gaaattgaatttgctgctttattactaatacttattgcaaacacaacaacagggtacaacacaaaaatgccacaataaatagaaaagcaatcatacaccatcatattaatctatgaacaaataaattaaagagatcactaaaactggactgtacttttcactttcacttggcatttacatttcaaatctctcttccctgttctgatttgtctgtcacttgaacacaataagatcaggacgtgcaagatggccatcaaacaaatagaaccaacttggtcagaatcacaaatattgtagtgcagagatgacacattcagacttttattcaaagaacttggacaggaagatagatgtttcacttgactccaaatagagcttgcctttattcctcgataaaaactagaacatgatttatcgtgaatggtgcttccgcaattcgaacttact

SEQ ID NO: 225068 - DNA, 489 bp, Glycine max
ttttttttttttttttttttttttttttttttttttttttttttttttttttttttgtttggtttttttttttttttttttttttttttttttttattttttttttttcgggggggcaaccccaaaagaggagggaaaaaaaaaaaaattttggggggaggaagggggtttaaaaaaacccccccgggaaagggaaaaaaaaaaaaattaatttggggaaaaagaaaaaaaaaaaaccccggggggtatagaaaaaaaaaaaaaaatcccctaaaccccggggggggaaaccccacaaaaaacccccgggaaaaattttcccgggactaaaaacaacattctccggagaaaggaaaaaaaagccccaggcccccattgtttaaaggaccccaaataaggggggcccgggggagccccccaaaaaggggggaaagaaccaacccggggggggggggggggggctccaaaaaccccccagggggggctccc

SEQ ID NO: 225069 - DNA, 448 bp, Glycine max
aaaatagaattcccatatgttttaatactaaaagggaaaacaggaaggtctatgtaattaagattcatgatatagcaccatccactattatttaagacggaagaaaggaccagttactactattcagaaatagatgataggagtcatcacctttgaaaagctgattggtgcaataacagaaataccaacataagtctagtacaagattatgaaaagaaagcgcatatataaagtttctgaaggtgagctagattaagcactagctgaagccacatgtttctgtattttctgctgcagctcatccttctttgctcccaccactttgtccagaagcgttccctctttcacaaacacaaaagtgggcatagcctcaatagcccaatcttgagaaacactctttaattcgtccacatccacctttaggaatatgacacttgtgaacttctta

SEQ ID NO: 225070 - DNA, 635 bp, Glycine max
tttttttttttttttggttttttttttttttttttttttttttttttttttttttttttttttttttttttttttttttttttttttttttttttttttttttttttttttttttttttttttttttttttttttttttttttcgaaaaaaagggggggaaagcttaaacacccccaataaaagggggggccccaccgtttttcaaaaaagggaaaaaaaaggggggaaaaaaaaaaagggtttttttttaaaaaggcccccaaaaaaaaaaaaaaaaaggggggccaaaaaaacccccccggggaaaagacaaaaactttttgggggaaaaaaaaaaaaaaaaaattgcgggcaaaaaaaaaaaaaaaacgggggagggggggggggttttttttttggggggggagagggcccccctttttttttttaaaaaaaagggcaaaaaaataaaaaccccccccaaaaaaaaaaataatttgtggggggggagaaaaaaaaaaaaaaaaaacccctccggtttttttagagggggcaaaaagggggggtgttaaaaaaaaattcccccctttttttttaaaaaaaaagggggaaaatgtgtatttcccgcgggggggaagaaatttttttttagggc

SEQ ID NO: 225071 - DNA, 488 bp, Glycine max
caagaacctgtgagctccgagtctgaggcgcgccgtgtctaatccgacgtcgttttggtggtgttctatgtcagtgtggtgctcgtgtttgggacatggcggaaacaacctctgcttctgtttcttctcctgcgggtgattctaattggagagagaacaagttgtggaaaggcacatttgctgtcgcaggaatcatgctcaccctcgttacctatggtgttttgcaggaaaagatcatgagagttccttatggggtgaacaaggactacttcaaatattctctttttcttgttttctgcaatcgcatcacgacatctgctgtttcagctggtgctttactggcaagtaaaaaggcattggatcctgtagcttccatttataagtattgccttgtgtcggtatcaaacatacttaccacaagttgtcagtatgaggccctcaaatatgttagtttccctgttcagactcttgcaagtgtgctaaaatga

SEQ ID NO: 225072 - DNA, 534 bp, Glycine max
gtggctaccggaggaccctggcctggggtctttgttacaaccatgaaatgagtcctatgcagtcatactgtgatgactacttcaaactcacatacccctgtacacctggtgctgagtactatggtcgtggagctattcccattttctggaactacaactatggtgctgttggagaagctttgaagatcgacctactcagccatccagaatacatagagcagaatgccacccttgctttccaggctgctatttggagatggatgacaccaatgaaaaagtcacagccctctgcgcatgatgcctttgtcggcaactggaagcctagcaagaatgatactatggagaatcgtcttcctggatttggcactacaatgaacattctctatggggatggtgtttgtggacaaggtgatgtggactcgatgaacaatatcgttttccattaccagtattatcttgaccttctagggtgaggtcgagaacaggctgggccccatgaaatcttacatgcgctgagcaggttcctttaaccca

SEQ ID NO: 225073 - DNA, 460 bp, Glycine max
  unsure (1)..(460): unsure at all n locations
cgcccataacgtacatatataccagatacaaatttttcacgacatatgatattacaaatgactaaaacttctagataacaacgaacaaaagctatataatgaattcccacactaccacgcagttcaaaattattgcataccaataatttcaagaacccttattaactttcactttcaaagggattggtacaacaatatcatatgctaataaatataatcttaagatgaagaagcaggtttggaagatgggttgaaaggaacctgctcagcgcatgtaaggatttcatggggcccagcctgttctcgaccaacacctagaaggtcaagataatactggtaatgggaaacgatattgttcatcgagtccacatcaccttgtccacaaacaccatccccatagagaatgttcattgtagtgccaaatccaggaagacgattctncatagtatcattcttgcta

SEQ ID NO: 225074 - DNA, 484 bp, Glycine max
acaagtcatcaaccgtttatgtactttagttataataaaaaaataacagttatttacatttaccagagtatattataatgtacaaacaccataaaaagaatatagtcagaactacagattcagagaaatgctagttgcaatgcgagaatgtctttatattaggtcagactgtagcttaatggacatgtagagaagagctaatagagcaccttggggaagtggtgcataccttgcaaggtatgagccaacccacaaggccaccacaactagtgcgacaacactactactggttttcccgcaaacccaacttgcaaatgacaagcatagtgttagcaatatgccacccctcccacccaaaatccatgctattacatagcccattttatagccggtgtctaatttcttatcaaacaatgccatcagactgctgaatgtgagtgagaaacgggatccaagcgtctgaagcaaaaataatgacatgaat

SEQ ID NO: 225075 - DNA, 464 bp, Glycine max
aagcaacaacattcagaagtctctcttatttagtccacgagattggatatgggatgagaagatgatttttcaaccatcaacaaagaaagtttacattatcaaataaactgagctactaaggagcctgaaagatcagcttataccaaatctgaatcttaacacaaggtcaaacagccatgatacagacttaggaagggcattctcacgcatacaaatctatgccccaaaacacagctggttgattggttcgatattttctatctatacttccaatgagctccatgtcctctttagacaactcaaaatcgaaaacctgaaagttctctttcaacctctccagttttgacgatttaggaatgaccacagtgttcctttgaattccccagcgaaggctgatctgggcggcagtctttttgtatttttcagccagacctttgagaacttggtcatccaaacatgaaact

SEQ ID NO: 225076 - DNA, 219 bp, Glycine max
agaaaaatataaatcccccccccaaatggaaacaccacagtagaaacatttaggggtctttaaatgttaacccaaaccaaactttttttaaaggggcatttcacaccccttaaacataacaattgttcttaaaaagggggggaaaatcccaaatcgaccctcaacaaaaattacgctcctggttaaaaccccccagggaaccccaacccccagggccag

SEQ ID NO: 225077 - DNA, 461 bp, Glycine max
  unsure (1)..(461): unsure at all n locations
ctcagatattgagggataacacacttattcaaaatgcgctttccttctaccgcttgatgattgtttggttggttggcttggtgggtggattaaagatgcctctaccaccaacttgcccaatggaattttctaccatgcctgaacattttgtggaagatgccatggaacttttaatatttgcttcccggattccaaaggccttagatggagttgtgctggatgaatttatgaacttcataattatgttcatggccagccctgaatttatcaaaaacccatacctgagagcaaagatggttgaagtcttgaactgctggatgccccgtangagcggctcaactgctacagccaccctatttgaaggtcaccaactctctcttgagtatcttgtgaggaatcttcttgaactttatgtcgacatttgagtcactggctctcacacacagttctatgataagttt

SEQ ID NO: 225078 - DNA, 392 bp, Glycine max
gttcctgcgcgtgaacaagcctcaggtaagccaaagccatggttaagcataacaatgttatccccaacggacacttccgtaagcactggcagaactatgtgaagacctggttcaatcagccagcacggaagacaagaagacggttggctcgtcagaagaaagctgagaagattttccccagacctacagctggacctcttagacccattgtacatggtcaaactttgaaatacaacatgaaagtgagagctggaaagggattttccctatgagaactcaaggcagcatggattgccaaaaagcttgcaccagcaattggtattgatgttgatcatcgtcgcatgaaccgttatttggaaagtctgcaagctaatgtgcagaggcttgaaaca

SEQ ID NO: 225079 - DNA, 506 bp, Glycine max
agacagaaacgttgaagctttaattaactatggaaattaaaagtagttgcaatgtaacatgaatacactaaaataacacctgaaatgaaaggcaaacacaacttcaattctaaccaaataaactcaacaaaagcattacataaattagtcaaacagactgaaacccatgtcatcatcagattcttcagctggttcttccttcttttcctcttccttggctgcagcaggagcaccagactcagcagcaggagcagcaacagcagcgacagcaaatttacttggatccttcagatactccttgaccttgtctgcctcagggaaagaataatctgtctcaaccgcaacagcaagaacattcttgtaggcattgacaaacatgtgtggtgcagcagcaagtgttgggtatgagatagctaatgaaagtgaagtaaccattgagacaccagcagcaaacttctcaataaggtcatcctcagtaagatcaagacctcaggactgaacactga

SEQ ID NO: 225080 - DNA, 492 bp, Glycine max
  unsure (1)..(492): unsure at all n locations
agaaaaagcaaatgcttttattcaagagaaacaactgtgcattacatttgatactgctctcaggactatcaagaacaaagagcatcatcatacagttgacgaaggtgactgcaaaggtgatgtcaagacagccaatttttcagcaaaaaaaccagaaataaaactgataacttcccattgaacacaagaaacaaatgctttttactcatgagaaacaacgagcacttgttttccaacattgcgaccgctaaaaaggccaaccaatgctgaaggtccattctcaagcccctcagctatgtcttccacatacacaaccttcccctctctgatatttggcaggagaaactccaagaacttgggatataggtgaacgaaatccatgaagttaaagccttgcaaacgaatccgcttatatatgatctgtgccaaatntgttacaccttcatgttgagtaagattatactgtgagatcattccacagacgggtatgcg

SEQ ID NO: 225081 - DNA, 415 bp, Glycine max
gagtaacattattctatattattatataggaattaacaaaacagaacattcacatcatcatatatccaatccaactcacacactaacagtagcaactagcaacaacactttgtaaagaaagtaaaaacaataagaaattcaaaaccgcaatagatcgagatcagtttccaccgaagactttggcgatcttctcagtaggcaccaaaggaagataagcagaaaccctgtaacctttctcagcagaggaaacaaccgcctcgttgtacttctcggtgcaataggcagccttgggcaacacaacattggccacctgagggaagagcggaagctggttgagctttcgccatgcagacactgcgcactgctccgccgtaggctcgtacttggagtaaacggtcttggcgtaagcggagac

SEQ ID NO: 225082 - DNA, 470 bp, Glycine max
gataataatttaactttaaagagaacttcatgatcatcaaccatccaaggatttaagacgaaaggaacaagtacaaccctcgaaagtgaattaggaagaaaacacaaggaaggaaaaccatacacagaagaagattccagagaaattcaataatacacaatttttttttttttattttcatttccccccctctagtagtcagtggtgggaagctgctcgtgggtgtggctgataaagacaacctcgtaaacaaggccagcgattccaccaccgatgagaggcccggcccagtagatccagtggttggtccaggtccagctcacgacagcaggcccaaatgtcacagcggggttcatggccgctccagagaaggccccacccaacaaaatgttagcgccgacaatgaaaccaatggcgatgggagcaataattcccaaattacccttcttggggtcaatggcagttgcgta

SEQ ID NO: 225083 - DNA, 551 bp, Glycine max
  unsure (1)..(551): unsure at all n locations
cggaaccgccagctatcttgaaacctgccggaaacagagtaaccgtttcccaagagccgaaacagaagaagaaggagaacagcgtgaagaccagtccacagcgtcccccgcaaattctgaacaccgttgtgcaaagcaacgtgtctttggacagcacgtgttcctcagatagcaattcatcaaccaaaaaggtgaagcccgcaaccgcaactgtggcgagtaggagaaacgtgaagcgtaacgggtttaagccggtaagggttgtgccagacgccgtcgatgtagcaacagtgttgccgcctcttaagagatgtgaatggatcactccaaattctgaccccctttacactgctttccacgatgaagaatggggtgttccagttgatgatgataggaagctatttgagcttctagtctttttacaagcattggcagaacaccgttggccagcaatccttaaccagagagacatattcaggaagcttntttgaaattctgaaccatcaccagttgcacagtttactgagaagaaattgctaacactgaaaata

SEQ ID NO: 225084 - DNA, 378 bp, Glycine max
aagcaaccatggcaatggcaacccaagcctctctcttaaccccacccctctccggtctcaaagccagcgaccgcgcctccgtgccatggaagcaaaactccagcctctccttctccagcccgaagcccctcaagttctccagaacaatcagagcagcagccgccgacgagaccacagaggcaccagcaaaagtagaggctgcaccggtcgggttcaccccaccagaacttgacccaaacaccccttccccgatcttcgggggcagcaccggcgggctcctgcgcaaggcacaggtggaggagttttatgtcattacgtgggactcacccaaagaacagatctttgaaatgcccactggcggcgccgctatcatgaggg

SEQ ID NO: 225085 - DNA, 393 bp, Glycine max
agcgaaaaagaagtgtaaaattaaggtacagagtttaagcaatatttgtggcataataaaattgacaataggtacatgatatcacatgagaatatatagcatataaaggaagcacgggggatgatgatgatgaagatagagttgtgtgctcacaaatcatagggctgcttgccagtgaacttgacctcaataggactaacattcttaccaatagacctgaagttttgacccaccccttggcgtccggcgttgaccttctcagggtaaacaccatccttagggtgcaaatactgaacctccccattagggaagaccctgtagaactggtacttgatcttgtacttggacctgagcctagtcccaagagccaagcactgctccttcctggccaac

SEQ ID NO: 225086 - DNA, 408 bp, Glycine max
gccatgaaataatgattcagaaacattgatcgattatcactggcgtcgcgtatattaactacagttttttacacttgcatatatatatatatatatagctgaaggacctacttagcatacaaatggaggttcaaaaaattaatatctcgcggaatagaagggatacacacattacacgagcagaagatacaagttttgggaatcaacacgggccatctcgagaaataaatcacatagggcctcctaagccactggcacttacaccatccataatggcaaatcgcatgtcctctgttggtttccaatgccggttcctttgattgatgaaccaattattgatctgcttttgatcaaggccggtcatttttgatagctgcactttttcttcctccgtaggataaggccacc

SEQ ID NO: 225087 - DNA, 502 bp, Glycine max
  unsure (1)..(502): unsure at all n locations
cggcacaaaacttcagactttatttgatatgaagttgcagatttcattacagcatataaagaggtggatattgcaatgtttatacccccttcatgaactagaagttcagaggtggatattacaacgtttattggattaagcagactagaaatcacacaaacattaagggaaacgtgcttttggccatagatcagaatcagacaatttgttttttaaggaactcaatgatgagctggttcaccttctctggaatttgttcatgcacaaaatggctcccttctggaatatatatgatttccaagtccggcacaaaatttttcaccatcccacttcgaatataatcctccatgcctggaaagttgataacataatctttctcacccatgatcagaagtgctggaactgtaaccttcacgtcacttaagccagtttccacattgagactcctgtaaggagacctgcatgcatatctgaatccagatttttcatatanagatgcata

SEQ ID NO: 225088 - DNA, 431 bp, Glycine max
gaagtaaatataatttattcaaaccaagaggaacaggcaaatgaccatagtaatttgaaccctcctggaaccatcatcctcaatacatacataacataacccatagaattctcgtatcctccgcttggcatgcatgcatgctgacatggagccaaatcagcagggcttatatatatatatatatatatatatatatatatatatatatatcggaaagccatacccaaagacttaccattacaataataacattaataataaataaaataaaaatgcaagaaacttcatctacttcaataataccgtatccatgggcttaagcttcagtcttctcaacagaaacttgttgtgttttggtttcctcaacggtttcagctggtttgatctcctcttgcttctgttcctccactggcgctgattcggtttcttta

SEQ ID NO: 225089 - DNA, 483 bp, Glycine max
atatataaaatcaaacaatttggaattttttaaaagatcagtctcaacaaaagtttggccaacttaaggggggaaaaaactcactactcggggatccataatgtcaaaacagaaaacactacaatatgtttataagatatggtaaccgaatagaaatccagcatttccatccaattaacaaaattatgctttgaggcgtccaaagaacttctgcttctcctgtgtggtctggaagcgaccatgcccaaactttgaagaggtgtcgataaacttgagcttgatctcctccagagcaacacgagaagtctgcttaaggagggattggcgcaatgtaataacccttttcttgggaccaacgcagcatcccttgaccatgatataatcatccttaacaacaccatagtgagggaaaccacctattggggtaatgtctttctcggtcctatcaaactcagtaagagcagagtgagattcatctccagc

SEQ ID NO: 225090 - DNA, 557 bp, Glycine max
  unsure (1)..(557): unsure at all n locations
tgctcagattatgacaaatactatccagaagaagtacaaggtttcttccacccagcttctgtatcaatcatgtccatatcaagcagcaaccctgttaatcgctggtccatatctggataaacttttgaccaaccaaaatgtatttggtttcaagtatacgacacaagtgacggttttcataattctttcctgccttatctccatctctgtcaatttcagtacgttccttgttattggaaagacatctccagtcacctatcaggttcttggacacctgaagacatgccttgtattggcatttggttatatacttctccgagacccatttagctggagaaacatactgggtattttgatagccatgattgggatgattctatattcttactattgcactctcgagaatcagcaaaaaactgtcgaagctgcatctcaatcatcccaggcaagagaagatgaatctgatcctctgatgaatgtggaaaatggaagtgcaagtgtgagttctactgtcngacaaagacaaatgtcccctgtatggagcaagagcaaagact

SEQ ID NO: 225091 - DNA, 530 bp, Glycine max
atatgctattcaagccaagaaaaagtttgaatatctatataaaatcataaatgtatcatgatatgaaaacatcaccaggagatgtatgttactataagacatatttgttggccaatagaattacgacatgaccatgtgcttgttcccttccctaatactgttggtcggcaaacgattcataaaaatattagactaaagctattaaaaatgactaggacatgtgtttggcagcacttccactttctaattcctcatggattacgggcgttaaccctctatagggactataaaactgttcttgacaatgctaaaacaaagcccattaaacatactagtctttgctcttgctccatacaggggacatttgtctttgtccgacattagaactcacaactgcacttccattttccacattcatcagaggatcagattcatcttctcttgcctgggatgattgagatgcagcttccacagttttttgctgattctcgagagtgcaatagtaagaatatagaatcatcccaatcatg

SEQ ID NO: 225092 - DNA, 409 bp, Glycine max
  unsure (1)..(409): unsure at all n locations
tgagcgagcagtgatcacggacactggaagcatcacgatgtcaccgttaaggacgagaagacccttctcttcggtgacaagccagtcactgtttttggacacaggaaccctgaagagatcccatgggggtcaactggagctgatatcattgctgagtccaccggagttttcaccgataaggacaaggccgccgcacatttgaagggtggtgcgaagaaagttattatttctgcccccagtaaggatgcccccatgtttgttgatggtgttaacgagcacgagtacaagccagagcttgatattattttcaatgctagctgcacaaccaactgccttgctccacttgctaaagttattaatgacaggtttggcatagatganggtttgatgaccactggttattccatca

SEQ ID NO: 225093 - DNA, 391 bp, Glycine max
aaaatgtgccgaaaaatatataaaccacacgaatcaataattcaaagcagaaaagggaggggggttcaaacactcgagaaccatggacgaaaaatggagggcaaaaatgtctgcaatcagaatcaacaaagagccgagtacatcagcaagtatataataatccaaaaactccatcccctacacagaagagacaccaaaaaaaagcttaatgctcctaacagggtaacaacaccggttcccgaaaccgatttattcatacttctcatttttgcccgagcaagaagacactaaatcgcagctagacaccagcacataatgtctagacaagctacttttttttcagtacaaccttaaaaagacttcttggcaacgaatacaagcaggtcaatga

SEQ ID NO: 225094 - DNA, 442 bp, Glycine max
agaaaaggaaagggtggaaggagatgcatttatttaaatagaagaaaagaaggctaaatcatagaggttatacggaaccttgcaatcctaaagtaactgatatcatgggatttagtttctccatggacagcaaggtccgtcaatatcctgccaataaccggagccatcttgaagccgtgaccagaaaagccggctccaagaaccacatccttcccaaagtccccacccaagaaatcaatgaggaaatcctcatctggcgtcatggagtagatgcaagactgtttgatgacgggctcagtggattcaaccatccccttgaacgtaaactccacccattctttgagtttttccatcatcaccgctgctccccacggcctcttatccgggtcgcacggctcccccccgtgcacaccaaccttaatcagccccggaaactccaacg

SEQ ID NO: 225095 - DNA, 424 bp, Glycine max
ccttcaaagtcctgtactccaatttgacatccctgttgttagggtcaatctcaagagctttcttaatgtcaagttcagccaaatccaagtcagttaactgcatatatgcttgggcccttctatagagggctttaacatttgtactctcgaggtctaacaccttggtacacaatttttctgcttccttgtagtcttttaacttcaacttgcaagcagcattgttaagattgcaggcaaccttcaaggtcttggcctgctttttctcctcctcaccgaatgaggaatcatattctatgtactttacagccttttcatatcttttggaagctcttgcatgcttaccagctttaaacaacacatttccttcttctttcttcttaccagcagcttcaagtttctcttcagtgttcaaatcccaggactc

SEQ ID NO: 225096 - DNA, 546 bp, Glycine max
gaggcccctcttttatatggtcgttgataaaatggcttcgacccttttaacaaagatgcttttgggtcaccgattgatacacccttcttcgttcctcactcaccagccacagattctctcttctctattcagtaaacggctgttttgtatacgagctgtcccggtctcagcctctacatcccaaaacatcaaaacaactggttgggctccttgtatggcttcttcctcagttggtagaagagctacatattcaacacaatctgtatcgacaaatgagccagttgtatctgtagattggctttatgataacctgaaggagccagatatcaaggtactagatgcttcgtggtacatgccggatgagcagaggaatccaattcaagaatatcaggttgctcacattcctggtgcccttttctttgatgtagatggaatagcagatcggactacaaaattaccacacatgctgccatcagcggaagcgtttgctgctgctgcttctgctctggcatagagaacacagatgatctggttgttatgatggaa

SEQ ID NO: 225097 - DNA, 353 bp, Glycine max
aaaagccccatgataggatttaatattagtaacatttgaacattttagcaattctcaagaatttcaaccccaactaaaccaaaacaaccaacagtaaagcatacaaaaattggggggttcaaaatggttgacaaaagaaaacagccccttcacttgcaaatactttttgggggcctgcaaatttagctgtattgaattcataaaggggcaacaggggtatttgattgggctccccattcaggccaagatccatcataaactggaacatcagactttttaagacgatgaaaaccccatgcaagaatgcaagcagttacccctgttccacatgaagtcacagctgggctttccaa

SEQ ID NO: 225098 - DNA, 488 bp, Glycine max
aattcggttcgaggagaaactctctctctctctctctctctctctctagaaaccctattgcacgttttgcaatcgaactcgacaatggccaacagcaacctccctcgaagaatcatcaaggaaacgcagcgtttgctcagagagccagcacctggtattagtgcctccccctctgaagagaatatgcgatatttcaatgtgatgatccttgggcctacccagtcgccttatgaaggaggcgttttcaagttagaactatttttgccagaagaatatccaatggctgctccaaaggttaggtttctaacaaaaatatatcatccgaacattgataagcttggcaggatatgtcttgatattctgaaagataagtggagtcctgcacttcagatacgcactgttctattaagcattcaagctctattgagtgcaccaaacccagatgatccactttctgagaacattgccaagcattggaaattaatgag

SEQ ID NO: 225099 - DNA, 404 bp, Glycine max
tttttttttttttttttttttttttttttttttttttttttttttttttttttttttttttttttttttttaaaccaatcaaatttttgacgggatcattggaaaaaaaagaaccaaaactaaatcccaaatttgggcctttgggggtgaaaatcccaaattactttagtcaaccactgaagcccgttctaaaatggtaaaaagggaaagggtcaacccctattttcataccagttccaaaaaaagggggcttccaggggaaaaaattaccagggaaccggaaacttgttgggaatttaatttgaataggttaaccataaaatcccggagattgccaaaataaaaagggtcccactggtattttggcgccctaagtttgaagcctttcataaggggccacttgc

SEQ ID NO: 225100 - DNA, 474 bp, Glycine max
gcacaccaccaacctcttgaattctcaccaaattaaacagtggtagcacactttacaaataaattaagagaagaaaaaaaaagcatagaatggagagagagaaaaaaaagagagatagaaaaagaaagaaacatgaattacaaaggccatgacttgaatcagatcaaaattcactggaaagaggtgcatggtcagagcgaatgaagacattgccgtagataaggccagccaaaccaccaccaataagaggtccaacccagtagatccagttgtcatggaagtcaccactaacaactgcaggcccaaaggagcgtgccgggttcatcgagccgccagagaatggccctgctgccaagatgttggcaccaacaatgaaaccaatggcaattggtgcaatggttcccaatgatcccttcttagggtctggtgctgtggcatacactggggacaccaaaccaaatgtgatgatgatct

SEQ ID NO: 225101 - DNA, 461 bp, Glycine max
cacatataacataaattacattcattttctactacttattattccactctgatcaaatacatagacaatttcatcaggcaaaccatacatagcaggtaccgcatatgaattcgcccactactgaagcagccacctccatgaatttcctttataaattgtcatcaagtatgggggacagcaacagcccttgaacaaactcgcatcttttttccttctcctccttatccttaactgacaaggttgatgtctccacatttcttgttgacacagtctcatctaagcattttttagatgatcttgtctcagtgtgtaagtgaggctgagaactggcatgttcattagctaaaggcaatataaatgatgacaacagtggatctgcattagatgaggacactatacatgaagatccgccaaaaagggattgcaaatttccttctcgtagttccttcctcaaaaagata

SEQ ID NO: 225102 - DNA, 595 bp, Glycine max
  unsure (1)..(595): unsure at all n locations
gtggtctcatggattctcctcctctatatcctacttagtcaacagctgaggagcagggcatatccatggcagaaccaccaaagggggatgaggaggacggcggagctgctttcgttctccaatccaaaggtgaatggtggcatgcggggtttcacttaacgaccgcaattgttggacccacgatactaaccctgccatacgcgttcaggggattggggtggggacttggatttatgtgcttgacggtgatggggatcgtcaccttctactcttacttcctcatgtccaaagtgctcgatcactgcgaaaaatccggtcgccggcatattcgtttccgggaactagccgctgacgtcttagggtccggttggatgttctattttgtaatctttattcaaacggcaatcaacactggcgttggcgtatgggcaatcttgcttgcggnggaatgccttcagatcatgtactccaatatctcacctcatggacccctcaaattgtaccactctatagcaatggtgacagtgataatgatagttttatctcagcttccttcttttcattctctgcgacacatcaacttgtgttcactact

SEQ ID NO: 225103 - DNA, 400 bp, Glycine max
aggaaataaaaatagcgttctatatatttaggggggttcgctctataaatacaagagattagaacatattaaaggaatggagattatggggtgtgctggatccacattagtagatgacacttcgacttatgttggatgatttgagcaccaacttttggattaggagtgagcacagtgactggagcatgtgcataggtaggagaaagctcaaatgagaagcgttgtaagagtaatgacaaaaccaacttcgcttctaataaagcaaaattttggcctaagcacactctaggaccccatccaaatgggaaaaacacaacttggccttttgttgcctttgctactccttcagcaaatctttctgggttgaactctgtagcatcatcaccccaaatatcacgat

SEQ ID NO: 225104 - DNA, 452 bp, Glycine max
ctctctcattcttcttcagatgccaaacctaacctaacctcccaaacaaactcaaccttatcatcatcatcgtcgtcgtttaaataaattctgatctccacgcacacgctctgagtcagatcatgctgcgtttgtgctacggccctctggattgctgcttccgacgccgccgtgccgacggactcctctggcacaccgacttgaagccccacgcctccggcgacttctccatcgccgtcgcccaggccaattactgtctcgaggatcagagccaagtcttcaccttcccctacgccacctacgtcggcgtctacgacggccacggcggccccgaagcttctcgattcgtcaacaagcgcctcttcccttatttgcacaaattcgccactgagcaaggagggttgtctgtggatgtgataaaaaaggcattcagtgccacagaggaggaattc

SEQ ID NO: 225105 - DNA, 532 bp, Glycine max
gccatttgggagttaggttctgcacgctctgcttccagcgagtgttctttcttcgtttcaacaccttaatttgcacacgctgcttcttcagcttgagaaatggcacaagaaacctttctattcacatctgaatctgtaaacgagggtcaccccgacaagctgtgcgaccagatctctgatgcagtgctcgatgcgtgccttgaacaggaccctgacagcaaggttgcctgtgagacatgcaccaagaccaacatggtcatggtctttggagagatcacaaccaaggccaacgtagactatgagaagattgtccgtgacacatgccgcgaaattggattcatctctgatgatgttggtcttgatgctgacaaatgcaaggtgttggtcaacattgagcagcagagccctgatatcgcccagggtgtgcacggtcacttcaccaagcgcccagaggaagttggtgctggtgaccagggtcacatgtttggctatgccactgatgaaacccctgagtacatgcccctcagccatg

SEQ ID NO: 225106 - DNA, 402 bp, Glycine max
gggacaaaattctgataaaatttccattgcatcaaaacggtaacattgcataaccaaaaaataaattgtgagtaaaaggagaaaaggaaaaaaaaaaacagtttaagtattgatgagatgacattagacctatgaatgaagtagtagtagtcatggaacacgcaaattattcatccacacctagcaagacatccattgaagggagtgattaacttcacaacaatcttaagcttgaggcttctcagacttgagtggcttcacaacttcccaggtgaagtcagggtcatcccttccaaagtgtccataagcagctgtcttgaggaacctatggccacccctcttaaggtccaagttaatggtgatcattccaggtctgaagtcgaaattctccttcacaatttg

SEQ ID NO: 225107 - DNA, 433 bp, Glycine max
ggctcgagagtgatttcagtgagtgatcggtgttcacttgatctcatcataatcgtcagcgtcaattgaagaagatgccgatcagaaacatcgccgtcggaaggcctgaagaggcgactcaccccgacacgttgaaggcggctttggctgagttcatctcaaccttcatcttcgtgttcgccggctcaggctccggcatcgcctacaacaagctcaccgacaacggcgctgtcacccctgccggcctcatctccgcctccatcgcccatgcattcgccctcttcgtcgccgtctccgtcggcgccaacatctccggcggccacgtcaacccggccgtcaccttcggggccttcgtcggcggcaccatcaccttcctccgcggcatcgcttacgtaatcgcccagttcctcggttccatcgtggcctccttcct

SEQ ID NO: 225108 - DNA, 442 bp, Glycine max
ccccccctctagtagtcagtggtgggaagctgctcgtgggtgtggctgataaagacaacctcgtaaacaaggccagcgattccaccaccgatgagaggcccggcccagtagatccagtggttggtccaggtccagctcacgacagcaggcccaaatgtcacagcggggttcatggccgctccagagaaggccccacccaacaaaatgttagcgccgacaatgaaaccaatggcgatgggagcaataattcccaaattacccttcttggggtcaatggcagttgcgtagaccgtgtacaccagaccgaaggtcatcacgatctccaacaccaaggcgttgccaactccaactccagcggagagtccgaatgctggaacagtggaggcggtgaccaaggccacgaggagggaggcgacgatggagccgaggagctgggcgatga

SEQ ID NO: 225109 - DNA, 550 bp, Glycine max
  unsure (1)..(550): unsure at all n locations
atgggtttttgtgttaggtattattgcagcaatgttggtggttgtgaatggacaatcatcagtgaagccattggtgaagacagtgaaggggaagaaggtgtgtgacaaagggtgggagtgcaagggttggtctgcttattgctgcaatgagactatctccgattactttcagacataccagtttgagaacctcttcgcgaagcgcaattcgccggtggcacatgcagtcggattctgggactaccgttctttcatcactgctgcagcactgtatcagcctcttggctttggcaccactggaggaaagaccagtggccagaaagagcttgctgctttctttggccatgttggcagcaagacctcttgtggttatggtgtggctacagggggacccttagcctgaggcttatgctacaataaggaatngagtcctgataaattctactgcgatgactactacaaattaacctacccttgtactcctggtgcagcatactatggtcgtggtgcattcccacttaactggactatcactatggaaaagctgggg

SEQ ID NO: 225110 - DNA, 458 bp, Glycine max
cgagaaaataatgtaaagcttccatattgaaataatgtatctgtcagttacaacagaacttcagaaggggaaccaaatcttgttcatccagcaccctactgccatgactgcgtagggaaccaacccataccctgaaacaaacttccttatgcccactagaacttctagtttaagcaaatgcaccagcacatgcagtggctggagcagcttccagctgtttctttgcagtactgtatttttttgttataaacctaaagaagtccctccatagcaactcaaacatcaaccaatttgttccagttctggacgagccattaccaccatcattccggttggacgaagcagaaatgactctgccggcagtcttcttcagttcttcatacattgtgcgaggggaaaggcattccattgccaaccacagagaaattttgcaggagaaggttgcaccatatatactc

SEQ ID NO: 225111 - DNA, 456 bp, Glycine max
aagcacaaaagacgtggataacttgatattattttattacatacatgcatagatagcctgctctcaaataagtcggcaggaacaaagatagagagattcaacgatcttcaaatttcacatttgccagaaatatataacagaaaagaggggtatgggatatgagttaagttttgatcacattcaactacactatcccaaaccgttactcttaagactttgaacttcacttgtactctaggatcatgttgttctcaggagctaatccaacacaagccctcaggatgttttccagcatagctcgctgctttgacaacgcattcaccactggtgtacccggtggaaccagaggggccttggtcaggtaactaaggatggtcgcaactgggtggaatgagtggaattttccctcattttcagctttaaactcgattcgagtgctgagctcagcaagaagga

SEQ ID NO: 225112 - DNA, 483 bp, Glycine max
ccattaaactgttttcatattatgtcttcaaagcaaagaacacacaatgttctgaaatccataatcccacatcacatggtaaaacataagaacacatcagatataccacaatcacatacacaactcagattatatatgcccaacacataggcaggcacgtaagacttgacacttgagactccaaccgctcagaaaccatgaatcttgatatgctccttcttcacgataccagcctggaccaggaaggtagaaacattcttcctctgatcaccttgaagttgaataacctgtcctagttctgggtcctgaacaactgttccattgcaacagaactctttcttaacatctttaagtatcttgttatagctgaattcttttttcaatccctgaacggttgtcaggcttttccttccatttcgcttgtgtacgcgaatatgcacatactcctttgacccagcacccgagtcatcagcatttgcatca

SEQ ID NO: 225113 - DNA, 470 bp, Glycine max
accaaaccatcatttcctattttgtttttattagtttacaacgggtatacctgtcatcaaactatcaccaatacactgaaatcataatcataatgtaactgataacaccaccagcattgacaaaataaaatggttaaaaaaaagaataaaacaaaataaatcacacaaatcttgtaaaaggctttcttcccaccacccttgcgggcaaagacaccgttgaatccacactcacgtttcctatagattcaagtgactgaaatttatctgggactctttgatccttgtttgagaaccctttagaccacttgaaagacccaattccttgtgacaaagggaatgagagtctcctctttgaatcagtactagttggagttccaccaagcctgtctcttggattactactagcacgtactttggccctggcggaagggttggagccatgtagttaggcactgaaaatggtgggcagc

SEQ ID NO: 225114 - DNA, 635 bp, Glycine max
  unsure (1)..(635): unsure at all n locations
gccccgaccccaaaatcctccctttttaaaggggccctggggggganagtttannnntnnttttcttttntctccttcctcccctccccccccccccctccccccccccccccctcccctccctccctcccccccctcccctctcccccccttccccctccccccccctcttcccccctccctccctccccttccccctcctcctccccccccttccccccctcccctcccctccccccccccctcccccccccccctctcccctctctccccccttccccccccttcccccctcccccctcctcccccccctccccctcctccccccccccttttcccccccctccctatctcctccttcctctccccctccccccccccctccccctcctttccccctcttccctttccccccccccctctcccccctccccctcctcccccctccctccctccccccttcccctctctctcccctctctccccttccttcccttcccctccccctctcctccctccctcccccctctcaccccctcctctttccccctcctctctccctcttcccctcttcctctcctcccctccccctccctttcttctctcttcccccctcttctcctccttcctcctcc

SEQ ID NO: 225115 - DNA, 550 bp, Glycine max
cccaagctcactgcattcttgggttacaaggctggtatgactcacattgttagagaggtcgagaagccaggatcaaagcttcacaagaaggaaacatgtgagcctgttacaattattgagacccctccaatggttattgttggtgttgtgggttatgtgaaaactccccgtggtctccgaacattgaacactgtatgggctcagcacttgagtgaggaactgaaacgtaggttttataagaactggtgcaagtccaagaagaaggccttcaccaagtactcaaagcagtatgaaactgaggagggaaagaaaaacattgaggcacagctggagaaactgaagaagtatgctactgtggttcgtgttttggctcacacccagatcaggaaaatgaaagggttgaagcagaagaaagcccatatcatggaaattcaggttaatggtggtactattgcacagaaggtggactttgcatacagtttctttgagaaacaggttcctattgatgccgtgttccagaaggatgagatgattgacatcattggtgtga

SEQ ID NO: 225116 - DNA, 498 bp, Glycine max
tttcttttttttttttttatataaaatcaaacaatttggaattttttaaaagatcagtctcaacaaaagtttggccaacttaaggggggaaaaaactcactactcggggatccataatgtcaaaacagaaaacactacaatatgtttataagatatggtaaccgaatagaaatccagcatttccatccaattaacaaaattatgctttgaggcgtccaaagaacttctgcttctcctgtgtggtctggaagcgaccatgcccaaactttgaagaggtgtcgataaacttgagcttgatctcctccagagcaacacgagaagtctgcttaaggagggattggcgcaatgtaataacccttttcttgggaccaacgcagcatcccttgaccatgatataatcatccttaacaacaccatagtgagggaaaccacctattggggtaatgtctttctcggtcctatcaaactcagaagagcagagtgagattcatctccagc

SEQ ID NO: 225117 - DNA, 611 bp, Glycine max
cacgcacgcagatcctttattcctataatccttccttcgctctctccaaatttcgactctttcgatcagatccgcgacacccaccccaccaaaaccttgcgcaacccatccatgacgcttggctcaggaggatccagtgtcgttgttcctaggaacttcagattgctggaggagcttgaacgtggtgaaaaaggaattggagatggcacagttagctatggaatggatgatggtgatgacatttacatgcgctcttggactggcacgattattggcccccataatactgtacatgaaggaagaatttatcaactgaagctgttttgtgataaagactacccagaaaagccccctagtgttcggtttcattcacggatcaacatgacttgtgttaatcatgaaactggagtggtatcatttataattttccacatgcttttgttttataaatagttcttgataagtgcatgctaggacatataaactgtgctaataacagtgttttccattttaattttacaatggtgatgattcgagatgtctgttattagagatctaatcaagtctgattcggtttttgggagggaatctagatatattctttctactta

SEQ ID NO: 225118 - DNA, 607 bp, Glycine max
  unsure (1)..(607): unsure at all n locations
ttttgatggacttggggccacctataagcaaggaagtccagcttatttcttttcactccgtgtcaaaaggttattatggtgaatgtggacagcgaggtggatattttgaaatgaccaacattcctccagagacagttgatgagatctacaaggttgcatcaatatcacttagtccaaatgttccagcacaaatatttatgggagttatgctccatccacctcaaccgggagatatttcttatgacaaatttgttagggagagcaccggaatacttgaatcactgagaagaagagcaaggctaatgactgatggattcaacagttgcagaaatgtggtttgtaattttactgaaggtgccatgtattcattccctcaaatacgtttgccgccaagagctttagaggctgctaaacaggctgcaaaggttccagatgttttctactgcctcaaacttttggaagccactggcatatccactgttcctggttcaggatttggacagagagaagtgggtcttcatttgaggactactantttaccagacgaagaagacatgcccgctattattgatagtttcaaaagttcaatgatgatttcatgagcata

SEQ ID NO: 225119 - DNA, 494 bp, Glycine max
atctccaaggacaaatagtagaaagggaggttatgtttttcttacaaaagcacaagagtataatgcatcttttacgataattttcttacaaccttgaataacctctattgtcttcgtattgctccatgaattcatcattgaactttttgaaactatccataatagcgggcatgtcttcctcgtctggtaaaatagtagtcctcaaatggaagaccccttctctctgtccaaatcctgaaccaggaacagtggatatgccagtggcttccaaaagtttgaggcagtagaaaacatctggaacctttgcagcctgtttagcagcctctaaagctcttggcggcaaacgtatttgagggaatgaatacatggcaccttcagtaaaattacaaaccacatttctgcaactgttgaatccatcagtcattagccttgctcttcttctcagtgattcaagtatttcggtgctctccctaacaaatttgtcataagaaata

SEQ ID NO: 225120 - DNA, 546 bp, Glycine max
  unsure (1)..(546): unsure at all n locations
atcggccaactgttccaaggaagtttgataaggacaagcagttcacatcagaaagaatgggaaggcaactgtcatctttggggcttgatcccagtttggcaattaagagaatgcacagcagatctgtctctagaggtcggaaaagggatagatcgcctgaaacaagaagtgctgatggtatggatactgatggtgacacacctagcaaaaaacagcgtctgagtagatcactgtcacggtccaggtcagtgtcacgcccaccacatgaagttgtgcctggagaaggcttcaaggattctgctcaaaaggtcaaggcaatcaaacttgcaaagaaatctgtcaagaagagaaacaaggatgcccgtcgtggagaagctgatagagtcatacctaatctgaagcccaagcacttgttttctgggaagcgttccaatgganaaactgagagacgctaggacaggggatgctgtttatgcattttagaggacacctgttgcattttcagggctgtcaaaaaaattgtatttaatgaagtgtttgttgagt

SEQ ID NO: 225121 - DNA, 488 bp, Glycine max
gctgtgaagtcatcttcatcggacaagcgtgcaaggagctcacaacaaaagaatctgccctctcttgaaaatgatgttggtcaatccagtactagtagtgttataccatctgaacatttgttctgtgcatttgctgctgccaactgcccccttgaagataaatgttctcgcattcatggaaatcagtgcttatactgtagaaaattttgcttacatcctactgatcgaaaggaaaaagaaaaccatttgagaacttgtgagaaaaaggaaaaataccttcaggctttgaaagatagtcaagaagtagagtgcaatgtttgtttggaacgtgttctgtccaaacctaaaccagctgattgtaggtttggtctgcttcctgaatgtgaccatgctttctgtttatcctgtatccgcaattggcgtaatagtgccccaacctctggaatggacatcagtaatgctggcactgctaatacagtcagaacctg

SEQ ID NO: 225122 - DNA, 579 bp, Glycine max
  unsure (1)..(579): unsure at all n locations
taaaaactcaatatcaaattctttgtcccacaaaagatggggttcactcccacaagtactgcaacatgctttctcataatagcacctctggttgtgctatggtgttggaagctactaaagtgggtgtggctgaggccaaagagattggagagagcattaagggcacagggccttcaggggaatccctacagcctcttgattggggacactaaggaaatgtacacagtgctcatgcaagctgccagatctcaacaatctacaagttcttttctctctaaggataaggatgcagcaccacatatcacaacctttaaccatcacattgtcaacaaattcggcaagaattcatttttttgggaaggtaccaaaccaaaagtggtaatcactgaccctgagcaaatcaaagaagtcttcaacaagatccaagactatgagaaacccaagttgagtcctattgtcaagttgttgggctctggacttgcaaatttagaaggcgagaaatggcgtacacatcgaaagattattaaccctgctttccatttagaanaaactganggttatgtaccaatatttcttgat

SEQ ID NO: 225123 - DNA, 341 bp, Glycine max
aggaaataaaaatagcattcaatataataaagaggtttccctctataaatacaagagattagaacataagaaaggaatggagataattaggtgtgcaggatacaaattaatagatgacactacaacttatgtaagatgatatgagcaccaaattttggattaagagtgagcacagtgactggagcatgtgcataggtaggagaaagctcaaatgagaagcgttgttagagtaatgacaaaaccaacttcgcttttaataaagcaaaattttgggctaagcacactctaggaccccatccaaatgggaaaaacacaacttggccttttgatgcctttggtac

SEQ ID NO: 225124 - DNA, 401 bp, Glycine max
agatagtattaaaaattttgcgctgataacgtatcgaatttgtactccccctcccccttattatatttgaatatatggcaatctttcagccaacaagtgaagcataaatctggtagagctttgtttctataattaagagaccgaaagaaaggcttgctgtccagctacatctgaagatttgcaggcatgtattatattgcatatatctgtcgtctctaggattttctctgcatggtcaaaaatcaagggtccatactcgaaaaccattctcttgcacttatttgcatacttctccactgaattgcacaccttcagtaatgtctcaattatctctagcttagtgtcactctccttcaacttttccaatagagttgaaacagtatctttggcaaactcacagc

SEQ ID NO: 225125 - DNA, 538 bp, Glycine max
gtttctcttcctcccttggagaaaaagaagagccaccgctgcgacgccgttcgtgcatttttgaggtgccgctgtcatgtttgggcgtggtggaccaaggaggagtgataactccaaatattatgatattctcgggatttccaaaaatgccagtgaagatgaaatcaagaaggcctatagaaaggcggctatgaagaaccatccagataagggaggagatcctgaaaagtttaaggagttaggtcaagcatatgaagttttaagtgatcctgagaagaaagaactgtatgaccagtatggtgaagatgcccttaaagaagggatggggggaggaggctcgtttcataatccatttgatatatttgaatcattttttggaggagcaagctctggtggtggtggtagttcccgaggtagaagacagaagcatggtgaagatgtggtgcattctttaaaggtttccttggaggacgtttataatggcacaacaaagaaactatctctttctagaaacatattatgccccaaatgtaaaggg

SEQ ID NO: 225126 - DNA, 415 bp, Glycine max
ggggggatgaaactgggatatgcaatcgttattgcgcgccttgtaccaaaacatttaattttcatattttacaacaaaaaacagactttaaaaatctgccaagactaaataacgttaccagccaaaacctaaagggtaaatttatcacgcagttataactgcattatgcaaacaaaagataaaaaccatgccgaaattatagaacctttactaccataaattgcactactggtgagcacattgcactcgttgaccagatgggtcatcatcatcttcatcatatgcctcgcgatattgctggtgctgctttcggctcatctcctccttaaaggtgacatcatgcaaaggggtctcctcacaatcatccagctccatgtttgacacatgcttgctgctcttttgagggaacaccttt

SEQ ID NO: 225127 - DNA, 571 bp, Glycine max
agctggagccactggtagcactggcaaaagaatcgttgagcagttactggcaaagggttttgctgttaaggctggggttagagacatcgacaaggccaagacaaccctttcctctgccaacccatctcttcaaattgtgaaagctgatgtcacagagggttctgataagctagctgaggccattggtgacgattcagaagcagtagtatgtgccacaggctttcgcccggggtgggatttacttgctccctggaaggttgacaattttggcacagtaaaccttgttgaagcatgcaggaaacgcaatgttaacagattcattcttatcagttccattttagttaatggagctgctatgggacagttactgaatccagcttacatctttcttaatgtttttggactcaccttggtagcgaaactacaggcagagaaatatatcaggaaatctggtataaactatacaataataagaccaggcgggttgagacatgatcctcctactggaaatgttgttatggagccagaggacaccctttatgaggttccatatccagagatctagttgctg

SEQ ID NO: 225128 - DNA, 491 bp, Glycine max
  unsure (1)..(491): unsure at all n locations
gggaaacatattctatcagcatgtgaggactctaacgtatatctatggaatgttagtcaagaagagtctaatcctgtgaaagctaagaagattacatcttgtgagcgttttttctcaaatgcgtccatagcagtaacttggcatggtttgaaatcgcaaaatattgaaatccaacatcaactggatgccttggataaaagatcatctcaagttatacaactcagtcctcctgcttcattctccctgagtcaagagttcttcttggagtcttttccaaagggatctgcaacttggccagaggagaagcttcctgtttcaagccccaaggctaaaacatcagtgatgcgtaaatccgagtacaagttcttgaaatcttcttgcaagagtacctnctctgctcatgcatggggtatggtcattgtcactgctggctgggatggtagggataaatcattccacaattatgggctacctatactggcttgaaatga

SEQ ID NO: 225129 - DNA, 516 bp, Glycine max
gaagaagaaacttaatcgatcatcacttcacttcactaatacatcatggcagacgagacccagaacaagtatgagagctctgaggttgaggtccaggatcgtggtgtttttgactttctcggtaagaaaaaggatgaagaagacaagcctcatcctcaggaggaggtcatcgccaccgagtttcaaaaagtcactgtctcagaccaaggagagaacaagcacagcctcttagaaaagcttcaccgatctgacagcagctctagctcttcaagtgaggaggaaggagaagatggagagaaaaggaagaagaagaagaaggaaaagaaagggctgaaagagaagatcgaggagaaaatagagggtgatcatcatcatcacaaggatgaggacacaagtgtccctgttgagaaagttgaggatgttgaaacagcacatgctgaagaaaagaacgggttcctcgacaagattaaggagaagctaccagggcacacgatgacagaggaggccacagctact

SEQ ID NO: 225130 - DNA, 581 bp, Glycine max
acttcaaagaaggaaacctacacaaacttttttttttgtaaatggaagagataaatacacaataataaagtaaattaagtatgcatcaagaaacaccaaagaaacccacaaggctgtcatatgatgaaatgaaaacaaagcacaccacaatcatgcatctccaaccaacaaaaaagccttgtctcaatcttaaatatcaatgagcaccactctccttttccttttccttttcctcctctgtcttggagtgataaccaggaagcttctcttttatcttttctaatatacctttcttctccttggcctctccttcatgatgagcaccttcaccatgctccaatgatgcaacaggtggtggtggaggaggagtagtagctgtggcctcctctgtcttcttgtgccctggtagcttctccttaatcttgtcgaggaaccccttcttttcctcagcatgtgctgtttcaacaacctcaactttctcaacagggacacttgtgtcctcatccttgtgatgatgatgatcaccctctaatttctcctcgatcttctctttcagccctttctttccttctcttcttctt

SEQ ID NO: 225131 - DNA, 404 bp, Glycine max
cttggaattcggctcgagtcaaagaaggcgtcttcataaacgcctttcttctccgtttccgtttcctcgttcgaattcgctttttgatctgcgaaaatgagagagtgcatctcgatccacattggtcaggctggtatccaggtcggaaatgcttgctgggagctctactgcctcgagcacggcatcgggcccgatgggcaaatgccaagtgacaagacagttggcggtggtgatgatgctttcaatactttcttcagcgagactggtgctggaaagcacgtgccacgtgcagtgtttgtagatcttgagcccactgttattgatgaagtgagaaccggaacttaccgtcagcttttccacccagagcagctcatcagcggcaaagaagatgccgacaacaactt

SEQ ID NO: 225132 - DNA, 299 bp, Glycine max
ggtcgccctttttttttttttttttttttttttttttttttttttttttttttttttttttttttaaaacaacatagttcaatattgccattcagtttaggtccctaacaggagcagcgaagcataaaagcaatgcatccaaattaaaaccacattggtactggaacacatttgaacattaaacacaaccgaaaacagaccacaagaaccagaatttgaagtagattctagtagtcttaatccttttcctggcccttaccagacttagcacccactttttcataatccttttaaagggc

SEQ ID NO: 225133 - DNA, 576 bp, Glycine max
gaggaattcatttgaattattgttactctttttcttcgtttcatcatggacgctcagagagctctactcgacgaactcatgggtgcagcgcgcaacttgacggaggaagagaggaaggggtacaaggaagtgagttgggacgataaggaagtgtgtggattctacatggtgcgcttttgcccttacgatctctttgtcaacacgcgcagcgatctcggaccttgccccagaatacatgacccgaagttgaaagaaagttttgagaaatctccaagacatgatgcatatgtaccgaaatttgaagctgaactttctcaattttgtgagaaattggcgatggacttggatagaagagtaagacgtgggagagaacgtcttgctcaagaggtagagccaacaccaccaccaccactgacagccgaaaaatctgaacagctatctgtgctggaggagaatattaagaaccttctggaacaagttgaatctcttggtgaagcggtgaaagttgatgaagctgaagctcttatgagaaggccgagacacttaatgctgagaagacagccttaacgcaacctc

SEQ ID NO: 225134 - DNA, 359 bp, Glycine max
accagaaatttcttaattattttccattgcgtcaaaactgcaaccttgcataaccaaaaaataaattgggagcaaaaggagaaaagggtaaaataaaaccttttaagctttgatgagatgacctccaacctcttacagaagataaagttgtcatggaacacccttattattcatccacacctaacaagacatccgttgaagggactgactaacttcacaacaatgttaagcttgaggcttctcaaacttgagtggctccacaccttccccggtgaagccagggtcatcccttccaaagtgttcataagccgctgttttgaggaacctatggtctcccctcttaaggcccaacttaatgg

SEQ ID NO: 225135 - DNA, 420 bp, Glycine max
gcctttccttttttttttattttcatttccccccctctagtagtcaatggtgggaagctggtcgtgggtgtggctgattaagacaaccttgtaaacaaggccagcgattccaccaccgatgagaggcccggcccagtagatccagtggttggtccaggtccagctcacgacagcaggcccaaatgtcacagcggggttcatggccgctccagagaaggccccacccaacaaagggtgagcgccgcctctgaaccctattgagatgggggcttttcatactcgagtggctttacagctttccaggggaagtcaggagactgcgttcaccagagcgcatgacatcacgattttaagcaccaaggggttgccaacttcaactccagcggaaagtccgaatgctggaacagtgaaggcggtgac

SEQ ID NO: 225136 - DNA, 569 bp, Glycine max
ttttatctggaggcatgtgtatctgggagtatctttgaaggtcttcttcctggagatatcaatatttatgcaaccactgcttccaatgcagaagaaagtagttggggaacatattgccccggggagtatcctagtcctcccccagaatatacaacctgtttgggtgacttgtacagtgttgcttggatggaagacagtgacagacacaatttgcgaacagaaactctgcaccaacaatataaattggttaaagagaggactatatctggagattcatactatggctctcacgtgatgcagtatggtgatgtagggcttagcagagatgttctcttccattatttgggtacagatcctgctaatgataatatcacttttgtggatgaaaactccttatggtcaccttcaaaaccagtcaaccaacgtgatgctgatctcatccatttttgggataagttccgcaaagctcctgagggttctctcaggataattcagctcagaaacaagttttggaagcatgtctcacagaatgcatgttgacacaatgttaaactggatgggaagcttta

SEQ ID NO: 225137 - DNA, 427 bp, Glycine max
actaaaataaatacaagttgtcattaatattaaacagtaattttggcatcataaattcttccggaataattatacaaaagtgaccagggaaaacccgatctgccagttgcccactgaataaaaacacacatcatattactatgtgttgtcatacatgcattgtaatgagtggatattccaaagcaattggtccctttatccctccttaatccttatgccgtaaatggcaccatcccttgtaaattgtaattgcttcttcagaaatagaattatacaaaggtagttgcaatatctatttgccaaactataaatgtaaagacccttcttcccaatcctagtagtgtcccaattgtatttacaaaggtgggacaagatatgtttatacaagtacaaccatgttacataatgtaacaaatatcatactttg

SEQ ID NO: 225138 - DNA, 542 bp, Glycine max
gattgtttgttgttgtaactcgttcttcttcttttgttgttctgtgtttgtgtttgttttttctctcacctgaaaatgtcttgctgcggtggtaactgtggttgcggaagctcctgcaagtgcggcaacggctgcggaggctgcaagatgtacccagacttgagctacactgagtcaaccaccaccgagaccttggtcatgggagtggcacctgttaaggctcaatttgagggtgctgaaatgggtgtgcccgctgagaacgatggctgcaaatgtggaccaaactgctcctgcaacccctgcacttgcaagtgaggtgttgggagagcaagcttcaagcagagatagcccttaattaggaataatgataaactattaatgtgtagctaaaaacttatgtattatgtctgtgatggttttcgtgcactctggtgttttgtgttaaacaaacatccttagaataaagtggtcatgtcttgcctatcagcaagttcaagtgtcttggactcgtgactggtgtgttaagctcatggttgcttctt

SEQ ID NO: 225139 - DNA, 373 bp, Glycine max
cttccagaaatagtatttaatattataagcagagattcataattcagattagccgaactttatacagaagcgaccaattaccaaacattaaaaaaaaaaaaaagaagcaaccatgagcttaacacacccatcacaagtccaaaacacttgaacttgctgaaaggcaagacatgaccactttattctaaggatgtttgtttaacacaaaacaccagagggcacgaaaaccatcacagacataatacataagtttttagctacacattaatagtttatcattattcctaattaagggctatctctgcttgaagcttgctctcccaacacctcacttgcaagtgcaggggttgcaggagcaatttggtccacattt

SEQ ID NO: 225140 - DNA, 538 bp, Glycine max
  unsure (1)..(538): unsure at all n locations
tggaggcaaagcacaatatgtgaaatggggcaatgctgctggccttaacttgacctctgatgatgacttcttctcacatccaactcttagaagctactacaaggcccatgttaagactgtgctcaatagagttaacacattcacaaacatcacttataaggaagatccaacaattttcgcttgggagttgatgaatgagcctcgttgcacctcagatcccacgggtgacaagttacaggattggatacaagaaatggcattccatgtgaagaaaattgatccaaagcacctagtggaggttggagtagaaggattttatggcccatcaacacctcagagaactcagttcaatcccaacacatatgctacacaggttggaactgattttatcagaaaccacctggttcttggagtggacttcgcttctgttcacatatatgctgactcttggatntcacaacaaattgctgatacacatatcccatttataaaatcatggatggaagcccacatagaggatgctgaaaagtatcttgga

SEQ ID NO: 225141 - DNA, 414 bp, Glycine max
gctctttggcgcgtttaatattgcggattttataccctatctcgggtgcgtggatccacaaggtttgaactcgagactcgctagggcacgtggcgcgctcgatagcttcattgataagatcatcgatgagcacgtgcataagatgaagaatgataagagcagtgaaattgttgatggagaaacggacatggtggatgagttgctggcgttctacagcgaggaggcgaagttgaacaatgaatcggacgatttgcagaactctatcagactcactaaggataacatcaaggctatcattatggacgtgatgttcggaggcacggaaacggtagcgtcagcgatcgagtgggccatggcggagctcatgagaagcccagaagatcaaaagcgggtccaacaagagctggcggatgt

SEQ ID NO: 225142 - DNA, 485 bp, Glycine max
cttccaaatactcccacattcttattgtgtagctgccttttttccctttatattattttaatatgattatgtataattgagggataaaaagaaaatacaaaaaaaaggaagaaaaaagatccaaattgttgtttttttaaaagagagggcacaccacgcgcttggttggcacagcaatgagtcgcgtggatcttggagcggtgagtccgaacacgtcacccatgtccatctcacttggcttcatcccatctggcaattcccacgtgaagcagtgaaggaggtgcgccaccgccaactcgagcgcgtagagccccaacaccatcccggggcaggatctgcgacccgacccgaatggaatgaactcgaagttgctccctttgaaatcgggcacgcccggtttaagaaaccgggcgggcttgaagctctcgggttcctcccagctgttcttgtccctcccaatggcccacgcgttgatcatgacacgc

SEQ ID NO: 225143 - DNA, 552 bp, Glycine max
gaataagaaacttaatcgattttcacttcacttcactaatacatcatggcagacgagacccagaacaggtatgagagctctgatgttgaggtccatgatcgtggtgtttttgactatctcggaaagaaaaaggattaatattacaagcctcattctcaggaggaggtcatcgtcaccgagtttcaaaaagtcactggctcagaccaaggagagaacaagcacagtctcttagaaaagcttcaccgatctgacagcagttctagctcttcaagtgaggaggaaggagaatatggatagaaaaggaagaagaagatgatggaaaagaacgggctgtaagagaagatcgaggagaaaatatatggtgatcatcatcatcacaaggatgaggacacaagtgaccctgttgagaaagttgaggtatgtgaaacagtacatgctgaagaatagaatgggttcctcgacaagattaatgagatgcttcctggcacaagagacagaggaagccacagctactactgctcttcaccatcacctgatgcatgattggagcat

SEQ ID NO: 225144 - DNA, 492 bp, Glycine max
actacattgaaggaaacctacacaaacttttttttttgtggatggaatagataccttcacattaataaagtaaattaactatgcatcaagaaacaccattgaaacccacaaggctgtcatatgatgaaatgataacagagcacaccacattcatgcatatccaaccaacaaataagccttgtctcaatcttaaatatgaatgagcaccactctcctttacctttaccttttcctcctctgacttggagtgataaccaggaagcttctcttgtatcttttctaatatacctttcttctccttggactctccttcatgatgagcacctttaccatgctacaatgatgcatcaggtggtggtggaggaggagtagtagctgtgggctactctagactcttgtgccctggatgcttatgcttaatcttgtcgaggaaccaattcttttcctcagaatgtgctggatcaacaaccttatacgtactaacatggacac

SEQ ID NO: 225145 - DNA, 448 bp, Glycine max
gcaaattgttagctgatcaatcctttgtatcttctatccttgcatcgcttcctggggttgacccaaatgacccttctgtcaaggatttgctggcgtccatgcaaaatcagtctgagcctcaacagaagaatgacgacaagccatcaaacgaggaggagaagaagtaatctttaagagccacttttccctgtatgatttttattttgttggtagcattcttcgcggctgttgctaatcggggaactattccaatatgtctctctgcagtttaattggaacccaatgcatgtctctcgattgaatattggatgatttttaacttaaaaaatgctcttgattgtcatgccttattcttggttagtgcttatcatctgacgagggcttttaaatgactgttttaatacctaagaaagtttcaactattaaaatgtatttcaatctcatctcc

SEQ ID NO: 225146 - DNA, 448 bp, Glycine max
ggagatgagattgaaatacattttaatagttgaaactttcttaggtattaaaacagtcatttaaaagccctcgtcagatgataagcactaaccaagaataaggcatgacaatcaagagcattttttaagttaaaaatcatccaatattcaatcgagagacatgcattgggttccaattaaactgcagagagacatattggaatagttccccgattagcaacagccgcgaagaatgctaccaacaaaataaaaatcatacagggaaaagtggctcttaaagattacttcttctcctcctcgtttgatggcttgtcgtcattcttctgttgaggctcagactgattttgcatggacgccagcaaatccttgacagaagggtcatttgggtcaaccccaggaagcgatgcaaggatagaagatacaaaggattgatcagctaacaatttgc

SEQ ID NO: 225147 - DNA, 470 bp, Glycine max
ggtaccaaccagataatggtaggttatcttatttggccccactcacggtaggccagcgtatggggggcaaaaactttctcccaggggttactaacctttatggacgcaatcttgctgctttgatttttaattgatgtgcttgcaactaaatatggcagtgggctcctctttcctaagtggtgctttggggcggccaaagaagttttgctcctactgtgtggtcagtaagcgaccatgcccaaactttgaagaggtgtcgattaacttgagcttgatctcctccacagcaccacgcgaaggctgcctttggagggatcggcgcaatgtaatcaccctattcttgggaccaacgcgaaatcctttgaccttgagataatcatccttaacacaccatagtgagggaaaccacctattggggaaatgtctctctcggtcctatcaaactcagtaagagcagagtgagattcatc

SEQ ID NO: 225148 - DNA, 453 bp, Glycine max
accaaacagtttgtacttatttaacagatcaggctccacaaaagtttggccaacttaaggggggaaaaaactcactactaggggatccataatgtcaaaacagaaaacactccgatatgtttataacacattgcaaccgcatagaaatccggcatttccatccaattaacaaaattatgctttgaggcgtccaaagaacttttgcttctactgagtggtctggaagcgaccctgcccaaactttgaagaggtgtcgattaacttgagcttgatcttctccagagcaacacgagaagtctgcttaaggagggatcggcgcaatggaataacccttttcttggaaccaacgcaccatcccttgaccttgagataatcatccttaacaacaccatagtgagggaaaccacctattggggtaacgtctttctcggtgctatcaaactcagtaagagc

SEQ ID NO: 225149 - DNA, 569 bp, Glycine max
atcttttccaatctcccttcgccgatccttcgcgcgttccgccaccacctccgccgttctcagctccccgcttccggaaaattatgtatagtgttttcttggctgcttcatagtcctccctcccttgccaccggtgaatatttgattggcaatcctgtccttattagtcaagttttagaatacaaagaagcttcaatggccaagaaaccaggaccaagatccagtaaattgtcagtgtacctttacattcctaatataattggatacatccgggttcttttaaactgttttgccttctcccaatgtttatcaaacaaaatcttattctctattctgtatttgttaagctttgtatgtgatgctgttgatggctggtgtgcccgcaaatttaatcaagtgtcaacctttggagctgtgctggacatggtaacagacagaattagcactgcttgtctacttgtagtcctttcccaactgtacaagcctggccttagcttcttgtcattgctcgctttagatattgccagccactggctgcaaatgtacagcacattcttgacgggaaagac

SEQ ID NO: 225150 - DNA, 596 bp, Glycine max
  unsure (1)..(596): unsure at all n locations
ggcatgacatcgtgtcaattcatcaaacgcatgcaagtacaagcagtaagtacacgatcagccaatcctataaaaggatttgcaatttcaaaactgaacaaatctttcttagcgtcgcagtgtgattaacaatggctaaacaaaaaagaactgaaccttgcgctacagaatctttttgctatatagaaaggtagattcttcagttcagtatgttatttttctttcattacaaattatagaaaactgaacaattcaagcccaattgccatctgggataattcatattaatctttgagcgcacatggtactgaaaaacaaagacaaggggatcctggtcgtggaagaaacatcagttcttgtgttctttttcgatgtcataaagcacacacgcatctgctgctgtcttcatctggataacatttataatttgcttgactgcccatccaaataaactagtacccattagaagagaaaggaatgatatcttttgtaaattacttgatataacgttcaccagtttctctgttngattcttcgcangataaaacaggattaagtaaagaccttacatgagacacagcagtaagccataaaca

SEQ ID NO: 225151 - DNA, 552 bp, Glycine max
cacacacacactctccccgaggtttgagagggtactggcatccaaaaaatgggttctaaaactaatgcttcgggccatagagcacgaaggccgctgtcaatatttgctgtgcttggtctttgctgtttcttttatcttttgggagcatggcaaagaagtggatctgggaagggagataaccttgcattgaaagttaataacctgatgactgactgcactgttttacccaatttgagttttgaatctcatcacaatgatgtagaaattgtcgaacctgctgagccaaaagctaaagagttcaagccgtgtgatgtgaaatatactgattatacaccttgccaagagcaagaccgagcaatgacatttcccatagagaatatgatctatagagaaaggcattgttccgctgaaaaggagaaattgcgctgcctcattccagccctcgaagggtacacaacttctttttcgtggcctaaaagccgtgattatgcctactatgctaatgttccttacaagagcctgacagtggagaatgctgttcaaaactgggtg

SEQ ID NO: 225152 - DNA, 555 bp, Glycine max
  unsure (1)..(555): unsure at all n locations
ctccaaatagcaatatcacccttttcatacttcttttcccaacaaagactttcagctaactcctcaagttttgtttgttctgccttcagatcttccttggatcgcttccatgtttggtagtatgttttccaattaattggggggccagacaaaatccagtatccaccaggccttaagactcggtcaacttccattagatacatgccctcatttgaggtccatggtattagacatcgagagcactgggccatatcgaaggctcttgatgggtatggaaggtggatggtgccaaggacaccaataacagcaggcacccctcgttctagagcaaactgaacttgtgcttcatggttgtcctttggagcgaaggacatagccagcacatttctctttagcaagtaggctccccagcttgcaaccccacaaccagtgtccagtgctgttctgacagaaccatcagcaattggaataactgacgcangttcatcaatatatgcatctgctccgtgagggaacatggtccctccacctggaaaattaaacacatttccctgg

SEQ ID NO: 225153 - DNA, 478 bp, Glycine max
ctagttctaggatcgtgcgaccacctacgaaaggcgctgttgtgcagagaccccgaacccgtgctctgaccgccgtgcatgatgccatgctgtaggatgtggtgtgtcctgcgcagatagtgggcacacggggcacatatataatagagggctcacaaatattgagagtgttcttgtgccccaaggagcgcaccaccactgtgtacacgctggagacactttctggggagtatatagagcgcactgtgaaagatgtggtatatgagtgtccactctcagaagcctgagatgctgctcggggtacagtggtatatagtgtttgggagatatttctgtgagaaatacacatagtgtgaaacactatccacaatattgacacctggagtattatatgatgcgcctttacctcggatatatatagtggtcctgtgttaatatagaacgctggctttatatgtggcgcaaaaaaaaaaaaaca

SEQ ID NO: 225154 - DNA, 445 bp, Glycine max
ggggttgggtgttttttttttttttttttcctttatttatatattattgtaaatattaaaacaaaaaaaaaagaaaaccaaagggaaaaaaaaaaaaaaagaaaaaagggggggaaaaaaagaggccccagaaaaaaaaaaaacaaaaaaaaaaaaaaaaaaagggggggaaaaaaaaaaaaaaaaaaaacaaaaaaaaaaaagggggggggggggaaaaaaaaaaaagaaaaaaaaaaaaaaaaaaaaacaaaaaaaaaaaaaccaaaaaaaacacaaaaaaaaaagggggaaaaagaggggggcccaaaaaaaaaaaaccaaagggagggggggggaaaaaacccgaaaaaaaagccagcggggcacaaggaggggggagcccccacgggggggaaaaaaaaaaccttttagggggggacaaacaaaatttaagggcgccggg

SEQ ID NO: 225155 - DNA, 541 bp, Glycine max
ggacaaatagtaaaaagggaggttatgttttggggacaaaagcacacgagtataatgcatcttttacgaaaattttcttacaaccttgaataacctctattgacttcgcattgctccatgaattcatcattgaactttttgaaactatccataatagcgggcatgtcttcctcgtctggtaaaatagaagtcctcaaatggaagaccccttctctctgtccaaatcctgaaccaggaacagtggatatgccagtggcttccaaaagtttgaggcagtagaaaacatctggaacctttgcagcctgtttagcagcctctaaagctcttggcggccaacgcttttgagggaatgaatacatggcaccttcagtgaaattacaaaccacattttctgcaactgttgaatccatcagtcattagccttgctcttcttctcagtgattcaagtatttcggagctctccctaacaaatttgttataaaaaatatctcccggttgaggtggatggagcataactcccataaatattgtgctggaacat

SEQ ID NO: 225156 - DNA, 564 bp, Glycine max
ctcacggcaatgtgatagaaacaaggcatgaaggaattggtgctcccaagattgaaaagcccttgcaaaggcacggaggcaggcttgagcacaatgagacttattgtggttcctgttatggtgctgaagagtcagatgatgattgttgtaattcctgtgaggatgttcgtgaagcataccgtaagaaaggttgggcactttcaaatcctgatttaattgaccagtgcaaaagagaaggattcttacaaagaatcaaggatgaagaaggtgaaggatgcaatgtgtatggtttcttggaagtaaataaggttgcagggaactttcattttgctcctgggaaaagctttcagcaatctggtgtacatgtacatgacctactggcttttcaaaaggattcttttaatttaagtcaccacatcaacagattagctttcggagagtatttccctggtgttgttaatcctcttgacaacgtgcataggacacaagaaacaccaagtggtatgtatcagtattttattaaaggtgtgcctacagtatacactgacgtgagtgggcatacta

SEQ ID NO: 225157 - DNA, 523 bp, Glycine max
atatctcattttagattatcattgaagttatatttccctaatggattcctcccttttgatgcttcagcaagggaaagcccctctactttccataaagcaggtaacattcacaacatcagagctgtcagaaaagatatgaatcaaggcaaagtggcatttgttgcacatgatatcttagcatttcaaccttggtctaagggcaaaatccttttgttgaaaccgaagaactcagaaccccaaggggaattttaatcagtagttaaccttgaatagatttgtctctggagagccattccctcgaaattactcaaatcccatcagttaaatttaccaagctccatcttcttcttgatagccctttgaccgtgatagatgaatgaatctagtattccagaaacggtgaaaatacctccaactatggcacaaacattagtaagaaaatgtaagaatgagacattttcttctgtaaaagtaaccttaattggagagaggtcatagaataagaaaaccccgggaagggact

SEQ ID NO: 225158 - DNA, 650 bp, Glycine max
  unsure (1)..(650): unsure at all n locations
tgtaactcaaaatggcagataattccaacggcaatggcgtctacgtcgatgaagaagaagaagaagaagaaataaagttgaagcagaaaaagcaaagactgaaagagaccttgccggaggtccttaaccgcatcgcctccgccattctcttccaggaacccgccgatgccggatccctacttcgccggatcaaggtctccgtcgccgacaacgctactctcctccccgaagcttccagaaactccgcccgcgacgttctcatctggactcgccgcggcactcccttccgcgcgctcttcgtcatctccgttgggacggtcacttttgttgctttgacagggctgcttgtgtttatgcttttctttctagctgcgaccgtaaatgccattgtcatatcgatactgatgtctttggcagctgcaggaggattcctggctcttttctttgcttttgttacagctatatacattggagcattatcaattgccatatttgctatttcagttaccacattttgggcaattgtggctattctgatgatcacaggctgggaaggattcatttacactgtgtggctggtaactagaancagctttggatttgctaaacactctctggacgtgaccggttttgaattcatctacactact

SEQ ID NO: 225159 - DNA, 457 bp, Glycine max
ggcgttggcctcttctgccgcaaccgtttttcctcggaacctggcattcaccagactctccgtctctcactctcacactcttctgccgcgctgcctgtctttcccaactcccaagacatcagaccctcgcaaccgcgtcgcagtctgtctccaaaccccacgcgctcaatccgccgtgttcgcttctccctccgccttcttacacggtctctgctacgacgagggcgacaatatcgacaccgaccagatcattcccgccgagtgcctcaccctcgacccttccaagcccgacgagtacgagaagctcggctcctacgccgtcatcggactacccgccacctacgccacgcgttacatcgaacccggcgagatcaaaaccaagtgcgccatcgtgatcggcggtgccaacttcggatgcggctccttccgcgagcacgcacccgtcgcgctgggcgcc

SEQ ID NO: 225160 - DNA, 540 bp, Glycine max
cgaatccctctctctctttctctttctctctcatccagatcttgcaaaaaaaaaaaaacacaatggcagcgagcgctcccactccacgcgaagagttcgtgtacatggcgaagctggcggagcaggccgagcgctacgaggagatggtggagttcatggagaaggtctccgcctccgccgagagcgaggagctgaccgtggaggagcgcaacctcctctccgtcgcctacaagaacgtaatcggcgctcgccgcgcctcctggcgcatcatctcctccattgagcagaaggaggagagccgcggcaacgaggaccacgtcgccgtcatccgtgactaccgctccaagatcgaggccgagctctccaacatctgcgacggaatcctcaagctcctcgacacgcgcctcgtcccctccgccgactacggcgactccaaggtcttctacctcaagatgaagggagactaccacaggtacctcgctgagttcaagaccggcgccgaccgcatggaagctcgcgagagcacgctctacgactaca

SEQ ID NO: 225161 - DNA, 525 bp, Glycine max
gctaaaacaattagcaataccaagtttgctagagaacaatatcttaatattctaaacagcattataatggaaatttcagtgtcattatgaaaataggcagttcagaaacgcgtactaatggaaggacaaactaaaatagcccagtacatccacaattcataacgaagaacatgaatgcccaaaatctcagtaacaccgagattagcattcaacaccttctccctttgaaaacattacacaagggaagttcaatcactaattagaagtatggtatgtttaattttgttccccgtcacctttgggtgcggcttctttaatttcatctgcaccatcatcctgcatgtcagaggtccagagggtaaggttatcacgaagaagttgcatgatcaaagtgctatccttgtatgattcctctcccaacgtatccaattcagcaatagcctcatcaaaagcctgttttgcaaggctgcatgcacgatcaggagagttaagaatctcatagtaaaacacagagaaattcagagc

SEQ ID NO: 225162 - DNA, 533 bp, Glycine max
  unsure (1)..(533): unsure at all n locations
tgagtgctaatgttggacatgatcctttgtactctcttgatcggcttcgagaggaaaacgatgccattgtcttggctgtaggagctacaaaacctagggatcttcctgtacctggtcgggagctttcaggagttcattttgcaatggagtttctccatgcaaacactaaaagcttgcttgatagcaatctcgaggatggtaactacatttctgccaagggcaagaaagttgtggtcattggtgggggtgacactggcacagattgcataggaacgtccattcgtcatggttgtagtagcgttgtaaatcttgaactccttcctcagccaccaccaactagggctcctggcaacccatggcctcagtggcctcgcatattccgtgtagattacggtcaccaagaagctgcagccaaatttggcaaagatcctagatcgtatgaggtattaactaagaggtttatcggagatgaaaatggagttttgaaaggacttgangtgattcgtgtttgctgggagaaggatgcaaccgac

SEQ ID NO: 225163 - DNA, 556 bp, Glycine max
agaatcgaaacgatgtcacttctaaataataattatcaaactgtacacttcattacatataatcgtcatcaccattaccaactaaaagctaaccttcccaacaataaaagcccgaataaaacaatcattgaacaactgaacactcgaatctgcaacaactttataccctgaaaccacaccaaacaccgaaacaacctcttgatttccctacactacacttgtctttatttcttcttatttttcccgtttaaagtaaaccaatgaatctcctgctcaaacttggaacaattttattctgtgcaattccttttggaactttatgagtatgaaaaatcagaggagccacctataagtcatcaccgtgtgtttgctgcttccatgctgcttcttgtagaggccctgctgtctcttgacaaggccatcctgattccggtggtctttgtcttctttgacgaggtagttgtcgacctgtgctgctgctagtcgtccctctgaaatcgcccacaccaccagggactgaccacggcgacaatcaccggctgcaaacacccctttg

SEQ ID NO: 225164 - DNA, 480 bp, Glycine max
tgaatctcagaattctctaaaagagatctttttctgctctttgaagaaagaagggtctttgcttgattttggagatgtctctgctctcagatctcatcaaccttaacctctccgataccaccgagaaggtgatcgcagagtacatatggatcggtggatcaggaatggacctgaggagcaaagcaaggactctcccaggaccagttagcgacccttcagagcttcccaagtggaactatgatggttccagcacaggtcaagctcctggtgaagacagtgaagtgattttatacccacaagccattttcagggatccattcagaaagggtaacaatatcttggttatctgtgatgcctacactcctgctggagaacctattcccactaacaagaggcacgctgctgccaaagttttcagccatcctgatgatgatgctgaagtgccatggtacggtattgaacaagaattacacctgttgc

SEQ ID NO: 225165 - DNA, 516 bp, Glycine max
acatgacaatttcatatattattattatacttcacaatcagcatttctttgttcaagactgataataaccattaaattattgtcattgtaacaatcggaaaacgagggaaaggaatagaagaaaacaatgaacaacccttgccagttagttgcaccaaccaacaaggcaccaaccatagtaccaatcaaaaggtaaaaagagagagagaccaaatcctactaagaaaagcataactgttcctttccatccaaagggagaaaacatgcaggttttgctcatggcttccacagaatggttgtgtctgcaatcatggaagtaaccacgtatgggtccatgttggaagctggccttctgtcctcaaaatatcccttccctgctttctctgtgtctctcccaaccctaacagaagctccacggtttgcaactccccataagaaggtgttgatgtcagcggtttcgtggcgtcctgtcaaacgacgttcgttgccttctccataagcagcaatgtgctcctt

SEQ ID NO: 225166 - DNA, 511 bp, Glycine max
ggttccttgggccccttgcgataatgagaatttggagcttctgtttgttttatgtcatggctgagttgtgggggagtgtggttatttccgtactcttttgggggtttgctaatcagataactactattgaagaagcaaaacgattctacccactgttcggactcggggccaatgtagcccttattttctctggccggacagtcaaatacttttctaatctgaggcagaatttatgtcctggagttgatggttgggccatctctctgaaagcaatgatgagcatagttgtgggtatggggtttgcaatctgtttcctgtactggtgggtgaacaattatgttcctcttcctactcgtagcaagaagaagaaggagaagcccaaaatgggaacaatggagagcttgaagttcttggtgtcttcaaagtacatcagagatcttgccactttagtggttgcttatggaatcagcatcaatcttggtgaggttacctgtaagtctaagctcaaagc

SEQ ID NO: 225167 - DNA, 560 bp, Glycine max
gatgggaacagctgaacttggattcaaacagccattaagcaaagaggaacaagtaatgaagaagaaagaacgtctggctgctattggtgaggatttattagccattgcagcagaccagccctttcggtttcctgctacattcacatttgttgttagagccttctcagtattggatggcattggaaagggccttgatcctcgttttgatattactgagattgccaaaccttatgctctggagttgctaagattccgtgaggcaggagttgaagttatcctaaaggacttgagaaagagatgggacagacaatctcaagcattttacaatttatttagacaggctgatagggttgaaaagcttgctgaaatcattgaaagattggagcaaggtgatttaaagctccgagtacgaactttggaatctgagagggcattccagcgtattgccactgtccagcggacaataggaaatgcaatagctgctgggagcctaataaatcttgcaacaattctgtttcttaactacgatagggtgcctgccactatagcatatgtcttct

SEQ ID NO: 225168 - DNA, 444 bp, Glycine max
ctgattcgcttgcttatacttccaaatctcgagccatatttgcatcttcttgagccagaaatgcaacctgagaagcaaaaaaatgaaatgaagaggcatgaagcttggcaagtttatggggctttgttgggtgcagcaggacaatgcgtgcatgaaaaggtcaaaatgtttagcaatttgttctctcctccaactcgggttacttcaagaggcagtggaaaagctgtgattgcgatgtcaggcaaacgaaaagccagcactgacaatctgatgcagcagcagcagcagctgcctccaatgaagaaacttgcaacggatggccctgggggtgtggtagcaatgaactccatgttagttgacatgcaaggttcaacaggtggatattcctccatgatgggggtttcttcaatgtcaatggctcgtcaaatatccatcgacaacgtg

SEQ ID NO: 225169 - DNA, 567 bp, Glycine max
gctcggcaaccttattgggacctcaacttctacattaatctttccaccagacatcagcttccatgattttctgcactctattctgaggtgaccaattctgttcttcttttctcgcataataaagtaatcaataagcacataaaccttcgaggacatggcatcagccttgtccacgaccagtgtgctttgctggaggaatcctcagcacatgcatattatctcaccctcttcacagacacttcaaaatggaactctaagaactgtagctgcttcagcctcaaaagatatcagcatagaaagtgacaagtgttcctctttgttggtgaacagaagaacaattttggcttctggggtttccttgttgtctttcccgggtgagagtttggctgtggtgaaacaaggccttctagcagggagaattcctggcctgtccgagccagatgaacaaggttggaggacctatcgcaggccggatgagaagtcaggaggacatggtgttggatggagtcctattattccatacagcttcagagtgcctgaagaatgggaagaggtccagtatcaata

SEQ ID NO: 225170 - DNA, 497 bp, Glycine max
cactataaaatttcatagcatttgatgtgtacttagaacgtagaacagcaactttgaaatataacacgactggtttggtatattgaaggtacaaagattttgcctatatgatctcttgattcacataaatcccagtcagacaaagtagtgggaaacaacctctttgttgtactacactacaaatatagaaagctgcatttcaattagctctgggttcacagaagattttagttatacaacccggaaagattcagctatcttcttcaaatcattgtagtgtctcttccactgaagaccgctgcctgttactccaaacaaatataagcggttgccagctgcagtggcagtaatgaaaatatggggaggctctagctcaaactggtagtaagttcttccttcatgttctgctgcactaacgctcagaaccttcccttctacattttccccaatcatttctggaccaaatgcattgatcactttctctggggtccaatttt

SEQ ID NO: 225171 - DNA, 345 bp, Glycine max
cctctggctactaagacgagacaaatcaccaggttgtctcttgcctgcccgaggattcatcagcagttcgcatggccgacctatgtatggaacccccggacctacgcttatttccaactacccgcaacattaccatgttcactacccccttcctaatactggggggcctaggactacaccataaacccttgaaccgaatttctagcttacgaccacgagcttgcgacggcataactctcactttgtagtacctcaaggataactgactggccgccctctatacagcactataaactgtgaaaaccctgtggttacccaacttcaattacacgtactagattccgc

SEQ ID NO: 225172 - DNA, 477 bp, Glycine max
ctttttcttctctctcaacaacttcaccttcttcctcctcgatcatgtctcacttcaagggcaagtaccatgatgagcttatcgccaatgctgcgtacattggcactcctggaaagggtattcttgctgctgatgagtcaacagggacaattggcaagcgtttggccagcatcagtgtagagaacattgaatccaacaggcgagctcttagggagctgcttttcactgctcctggtgttcttcaatatctcagtggtgtcatcctctttgaggaaaccctctaccagagcacagctgcaggcaagccctttgtgaatgtcttgaaagaagctggtgtgcttcctggcatcaaggttgacaagggcacagtcgagcttgctggaactaatggagaaaccaccactcagggtctagatggccttggtcagcgttgtgccaagtactacgaagctggtgcacgttttgccaaatggcgtg

SEQ ID NO: 225173 - DNA, 373 bp, Glycine max
cacagcacggtggtgtctttcaagaaaacaaagttacattcccttccctgttgcacaggtttgaccaaatacactgaattactaaaattgacataaaaggaacactaggaaaacaaaaagcaaaattccaaacgattattctgggaagagtcaaaccacaataatacttatcaacaagaaattcggttgttgtacccataataccgattcctactcgcactagtctcttcaaacaacaccaacttggattgatcagtaactggattctgaaacatggaggctctatgaggcaccataagcaagctgtgagttacccttgtaggttccaataattgccactgagttactcgaggctatgactacaagggctacc

SEQ ID NO: 225174 - DNA, 492 bp, Glycine max
aagcaattcatttgactcttactttattatttgatttgccggcaccctcttcttcacgggagctgaaaaaaaatgggagaaagtgctttgttctctgtgtagagtttggcagagaaagataacaacattttgtagtcctttataatgccagttccacttgccccctacccaacaccggcagctccttatacaccaccagctaatggtgtacagagtcaacttgtctgttctgggtgtagaaaccttctagtgtttccagttggagccaccttcgtgtgctgagctgtttgcaatgctgtcacagcagtgccacctactggcacagaaatggtccagttagtatgtggaggttgccatactttactcatgtacatccggagcgcgacaagtgtgcaatgttcatgttgtcacactgtcaatctagctttggaagcaaatcaggtggcacatgttaactgtgggaactgcaggatgctactggcgtaccaatat

SEQ ID NO: 225175 - DNA, 474 bp, Glycine max
  unsure (1)..(474): unsure at all n locations
gtaagcaatatttgtggcataataaaattgacaataggtacatgatatcacatgagaatatatagcatataaaggaagcacgggggatgatgatgatgaagatagagttgtgtgctcacaaatcatagggctgcttgccagtgaacttgacctcaataggactaacattcttaccaatagacctgaagttttgacccaccccttggcgtccggcgttgaccttctcagggtaaacaccatccttagggtgcaaatactgaacctccccattagggaagaccctgtagaactggtacttgatcttgtacttggacctgagcctagtcccaagagccaagcactgctccttcctggccaacttgagaaggttaggaccctccctcatgatagcggcgccgccagtgggcatttcaaagatctgttctttgggtgagtcccacgtaatgacatanaactcctncacctgtgccttgc

SEQ ID NO: 225176 - DNA, 580 bp, Glycine max
  unsure (1)..(580): unsure at all n locations
aggaattccgacggggcgattctccggtcatcggccggcgagacaaggaaatcggcgtcgccggagaaggaggaccggtactacacgacgcggggttcggcggaagagaacggcaaggtcaccggcggcgaaggcatcaacggcgaagaacgagccctagtttggcccaagctctacatcactctctcaagcaaggagaaagaggaagattttctggccatgaagggttgcaagcttcctcagcgacccaaaaagagggccaaaatcattcaaagaagcttacttttggtgagtcccggggcgtggttgactgatatgtgccaagagagatatgaagttagggagaagaaaagtaacaagaagagaccaagaaggttgaaggctatgggaagcatggaaagtgattctgaatgaatgatatgatggaaagaaagaataaaaaatcaattgagcggatccacaagaaggtggaagaaagaagcccttttaagaagcatgaagaagaaatgtttaggagatggtgatgatgatgatgtngttngaatngatgaatggtgaagatatgatgatcangtttttt

SEQ ID NO: 225177 - DNA, 499 bp, Glycine max
gcttaattaattgaaatggattggatcggatcgaatcttactcgtttacaaaaaaacattgagggggcaacatacatgccacacaaattttaaaaaaacttgaatcatcattatcttcaccattcatcaattcaaacaacatcatcatcatcaccatttccaaaacatttcttcttcatgcttcttaaaagggcttccttcttcccccttcttgtggatccgctcaattgatttttttttctttctttccatcatatcattcattcagaatcactttccatgcttcccatagccttcaaccctcttggtctcttcttggtacttttcttctccctaacttcatatctctcttggcacatatcagtcaaccacgccccgggacttaccaaaagtaagcttctttgaatgattttggccctctttttgggtcgctgaggaagcttgcaacccttcatggccagaaaatcttcctctttctccttgcttgagagagtgatgt

SEQ ID NO: 225178 - DNA, 577 bp, Glycine max
  unsure (1)..(577): unsure at all n locations
gaagacggtacggcttgagaagaaggtgatggttctcacacaaggctatgagatgagagtaaagaaaagcctctggccgcaaattgaggccactttcaagcagatggatgttgctgcaactgagttagaatgctttaaagctttgcaaaagcaggagcaattagcagcatcacataggataaacaatctgtgggctgaagtacagaagcagaaggaacttgagaaaactttgcaaaataggtatgggagtctaattgaagagctggaaaagatgcaaaatgtcatggaccaatgcagattacaagcacaacagcaagaagaaattaaagccaaccatgctcgtgagtcaactgagacccctgagaccaaggctgatggaattgatgtacagggtacagcaaattgtgaagctgtacctcactcggtagagcatggacgagctctagcagttgagtcatctgctgatggaactgctgaccagcacgtagatattgtgcatgaccatgctacttctagtgtcagtcatgacatggatgtggattctgataaatnggcaaatcctacaccagctgcagag

SEQ ID NO: 225179 - DNA, 538 bp, Glycine max
ggaaggaagagtgagcgtgaaagatgccttgggtgaggctttcagagtctccaaggctcgacgttgctattgacatgggtaatccatttctcaatctcactgttgatggtttccttaagatcggagctgtcgcagccacgcgatcagctgctgaagatacttatcatattatccaaaaggggaatatctcaagtcgtgatttcgagaaaactttgaagaagatgtgtaaagaaggtgtatattggggaactatagctggcgtttatgttggaatggaatatggggtagagaggatccgtggcaccagagactggaagaatgccatgattgggggtgcagtaactggggccctggtatctgcagccagcaacaacaagaaagacaagattgcgatagatgccattactggggcagcaattgctactgctgcagagtttataaattaccttacctgaatgaatgaaagtggatgtcttgctggttttcttgcatgttttggaaagggattgcacactcagtctcttttgtcatcatctgt

SEQ ID NO: 225180 - DNA, 513 bp, Glycine max
aacaaaattgcaaggcaaagctactaacatgcagaaaccgattggccaatacaatttatcaaatcataggttttatagaaagttaaataaatagaatatcttagaagtaactgcaccaatatcaagacggaaccggtacagatgatgacaaaagagactgagtgtgcaatccctttccaaaacatgcaagaaaaccagcaagacatccactttcattcattcaggtaaggtaatttataaactctgcagcagtagcaattgctgccccagtaatggcatctatcgcaatcttgtctttcttgttgttgctggctgcagataccagggccccagttactgcacccccaatcatggcattcttccagtctctggtgccacggatcctctctaccccatattccattccaacataaacgccagctatagttccccaatatacaccttctttacacatcttcttcaaagttttctcgaaatcacgacttgagatattccccccttggataatatgat

SEQ ID NO: 225181 - DNA, 504 bp, Glycine max
atagagcattcattcatcaccaacatggctcttctaggcttaatgagttttgctgccttgacccttttcttggtcctaacaactgtgcctcgtcaagcacacgcttcaagccgtggcaacttaggcagaaacatcaacccttcagtgtatggcatatgtgcctcttctgtcattgtgcatggatacaagtgtcaagaacacgaggttacaactgatgatggttacattctgagcctgcaaaggatcccagaaggtcgaggtaaaagcagtgggagtgggacaaggaagcaaccagtggttatacaacatggagttcttgtagatggtatgacatggcttctaaacccaccagagcaagatctgccgttgattttagctgataatggatttgacgtgtggattgcaaacacaagaggaaccagatatagtcgccgacacatctcattggacccctctagccaggcctattggaattggtcttgggatgaacttgtctcctatgat

SEQ ID NO: 225182 - DNA, 394 bp, Glycine max
ctctgtctcgtttacacatctctccaacctttcactttcgtttctcagttttattcgaatccctctctcaatctcctttccaaatggccagcgttgaggttgcacagcaaacaccaacaacagttccagaaaatgaaacaaccgaggtaagcaagacccaggaaacaaccccagtcactgaggctcctgcaacagaacaaccagcagctgaggttcctgcaacagaacaaccagccgctgaggctcctgccccagaatcaaccaccgaagcaccaaaggaagaaaccaccgaggcaccaaccagaaacagtagaaaaaacaactacagaagtagccccagaggagcctaaagaagttccagttgagaccgaggaggtggtggcaaaggagacag

SEQ ID NO: 225183 - DNA, 473 bp, Glycine max
agattatggagtaaatatcatttatttaaacctaaagaaacacagttacacaccattacaaactcatgtaaccctgccaattaaccattacccctaaactccagcaccagcagcttggtcactttaatacacaactcccagaattttttatgtcaccacgtggcaagcacgctgatgtggagccaagtgttgggcttacacgtaggggtaccctccataatacaaccaaagacttaagcatcatataataatattaataaagtaaacttaagaaattaaaagaaaaaaaaaaaaaagagggtttttaacatggcatgcaaaatgggagacctgatccccacaacttggaccatttttaaacttggttttttcactcacactggccatagggctaagcttcagtcttttcaacaggaacctttactggggtttcaactgactcaactggtttggtctcttcctctgggggtgct

SEQ ID NO: 225184 - DNA, 390 bp, Glycine max
gacaaaccaaatgcttaatatcaacacaaacacgtgtacagaaaagaaaccactcttcaagaaaacagaaaataagaaaaactaacatattggaagaggtgccccattccactccccaaggcattccaaaagtggatcaatgatcttcccttggcacaaagcagtgaacactttgtcacactcttcacccggtgagataaccctttcaccagttagcaatgctgtccccaactcctctctcacaaacttgtacaaggggtaagacctgcattccttgatcttgtttggaattgcacattggtcattctcatatgcaactcttgcaccttccacttccttaggcaaaagggtcttcaactcttcctcaaatgttgcaatcttttggaagat

SEQ ID NO: 225185 - DNA, 535 bp, Glycine max
  unsure (1)..(535): unsure at all n locations
cantatcttcgtcaagacccttaccggcaagaccatcacccttgaggtggaaagctctgacaccatcgacaacgtcaaggccaagatccaggacaaggaaggaatccccccggaccagcaacgtctcattttcgccggaaagcaacttgaggacggccgtacccttgctgactacaacattcagaaggagagtactcttcacctcgtcctccgtctccgtggtggcatgcagatcttcgttaagacactcaccggcaagaccataaccctagaggttgaaagctccgacaccatcgataacgtcaaggccaagatccaggacaaggagggtatccccccggaccagcaacgtctcatcttcgccggaaagcagctcgaggacggccgcaccctcgccgactacaacatccagaaggaatcaacccttcacctcgtcctacgtctacgtggtggcatgcagatcttcgttaagaccctcaccggcaagactattaccctagaagtcgaaagctccgacaccatcgacaacgtcaag

SEQ ID NO: 225186 - DNA, 506 bp, Glycine max
  unsure (1)..(506): unsure at all n locations
ggtatctccaccatcgcttctccttttgactccatcatcttcgatttggacgacaccttgtacccctccagcaccggaattgacaagtgcgtcaagaaaaacatccaactctttctcatccagaaatgcggattctcagaatccaaagccttgacccaacgagttgagctcttcaaaacctacggaagcacccttgccggcttaagagcacaaggcctcgatatcactgcagaggactaccacggtttcgtgcacggaaggctaccttacgactccatcgacactgatcatcagttacggaacctcctcttgagcatcaaacaaagaaaaattgtttttactaattctgacaggattcacgcgatgagggcgctggataggctaggggtcaaggactgtttcgagcaaatcatatgcttcgagactataaacccgaaccttgcctattcaacccgacccgacngaatccccatcctgcttaaaccttcgctcgacgccttcaagat

SEQ ID NO: 225187 - DNA, 512 bp, Glycine max
aagcaattgatatccctgagagacacattgattttatttgaaagacgattgataatacttaatatcttacaatattcacatgtcgcaaataattgcttagggggtccacgttacttactgttattgtcttcgctattggtggtctgatactatttatactactgtactattatttttaattgcatagatagttgggttggttgggaatgtacatttttgtacaacgtcaattttcaagctccaaccagagcacaagcgagtacggcctccaattcactcttcgaacgtgtcatcgttggatcaccaccgtccatttcgtttgcccatatctctgggatcacttgtgccaagttatgcacactctccacagcatagtcagctcctttgcttttcattgtcttcccaaccagaacagtgtggagacccatttcttttcccgcggcaatattgcgaacgctgtcatccagaaacaacgtacgacgaggatccacgttggcagcgtcaagcgcgat

SEQ ID NO: 225188 - DNA, 584 bp, Glycine max
  unsure (1)..(584): unsure at all n locations
caacaatatttaagcctcaacaaccctataggcgatgtgtttctgaaacattcaaggagtttcctgcacctgcaatagaattgatagagacccttttgtccatagatcctgctgatcgtggaacttcagcatctgctttgaatagtgagttcttctcaacaaagcctctaccttgtgatccctcaagcttaccaaagtatcctcctagcaaagaatttgatgccaaagttcgggatgaagaagctagaagacaaggagcagcaggaagcaagggccagagacatgatcttgagagaagaggtgctagagaatcacgagccattcctgcacctgatgccaatgctgaactggtcttgtcaatgcagaagagacaagggcaggccaattctcagagcatgagtgagaagtttaaccctcatcccgaagaagttgcttctgggtttcccattgatccccctagaccatcacaggctgcaggattaattgcagatcccncggttcatcaacataaaagagccttccattcaggtccactgactcaccgtgcggcatgggctaaagctcgggaagaaccaggacgatgc

SEQ ID NO: 225189 - DNA, 271 bp, Glycine max
ctgctgcctatggacactttggaagataagaccctgacttcacatgggaagtggtcaaacccctcaagtgggagaaggcctaagtaattcattccactgctctatgctggaagttttttgagcgttgcccttataatatgtctaatatccataactttccacgtctcttactctgtgtgtttctctcctcttcctcctattttgttatttgtatgttcttttgtaattttttacgtgatcaactaaaaacatgtactctctgtttgtatgt

SEQ ID NO: 225190 - DNA, 271 bp, Glycine max
acatacaaacagagagtacatgtttttagttgatcacgtaaaaaattacaaaagaacatacaaataacaaaataggaggaagaggagagaaacacacagagtaagagacgtggaaagttatggatattagacatattataagggcaacgctcaaaaaacttccagcatagagcagtggaatgaattacttaggccttctcccacttgaggggtttgaccacttcccatgtgaagtcagggtcttctcttccaaagtgtccataggcagcag

SEQ ID NO: 225191 - DNA, 575 bp, Glycine max
gtcattgggagcactcaacctaaccattcaagttgtgaaaccacatcgcaagaaaattcacaagcgatggatccgaagctgaaagaggtttctcagctcttcgatcgcttcaaggcttcgtttctccggaacgacttcgataactgttccaatctcctttctcagctaaaggtgttacttacaggtttcagaagcctgccaccgttgtttgcagatacacctaatgcagttcatgaattaacaatagcaagggatatatatgagcatgctgttgtccttagtgtgaaaattgaggatcaagatgctttcgaaagggatttcttccagttgaagccttattatacagatgcctgcaatcgtcttccaccatctcctcaggagtaccctatactgggtctcaacctgttgagactacttgtgcagaataggattgctgagttccatactgagttggaattgctttcatctgctgctcttgagaatccttgcattaagcatgccgtggagttagaacaatcttttatggaaggggcttacaatcgtgtcttgagtgcacggcagacagtgccacatga

SEQ ID NO: 225192 - DNA, 493 bp, Glycine max
atatccccataatttgatatgaacctttctatgggtttgaaatttagactacagcttcatgaatcatataatcctcaacataaaaaggtggataagtacggaagagtttttctttttccagagcacaagtcaagaaaaataaaatataagcaaccatactgccacctaaatgatcaaaatacagaggtgaacaattttatagttccatattgaatcagaaatgaacaatttcaaaatattagtaactattatccagacacctaaaaattttggaaacacaaaagccgccattgcatttcgactcagacaatcctctccaactccctagcataactaagtgtctggttgatgagctgcagagagggtatttctttgcaaggtgcagattcttttgccttttggaaaaagacactatcattcttaatctcccactcaggatgctcctctttaatatattccaggagttcctggtctgaggagaacagcaacattt

SEQ ID NO: 225193 - DNA, 491 bp, Glycine max
atgtatctatataatcgaattgaaattacgattctatcaaatctttttatttactttttttttttttaagaaaaaagaaagttctaattattaataaattatatctatatatatatatatacagatagatattctatatcttttatcttaattaatatttgacccctccttataatgtgttatagttttctttatttttaggaacttatccattccttttttaatgtgcccgacaatccgaaagaattctgggggaggggtcatttcgtttttgatctagaataaatagagcttcaagaaatgagagaattaagaatacccacgagaaacactaatccaatccataatgatgtaccggaaaatacaacatttttgttattcgaccaaccttcaggagaagcaaatacaacaggtacactaatcaataaaataaatgaaatagcaattaatgcaaaaacagctaattggaaagcaatagtcatgtttctaat

SEQ ID NO: 225194 - DNA, 302 bp, Glycine max
tttttttttttttttttttttttttttttttttttttcttttttttttttttttttttgccaacaatgggtattaatgaggcccaaaagtggactcaaacaacacacggaaccgaactccaaataaaaggggaacatgcacatctaaattctgaaaaccagtattaccaaacgggggaaaaaggaaattacaaaatggggaaaaagtcagttatccaatgcagagaacatctgattattctacaaaaaaatacagaactatcctcgctgaaaaaagggatcaaacccatatggccaatggtg

SEQ ID NO: 225195 - DNA, 473 bp, Glycine max
aggtccgaaagatcactatcattatcgctgaacaatgttatttaacaaaagtatcaaccacaaataaaaacaacaacccaacttcccaatcatcgtcacgtccagcaaaatacattcaaaagctatctaaaatctggggaacccacattggcattaaaaaccatgaccatacaattttttagagaaatattatgggcaccatgcctcttcaacaatcccctaaacgttgcttaggcatcagcaaacccaagctcggaaagcttttggtgagcctcagcgtaatcagcaaagaaggcatcttcgtccgctgcatatttatcaacgagagggcggaatacagggtcagacaaaagagccttgtcagaaggtagctgaaggagaccttccttctaccactcaacaactccgtgaagtatgagttgtcgaaaataagaggattagaggtccagggaccctcaaatccagaacgctcc

SEQ ID NO: 225196 - DNA, 549 bp, Glycine max
aaaacagttaacaaaacttccttataaattaaatgcaaatttaagacatccctcctcagcagcaaaggaaatggactaaaaccctatggctgcttgtgaatttgaaaatctcagacttttaccatcaaaacaaaaaacagtactcatcaaaaacaaacagcaacgaaaatgttaccgccgatcaagaacccagttttgaaggctacggctacatgaaatcggcggacacttcaaaatataactggtaaaacaaacacctaagactctgcaaagataaactactgtaaaggaacaagtttttttgaaaccacgttgatgatcacatgtgctagcaaaattgccaaaatgcaatcacttcttcttggcggcagcctttgtgaccttggctccggtggggtctttcttctcaacactcttgatgactccaacagctacggtctgacgcatgtccctcacagcaaaacgaccaaggggaggatactcagagaaagtttcaaccaccatgggctcggttggaaccatcttaaccataccagcatcaccattctt

SEQ ID NO: 225197 - DNA, 528 bp, Glycine max
aacatgatacaacgcataaatgagcatagcttttggtacaatattaagcatcttgctctcattattgtgcatcataacaatgatattactagtgcatacaacaacattcatggtaattactatgcacaatacaattcttggctgatttctccagcattctcaggcttgcgcaaatatataaacttcatcatatcctttcccagccttcccacaataagttggactgtaattgtaaatgagattgtctagcaactcttgagcaactggtctgtttaaggatttcctagcttcactgaccaaaaaatttgcaacatactgggttatctgaatggcatcctccgtgtgtggaattcttggtgaaccccattcaaaggcatttttctctggatgccattggaagccagtcacaggatagttttgagaacgtacagtggaaacataaaccttatcatcttcatctgtgcaagttgtcaagatctcaaaaaaactagacaactttggattattcagaagctttccaggggatat

SEQ ID NO: 225198 - DNA, 301 bp, Glycine max
actctctaatgattcaagtttcaggttttggtggaaattgtatttgattttatgaaggctttcttcgttctactagttctcttcaacccccctataagaaaaacttcatatctcgtgtattacttatgagaaatttgtgtataacttgcaaacgaagatatttgatctaatagaaaatgatacagaagttttgtttacctttattattgtacacagccaataattttagaggtctagctattattttatattgtaaaaaaaaaaaaaaaaaaaaaaaaaaaaaaaaaaaaaaagggcggcc

SEQ ID NO: 225199 - DNA, 301 bp, Glycine max
actctctaatgattcaagtttcagggtttggtggaaattgtatttgattttatgaaggctttcttcgttctactagttctcttcaacccccctataagaaaaacttcatatctcgtgtattacttatgagaaatttgtgtataacttgcaaacgaagatatttgatctaatagaaaatgatacagaagttttgtttacctttattattgtacacagccaataattttagaggtctagctattattttatattgtaaaaaaaaaaaaaaaaaaaaaaaaaaaaaaaaaaaaaaagggcggcc

SEQ ID NO: 225200 - DNA, 516 bp, Glycine max
cgtgatccaatctctgcatttaatgtctcagctgatggaaagtttcttgcgtgtggaacaccttcaggagacattgtagttgtaaattcaacaaatatgcagattcacacaatgataaaaaaggctcaccttggcatagtaactgctttagcattctcccctgattcaagggcggtggcttctgtatccatggattcaagtgcgagggtaacaataattgaagagaagaagactaatgggcttagcttgtggattgcattatttatcatcctacttgcagtagccgcttacttcctgaggcaagaaattgaaaagtgaaggttccaagattttgcttattgaaatatgaaacaattagcatccttgtgaatgctactgcttatttttgatgcattgtcattttttaaggtgtttgctgatacttttatatattatggcatctttatgaacagttgttctaggacacgaccctttctctaaaatgcctgtaacatggttgatcgtacgtacatgttc

SEQ ID NO: 225201 - DNA, 488 bp, Glycine max
  unsure (1)..(488): unsure at all n locations
gatagctcaattctacctggaagcattgtacgaaacatgtaacgtaacgatacaacccatgttacaaggcattttagagagagggtcgtgtcctagaacaactgttcataaagatgccaaaatatataaaagtatcagcaaaccccttaaaaaatgacaatgcatcaaaaataagcagtagcattcacaaggatgctaattgtttcatatttcaataagcaaaatcttggaaccttcacttttcaatttcttgcctcaggaagtaagcggctactgcaagtaggatgataaataatgcaatccacaagctaagcccattagtcttcttctcttcaattattgttaccctcgcacttgaatccatggatacagaagccaccgtccttgaatcaagggagaatgctaaagcagttactatgccaagggtgagcctttttatcattgtgtgaatctgcatatttgtngaatttacaactacaatgtctcct

SEQ ID NO: 225202 - DNA, 514 bp, Glycine max
aaaaaaaaactaagtacattaataacaatattatgtcagctacttagcctacaagacaaacagagtatttctaatatggtttacaatatccttgagatgctaaacataaatatgattatgatctgactatcgatttttggatagggatgcttccagcttttctttcaactgtatagcagcagtctcccctccctcagttcttatggagaatgtgtgaataattttatcatctgtagtcgaaacactggagtcttgagccacaatttgatgctccttgaacgttttaacaacattagaaacagggtgaatatctaaggggcatctcactgtcacaactgtctcatcctctctttcctgaaaatccatatctggcaatgacaatttttggtcctgattgtggatcatgttcttctcagcttccaacaccttgatcttcatctggagatcagtgataaaggtaatggcatcaccaagcaaagatgccttggtccatttagatatgttagggacaaca

SEQ ID NO: 225203 - DNA, 510 bp, Glycine max
ctcacccgaaggattcgccttacgaacccgaaatccttcaccggagcccgcgcacgcgctcgctcacgctctccgcgtcgtcgagttcgctctcgccggtcgaagcttcgccgagcagaatgacgcgggcgctgtcggagacggatctctccgcgcgctccaaaacgtcttcgttcggctccgctctgttttccttcaccgagtcggacgaaggagacggagttggcggcggcggcggcggtgatggatgggacaacggtgacggcggagggtcggggttatgggattcgaataatgggaatgatagcacggacttgtattaccggacgatgattgaagcgaatccagggaaccctctgtttcttggcaactacgcgaggtacttgaaagaggttcgaggggactatgtgaaagcggaagagtattgtgggaaagcgaatttggcgaatccgaatgatgggaaggtgctatcgatgtatgcagatatgatatgggagagccagaaagatg

SEQ ID NO: 225204 - DNA, 527 bp, Glycine max
accataattccgcgatacaattatattataatactcgataccacatcaatgaggaaaatgtaacaccataagtgatactgatactgagtcataacccttcaagaattatagggaaaagtatagggaaagtagacttaaaagactgaatcttgctctctctcttgaatatgattaagctcaacttaaaattaagtcttcttaggagcaagcttggccttgatgtcatcaaccttcttagtatcaatctggaaagcctgagcaagaacatcatcaggcacagttggtgttgaagtgaaaagagctgcagctatagacactgtgccagggagttggctgttgaaggcagaaagcacagaagcaggcttatccccattgttcttctgatagtgcaccaaaccttttgggaacacaaagatttcacccttcttaattgactttgagatgagtttattggctgtggtgatgaatccaacatctagttgtccatccaacacaaacacaatctcagtggcaccagggtgtgtgtg

SEQ ID NO: 225205 - DNA, 523 bp, Glycine max
aatggtaaatttttgctatattgctatcaaaatattgcaagatatattccatcgttctcgcatatttttggttatctgttgttattgacaacatgaataaatttcttacaagaagggggaaacaaatatttggtataatcttctgttgaatttctaaaaaatatagaataaagaagcatagtacaaaaaagaaccaaaaaaaaggaagattggaattaggcaaaactcatactgttgaggcacttgtgtgaagttggactaaggaagcataaaatccaccactgatgttaatgagcttttcatgcttccctttctccactataactccattttttacaacagcaatcacatctgcattttttattgtagatagacgatgtgccacaaccacagtagttctgttcaccatgactttgtccaacgcatcttgaacaactctttctgactcagcatctaatgcacttgttgcctcatctagtagcaatatctttggacttttaattatggcacgagcaattgctac

SEQ ID NO: 225206 - DNA, 421 bp, Glycine max
gtgccttatgtaggggacagtaagagcaatgttgttgacgatatggtcaacagcagcgccatcctctatgagcccggtgaacatccagaccatgtggttgtcattaagtacgtgccttatgtaggggacagcaagagggccatggatgagtacacttctgagatattcatgggtggaaagaacacaattgtgttgcacaacacatgtgaggattcactgttagctgctcctattatcttggacttggtccttcttgctgagctcagcactcgaatcgagtttaaagctgaaaatgagggaaaattccactcattccacccagttgcgaccattcttagttacctgaccaaggcccctctggttacaccgggtacaccagtggtgaatgcgttgtcaaagcagcgagctatgctggaaaaca

SEQ ID NO: 225207 - DNA, 514 bp, Glycine max
aagcacaaaagacgtggataacttgatattattttattacatacatgcatagatagcctgctctcaaataagtcggcaggaacaaagatagagagattcaacgatcttcaaatttcacatttgccagaaatatataacagaaaagaggggtatgggatatgagttaagttttgatcacattcaactacactatcccaaaccgttactcttaagactttgaacttcacttgtactctaggatcatgttgttctcaggagctaatccaacacaagccctcaggatgttttccagcatagctcgctgctttgacaacgcattcaccactggtgtacccggtggaaccagaggggccttggtcaggtaactaaggatggtcgcaactgggtggaatgagtggaattttccctcattttcagctttaaactcgattcgagtgctgagctcagcaagaaggaccaagtccaagataataggagcagctaacagtgaatcctcacatgtgttgtgcaacac

SEQ ID NO: 225208 - DNA, 504 bp, Glycine max
tgaataaaatgggccatacagtaactgtgtatgaaagagctgataggattggagggcttatgatgtatggtgttcccaacatgaaagctgacaaagtggatatagttcaacggcgggtcaaccttatggcagaggagggaattaactttgtggtgaatgctaatatcgggcatgatcctttacattctctcgataggcttcgggaggaaaataatgctattgtcttggctgtaggagccacaaaaccaagggatctcccagtacctgggcgggagctgtcaggagttcattttgctatggagtttcttcatgcaaacactaaaagcttgcttgatagcaatctccaggatggtaacttcatttctgctaagggaaagaaagttgtggttattggtgggggtgacacgggcacagattgcatagggacatccattcggcatgggtgtagtagcattgtaaatcttgaacttctccctcagccaccacatactatggccccaggca

SEQ ID NO: 225209 - DNA, 513 bp, Glycine max
  unsure (1)..(513): unsure at all n locations
ggaaacaataacctaaatcattaattatcaaactgtacatttcattccacacaatgccacaataattaactaagaactaacctttccatcacgaagcctatgaacattcctaattttctactgtgcactaaccttgcacccttagatcgcttctttattattttcccccttacatttatatggggcaccaactacgaaccaacaatgctcaatgaatctccagcagtcatcttttattattccatcttttaagaatagaaaaaccacagaaggctcctaagtaatcactgtttgtttgccactgccacagtgtcccttggttgctgcttcttcttgataagttcgtctggactcccggcaacattgtgctctaaatcttcatttgtgaggaaactgtcaacttgtgctgcagcttgtcgtccctctgaaattgcccataccaccaaggactgaccacgtcgacaatctccagctgcanacacccctttaagactggttgagaagcgaccatac

SEQ ID NO: 225210 - DNA, 549 bp, Glycine max
  unsure (1)..(549): unsure at all n locations
gccaaggagaaaagaaaaaatataagaactggactccttcaattagtgcattgttgcttttcttcaaatggtagcaagaagacattgttaatttgagagatggcgagttacgaggctattaagaactttgatgatgatgatgatgatgatgatgatgtggagatggcactcccccatagccagatctctgaatcaagatctgccactgtttcttcccccattggccaaactaccccgctttacattcacaacattattgaggaacaacgcattatctgcaggcaccaacctcaacccaaatctccgcgtctggtttctcttgatgtttttcgtggtctcaccgtcgcgctgatgatacttgatgatgatgctggcggactcattcctgcgctcaaccattccccatggaatggtttaacactagctgattatgtcatgccatttttcctatgtattgttggtgttacgctcgcactctcatacangaaactgtcttgtggagttgatgcatctagaatagcangtttacgggctctaaaacttcttgcg

SEQ ID NO: 225211 - DNA, 575 bp, Glycine max
cttagttatctaattacctcaattaatcccttaattgcaagcatcatggctgaggagaaacaccaccaccacttccaccaccacaagggcgatgatgtgcctggcgaggttgattataagaaggaggagaagcaccacaagcatcttgagcaccttggggaacttggtgctgcggctgccggtgcttatgccttgcatgagaagcatgaggccaagaaagacccagagcatgctcacaggcacaaggtagaagaggagattgcggcagcagctactgttggtgctggtggttttgtcttgcatgaacaccatgagaaaaaggaagttaagaaagaagatgaggaagctcatggaaagaagcaccaccatctgtttggctgaacatgataaatattcatatataattaatattcaagctccaaagtatcaccatgcctgtgtatctctatcatatcttccatttctagtgtgcctttgaataaattctgtgcgagctagaagagtgtttaattatgcctatggtgttacttcatatatatatatgcgtatatataatgtatgctatgttggctata

SEQ ID NO: 225212 - DNA, 485 bp, Glycine max
actcttaacacatacgccttgcataaaattatcaggataataatacaatctcaaattactttacaatcttattatcaatatagccaacatagcatacattatatatacgcaaatatatatatgaagtaacaccataggcataattaaacactcttcaagctcgcacagaatttattcaaaggcacactagaaatggaagatatgatagagatacacaggcatggtgatactttggagcttgaatattaattatatatgaatatttatcatgttcagccaaacagatggtggtgcttctttccatgagcttcctcatcttctttcttaacttcctttttctcatggtgttcatgcaagacaaaaccaccagcaccaacagtagctgctgccgcaatctcctcttctaccttgtgcctgtgagcatgctctgggtctttcttggcctcatgcttctcatgcaaggcataagcaccggcagccgcagc

SEQ ID NO: 225213 - DNA, 504 bp, Glycine max
ccacggaaaaaggaaaggttacattaacaatgtagttttcgaatagcttaccacacttattacccgtctctctctctctctctcctcattcatgaaaagaagtagtactataattttgcgtcgcatactagacttgttactacttagaaagctaatctaatctgttacacaccattatattattatattatattggctcaaaagtattaagcacgattatgggtggctaattggctaattggatgtctccgttatcaccgtccttacccttggaccatgaggcgaatttaccaaaggagccttccatttcctcaagggtcttgccctgtgtttcggggagcatggtatagaagaagatccatccacacattgcgattcccccaaagaggaagaatgccccaccaatagtgatcttattagagagggacaggaaagtcattgagatgaccccactagtgaccctattcacgacaactcccatagccgcaccctgcgcgcgaagcc

SEQ ID NO: 225214 - DNA, 572 bp, Glycine max
atggcaaatgcattctttactaaaagaaactaatgctgagtattttttacatgaatcaaatccattttttcacattactgtaacagataggcctaaaatacattcctaaaatccaatagcagcagcaattatacgaattactttttttttttttcctgtgattggatgaaacttaagagcagtggattatcatcattgtcacatatgatgaagcaatattcaacaagtgcaagaactgtatgaataggaataagagtttatgtacaacgggaaatgaaaatagttgtcatttgaacacattatgctgtggcagctgcttgttcttcaacagcctgtgatgctgggagaagggtgcaaatgaggttgcggtcaccgtacacattatcaacacgtcctgtggtaggccagaactttgcagtacggagccaaggagctgggaaggctgcatattccctggagtatggttttgtccatgcattagccatgagcagtgatggtggatgaggggcgcccttaatacattgatgtaatgtaacctttctttctcatctcacaattcttgctaatggaat

SEQ ID NO: 225215 - DNA, 585 bp, Glycine max
  unsure (1)..(585): unsure at all n locations
atagtgtaaaatacaacaaataaaaattttcggtcataaaacttacataatagtgttttctactccgagaaattttctaagctagaattgtacaggtaattcttttctttccagaaccaatatttctatgaaataataatccaactcaccagaattctacttacaggttgactgatataacacagggaatgcatgcacatgggccgcagccgtagatagatgcataataaatgctacttccgcctgaaaccatttgaacatgtgccagcatgcactaacttgaagaaccttgagctgctgtgcactttcaacaaattccatgcatgcactgctagacatttcgttctaagatttgatctgaattcctcgtttcaaaagagatttataagctggagttcttgaccattcatcaatttcgctagcacgtagaacaggcagaggatgtgacagttgccttgtatgtgcattccttatataccacccaattgggctggaagcaggtttttcataagagcgagcttgctccaggaatgcatccacatttagttgatcagccatagatggacatnccccagctaatttcat

SEQ ID NO: 225216 - DNA, 514 bp, Glycine max
gtaactcgttcttcttcttttgttgttctgtgtttgtgtttgttttttctctcacctgaaaatgtcttgctgcggtggtaactgtggttgcggaagctcctgcaagtgcggcaacggctgcggaggctgcaagatgtacccagacttgagctacactgagtcaaccaccaccgagaccttggtcatgggagtggcacctgttaaggctcaatttgagggtgctgaaatgggtgtgcccgctgagaacgatggctgcaaatgtggaccaaactgctcctgcaacccctgcacttgcaagtgaggtgttgggagagcaagcttcaagcagagatagcccttaattaggaataatgatcaactattaatgtgtagctaaaaacttatgtattatgtctgagatggttttcgagcactctggtgttttgtgttaaacaaacatccttagaataaagtggtcatgtcttgcctttagcaaggtcaagtgtattggacttgtgatgggtgtgttaagctc

SEQ ID NO: 225217 - DNA, 456 bp, Glycine max
ccagtaatagtatttaatattataagcagagattcataattcagattagccgaactttatacagaagcgaccaattaccaaacattaaaaaaaaaaaaaaggaagcaaccatgagcttaacacacccatcacaagtccaaaacacttgaacttgctgaaaggcaagacatgaccactttattctaaggatgtttgtttaacacaaaacaccagagggcacgaaaaccattacagacataatacataagtttttagctacacattaataggtaatcattattcctaattaagggctatttttgcttgaagcttgctttcccaacacctaacttgcaagtgcaggggttgcaggagcagtttggtccacatttgcagccatcgttctaagggggcacacccatttcagcaccctaaaattgagccttaacaggggccatttccatgaccaaggtcttg

SEQ ID NO: 225218 - DNA, 540 bp, Glycine max
  unsure (1)..(540): unsure at all n locations
accacctcccccaccttctggcggattacctggaacattgaactcagatgaaccaagagaccttaagctgccattgaaagataggttcttccttcaaccattgtctccaactgatgctgcacaaagggcaaaggaatcagccaaggaaattgttggcgttaagaagttgattgaaaagaaggcttggccatatgttcagaatgatctgcgtctcagggccgagtatctgcgctttgatctcaacactgtcattgctgcaaagcctaaggatgagaagaaatcactcaaggaactcactggcaagctcttccaggatatcagcaatctggatcatgcagcaaaaattaagagcagcccggaagcagagaagtactatgctgctactgtatcttctctgaacgatgtccttgccaaacttgttaaatgtgataatttctagcttcttgtgtaagcttgtgcataatttctcgacactttattgactgtattntaagaaatacatgatgaggaaaanttttattaatagatcattttctgacc

SEQ ID NO: 225219 - DNA, 469 bp, Glycine max
ggtctagatatattgatcttatttatagaaaattttccctcatcatttgattttcttaaaatatcagtcaataaagtgtctgagaaaatcatgcacaaagcttacacaagaaagcaagaaattaatcacattaaccaagtttggcaaggacatcgttcagagaagatacagtagcagcatagtacttctctgcttccgggctgctcttaatttttgctgcatgatccagattgctgatatcctggaagagcttgccagtgagttccttgagtgatttcttctcatccttaggctttgcagcaatgacagtgttgagatcaaagcgcagatactcggccctgagacgcagatcattctgaacatatggccaagccttcttttcaatcaacttcttaacgccaacaatttccttggctgattcctttgccctttgtgcagcatcagttggagacaatggttgaaggaagaa

SEQ ID NO: 225220 - DNA, 470 bp, Glycine max
  unsure (1)..(470): unsure at all n locations
aatcaacccttcacctcgtcctccgtctccgtggtggcatgcagatcttcgttaagaccctcaccggcaagactattaccctagaagtcgaaagctccgacaccatcgacaacgtcaaggctaagattcaggacaaggagggaatccccccagaccagcagaggctgatcttcgccgggaagcagctcgaggacggacgcacccttgctgactacaacatccagaaggagtcaactctccacttggagttgcgtcttcgtggtggtatgcagattttcgtgaagactcttacgggtaagactattaccctcgaagtggagagctctgacaccattgacaatgtgaaggccacgattcaggacaaggaaggcattccaccggaccagcagaggctgatntttgctggcaagcagctcgaggatggaaagaccctcgctgactacaacatccagaaggaatcaaccctttac

SEQ ID NO: 225221 - DNA, 483 bp, Glycine max
aaaacaacacgatatgacaattaatcatttcatatttcacacattcataacaaacgtaggtgggatattagagtactattattaatgggacacaattgagttcaacacaaaccgaacttattttcaagggacattattacagacccattaaacatcaaagttcttcaaatgttttgggaacacatccaacattacacaacgagcttaaaaccccccacggagacggaggacaaggtgaagggttgattccttctggatgttgtagtcagcgagggtccttccatcctcgagctgcttgccagcaaaaatcagcctctgctggtccggtgggatgccttccttgtcctgaatcttggccttcacattgtcaatggtgtcagagctctccacctcgagggtaatagtcttacccgtaagagtcttcacgaaaatctgcataccaccacgaagacgcaacaccaagtggagagttgactccttctg

SEQ ID NO: 225222 - DNA, 551 bp, Glycine max
ggcaaagcaatctacagccttcaattaccaacaagaatatgaagcaaactctcttcttctccttccttctactcaccaccattttctcaatcaccactttagctcagtcaccagctgcagcccctaaagccccagcaaaacctgcccctgccacaccggctccagcgccggcaaaacctttagtcccttcattaccccagtcaccatcttcaggtgttgattcttctggaagccaagacattgtgaagatcctaaggaaggccaagtcattcaacactctaatccggttgctgaaaacaacccaaatcatcaaccaagtgaatgcacaacttgtgacctcgaaaaacggaggcttaaccatccttgcaccagatgatggagcattttcagaactgaaagcagggtacttcaactccctgggagaccggcaacaaaaggcactgattcagtatcatgttcttcccgtttatgtgtccagctccaactatgatgctctgagcaaccctgtgctcacattggccagtgacagcctcacagggtatcagttaaac

SEQ ID NO: 225223 - DNA, 386 bp, Glycine max
agcttataatacatagctactccagaaaactggaaggcacgttagtattacaaataaaacaataccacaaagttcggttctagtttgttttcttatgcatcttctataaacaactgcacataacttaaacataacggctacaaaacaacaattataattacaacccaaaacacaatacactacacttgtcttttggtcttctagcagttaatgccacactcctcaacatcaggaccagtgacccttgtggtgaatggatcaattctaacccacaagagtgagaaaatggatgcaagcagaacggaccacaccaccacaatggttggtgttctgttttggcgccccatgagacctttgaggaaagggtatagatggatcggctcgag

SEQ ID NO: 225224 - DNA, 521 bp, Glycine max
  unsure (1)..(521): unsure at all n locations
aaagtaataaactatcacttcataggtcaggtatcatcatgataaaaacgcttttaacaggcccagaattggacggtaacaatgggtttgatctttaaaatagcacatggacacttcgaaggcatgctatgcctgcttttgtcccagaagttgaagaattgaaatcttgtgtgatgagacaatcgatcagtacttgactataaccctaaaattttagctaatttcaattcctcccagtgtcagcttcaagcattacgcatccaaactagacactgttgatatttggggttcggatttcttgtttttctcttgcatcattaattctacaaagtccctaaaagcgtaatcagaatcatggggtcctggggatgcctctgggtggtattgaagagacattattctttgagcagggaatgcaaggccagcacagcttccatcattaagattcctatgagtaacctccactccttctggcagtgtggcagggtcaaccgcatangtgtggttctgagcactaattt

SEQ ID NO: 225225 - DNA, 583 bp, Glycine max
  unsure (1)..(583): unsure at all n locations
gttacatacctgttgctctccaagcctgccaagggagttgagaaatccttttctctcctctctctccttcccaaggttcttgctgtctacaaggaagttattgctgaccttaaggcagctggtgcttcatggattcagtttgatgagcctacccttgtcttggaccttgagtctcacaagttgcaagcattcactgacgcatatgcagaacttgcgcctgctttgtctggtttgaatgttcttgttgagacctactttgctgacatccctgctgaggcatacaagaccctcacatctctgaatggcgtcactgcatatggatttgatttggtccgtggaaccaacactcttgatttgatcaagggtggatttcccagcggaaaatacctctttgctggagtggttgatggaaggaacatctgggccaatgaccttgctgcttctctcactaccttgcagggtcttgagggcattgtgggcaaagataagcttgttgtgtccacctactcctcccttcttcacactgctgatgatctagntaacgagaccaagttggatgatgagatcaagtcatggtagcttt

SEQ ID NO: 225226 - DNA, 460 bp, Glycine max
gcacaaaactggtaaaattccagatcaataaggattgcggcgaagccgcaaagatacaacattcattagggaaaacaggagtggggaaaaataaggggggaggggttgaggaagaacctattgctcacagtgcatgcttggacccctaactattccacacacagttattgctacaacccactatcgagaaaattcctctttggtgtattattatataaagcccaaccaattgactcgtaagattctactttcttataccattcacttggcaagttcgttgccgatgagttttgctgcggcaaccatgtttgtgagggctggcttcacctcaatgtacttacgggtcttgagcccacagtcagggctcacccacaagatgttcttctcgagcactgcccgcattcttgctgattctgtcaccactttcttcagctggcggtatacttggggagtggatgtt

SEQ ID NO: 225227 - DNA, 541 bp, Glycine max
accaaaatgaaatcggtgttggtggatttcctagtaggggccggcatcaagccaacatctatagtgagttacaaccatttgggaaacaatgatggcatgaatctctcagcccctcaaaccttccgctcgaaggaaatttccaagagcaatgttgttgacgatatggtcaacagcaacgccatcctctatgagcctggtgaacatccggaccatgtggttgtcattaagtatgtaccttacgttggggacagcaagagggccatggatgagtactcttctgagatattcatgggcggaaagaacacaattgtgttgcacaacacttgtgaggattcactgttagctgctcctattatcttggacttggtccttcttgctgagcttagcactcgaatcgagtttaaagctgaaaatgagggaaagttccactcattccacccagttgcgaccatcctcagttacctgaccaaggcccctctggttccaccgagtacgccagtggttaatgcactgtcaaagcaacgagctatgctgggaaaca

SEQ ID NO: 225228 - DNA, 536 bp, Glycine max
aagcacaaaatacttcgataactttatattattttacatgcatgcatagcatagatagcctgctctcaaattagtcagcaggaacaaagatagagagatccaacgatctttaaatttcacatttgccataaatatataacagaaaagagggtatgggatatgagttaagttttgatctcattcaactacagtatcccaaaccattactcttaagactttgaacttcacttgtactccaggatcatgttgttctcaggaactaatccaacacaagcccttaggatgttttccagcatagctcgctgctttgacagtgcattaaccactggcgtactcggtggaaccagaggggccttggtcaggtaactgaggatggtcgcaactgggtggaatgagtggaactttccctcattttcagctctaaactcgattcgagtgcttagctcagcacgaaggaccaagtccaagataataggagcagctaacagtgaatcctcacaagtgtgtgcaacacaattgtgttctttccgccatga

SEQ ID NO: 225229 - DNA, 356 bp, Glycine max
  unsure (1)..(356): unsure at all n locations
cttctcctttactagttgacaacgcccataagtttttcgaagcttccaaaaaggggaactaattctttttttcggtggataattttcgaaaacctaattccggggctggcgaccgggtgcctgtttaaggaggacgagagagatgctccgagttttctctttgaatcggtcgacccaggccaaatttatagcatcgacacgggcaacagtggggtagggacacacaccctgtattgtgaaaagttgtggaaaggagaacacggtggantaataattgggaccacgtgaaagggcgcaagagtgaggaaattgaagaggatcctgtggtgattcctcgtatgatcatggaaaagtgg

SEQ ID NO: 225230 - DNA, 510 bp, Glycine max
  unsure (1)..(510): unsure at all n locations
aaagtcacaaagctgtcattatcattaaataccttattatgttcatcacttctgtcataacattatcaaagtttcagattctccgtaattcatatcccctatcatctgcccacaccacaaacttcctctctaccatttaaaaaggatgcacacctcagttatcaaggagcatcactgatgatggatcaatccaaattatttatcaacaaatgaagattctgcaagatcaatggcacgagcaagagctgcagctttgttctcgcactctctttgttcatcagcaggatcactgtcagccacaattcccgctccagcctggagatgggcaacccattctctgcgtttgttcttatccttgtaggagtacattgtgtcataacgagcatttgtagggaaaactatggtcctcagagcaagggctatgtccatatcgccattgaatgatatacctncaaatcccccactatagggcccccttcttgcgacttccaactcatcaatcaactgcat

SEQ ID NO: 225231 - DNA, 590 bp, Glycine max
  unsure (1)..(590): unsure at all n locations
tctctctctctctgctcaactgaataaagcagagaagaataagaaaatgggtgtgttcagtacagtgctgctgtgccttatgtccctaatgtggatggtggatgctcgaattccaggcgtatactctggcggcgcttggcaaaatgctcacgctacgttctacggaggatccgatgcttccggcaccatgggtggagcatgtgggtacgggaacctgtacagccaagggtacggagtgaacactgcagcgttgagcacggcactcttcaacagcgggctgagctgcggagcgtgcttcgagatcaaatgcgcaaacgacaagcagtggtgtcactccggcagcccttccatcttcatcaccgccaccaacttctgtccccctaactacgctcttccaaacgacaatggcggctggtgcaaccctcctcgccctcacttcgacctcgccatgcccatgttccttaaaatcgccgaataccgcgctcgcatcgtgcctgatcgcttccgcanggtggcatgtaagaagcatggtgggatcaggttcacaataaacgggtttccgtactttaacctgggtttgatcagcaacg

SEQ ID NO: 225232 - DNA, 547 bp, Glycine max
  unsure (1)..(547): unsure at all n locations
aaaagaaaataaacttgtattttatatatcttaagaaagtaaagggggtgttcagacacggaagttctttccagtgaaagtttgaccaaattgccaatttgatggaacaatgttccaagaggtggaagagcgacggtcgctggcggtgactctgaaggacaaagcctgacccaccaaaacggcgtttgactgccagttctgtccccagtttctgctcattggcatccaccccgttcgtgatcccttaacgtaggcgtgcacgatatcccctgcacccgctacgttgctgatcaaaaccaggttaaagtaacggaaaccgtttattgtgaacctgatcccaccatgcttcctacatgccaccctgcggaaggcgacaggcacgatgccggcgcggtattcggcgattttaaggaacatgggcatggcgaggtcgaagtgaaggcgaggagggttgcaccagccgccattgtcgtttggaagagcgtagttagggggacagaagttggtggcngtgatgaagatggaggggctgcggagtgacaccact

SEQ ID NO: 225233 - DNA, 498 bp, Glycine max
aaaatatattttttttcttatgaaatgagtctggtcacagaaccactgttatttttctgtagagagagagagagagagatcttgctaatctatgtagccacatatttctatatttctatacatgaacattgaagccagcatactgcagaagaaccaaactgtgtctttgtctgtgtctatcttatctcttttggtaattcattctctttatgaaataggcaaacagagaagcgtagacaattgggtacacaatgagcaccacagccacaaggcttaatctgtcatgccggaagccatagtaatctcttaaaaaggaaccaactgatttttgttccccaaatacgagtacctccttctctatgtctccatattgtgaagttaggaggccattcaaggaccaagccgtaggacaaattcagtagcaccaaacccaccatttaggaattttcggtcctggcatgagaaatccagacaagagattggatatggtgtagactg

SEQ ID NO: 225234 - DNA, 537 bp, Glycine max
caaaatatcttcataatctatcagagcaaaaaaatattcaggcactaaattagaaatttgttcaactcatccggatctaataattacttcaagtgcccttcccttctgtatgattatgattataccaccaaacgaaagatccatatcatgcttacaccccaggaaggatatactgcaaatacaccattaactcaatttcatcgacgcaaatttttctgccagatctatagcctcgtttacatgtgatgcctctgtaccctgacccgttgcaagaccaccttttcctttaccacatctcccttttagaggccccaaagcattactcagccaatctgccacatccagattacctttacctcctttctctggcaccccggcacacactacagccttgttcgtagattcgtccgtgctaaaaaccatcacagattagcccttctggtccatgacttatgtcacagccttacgaactgcagctacatccagaccaacatcaacaggagatatacaagatgttatccatttgaaacagcaagt

SEQ ID NO: 225235 - DNA, 432 bp, Glycine max
aacaaactcccgtaggctttttattttcactagatatatataatgttaaataataagacaccgaactataaaatacacaggctacatcgtgagcaataataatttaagtatactactagtcactaagcttggcacatgcaatcaggagctggatatgtatatattgattgttttggcttcctcagccttggttcgccttgtctattttggtgaccttcaaccactgcatcctgaaactctgaccactctatggttttattcaggaaaagctgacccatcaatgccatatttggccttatagtctttaagttcaagtatgtccggtgtccaaccaatgcattgtgcatgtttcctgaggaagcagagataaatatgtcactatgcaagccaacatagtagtcaagtgcagctagtagagaagcttttccctta

SEQ ID NO: 225236 - DNA, 574 bp, Glycine max
cgttcttgtttttccacattcatattttcctttcgtttcctttcattttccctcactttctcgctccccaaacgcccctctctctcctccaatggccgaccagctcaccgacgaccagatcgccgagttcaaggaggccttcagccttcttcgacaaggacggcgatggttgcattactaccaaggaacttgggactgttatgaggtcacttggtcaaaacccaactgaggcagaactgcaggatatgataaacgaggttgatgctgatggcaacggaaccatcgatttcccagagttcctcaacctgatggctcgcaagatgaaagacaccgactcagaggaggagcttaaggaggctttccgtgtgtttgacaaggatcagaatggtttcatctctgcagctgagctccgccatgtcatgacaaatcttggggagaagctgacggacgaggaagtggatgagatgatccgtgaggccgatgttgacggtgatggacagatcaactatgaggaagttgtcaaagtcatgatggcccaatgaggaccattccaaccataacctaaatttgaaag

SEQ ID NO: 225237 - DNA, 563 bp, Glycine max
  unsure (1)..(563): unsure at all n locations
aaaaaaacacaaatgcatccaattgttctaggttcataataataataataataaccaaaagaagatgaaaacggagagtaacaaagcatggtgagacacagctaccgaagctactaaaaacaagggacagagcaaacaagtaggataactagggagcagagaagtagtagcaattaaagcaaacaagaaaaatagacactcaactaacaaaacctaataaccccaaatcaagatggacctaatgggaatagaattctcatcaaaacttatctgccctgtccctcttctctttatatgcttttcaaatttaggttatggttggaatggtcctcacttggccatcatgactttgacaaactcctcatagttgatctgtccatcaccgtcaacatcggcctcacggatcatctcatccacctcctcgtccgtcagcttctccccaagatttgtcatgacatggcggagctcagctgcagagatgaaaccattctgatccttgtcaaacacacggaaagcctncttaagctcctcctctgagtcggtgtctttcatcttgcgagcca

SEQ ID NO: 225238 - DNA, 357 bp, Glycine max
ccgatggtgaagtcatgtacatgagggcaaggtttgagagaattgttgggtccagagactctgaagctttctacatgatgaatcctgacagcaatggagcacctgaactcagtatttatttgcttagagtctagtactatgatctgtttagttatttatacttttaactttctttctttccctttttttagtttgttctttgtggatgttaagcactaggctattcctatactacctgtttagctccttaatcatgaacaatggtgacctagttttcttcagcttatttttctttttttccccctcttctttcaggaagaagtagggtttctgtttttttttttttttggagggggg

SEQ ID NO: 225239 - DNA, 530 bp, Glycine max
cttatcagaataattcattatttattaaaacggaagtaatcaaatcacctgttgtaataagaaattgaataattagaatacaaataatggtttcctcattgctgttttttttcttcttcaaatttccaaatcaataaaaattcttctggcagtatattatataggtatagctcctgttaaggtgtgatggagttggaaatagtctaaaatgagtttactgccttcatggcttcgaatctgggctccttaggctggaacttgagtgtcgcatagagcttcatgtaatcctcaaatacaaattttggatacacttgttctgtatcctctgccttttgctccaacaatgctggtgcagggtagataagagcgtcactggcagggttgtagaatgaggctacggacattctggtcccattcgtttgggcaatcacacgatgctccacactcttgtatctcccattggtaatgacctcaatttggtcaccaaggttaacaacaatggaatggcgcattggaggcacatccaccca

SEQ ID NO: 225240 - DNA, 342 bp, Glycine max
gggttccaaggaacaaaacaaaatgccttaataatatctcagggatatgttttggacattaagattggagaaaaacctgaagatgaatgatttaaagagttggagcttttttaaaagacccggcaatgacagtgggcaagttgttgccaaaaggggcactgaaatgttttgctaggtttttaacaggaccttttccggggacatatgcttggaagttgaaaccaagcttgggaaacattgcaaggctgccatttttaatttccttcacctttagcagtgcaacttggtttggatcatttgcaagccccaatgggttaaatggaccacctggatgaaatttgt

SEQ ID NO: 225241 - DNA, 505 bp, Glycine max
agaaaagttagggttcacaacttttccttttccttttgcttgcgaatctgaatcaaataatcaatcatccattcattattcatcatgtcgtcggcgaagaaaatcacgctgaagagttcggacggcgaggctttcgaggtggaggaggcggtggcgctggagtcgcagacgataaagcacatgatcgaggacgactgcgccgacagcggcatccctctgccgaacgtgacgagcaagatcctggcgaaggttatcgagtactgcaagaagcacgtcgaggccgcgaatcccgaagacaaaccctccgaggacgatctcaaggcctgggacgctgaattcgtcaaggtcgaccaggccacgctcttcgatctcatcctggctgctaactacttgaacatcaagagcctgctggaccttacatgtcaaactgtagccgacatgatcaaggggaagactccagaggaaattcgcaagacctttaacattaagaatgacttcacccctg

SEQ ID NO: 225242 - DNA, 534 bp, Glycine max
  unsure (1)..(534): unsure at all n locations
agaagagcatcactgaactaacaaagcaaccctatgtcgaaggtggtttgtgtcaccggagccagcggcgccatcggatcatgggtggtcctactcctcctccagcgtggttacaccgtccatgccaccgtccaagatatcaaggatgaaaatgagacgaaacatttggaggaaatggaaggagcaaagagtcatctccatttttttgaaatggatcttcttgacatcgactccattgccgctgccataaagggttgttccggcgtaatccaccttgcatgtcctaacatcattggtcaagtcgaagatcccgagaaacagatattggaaccggcgataaaaggaacggttaatgtgttgaaggcggcgaaggaagcaggggtggagcgcgtggtggcgacttcatcgatttcgtcgattatgccaagtcctaattggccagctgataagattaagggagaagagtgttggacggaccttgaatactgcangcaaaggggttgtattatcccattgcaaagactctagcagaga

SEQ ID NO: 225243 - DNA, 540 bp, Glycine max
cactaataactgcaagagtaaattaaaactctcgcaaaacattgatatcgttacaaccactgatccaagtgacccttattttagaatacagttacacgcacaagtgcacaacacaagaccataggtaaaaacataaatggcatgaacaatgagtcaaagcaatggcagaacaataatattaacgccaccaccacttgtaacagtgcactcagttcctctgcagtagcagagaaattagacatagcccctgctcttcaaactctccactgcatccttgatgatttgctcaacaggagtgaattctagacctaaatcaatcagcttctttgatgcatcctttccacttgctctcaacaaccctggttgggtatcctttggcaacttagccacatcgtattcagggtataactcagcaaccttgtccacaagatcactaaagtgacgaatagattccacacacaagtgccttcctgctgctttcttgttctcaagtgccaaaatatgtgccaatgctatgtctttgaagtgagccgttcccat

SEQ ID NO: 225244 - DNA, 520 bp, Glycine max
ccttggaaataacccaaggaaaatgagctatgttgtaggttttggtaatcattacccaaaacatgttcaccatagaggagcatctataccgaagaacaagatcaagtatagctgtaagggtggatggaaatggagggacacttctaagccaaacccaaatacaattgttggtgccatggttgctggtcctgacaagcatgatggcttccatgatgttcgtacaaactacaattacacagagccaactcttgctggaaatgctggtttagttgcagcactagtggcattgtcaggcgacaaaagcacatcgattgacaaaaataccattttctctgctgttcccccaatgtttcctacaccgacaccaccaccagcaccatggaaaccataagcgcatcatgccattggttatttctttctagcaagtatcccagatgatttgagtgcaccggtaaccttcgttgttatgatcaactgaaagatcaggtaattttgcagaaaaaagctttgagaatagaag

SEQ ID NO: 225245 - DNA, 484 bp, Glycine max
gagtaaaactgtgaaggcattagatgaaactgtcaaacaattacaagctgttcagtttttcatgtttaaagaatacaagatttgatttagatacatatatactatatgtgtatcacaaaaatttaaagagacacactctcaagtaccactttatcaattcttaatgctaaatcttgagtcgatcattggccccaggcagctatattcagtaggccaagctccatttcttctatttctcaaagctttttttctgcaaaattaccttgatctttcagttgatacaaaacaacgaaggttaccggtgcactcaaatcatctgggatacttgctagaaagaaataaccaatggcatgatgcgcttatggtttccatggtgctggtggtggtggcggtgtaggaaacattgggggaacagcagagaaaatggtatttttgtcaatcgatgtgcttttgtcgcctgacaatgccactagtgctgcaacta

SEQ ID NO: 225246 - DNA, 545 bp, Glycine max
  unsure (1)..(545): unsure at all n locations
atcttcgtgaaaaccctaaccggcaaaacgattacgctagaggtagagtcctctgacacaatcgataacgtgaaagcgaagatccaggataaggaaggtattccaccggatcagcaacgtcttatcttcgccggaaagcagttggaagacggcagaaccctcgccgattacaatattcaaaaggaatcgacgcttcatctggtgcttcgtctccgcggagggatgcagatcttcgtgaagacgctcaccggaaaaacgattactctggaggtggagagttctgatacgatcgataacgtgaaggcaaagattcaggataaggaggggattccaccggatcagcagcgtcttatcttcgcagggaagcagcttgaggatggacgcacgcttgcagattataatattcagaaagagtccacgcttcaccttgtcctcaggctccgtggtggtgatttctagttcagttgaatcttgctaatgagatgtatcagttctaataataatttctctgtccttttntcaaagaaaaaaacaaggcggacgtn

SEQ ID NO: 225247 - DNA, 521 bp, Glycine max
  unsure (1)..(521): unsure at all n locations
ggaaaaaggaaagagaaattattattagaactgaaacatctcattagcaagattcaactgaactagaaatcaccaccacggagcctgaggacaaggtgaagcgtggactccttctgaatattataatctgcaagcgtgcgtccatcctcaagctgcttccctgcgaagataagacgctgctgatccggtggaatcccctccttatcctgaatctttgccttcacgttatcgatcgtatcagaactctccacctccagagtaatcgtttttccggtgagcgtcttcacgaagatctgcatccctccgcggagacgaagcaccagatgaagcgtcgattccttttgaatattgtaatcggcgagggttctgccgtcttccaactgctttccggcgaagataagacgttgctgatccggtggaataccttccttatcctggatcttcgctttcacgttatcgattgtgtcagaggactctacctctagcgtaatcgttttgccggttagggttntcacgaggat

SEQ ID NO: 225248 - DNA, 517 bp, Glycine max
catctataattcatagttcatagtataatataagcccacctaagcagttgaggcagagcaactaaactaaataaaatatgagacatgtagtgtagcattgactataggtaatagccatccatcaactttgatatcaatcatcctatgaagagacagagaaattaaacaaggaggcaaccatatgcctaatgaggaattaaaagtatagaatttcaagccaggaataataaaatgagaaagaaacagaaagcagctgtaacattttaaagaccaacttagaactacccttattgatcctaaccatagctttcacatgacctcactgatagattcataatactagtgccttagaattttgcttcagttgttgagaggtgcaggatatctgttgatgcaatcaagccaagggttcctagaaggcttggtaactcggcgcatggcgcgccaaaccacgctgttgcacttgaagcctgagccaaatgcgagttgccaaacgcggtctcctcttctcacactc

SEQ ID NO: 225249 - DNA, 557 bp, Glycine max
  unsure (1)..(557): unsure at all n locations
attatatgaaaccaaatttgaacacacacatatatatatatataaatatatgacaaattaacaggtagactatatataattgtgagacacaaaagaggtgcggtaataaaatgatggacagagacccttgattgattgatctagttcttggaatccaaagccataatggtgctaagattcattggatacatatactctgaggtgcctgacaaaatctgttgaacgattaacctattagccctttctgatggatgaaaaggatcccaaaaggcataaatatcacggttagggcacaagttggatgccggagtgcacagtccaagaccattgtagggtccttgaccgcaacatgctacttttgatgtaacaaatccatatcgttgaggattactgatgaagtcgatgtgcatctgttgcgtgttgactccaacgaagacattggaaccaatttcgctgttgagttgttggataatctgaacaagttgagggttgaacaaggctgcngctcgctgcagctcagctgagcagtcaccgttgtgcttcgctgggccattccg

SEQ ID NO: 225250 - DNA, 533 bp, Glycine max
gcagtaaatgttgtagcatttcattggaaaaggaaatacacccaccataagcaattctcatcaatcaaatcccccagagactggaggaaacggattgggaatgaaataggccatttccagacaccacacaaataaaaacataccataaatatagcacaaatggagtatctctttcccctatcgggaagtattgggcaatccaacaggaaacaaagaggaaacaatagaatccctatctctagctaatacacagataagtaatcggccctcatgtttcattcccaaacgcatgcatcgaatcctatggaagattccatcatccatcggactcactctgcatcctcaccttcaccaagcttggcagtgccattcactttctgggcatcttctccatcttctgggatgtcagaagtccacaaagttaggttgtccctgagaagttgcatgattaaggtgctatctttgtatgactcctcattcaaggtgtcaagctcagaaatagctttatcaaaagcttgcttcgcaagatgaca

SEQ ID NO: 225251 - DNA, 497 bp, Glycine max
  unsure (1)..(497): unsure at all n locations
ccacaactcaaagaatgccagtgttcatttctgtggatacaaggcattttatgatgctggcgatgatagcgaggaggatgaatttactgatagcgaagaggatgttccattgcttaaagcagagaatggaaaacctgaaacaaaagctgaagagttgaaggtacctgaatctaaaaaagctgttgccaaggctagtgcatcagcaaaacaagtcaagattgttgaaccgaaaaaagacaatgaagaggactctgatgatgattctgacgaagatgatgattttggaagttctgatgaagagatggaggatgctgatagtgacagtgatgatgagagtgatgacaaagaagatgatgatgaagaaacccatcctaagaataagaaggcagatctaggaaagaagagacccaatgaatctgcatcaaaaactccagtttcctccangaaagctaagaatgccactcctgaaaagactgatggtaagaaaggtggacata

SEQ ID NO: 225252 - DNA, 302 bp, Glycine max
cttggcttagctgctggtggtgtgtggaagatgcaccactggaatgaacagaggaaaaccaggaccttctacgatttactggaaaagggtgagattactgttgttgcagaggaacagtgaaaatgttcttgttttgttgcctatgctctccatttataggctttttttttcccgtgttatattcaattggctcttcaaatgtaaatgagccaacatactatgagattgaaaagaataagtttcttgaactgattgaatactatgttggcctgtaaaagtttcatgcagttatgtttttattt

SEQ ID NO: 225253 - DNA, 305 bp, Glycine max
aaataaaaacctaactgcatgaaacttttacaggccaacatagtattcaatcagttcaagaaacttattcttttcaatctcatagtatggtggctcatttacatttgaagagccaattgaatttaacccgggaaaaaaaaagcctattaatggagagcattggcaacaaaacaagaaccttttcactggtcctttgcaacaaccgtaatctcacccttttccagtaaatcgtaaaagggcctggttttcctctggtcattccaggggggcattttccacacaccacccgcagcttagccaagctt

SEQ ID NO: 225254 - DNA, 592 bp, Glycine max
  unsure (1)..(592): unsure at all n locations
caccttcccataaccaccaccatgactccttcactcacggaggcggcagcaccgtgcaccacacccctcacaacaacgcgccacccaccacctctgttcatcacttgagccacctggttaacaccggtgttctctcgagcaaacccactgtgagagttttcaccaaagccaatcccaatttctctctcaccattcgtggcggccaagtcattctcgctccctccgatcccaccaatgagtaccagcattggtataaggatgagaagtacagcactagggtgaaggatgaagaggggtgccctgctttctctttgatcaacaaggccactggtgaagccttgaagcactccatcggtgccactcatcctgttcggctgataccttacaagcccgactatcttgatgagtctattctatggactgaaagccgtgacttatgagatggccacagagctataaggatggtcaacaatgttcatcttaatgtggatgcttttcacggtgacangaattctgaggtgttcgtgatggcactancatagtcctctgggactggaaacaaggtgataaccagcagtggaagatcttacct

SEQ ID NO: 225255 - DNA, 442 bp, Glycine max
ttttttttttttttttttttttttttttttttttttttttttttttttttttttttttttttttttttttttttttttaaccttttttttttttttttttttttttttttttaagggggaaacctttaggcgaaaaaagggccacaaaaagtggggaaaaggggatattggacggggaattacccctaattagggcaaaaaaacccaagaagggccaaaacaggggggggatataaaaaaaaaaggggacctgaaaaggacaaaaagggggggaaacccaaacccgggggggggaaaaaggccccacctttttttataccaaaagtccccaattggggaattgggttgggcaaaaaaaggggaaatacaatttaaaaaaaattccttaaggggccaaggggccatccgggcaaagggcattagggccccaatggggatttcc

SEQ ID NO: 225256 - DNA, 555 bp, Glycine max
aaaattcataacataagaattgaagagatcagaacaagataataatttaatatcccttatttgatttctctgaggtataaaccaaggtactacatacatatatattagaaaattttagtcaactaaacaggataaaattacataaatacctgatcagccactactccatttgcatgtcttgcaagaatagatcgagacttcccacttctctcagtagctggtcccttatcagattccagtgcatccttcaccctagaaactggtaaaccaactctagaagacctggtttgttgcactgcagcttctattgccttacttccaccaataaaatttgggtgggaagtgttgatgtagtccatctccatttctatgacgtgtgttatcatagtctccgagggttctaggccttctcgtaaaaagttcccaataacttcatccatgcgctttctcaagaaagggaaccgctgcaattcagtgaccatacagtgatggctgattttcattaactcgtcatatataaacctagcgcactgaagacttggatccattagtcga

SEQ ID NO: 225257 - DNA, 472 bp, Glycine max
atatgactctggtgttatttttgattttgcaaattaaattacacaatcacagccgtacatcacacatgagttgggcctcttccaacttaaaagcagaggataacattggcccatgacgcgacacatgcaccacctaataatcataattttacatctttacatacaaaatacaaagactttaaattttaaaaagaagaaaagagataaacagatcatcttaatgaaatgaaaccaaaacccacaaacattggcttgatttttgttgttgttgttgttcccaacttgattaagcatgaaccgtttgattgaatcacttggacttgaagggaatggccctgattacgacctggtggtagagtgctgcaagagctgcaccgatgaatggtcccacccagaagatccagtgttcatcccaaccaaggtccttgttgaagatgatagcagcaccaagactacgagcagggttgatacc

SEQ ID NO: 225258 - DNA, 176 bp, Glycine max
aaaaaaaaaaaaaaagaaaaaagaaataaaaaaaaaaaaaataaaaaaaaaaataaaagaaaacaaataaaaaaattgagtaatatgaaaaataaaaaaaaaaaaaaaaaaaagataaaaaaaaaaaatgaaaaaaaaaataaaaaaaagaaaaaaacacaaaatgagctgaaaaa

SEQ ID NO: 225259 - DNA, 448 bp, Glycine max
gacagaaaaaagttcatttagcacttaagataggaccaagcctgtgagagtacaagggtaagattccctggtacctataacagatgaacaagtacagaagcgagaatcccactggacagggcattatcggattcactactgatgtcaggttccattctagaatctaagtcacctgaaagtctttcccttgatccaaagttcagaagaaagccctgcttccataaaacacacgggagttagtgctgctcggtgtctgtatcttctgctcatagctagagtttcctgagctagttggtccactttcaaagtccataggaagcttcattttcgccaatgactcggcgaattgctgcatgctttgcatgtacatatcgaccaaatcctgctgcagcacatttggctgcggcttgatgttaacagtgacaacaggcttaaggaatgactgatt

SEQ ID NO: 225260 - DNA, 598 bp, Glycine max
  unsure (1)..(598): unsure at all n locations
cccacaaacctcttctttctcttcctcccaaacatgtttctctttctctctctctctcttaattcctgaaaagcaagtagctaaggaaaacaaaaacatcatcacagaaactcacaaaggaaaaacaaacaaacaaacaaaatgtcttctccaagcaagcggcgagaaatggacttgatgaaactgatgatgagtgactacaaggtggagatgattaatgatggaatgcaagagttttatgtgcacttccatggacccaatgagagtccttatcatggaggtgtatggaaagtaagagttgagctgccagatgcttatccttataaatctccttccataggctttatcaataagatctatcacccaaatgttgatgagatgtcaggatcagtttgtcttgatgttatcaatcaaacctggagtcccatgtttgatcttgtcaatggtgtngaggtgtttctaccacaacttcttctgtatcccaatccatcagaccccttgaacggagaagctgcagctttaatgatgcgtgatcgagccacttatgaacaaaggttaaagagactgtgagaagatgctaaactgagacatagagctg

SEQ ID NO: 225261 - DNA, 401 bp, Glycine max
gcatcaggaaatcaatgatccattatttacagggtaaactaaataaccggaaggaaaattttcccctatccacaaccaagtgcatttcatttaatgaggtaaattcacatgactagaacatcatgcccaagttaagattgaatgagaagaacaggaacatgcatgcaaggctaggggtttgccttaccagcaacctgttgattactagaatcatattcattttcacttagctcttcatcactggagttcttttctgtggcagctcctatgtcttcaggtttagcatacttctcacagaactctttaaccctttggtcataaatggctcagatcacgcatcattaaagctgcagtttctacgctcaaggggtcttatggattgggataccgaaaaagttgtg

SEQ ID NO: 225262 - DNA, 539 bp, Glycine max
aggagagagaaagtagcagatcctccatggcctccaccaaggaacgtgaaaacttcgtctacgtcgccaagctcgccgaacaagccgaacgctatgaagaaatggtggaagcaatgaagaatgtggcgaagctaaacgtggaattgacggtagaggagcggaaccttctgtcggttgggtacaagaacggggtgggtgctcgtagggcttcgtggaggattctttcctcgattgaacagaaagaagaagctaaagggaacgatgtgagcgtgaagaggataaaggagtataggctgaaggtggagtctgagttgtccaatatctgcagtgatatcatgactgttattgaggataccctatttcctctagcgtatctggtgaacctagtgtctttatctacaaaatgaagggggactattaccggtacctcgcaaagttcaagttcggtgatgagagaaaagaggctgctgatcattccatgaaagcgtatcagttggcttccactactgccgaggctgagttagcatccacacatccca

SEQ ID NO: 225263 - DNA, 575 bp, Glycine max
gaaataaatattatctatgtaaactgataaaagaatgcaaggtagcatcctcttagaaagaaagtcaaaatgaagaaattcactaaattacagccaaacaccatgcaaatctcaactccagtctccagtaacagaaagcacacgcatagaataaaaggctcacaaagccttatggtgattttctagagaccaattccatgttctattacaacatcctaatggtaaactatcaagagagagactagccttctcgtatgcactccacaaattccttggccaatacctgcttcactatgcatcgtcacctccagcagctcgggcagaatccaccttttgttcctctccatcttcagggatgtcagaagtccacagggtgagattgtccctcagaagctgcataattagggtgctgtctttgtaagactcctcgctcagagtatccaactcagagattgcttcatcaaatgcctgcttagcaaggtgacaggccctttcaggagagttcaaaatttcataataaaagacagagaagttcaaagccaggcccaaacggatgggatgtgtggatgctaact

SEQ ID NO: 225264 - DNA, 503 bp, Glycine max
caactctaattgtgtttatcacaagagctgataaaaatggagttaaaattgtgaaacatgtcaaaggggggttgaatccaagctccatccatcagttagacttcaacaacccctacattggagaagtggccaaaattggactagtggttgctgtcgttgcccttactgaatctattgctgttgggcgatcgtttgcatccatcaaaggataccaacttgatggaaacaaggagatgatgtcaataggtttgacaaacatcataggatctttcacctcctgctacgttgcaactggttcattctcccgtactgctgttaattatgcggctgggtgtgaaactttggtgtcaaacattgtgatggccatcacggtgttgatatcactgcagtttttgacaaagctattgtattacactccaacagctattcttgcttctgtgattctctctgccctaccaggactcattgacctcagtgaagcttacaaaatttgggagggttga

SEQ ID NO: 225265 - DNA, 505 bp, Glycine max
aagaaatcaattatgaacttgaacctttatttgttcaccggggttggagttcagaactgcacaaaggagacttgatctcaaaaaatgagaaaaggaaaacaaaaatcacatttaaaggatgctcttctcttcactgttgtgtgctcttttcaataatagctattaacttcagcgatcaatgccttcaattttgtcttccacttctgaatacaactgcctgagcttctcaatattatcttctgaagtttcccaataaccacgtccattggcttccaagaatgtctgcaccagtttcctgaaggagtttggattagtgctcatgagcttgttcagcatttgctcatcttgaatgaaagttgtgttggcttcttcatacacccagttatcaacttggcctgaagttgcactccaccccactgtattggtgagtctcttctcgatctcgcgtacaccctcatatccagtagacaacatgccttcataccactttggattcaacagcttg

SEQ ID NO: 225266 - DNA, 504 bp, Glycine max
aaagaaaagaccatcaaagtttcacttcagccttatccggtttagggtttcggtttttgacccaacctttgacgtatcgaaaccttaagtttcggatcaggtctgagcaatctggttggtagaacctttggtcttagagagtcaagttttatgtctgaattagacgatcaaattcctactgccttcgatccttttgctgatgcaaatgctgatgactcgggtgctgggtcaaaggagtatgtgcatattcgcgtacagcagcgaaatggaaggaaaagcctgacaaccgttcagggattgaaaaaagaattcagctataacaagatacttaaagatgttaagaaagagttctgttgcaatggaacagttgttcaggacccagacctaggacaggtattccactcaaggtgatcagaggaagaatgtttctacctttctggtccaggctggtatcgtgaagaaggagcatatcaagattcatggtcttctgagcggttggagtct

SEQ ID NO: 225267 - DNA, 519 bp, Glycine max
attattaaattctaaatgaaataagatcgtataggaggtccattaaactgtattcatattatgtcttcaaagcaaagaacacacaatgttctgaaatccataatcccacatcacatggtaaaacataagaacacatcagatataccacaatcacatacacaactcagattatatatgcccaacacataggcaggcacgtaagacttgacacttgagactgcaaccgttcagaaaccatgaatcttgatatgctccttcttcacgataccagcctggaccaggaaggtagaaacattcttcctctgatcaccttgaagatgaataacctgtcctagttctgggtcctgaacaactgttccattgcgacagaactgtttcttaacatctgtaagtatcttgttatagctgaatccttttttcaatccctgaacggttgttaggcttttccttacatttcgctgctgtacgcgaatatgcacatactcctttgacccagcacccgagtcatcagcatttgca

SEQ ID NO: 225268 - DNA, 340 bp, Glycine max
caaaaaaaaaaagtggggggaagcgcaaaagcattttctatacgaaagcaagttgcttttctcacatggccctaacagcttggaatcttggttccttgggaaggaacttctgctcagcatagacagacatgtagtcaccaaaaacaaacttaggataagtttcatctacttgttggtcttctttctccacaagttgtggtgcaggacatatggtggccttgaatgaaggattatagaaggaggcaattgatcttctgttcccatctggtgtggccagaaccctgtgccagcaactcttgtatctaccattgctcaagacctcaatctgatcacccagtgt

SEQ ID NO: 225269 - DNA, 553 bp, Glycine max
ctcatgatgttcatggaaggcaaacccaccagatcccactgcagctgctgctgcaacctcctcttctatcttgtgcctgtgagcatgctctgggtctttctctgccttgtgcttctcatgcaaggcgtaagcagcagcagatgcagcacctaactcaccaaggtgctcaagatgcttgtggtgcttctcttccttcttatagtcaacctcatcatcatacccaccaccacttgttttgctgtacccaccatcagtggtagtgtcagggtacacaccaccaccaccagcggcgccatagccaccacttggtttgccgtagccaccatcagtgacgtcagagtatccaccaccaccagcgccatagccaccagaagtctcatcaatgccaccagaataacctgttttcttgtacccaccttcatagccaccaccagaagctggctcatcactagaataagatgtcttgctgaaccaccttcatagccaccgccagaagactcatacgatggcttgttgaaaccagagtcatagtcatcagaaagcttggaatatg

SEQ ID NO: 225270 - DNA, 563 bp, Glycine max
caacaagaaagtgtcattgtggaagaagatacatgtgatttacagcttcttctttgttcggaaggtcgtagcacacatcaacacgtttgtgttttattgcattgtattacctgcaacagttttggtgcctgaggttgtggtcccaaagtggggagctgtctatatcccttccatcatcactattctaaatgcagttggaactccaaggtcactccatttgatggtcttctggattctctttgagaatgtcatgtctctgcatcgaacaaaggcaacaattattggtctacttgaggccagtcgagtgaacgaatgggttgtcactgaaaaacttggtgatgctctcaaggctaaagcaggaggtaaagcacctaaaaagcctcgattcaggattggagacaggattcacttgttggaacttggtgtcgcattctacctcttcttttgtggctgctatgatgttatgttcgggaaaaaccatttcttcatcttcctctttatccaatcttttgccttcctcatcatggcatttggatatgttggcaccattgttcccaacttct

SEQ ID NO: 225271 - DNA, 567 bp, Glycine max
atactaacaagctgtgattagccagaactatgttgaaaacactataatacacgttgatatgaaggcacagaagctgaaatagccgaatgaagtgccaaacccttctaggagttgggaacaatggtgccaacatatccaaatgccatgatgaggaaggcaaaagattggataaagaggaagatgaagaaatggtttttcccgaacataacatcatagcagccacaaaagaagaggtagaatgcgacaccaagttccaacaagtgaatcctgtctccaatcctgaatcgaggctttttaggtgctttacctcctgctttagccttgagagcatcaccaagtttttcagtgacaacccattcgttcactcgactggcctcaagtagaccaataattgttgcctttgttcgatgcagagacatgacattctcaaagagaatccagaagaccatcaaatggagtgaccttggagttccaactgcatttagaatagtgatgatggaagggatatagacagctccccactttgggaccacaacctcaggcaccaaaactgttgcaggtaataca

SEQ ID NO: 225272 - DNA, 499 bp, Glycine max
attcaacaaacatttaattaataacaaggacaagtttacatttttttttccaccttacatatgtacaattgcaagcaatcgcacggcttgagagtcatatattcacccctccattcttcttcatgctacaaactatattatatttaattcccacatttttgttttccttttttttctattgccactgttacgtacactttgcaataaaaggaacaacaataattatgaaagcctagagccaattaagattgatttttctctaactagcccaaagcatatgtttaatcttaatcacttgcagccaccagcaccaaacccaattcttccaccaccaacatcatacacaacctctattgttttctgctgcacgttcccatatatagtaacatcactatcgtcaccatttgcagcaaaagccaagcaaacttgcttggcactggccacgtagagtatcccttgcggcggaagctgcaccgtgacgccgtcggcgaaggaaaaa

SEQ ID NO: 225273 - DNA, 550 bp, Glycine max
agccaacgcaattgaaacgttgtcgtttctttattatcaataaaagtactctagtccttggcagttcaaacgcattactagatagtatacacatacaaacacagaacacaacatcaaagtgacaaccatcgattaataataaatatgtagggcaaatgaaaaacgaacaaagatatctagctcttgctgctttttgaaggtgacttttacagtactcctagaggggcaagaggttgctgcgatctgatcctgctctttctcaaacgctcagcgatgatgaaagcaagctcaagagattgtgaagcattgagccttgggtcacagtgcgtgtggtaacgtgagctcaagttatcaaatgtgaccgttcttgacccaccaatgcactcggccacattctgacccggcatctctagatgaacccgtactgggtggcttacttcttgctcgtgtacgtcgaataatgctatcacttgggccctgatggaatcgaacgggctagtattaaaaacacagggagcccttatggtgttgtcatgcataggagcactga

SEQ ID NO: 225274 - DNA, 502 bp, Glycine max
  unsure (1)..(502): unsure at all n locations
cttctttttactctctctctgtctctctctacgctttctcgttcgagatccctcaagggatccactaactgaaggagaaatggggttgacattcaccaagcttttcagccggcttttcgccaagaaggaaatgcgaattctgatggtgggtctcgatgcagctggtaagaccaccatcctgtacaagctcaaacttggagagatcgttaccacaattcccaccattgggttcaatgtggagactgtggaatacaagaacattagtttcactgtctgggatgttggtggccaggacaagattcgtcccttgtggaggcactacttccaaaacacacagggtctcatttttgtggttgacagcaacgacagggacagagttgttgaggccagagatgagttgcacaggatgttgaatgaggatgaactgagagatgcagtattgctcgtatttgctaaacaacaagatcttncccatgcaatgaatgctgctgaaattaccgac

SEQ ID NO: 225275 - DNA, 452 bp, Glycine max
aactcaatgggatggcgcattgattggtatcaattacagttataaacattgaatccaaactcaattaaaaaaaaaaaaaactcaaaagtatttagacatcccatgaaacaaattcctactataattttagccatcaagatgtcctaagccataaaacattaacataaagccaatttgactcatgagagaaccaaaaaaacaaactagataatattcacccctgcatccagaatcaccaatccacaagaagactcccaaaaagcatcaagccttgatggctatgttgttggaaagccagtccaaacccttataaagaccctccccagaggttgcgcaggtgctctggatgtaccagtggcgctgtctgatagagtggagacccagcttggcggtaatttcagcagcattcattgcattgggaagatcttgtttggtagcaaatacgagcaata

SEQ ID NO: 225276 - DNA, 483 bp, Glycine max
  unsure (1)..(483): unsure at all n locations
gtttcagtttcggatctctctcttctttcacaccaatttccagcatttgaaacatggcagattcaaaatcaggattgaggaaaccagtgttcaccaaggttgatcagctttgcccggggaccagtgggcacactttaactgtgaaggtggtcaatgctaagatggtgatgcagagaggtcgctctgatggtcctcaatctcgtcaaatgcgaattgctgagtgcttggttggtgatgagactggaatgatcatattcaccgccagaaatgatcaagtggatacgatgacagagggagctactgtgatcctgcgtaacgccaaaattgacatgttcaaaggatcaatgaggcttgctgtggacaagtggngccgtgtggaactcacagaacctgctagtttcactgtgaaggaagataataacttgtctctcattgagtatgaactggtgaatgttgttgcggaatgactttatttgggaatct

SEQ ID NO: 225277 - DNA, 528 bp, Glycine max
gactaaaaaaaggattacgtcaaatataaacactcacctgccatatataaaattctgatacacataatctaaaattgtcaatagatagcataacaaaaagcatatgatctggaagccaattcccattttcttgttgcaattacagcgaccatctgttcagtggttaagctacaagatccagagtctgttgcaaaagtaagaagcaactgttggcactactagctgctcaaatctctattcctaaactaaggtgaatgtgatgggcatgatgagatgtctcagacaaaaaacaaaagatttcttcgctggatttgttttattctcaaaagaaattccaggattcccaataagtcattccgcaacaacattcaccagttcatactcaatgagagacaagttattatcttccttcacagtgaaactagcaggttctgtgagttccacacggccccacttgtccacagcaagcctcattgatcctttgaacatgtcaattttggcgttacgcaggatcacagtagctccctc

SEQ ID NO: 225278 - DNA, 443 bp, Glycine max
caactctaattgtgtttatcacaagagctgataaaaatggagttaaaattgtgaaacatgtcaaaggggggttgaatccaagctccatccatcagttagacttcaacaacccctacattggagaagtggccaaaattggactagtggttgctgtcgttgcccttactgaatctattgctgttgggcgatcgtttgcatccatcaaaggataccaacttgatggaaacaaggagatgatgtcaataggtttgacaaacatcataggatctttcacctcctgctacgttgcaactggttcattctcccgtactgctgataattatgcggctgggtgtgaacttttgtgtaaacattgtgaggccatacggtgttgatatcactgcagttttgacaagctattgattacactccacagctttcttgttctgtgatttctctgccta

SEQ ID NO: 225279 - DNA, 501 bp, Glycine max
  unsure (1)..(501): unsure at all n locations
agcctggccctgcaagtgttgaaatcgatgatcaccctatgcaaattgaagaaacacagtacccgaaaaccttcttctataaagaagaccttcatccaggcaaaacaatgaaagtacaattcagcaagcctccctttcaacaaccatggggtgtcggtacatggttaaaggaaattaaagacactactaaagaaggatatagttttgaagagctatgcatcaagaaagaagccattgagggagaagagaagttttgtgcaaaatccttgggaacagtaattggttttgccatttcaaagctgggaaagaacattcaagtactttcaagttcctttgtcaataagcaagaccaatacactgtggaaggagtgcagaatcttggagacaaagcagtgatgtgtcataggctaaatttcagaactgcagtattttactgccatgangtccgtgaaacaacagctgtcatggttccattggtggctggtgatggaaccaaaactc

SEQ ID NO: 225280 - DNA, 577 bp, Glycine max
gatcacaggatgatgctctctttaagtagggaagcagatcttatcagtacacataggtaggttgaaattctagctctagcaatctagctagagaaggtagtacttgcacaacacacagcacatgataatttattttatacacaatctcattctcatggtgctcaagatgcatggactaattaagcaacaatgttggtctgataggcagtgtccacagataaattgggtacccataaaatggccttgcttccaaggaaatggcaaacagggttagttccaggatcaactcccataagttgatgaagcatttgatgattcattccagaagtatttgagtggcaaatagcaagtgcctgagttttggttccatcaccagccaccaatggaaccatgaaagctgttgtttcacggacttcatggcagtaaaatactgcagttctgaaatttagcctatgacacatcactgctttgtctccaagattctgcactccttccacagtgtattggtcttgcttattgacaaggaacttgaagtacttgaatgtctttccagctttgaatgcaaaaccaatactgt

SEQ ID NO: 225281 - DNA, 415 bp, Glycine max
gtcacagtagaggtgtgtaccaccgagacattaagcccgagaacattctattggatgaaaatgggaatctaaaggtttctgacttcggtttaagcgctctcgttgattccaagaggcaggatggcttactccatacaccatgtggcacacctgcttatgttgctcctgaagtcatcaaaaggaagggatatgatggtaccaaagctgatatatggtcttgtggaatagttctgtttgtcttgttggcaggttatctcccttttcacgacccaaatttgatagagatgtataggaagataagcaaagcagaattgaaatgtcctaattggctcccacaagaagtatgtgagctgttgggcatgatgttaaatccaaatcctgacactaggattcccatatctactattaaggaaaa

SEQ ID NO: 225282 - DNA, 485 bp, Glycine max
tgaagagactgcatagtttggggttggatctgctgagtctatcaatggaagatgctggaggttccaaattgcatggaattaagcagattgagagattgaaggaaatgtttcagaagtggcaaactgtaactctgggctcaaaagattccaacaatcattctgatgtgactcatcatcatggggtcttatcaccaatgattaacaaaaggctaactgatattgtgtattgtgactctgatgaggatggctgctacagccctcaaccaccacatgatgttcccaaagggtacttagccgtctatgttggtcctcagcttcggaggtttatcattcccacaagctaccttagccactctaatgtcaaggcggtgctggaaaaggctgcaaaggaatttgggcttgatcagagtggtggactcaccattccatgtgaaattgagacctataaatacctcttgaattgcatagagaaccatgatgaccgc

SEQ ID NO: 225283 - DNA, 447 bp, Glycine max
tgttgatcgagataactagaaacagtgtgatgaaaatgaaggtccttgttttcttcgttgctacaattttggtagcatggcaatgccatgcgtacgatatgttccctctccgaatgaacactggctatggtgcccgtactccggaggtgaaatgcgcaagttggaggcttgctgtggaagcacacaacatctttggctttgagaccattcctgaagagtgcgttgaagcaacaaaggaatacatccatggcgaacaatatagatcagactccaaaacagttaaccaacaagcttacttttatgccagagacctcgaagtccatcccaaggacacatttgtgttcagtatagatggcaccgtactctctaatattccatactacaaaaaacatggatatggggtggagaaatttaactcgaccttgtatgatgaatgggttaacaagg

SEQ ID NO: 225284 - DNA, 356 bp, Glycine max
gtcttcataaacgcctttcttctccgtttccgtttcctcgttcgaattcgctttttgatctgcgaaaatgagagagtgcatctcgatccacattggtcaggctggtatccaggtcggaactgcttgctgggagctctactgcctcgagcacggtatcgggcccgaggggcaaatgccaagtgacaagacagggggcgggggagatgatgctttcaatactttcttcagcgagactggtgctggaaagcacgtgccacgtgcagtgtttgtagatcttgagcccacctgtattgatgaggtgagaaccggaacttaccgtcagctattccacccagagcaactcatcatcgggaaag

SEQ ID NO: 225285 - DNA, 558 bp, Glycine max
gagcaaaaacttatatcattgttcaagtagaaacggggaaaagtacattaaaaaaaaaagagaaaaataaaatcgcaataaaaacataatgacacgctgttatctaaacttcaaaagggtctttgacaaaatcaagaacaacccatgagaatcttctgcttaatcgacttcctcaattttgggtccagcaccgcttccactgccagctgcaggaccatcctcatccatggctccacccgcatcaccaccagcaccctggtacatctttgctatgatgggattacaaatgctctccaactccttcatcttatcctcaaattcgtcagcctcagcaagttggtttccatctagccattggatagcctgctcaatcgcatcttcaattttcttcttatcatcagaagacagtttggaagcaatcttgtcatccttgattgtgttcctcatgttataggcataattttccaatgcatttttggcctccactttcttcttatgctcctcgtcctcagacttgtatttctcagcttcctgcaccatcttctcaatctcctcctt

SEQ ID NO: 225286 - DNA, 549 bp, Glycine max
  unsure (1)..(549): unsure at all n locations
gggatttgccaagttcttcaaggaatctagtgaggaagaaagagagcacgctgaaaagctcatgaaatatcagaacactcgcgggggaagagttgtacttcaccccatcaagaatgtcccctcagaatttgagcatgtggaaaagggggatgcattgtatgcaatggaattagctttgtctttggagaagttagtgaatgagaaacttctgaatgtgcacagtgtggcagatcgcaacaatgaccctcaaatggccgacttcattgaaagcgagtttttgtctgaacaggttgaatcaattaagaaaatttcagagtatgtggctcagttgagaagggttggaaagggtcacggtgtttggcactttgatcaaagacttcttgattaggaagatgctgcttaatcttgaatagccttattattagtcttcatttacatttggtcttttctgaaattctgggttgttttctatctagtagtatttaaatgtttttcctatgtactgagaattangaaactcgagtaatgtaattgctagtagcacatgta

SEQ ID NO: 225287 - DNA, 461 bp, Glycine max
tttctttttttttttttttttttttttttttttttttttttttttttttttttttttgttttttcttttttttaaacgaaaggcaaatccaaaagggcatggcaaaaacgggttgcggccttttacaggggcccctagcaaaaacattactccgggtccctaaagcctaacccatgggaaaaccctttaaatccctcaaaccttaaaaacagcccaaaatttcagaaaccccccaagggaaccgaagaccaacaaaaaggccttctaagattaaaccgctttttcctaaataaaaaatttttggccaaggggccaaacaccgggaccctttccaaccctttctaaatgggcccccttccctgaagagctcctaaaggactcaaccgggccagaaaaaaactcgttttcaatgaaagccgccctttggggggtattgtggggaactgccccacagggcccat

SEQ ID NO: 225288 - DNA, 451 bp, Glycine max
ctcgagccgaatcggctcgaggaggaagaggaaaaagaggattggagggtcgccacgtttagcaacaaccaaaccctctctactctttcttcttctcttcgctagggttttagcttcttcctcttcacttcgttcttctggcctctacaatgagcaacgacaaggacaccttcaacgtcgctgatctcacttccgctctcaacgaggacaatagagcagaccttggcaatgctctcaagagcaagatacagagtttggctggacagcattctgatattctagagtctctgtcgcccaatgtcaggaagcgtgtggaggttcttagagagatccagggtcaacatgatgaattagaggcataattttttgaggagagagcagctcttgaggcccaataccaaatattgtatcaaccactctacacaaagcggtatgaaatagtaaatggtgc

SEQ ID NO: 225289 - DNA, 385 bp, Glycine max
ctgcatctggacgcgatcttctggcaatggctcgcccctattggaacattgagctgattccttctagaagcgtggttgttagcaatcagcaagaagagcctgtagttgtcgagcacctggctcatattcttgcatattactctcttgctggcccaagaacagattttccagataccgtaatacctttggatcctggaacatatgttgacacctaaacttggacataccatgtttctttatcttccaaatcttgattgttggcggcggcagtgttctaaattctagggggtgaacgatagtctgcaattcctagacaatagtgttgtaataagctcgtgttctttggttaccatcaactcttgcagcgggttgtttttttcccctg

SEQ ID NO: 225290 - DNA, 425 bp, Glycine max
agaaacaatccatgctttatattcacaaaattgagcatcttcaggggaaaaaaacaacctgctgcaagagttgatcggaagcaaagaacacgagcttattacaagactattgtctaggaattgcagagaaaattgaaaccctctaaactaaaacactgccaccactaacaaacaagatttggaagaaaaagaaaaatggtatgtacaagtttaggtgtcaacatatgttccaggatccaaaggtattacggtatctggaaaatctgttcttgggccagcaagagagtaatatgcaagaatatgagccaggtgctcgacaactacaggctcttcttgctgattgctaacaaccacgcttctagaaggaatcagctcaatgttccaataggggcgagccattgccagaagatcgcgtccagatgcag

SEQ ID NO: 225291 - DNA, 520 bp, Glycine max
cataacaaacgtaggtgggatattagagtactattattaatgggacacaattgagttcaacacaaaccgaacttattttcaagggacattattacagacccattaaacatcaaagttcttcaaatgttttgggaacacatccaacattacacaacgagcttaaaaccccccacggagacggaggacaaggtgaagggttgattccttctggatgttgtagtcagcgagggtccttccatcctcgagctgcttgccagcaaaaatcagcctctgctggtccggtgggatgccttccttgtcctgaatcttggccttcacattgtcaatggtgtcagagctctccacctcgagggtaatagtcttacccgtaagagtcttcacgaaaatctgcataccaccacgaagacgcaacaccaagtggagagttgactccttctggatgttgtagtcagcaagggtgcgtccgtcctcgagctgcttcccggcgaagatcagcctctgctggtctggggggattccc

SEQ ID NO: 225292 - DNA, 438 bp, Glycine max
gcagatggcatggctggggctgctatgtatgaactcgtgcgtgttggtcatgataatctcattggtgaaattattcgtctcgaagggaattctgctaccatccaagtttatgaggaaactgctggcttgatggttaatgatccggtgttacggactcacaagcctttatccgtggagttgggacctggaatactggggaatattttcgatggaattcagaggcctttgaaaactattgctaaacgatctggtgatgtctatattcctcgtggtgtctctgttccagcactcgacaaagatacactttgggaatttcaacctaagaaaattggtgaaggcgaccttctaactggtggagatttatatgctactgtttttgagaacagtctaatgccacaccatattgcacttcctcctgataacatgggaaagattacc

SEQ ID NO: 225293 - DNA, 387 bp, Glycine max
  unsure (1)..(387): unsure at all n locations
atttcatcaaccatcgcataataatagtattatcatgatagccgtggcccgaaaggacatggaccgtatcaagggcccgtggagcccggaggaggactaggcccttcagaagcttgtggagcggcgcggtcccagaaactggtcgctcatcagcaggtccattccgggccggtctgggaagtcatgcaggcttcggtggtgcaaccagctgtcgccccatgtctagcaccgggccttcacaccggaagaggacgagaccattattcgggcccatgcccggtttgggtacaagtgggccaccattgcgcgccttctatngggccgcaccgataacgcataagaatactgggactcaaccctaaacgcaagtgcgcgtgcttcatgatg

SEQ ID NO: 225294 - DNA, 404 bp, Glycine max
aaaaggaaaaattggggggatcgggtcatagaaaaaaaaagggaaaaagagaaccaaataattttaaaatggccccaaatgggaattaaattaaaggaaccaaagggacaaaaacagggaaggggggaatttcccggggaccaggaacccaaatcagggggggggaccggccaaaatattaggggcccaaagggcattaagcggacagggctgtttgggggccaatcgagtccaggggttgccactaccggaccaagggaaaaaactcacaggcccagcgggcaggtcccgggaactccccttgacggtatcgccccccaacccagggggggtccacctgggctcaatgggggccccgggtcccgggaacaccaacaaaaacgggggcaaaaaaccccgcttgg

SEQ ID NO: 225295 - DNA, 479 bp, Glycine max
ggctcatcttcaaggcctcgctgtgctgcgaggaccgctccgacctcatccccgacctcatagaaatcctcaattcgcttcacctcaaaaccctcaaagcagaaatggccactctcggaggaagaacacgcaacgttctcgtggtcgctgctgacaaagaacacagcattgaatccatccatttccttcagaactcgctcaggtccattctggaccgatccagttccggcgacaggtcgaaacgacgccgtggcttagaccgaagactgatgtcttgaaccggatactgtttccatagctacacatgcaaatgcatgccttactagtatcactcctaatattgttggttaattcgaaatggtttatgcgcctgcaggtgttctgtaatggaaaaagaaattaagacagatcatgagtgtaatggacttgcattatcagttcaaatataaacatttttgcactctcaactaatcataaaa

SEQ ID NO: 225296 - DNA, 470 bp, Glycine max
cccacaaacctctttttttttttcctcccaaacatgtttctatcactctctccgtgtcttaatccctgaaaagcaagtagctacggaaaacaaaaacatcatcacagaaactcacaaaggaaaaacaaacaaacaaacaaaatgtcttctccaagcaagcggagagaaatggacttgatgaaactgatgatgagtgactacaaggtggagatgattaatgatggaatgcaagagttttatgcgcacttgcatggacccaatgagagtccttatcatggaggtgtatggaaagtaagagttgagctgccagatgcttatccttataaatctccttccataggctttatcaataagatctatcacccaaatgttgatgagatgtcaggatcagtttgtcttgatgttatcaatcaaacctggagtcccatgtttgatcttgtcaatgtgtttgaggtgtttctaccacaact

SEQ ID NO: 225297 - DNA, 358 bp, Glycine max
caaagctagccaacctcaaataacccttgttatctctctttcattctcacttgtactcatctctttttcacaactttttttgtaccttctgatctaatggcagttccagtgattgatttttcaaagctgaatggtgaagaaagaaccaaaactatggcacagattgctaatgggtgtgaagagtggggattttttcagttgatcaaccatggtattccagaggaactccttgagagggtgaagaaggttgcctctgagttctatagctggaaagagaggagaatttcaagaactccacatcagtgaagctactaagcgattcagtcgaaaagaagagcagcgaaatggagcatgtgga

SEQ ID NO: 225298 - DNA, 510 bp, Glycine max
agaaaaaggaagactaattaatacccatggtggttttctattctggagaaatccgtgcagagaatgataaccaaatggtatacttttctactatcaagcatgtcttatagtaccaatacccttaaaacaaagtaaaagatgaagtttttttttttttcaaaaaaaaaaagtggggggaagcgcaaaagcattttctatacgaaagcaagttgcttttctcacatggccctaacagcttggaatcttggttccttgggaaggaacttctgctcagcatagacagacatgtagtcaccaaaaacaaacttaggataagtttcatctacttgttggtcttctttctccacaagttgtggtgcaggacatatggtggccttgaatgaaggattatagaaggaggcaattgatcttctgttcccatctggtgtggccagaaccctgtgccagcaactcttgtatctaccattgctcaagacctcaatctgatcaccagtgttgatgacaatggca

SEQ ID NO: 225299 - DNA, 534 bp, Glycine max
gaaaacccagataacggagtggatgctaaagtgcttgttggctcaaagaaagagagactggatgtcaaggcagccttgtcgaattcatttggttttgggggtcacaattcttcaatcatatttgcaccatactagtgaaacagatttcagagcagtactttcttattattataagttactgagtacccagacaatgtttattgcatactaactccagtgttatggatggttgacaatatatgcggtgtggattagttggttggatcagtaactgttgagaaacattgttttttgggatggggttggttgtgtgcctacagaatcagagtgttgatagattatcattatctggtgctcctggtgggagagagtgagtcgctatctatccactaccataaaatcctatctttaccatgaatggctagagtaggagttgacccacttttgatgtaaccgtttaacaaccattttgatgggatggataccgtcttttggtttattccatgtacaaatagaccctcatggctctgggca

SEQ ID NO: 225300 - DNA, 605 bp, Glycine max
agcagttatgttctgggcattatttaggctagttttactcttgatagtttgatgcacaagggaactcagttaaaattttatacaaagaaaccaacacaaaagaagtaagctttaactcattgatgtaatatagtggtcttaaaccaaataaataatccttgcattgacatttacgattggagtgaagacaaccaaagcccctttcaccttttcctcccaatctagcatagcatttcggccgcacatcttactggcccaagatatctgatgctgacttgttcaagatttgaaaaagctcttcccggtcaggtttgaatatgagatagcgataagtaaaccacacagagtaaaatattccaattaattccagtactgttgggaaaactggcaatttgtcaatggccgcaatcaaatttgttgatgcccaaaatgctgctatggctgcaaatcccaaaccaataagtcccagacggtcctcaggttgatcccaaacattctgaacagacttaaaaacagtaagggtagttgaagattcagaactttctccagaagccttacaacatagaaacatgatccgttccctgatgaagagaaaagggaacttg

SEQ ID NO: 225301 - DNA, 489 bp, Glycine max
cgcaaaaataaacacaaagcctcattcacagcacggtggtgtctttcaagaaaacaaagttacattcccttccctgttgcacaggtttgaccaaatacactgaattactaaaattgacataaaaggaacactaggaaaacaaaaagcaaaattccaaacgattattctgggaagagtcaaaccacaataatacttatcaacaagaaattcggttgttgtacccataataccgattcctactcgcactagtctcttcaaacaacaccaacttcgattgatcagtagctgtagttcgaaacatggaggctctctgaggcaccatcagcaagctgtgagttacccttgtaggttcccagagttgcctctgagttagccttggctcttaccaaaagggcttcctgagccttcttcacattctcttcttttccgccccatgccttaagggtgctctgttgaagtgcccttccaaaggagaaagagagtgaccat

SEQ ID NO: 225302 - DNA, 509 bp, Glycine max
tcgcgatctagaactagcatatattggaccttgtatcccatccaatcctttcatgtcggaactggtggtttcttcttggcaggtgcatcatatccataaagtgcgtaccttctgaaaacacatccagttccgacatatattggctctagaaagaaaaagaatgccaatagtaagaaggagaaaaagaggaaggtgaagcacagtgaagcatcaaagcagatacatgcacttgaaaatattgaggcggtgaatgaaggaaccaacaatgagaagacatccaatctgactcaaacaaagttggagaagaggtttggacagtctccagtatttgtagcctccacacttttggatgatggtggagttccacatggcgtgagtcctgcatcacttttaaaagaagccatccaggtcatcagttgcggttatgaagacaaaacagaatggggaaaagaagttgggtggatatatggttctgtgacagaggatatctcgactggatctaaaatgca

SEQ ID NO: 225303 - DNA, 516 bp, Glycine max
attcaaaagtttttgaaatgttgtcaccccttcttctatttctatgcctaactcttcctttgtttttgttgtccttcttcaaataccgtaaaaccttcaagaatccaccacttccaccaggtcctagaggccttcccataatagggaatcttcatcaactagatagtccttctcttcatgagcagctatggcatctctcaaagaaatatggtcctttattttcccttcaatttggattaaggccagccatagttgtttcctctccaaaattggccaaagaggtaatgaaagacaatgaccttgagtgctgtggacgacctaaattactaggccaacagaaactaacctataatgggttagacatgggattttcctcatacgatagttattggagagaaatcagaaaaatttgtgttgtccatgtccttaagctccaacgtgtccaaagctttacctcaataagacattttgaggtcaagcagatgataaaaaaaatatctaggcatgcctcatctt

SEQ ID NO: 225304 - DNA, 538 bp, Glycine max
cagcagtagttacgacttttggattttacatatagcacttggccacaacacacagaggattcttcttatgctgtgtaactcctggcaacacttcagtatcaatgtcttcctttttcattccttgtggcaattcccagtcaaaggaataaagaagattagcaagtataagatccaatgcagcaaatgccatattcataccagggcacaatctacgaccagcaccgaatggaataaactcaaaatcttgtccataaagatctatgtcgcaatttaaaaacctctcaggtataaactcttctggatctttccaagccttaggatctctatgaattgcccaagcattcacatataataatgtcttggctggaatttcgtagccatctaacatgcattttttatttgtttctcttggtataagtagtggtgctggtaagtgcaatctaagtgtctcttttatcactgcccttaagtaggaaaacttttgaatatcatcttcatccaagaaatctttcttaccacttaagcctctaatttcttc

SEQ ID NO: 225305 - DNA, 301 bp, Glycine max
aaaagatctgatttgaatgatgctgcgatctcagccttcatagctgagggctgctcatcacttgtgagagaatacttggatatatgccaatggagtttcccctgactgatcactgggccctgcttgtcctgtctcgctggaggctgccttttgtactgactaaactacaaaagatggctatcttagtgatggatagaagactatcagaagaggagactgctggcttgagaaaatgctgctggctactggatactgatgacaaggtggctgtctcttgaaaggaactacaagctggtctaat

SEQ ID NO: 225306 - DNA, 493 bp, Glycine max
gcgtgtgaaactttacatccgagaaatcaagaacttgaaagatcaaaatccttatacttaaactatggacagaatgcccctacatgaaagcgcagaaaaatagaagaccaacttgaagtagctgcaacacccaacactaaggtttacaaagcgagaaacaatggttgcactcatacagcacatagatgtaacactagatgaatccttatgcgagagcacccacaatcctgattgttcttcagggataggaccgggcagcaagatatgaacaattttttggaaagatttatactagataattgtctttctggctatgctgcatacaaacctgtacataatgagcacaatcgtaagctatagagcacttggtgcatctatcatgcttaaatgcagactgtagcgcatagtcctgctaccaattccagcggtgcctttttgcatcatggcagcaaattcaccataatcaatccttccatcattatctagatcaact

SEQ ID NO: 225307 - DNA, 285 bp, Glycine max
gcaaaggaggctgcttacttcacagcccaagtcatcatcatgaaccaccctggtcagattggaaatggctatgcccctgtcccttactgccacacttttcacattgctgtcaagtttgctgaactcctgaccatgattgacaggcgatccgccaaagagcttgccacggagcccaacattctgaagaacggagaggctggttccgctaatacgaccccaaccaaacccatggatgctgaaacttactacgacaatcctccacttggtagggatgctggtaggcac

SEQ ID NO: 225308 - DNA, 502 bp, Glycine max
gaacactacaaatagaaagttgacatttaataaaccaaagcaacacaacgcagcaaagtcctgaaactcgctgcgcttaacaaaaatgtaatcaggggttccgacaaacacaacacattaaaacacagataaataaaagcaattttgccaccgtcgatcaagaacccagttctgggaacaacagttgcgagatgatggtggagacttcaaactttgtccgaaaaacaagctacctagaaaagaagacacaagagtacagaaaagaaaccaacatttattgtaaccaacatcccctgatgaaccagcccgcacgattcacttcttcttctgggcagccttggtgaccttggctccggtaggatccttcttctcaacgttcttgatgactcccacagcaacagtttgacgcatgtccctaacagcaaacctaccaagtggaggatactctgagaaagttcaacaaccatgggtttggttggatcatcttaacataacagcatca

SEQ ID NO: 225309 - DNA, 457 bp, Glycine max
caaactcagaaccaaactcagaaccaaactcgccaaaactagggttttgcattgatggcactgtgcaaccgcgtcagatcgggaatctctctcttcaccaaatccacgttccttacttcccagcgatccagtctccaacgatccctcgttgcccctttcatttccctcgcctgcagaaattacgccaacgtgccggggcaaaaggaaaccaaagttaaggtccctctggctttgtttggaggttcaggaaactatgcctctgctttgtatattgcatctgtgaaagccaatgcagtggaaaaggttgagactgagcttctgcaatttggtgaggcagtaaagaatagtcccatattttcacagtttataagggacttgtctgtggctaaggatgttagagtgaacgctatccaggatatttgtggggaagccatgttttcggatgttacaaagaact

SEQ ID NO: 225310 - DNA, 453 bp, Glycine max
cttacattgtacacgtggcgaaatcggagatgcccgagagcttcgagcaccacgctgtgtggtatgagtcgtcactgaagaccgtgtctgactcggcggagatgatttacacctacgacaacgccatccacggctacgcgacgagattaaccgctgaggaagcgcgtttgctccagcgccaaacggggattctggctgttttgccggagacgaggtacgagcttttcacgacgcgaacgcctttgtttctcggacttgacaagagcgccgacttgttccccgagtcgagttcgggaagggacgtcatcgtcggagtcctcgacaccggcgtctggccggagagcaagagcttcgacgacaccggactcggacccgttccgagcacgtggaaaggcgcgtgcgagacgggaacgatattcaccgcgtcgaactgcaccatgaagttgatcggag

SEQ ID NO: 225311 - DNA, 552 bp, Glycine max
  unsure (1)..(552): unsure at all n locations
gagcccaaccatttaaaatttctttcccctttgcaacatttctcccagggaacaaacagaccaacaccaaccaagcataaggccccagctatcatcaatttccagctggataaataaataaacccaacatttttgtttgcaacaaaagttaaatttattaatagtagtaataatagtaacatattaaatactataatcactagccaatcaagacacacccctcttcgagtgagtgatgaaccttgcaatttgcatcaacctttttcaagtttcaaccccaattaaccgaaattggggatccaaccaggtgcttcccatcggaccattctacccttccaaaagcgttttctgtatgctgtggcgaacccgatgacgaaaacgtgacggtgaacgttttcttctcgttctccttgaaactcaacacttgcggttctaccgagattntaacggacgcagtgtctgacgtcacggaagctttgtaagttcccgcgggccccacgttagtgagagtcctcgtgtgcttaaccacgcttcctgatgattcaaacaaca

SEQ ID NO: 225312 - DNA, 543 bp, Glycine max
tgttttttttttttttttaatcgaaactggaggtatcatttatcattaatgattatgatccgaacatatgtatgcaaggccaaccagaacaatagtcactagattgattctcatatcaatatacggtgtccgatcccatgtgtagaaaaatataagatgggtaataaggatttttcttaagcaatatccatggaaagaatacagacaaaattgaaaattcaaaaggaagaatacaataagtactaacaagcgggctgtcaccaaaagcctcagaatttgaagcaataaccagccttgaagttagccgtcaccggaagctacacgaagttgataagacatacaaacgaaggaaacataagagaaaacagggcatttgctcctattaagcggctcccttctgcttcaaagttatcttatccccaagactgagggctattccctgaggtatacttgtgattctgatgtatccactcaacttaccatctgcttgcttttcaatgctcacattcaccaaagcatcttccccagatacactcttagcat

SEQ ID NO: 225313 - DNA, 496 bp, Glycine max
gaggttcaagagaaacaagggcaattcttaagtaaacaccattttcaacaggaatgagttattgcgaaggatgccaattacatcactgacaacagcatacttattactgcaaaaatgttacaaaatataggtccatgacaaataaatgaaaaatggctgccaaagcaatcatccagaggcataaatcttgtaaatttgaataaaacatttgccagaccttcaatgaagtctaaatgaggcaaaaaaactataatgaactaatagaggctccagtaggttttgcgtcggaaccagttgtaattaggcaaacgctgaataggacccgtggcagcaataacaacatccttgtcatagataaatcggttcgtaacacgtttaattgtactggcatgaacagcttcaattctagcaaacaattcagctaatgggattcttcgaccatatgtgagtagctgacgaccaatatttttagccactgtgcttgttccatctatgt

SEQ ID NO: 225314 - DNA, 552 bp, Glycine max
ctgggtattgtgttcaaactcacatgcctctgctctcctaaaccgtaaaaactattttacatatggactccagtagaatacactgattagtgttgaattttggatggtgccaccattgacagcttccttcaggatgcacaagcactcagtgcgtcaattcttaaccggttcgtctaccttgacacagacaatgaagggcttctgtcgtatgcggtggtggtgaccgagctccaaagcttgagggtgttggaaacgcactttggtattgatgtggagccagacccagatgagcttgctcgtgtttatgaatccttgttcgtacaattcgaccacaacttgaatggcaccattgatctcgactaattcaagaaggaaacgaagcagatgatgcttgccatggcaaatggattgtgcttcttgccgctcagaaggtcttggaagaaacagcattcttaaaaagctgttgaagggagttccaaagtggctctttagtactaattactcagcctgtattaaaaagtctagattggaatattttatgtcctgtttata

SEQ ID NO: 225315 - DNA, 467 bp, Glycine max
ttccgctcccgtaggaatcgaagatttataattccaatcatatatagtaatcgtaacatcgtagtataatctgattcatcaacagcgcttgtcggaaacagagtcggtttagtttgttagttagttgtttaatgaacgcaattcggtcccgttggttgacgagaatggcagaagacattgggaaaagcaacctcgaattctcttctgcttcaacaacttcccgaggcttctggccttctgtcttacgttggatcccctcttgcaccgatcacatcatcaatgctgaaaaacgccttctctctcttgtcaagactccgtatgctcaagaacaggtcaatataggttgcggtccacctgattaccaagttagatggttccgttcatctagcaatgaaccacggtttattaacactgttacatttgacagcaaggatgattctctacgctggtgatggttcatggatatg

SEQ ID NO: 225316 - DNA, 527 bp, Glycine max
cagtaatgaaatttatattagacgtcattattttttgaattgccattacaagttacaattgcaaattccatttaagcatgaataggacatggcttgaataaataaaggagtttaatttgtaaaagaaatatataatcatagacagcattacacaagattatactctatgcagaggttagcccttcaggaagggattcactgtctggatcaggcctaagaaaccttctacaagcataaaacactgctgaatggaagccacttgggttgtcaatgaacacaaagtgcccggcctggggaaccctaaggatttcacatggaaccttcatttgtttgcgtgcttcttgggctccttcataattcatccagtcctgaaaaccatatatgaaggtggtaggcaccttccactctgaagcactgtgaagaagaggtgacctcgggagtcctccaaatgaaaatatatattttaagcacagctcgccactagctatggctgctaaagtatggtaaacataatctgtcagtaatct

SEQ ID NO: 225317 - DNA, 462 bp, Glycine max
acaacctttaacaacaccaccaacaatgggagcacgaaagagactctcttcttccgaacctccttcttcttctcctcccgcaacaaatgaaaacacaaacacaactgccaaacccaccataacagaccctccaatcgcgcctgccaaatggggtcttcttctgaagctctctctctttttgctcccttacttgtacctcctctttcaccactaccccatcgagccggagctccgaagttcgatcctcatcaacgccggaatgagcctcgcggggctcttcgtcacggacaagatgatccccgtcgcgtcccgctacgtccagaagcggaacctctttgggtatgacatcaacaagaagggcacccctcagggaaccgtcaaagtgcctgagtcattaggtataagtggtggtattgtcttcttggctgcggcaatcttgtttcagtattttaacttcacagc

SEQ ID NO: 225318 - DNA, 532 bp, Glycine max
aaataagcagtatagtagtctaaaaaaaaacatcccacacactatcattcaccctagccaaaaccctagaaatgaggatcatgcaagaatctcaatctttcattattcccaccacaattctactactagcactatgctacaccacttcaggccaactctcaccaattcaaccccccacaacatcaccatcactcccatcaccaccactatcccaaccctccccgccgtctccggcactccactccccgccggcaaccgcgccggcgccggggttcaacactgtccctcttgtcccagtaaccccaagtggggcccccacacccaccaccatcatccctaagggccccaccattgacatagtccaaatcctaagaaaagccaaaaggttctcagtcctcactcgccttctcaaaaccacacaactcataaaccaactcactcacagctcgtaacttcagctcaggagggtaaccctattgcacccgaaacagtgctttctcaaactaaagcagggttcctcacctcctactga

SEQ ID NO: 225319 - DNA, 383 bp, Glycine max
aactaaataaactcgttcatgtaaaatccttacgcaaactaaattaactaaataaatcgtacatggcaagcctgcacgccaactaaaggctgacttaaattatgagaagtgggacacactatgcaaaatccaaatagatgaagatctaaggtttgaccatttctgggcacaaaacggggggtaggggagatttaacgattagccttggcaactctagtaatttgatcctatcgcttgatagcatgactagcggatgaaccttgggacgcatgcagaagttgatatgacactattacatgacgtgttttgatgtttctgtgaccagatcttcgaggacctggagtcagaagatgaagagtcaagatgaccacgaagaagggggg

SEQ ID NO: 225320 - DNA, 565 bp, Glycine max
  unsure (1)..(565): unsure at all n locations
ctattaaagcaggggacaaaactgaaacatgcaaaactccattaactagtgaaagccccctgccatcatgcttgaagccttggcctcatcagctggctttggagttggcagcaagacaatcgccattatggcgctcaacgcggctgccgcagcacccaccatgaaagccggcaagttgccaccaccaaacaaggaatcccaaggaccacttaatgcagacaccaccatctgtggtaccacaattgcaagattgagaactcccaaagataaaccttgtcctgctcctgaagcgctgcagtatattgatgctagagcaaaagggacactgaaagtaatcgcaaggggaactccaagaaccccaaagaaaaccatggacccaaccaccaccccctcggaggggtggcccacggcggcggggttcatccggcgctggtgctccgccaccttggtgatcaccaccgtcattccgaacccaatcgcgagaataaagttcacaatcgcccaaagcctttcactccncaaccatcttcccaacggctccaccgtcacgacatgaagccaacac

SEQ ID NO: 225321 - DNA, 284 bp, Glycine max
ctcaattctgttttttttttttctgtatttttttatgaatttcccccttttttttgtgtacttgtatgtgttctttcagaacatatatattttatatgatgaaacaaaaaaaaatgttctctccaagaaaaattacttcatacaacaaaaaaaacacaaaaaaaaaacagaaaaaaaaaaaaaaaaaggacgggataagccagcaccaaagctgatctatgggcttgcggaatattcctgtctggcttggtgggaggctatatcctctcccacgacccagattt

SEQ ID NO: 225322 - DNA, 521 bp, Glycine max
ctcacacaataaatacaagagattctgcaaactgaaaaagggatttcttactaaagcaaactcaaacaagaacaacttccactcatttggcatctaccgtagtagaacaggatcaaaagcagctctctgatagaacacacgtatgtattatattgaacatcttgcacagtggttcatttctcacagctattgcaacttaaaatacttgcaaagcttctgcaaattccaaactttctttttctcccttctttatggatatgacaaagtgatcagatcatgaaacaataatcaatccattgaatttgaatctgatttttggtttggatcgatgccaccattcttcatcttaggaagggacaacaaataggccaaagcctactaattaagcgcttaaaactgcattagtggttggtttaagtgtgatgttagtaacatcagcttgattattaaagggtgttctttgtacgaagaagcatgccccaataacaatgtagcacagcaggagaacaaggcctttcatg

SEQ ID NO: 225323 - DNA, 519 bp, Glycine max
gtgcatggaaaatctggttaccacattgatccttaccatggtgaccatgctgctgagatccttgttgagttctttgagaagagcaaggctgatccatctcactgggacaaaatctcccagggtggactcaagcgtattcatgagaagtacacatggcaaatttactcggacaggctcttgacactcactggtgtgtatggcttctggaagcacgtgaccaatcttgaacgccgtgagagcaaacgttacctcgagatgttctatgctctcaagtaccgcaaattggctgagtctgtgccccttgctattgaagagtaaattcatgtttgaagagaacatcaatggagaaaccggcttttggtcgtttgaagtcttatggagctttcataaataacgccattgattttgattgtgatcagctcttggatttaaagagtctaaacagcagtgtcgcttggttttatattctgttaggttttgggtaacaaaagtaaaaaaagaaagtcttttttttttaaa

SEQ ID NO: 225324 - DNA, 526 bp, Glycine max
cgttccagttaccttatctaccacctcagccttttctcttcactcttcctttccctccaaacaaacaaaagcaaccattaccaccaccaccttgaactttcccagttacactaccaccactttgattccaaataaccaccatcaccatgttcacggctagtaaactagccttcacattaacaccacctcgtccatgcactgcacccttgacaccaatctcttcagcttgtggtgttcacctcattcagttcaatggcaggcacttatgcctccgccaaaggctgtttctactttctcctatggccactgcagatcaacaagggaaagttgaagaatttgaagatgattcacatactgttgatagtaaaattctcccatattgtagcatagacaaaaaagagaagaaatcaattggtgaacttgagcaggaattcctccaacacttgaaggctttattttgagggaaggctatcatgtaaatgaagagtttgataatctcaaggaagaactcatgtgggaagggagc

SEQ ID NO: 225325 - DNA, 296 bp, Glycine max
ctgatacctcatttctgagggttcaagcggatcccactactaatatttcggatttacctttgcaagcaccccacgccactacctttgacataaacggagagggttctgctctcgtgattgacctatgaaccacctacatttgtgatcatgaaaggtgacatgacccacttgctgatctaatcaacgaccaatggcacaaagcgacaccgtcttacttaggttttactgaatgctcgctattgatcgggcatagcgctaacaaccaagaacccatgaaccccaacaacctcgttttt

SEQ ID NO: 225326 - DNA, 368 bp, Glycine max
tttcaatttcaatcaacggttatacccttttctatttgagcatcatcatgtccggcgcagcgcatcccaaggccaagaaaacggggtcgtccaagaagcccctctgccatcctacctttggcgtgatgatagcggaggcgatagcgagtctgaaggagagaaccggttcgagccaatacgcgataaccaaattcatcgaaggcaagcacaaggagttgcctccaacctacaagaagcttgtactcgttcatctcaagaagtctgttgctgctggcaagctcgttaaggtcaaatactgttttaagctcgcaccgactaagtctgctactgttacaggcgctggtgctcccaagaagcccaccaaagct

SEQ ID NO: 225327 - DNA, 369 bp, Glycine max
tttcaatttcaatcaacggttatacccttttctatttgaacatcatcatgtccagcgcagcgcagcccagggccaagaaaacggggtcagtccaagaagcccctatgccatcctaccttcggcgtgatgatagcggaggcgatagcgagtctgaaggagagaaccggttcgagccaatacgcgataacccaattcatcgaaggcaagcacatggagatgccctccacctacaagaagcatgttctcgttcatctcaagaagtctgatgctgctggcaagctggttaaggtcaaatactgtgtcaagctcgcaccgactaagtctgctactgttaaaggcgctgctgctcccaagaagcccaccaaagct

SEQ ID NO: 225328 - DNA, 553 bp, Glycine max
caatgcaaaagaagaacacttgttaaaatttctagcaaaggaatttacatcaatactcttctaaaaatatatccacctatactacgattcaacccgaaatacataaacactataacgccaaactaaaacccactccaatccctcacttcttagccttggcctttttcgctggagatttcacgcttttaggtttcttcacgacgctcttgggcttcttcacggcctttacgggagtcttcttcgcaggcttagcggcgaccttcttcggcgcggccttagcgggcttggccttgggcttggtggccgcagctttggccttgggtttggcaacagccttcttcttaggtgcagcagctttgggcttggaagcgggcttggcggcgggcttagccgcagctttggtgggcttcttgggagcagcagcggctttaacaggagcagacttagtcggtgcgagcttgaaagagtttttgaccttaacgagcttgccagcagcaacagacttcttgagatgaacgagaacaagcttcttgtaggttggagggcaactcct

SEQ ID NO: 225329 - DNA, 607 bp, Glycine max
ctaaatctagaatcagagcggacgccctttaccttttcaaatctctcaaaactttccaacttggacctctctcacaacaagctctcagggagtctcagaatactgggtactcttgacaatctattttctcttaatgtctcttacaacagttattctggttctcttcctgacacaaaattcttcagggatcttcctcctgctgcatatgttggcaaccctgacctgtgtattaccaagtgtccagtaagtggacattaccgtggcatcaagtcaataagaaacattatcatatacactttccttggtgttattttcacttcaggatttgttacatttggagtaatgttagctctcaaaatccaaggggggactaactttgacagtgaaatgcaatgggcttttactccatttcaaaaactcaacttcttcatcaatgacattatccataagttatcagattcaaacattgtgggaaagggttgctcgggagttgtttaccgagtggagactccgatgaaccaggttgttgcagtgaagaagctgtggccaccaagcatgatgagacacccagaagagacctttttgctgcagaagttatacccttgat

SEQ ID NO: 225330 - DNA, 510 bp, Glycine max
gcaatataaaaagagaaaaaaatcggctaaaagggatatacgtaaacatttcgattgagtctagtcacagccatcacactaaaacactataggtatccttcccgaacaatttagcccgaagaacccaaatgagtggccaacatgaccctcttcttaagatccacaattacatgtgactctccatagctacattggtcaaatacacaaccgttaaaaccaggaaatactcatataaatgtttacaacaaacagaaatcaagtcctattcacgggttcaagcgcctcaacagtgaccacactatttcctctaattaccaccatccctatgtcatttttctcattgccattcacttccacagtgttgtcaacaactaaattcataaactggtcaaagccacggagagtaccaacaaccatgcgatttgcgttcagcttgatctgaagcttcttatccatgtactttttcaaatcccgtggttgccctgacctgctcatggtggaagaagagat

SEQ ID NO: 225331 - DNA, 385 bp, Glycine max
tgtccttttttttttttttttttttttttttttttttttctttttttgttttatttttattaatgggaccaatttgaggggaacacacgcggctgttgcttagagcgggacattattacagaccccccaaacatcacaggactgcagatgatttgccaacgcattcaccgggacaccccgggcttaacccccgtcacggggacggaggacaatgcgaagggttgacaccttcgggatgttgaagaggccgaggcagcttgcgttctcgaactgctggccagcctgaatgggccaaggctggccccggggcacgccgaaattgacctgaaggatggggtggacattgccagggagccccaggctcttaccggcgagtgaaaacccc

SEQ ID NO: 225332 - DNA, 560 bp, Glycine max
caacacacaaagctgggaagtgcatttatcgaattaattaccaatgatatgggggtggggtggtactggatggcatcgacagattgtatttctgctactccaccaagtaccaatttgagcacacaatctatagtttttcatcaattaaataagccagtcaatcaaattttatacattttctgagttccttcctcatgctgtattaaacgactgccacaaattcctgatttacacagattccagcctgtcacttgtgcagcacacctttccttgccattttcggtaccttttgaatgtgattcttctgttactccaatgcttcataatctgtcctctccctccacttactcttgcgtagttttataggacggtttccaacatacttaccattcatttctttaagagcaccagcaaggtcagaaggattggcaaagctcacaaatccataaccttttgttttaccagtccgcttgtctctgacaactcgtgccatgttaaaggaaggaaatcgtgaaaatgctttgagagaacatatcattacctcgtaccagatcccacag

SEQ ID NO: 225333 - DNA, 469 bp, Glycine max
tctctctctctctgctcaactgaataaagcagagaagaataagaaaatgggtgtgttcagtacagtgctgctgtgccttatgtccctaatgtggatggtggatgctcgaattccaggcgtatactctggcggcgcttggcaaaatgctcacgctacgttctacggaggatccgatgcttccggcaccatgggtggagcatgtgggtacgggaacctgtacagccaagggtacggagtgaacactgcagcgttgagcacggcactcttcaacagcgggctgagctgcggagcgtgcttcgagatcaaatgcgcaaacgacaagcagtggtgtcactccggcagcccttccatcttcatcaccgccaccaacttctgtccccctaactccgctcttacaaacgacaatggcgggtggtgcaacccttctcgccctcactttgacctcgccatgcccatgtttcttaaaatc

SEQ ID NO: 225334 - DNA, 509 bp, Glycine max
aaaaaaacttgtcactgactatttttttgtttcttcctctgcagtaaaaaagatcaggaaatagataaatggtgggaacccaaacaaaaagaaaataaacttgtattttatatatcttaagaaagtaaagggggtgttcagacacggaagttctttccagtgaaagtttgaccaaattgccaatttgatggaacaatgttccaagaggtggaagagcgacggtcgctggcggtgactctgaaggacaaagcctgacccaccaaaacggcgtttgactgccagttctgtccccagtttctgctcattggcatccaccccgttcgtgatcccttaacgtaggcgtgcacgatatcccctgcacccgctacgttgctgatcaaaaccaggttaaagtaacggaaaccgtttattgtgaacctgatcccaccatgcttcctacatgccaccctgcggaaagcgacaggcacgatgccggcgcggtattcggcgattttaaggaacatgggcat

SEQ ID NO: 225335 - DNA, 542 bp, Glycine max
  unsure (1)..(542): unsure at all n locations
attataggcacagcgtactaatgaatcaattccaatctcaatttacatggttatttatgtaccaagattttgtggcagttcatgtcatgccttattatgtcaaaacatcctatacaacttcattaacaacagggtatggatctcccaagatcattttcataactgattttttgactgacatatcataggtaatgttcataaaaatgtcttgtccataccctcttcttagttgaagagcctggtgtatcaccactcccagcaaattcccatttcacaacatctccatcccaagaagagctaacaagtgtagtgtggaaggggtgccagctacaatctcttacaggtgatttatggtgcttcagcgttgcgacttgagctccacttacctgtagtgagttatcaaagttaccatcaaaagagaaccaacttgaactttttattgatttttttttcaaataaacaaatctaactgcaaaatttcctgattagaatgaagntagttcatgcatagtggctaagaggatattcatcacgttccaaca

SEQ ID NO: 225336 - DNA, 448 bp, Glycine max
tcttgatctataactatgttgggtagaaaccggacttcaaatgggtgcctcaaataggcggaacatgcaggctattagatgaaatgagaacaaaactgaaaaacaggcaatcaactgaaataaccctcacaaccgacatatttaagccttttcagcgatagcgactgccgaagcagctatgtgccctaagacgaccagtgctgcttgcggcaatgagaccaaccttctgtgcaggaggagcatcaggcgtgacagttctaggatgaccgaattgctggaggttaccttctccgaggggatgctcaacagggttgatagcaacaccacgaacacttgggccactaacacctctgcactataaacgtgtggccagcatgtgcagccctgagaagaggctaatcaaatctccctacatctgcaacttggccaattatggccctaccgtcac

SEQ ID NO: 225337 - DNA, 482 bp, Glycine max
gcagacttaacaacagcacaaagcgggttactgtctgttcaagctaccatctctctctctctttcttagtgcctccttgccagaagttaaaatggcccaagaaactttcctattcacatctgaatcagtgaacgaggggcaccctgacaagctctgtgaccagatctccgatgctgtgctcgatgcatgcttggagcaggaccctgacagcaaggttgcctgtgaaacctgcaccaagaccaacatggtgatggttctcggagagatcacaaccaagggcaacgtggactatgagaagattgtgcgtgacacatgcaagaacattggttttgtctctgatgatggtggtcttgatgctgacaactgcaaggtcctcgtcaacattgagcaacagagtcctgatattgctccaggtgtgcactgccacctcacaaagaggcctgaggagaatggtgctggtgaccaaggtcatatgttcggct

SEQ ID NO: 225338 - DNA, 496 bp, Glycine max
ctagcataaatcttgagagaacatttttttttgtttcatcatataaaatatatatgttctgaaagaacacatacaagtacacaaaaaaaagggggaaattcataaaaaaatacagaaaaaaaaaaacagaattgagtaagagggaaggaaacatagagaaaattttagcaatcagataataagaagccagtagtagtgcaaaagtcccttgccaagagtgttggaaccccttttagttaagcaggtaccttctcccccttgagtggcttcaccacttcccatgtgaagtcagggtcatctctgccaaagtgtccatatgcagcagtcttcaagaacctgccatttccacccctcttgagatcaaggttgatggagatcatgccaggcctgaagtcaaaactctccttcacaatgctgaggatttccttgtcagggatcttcccagtgccataagtgtcaacaaacacagacaagggctcaggcacaccaatggcat

SEQ ID NO: 225339 - DNA, 239 bp, Glycine max
gttctagatcgcgagcggccgcccttttttttttttttttttttttttttttttttttttttttttttttttttttttttttttaagaaatttaactattggttttaaagttaaaaccgggtcataattggaacatacatttaacaggacttgggaacagcatcattttttaggtgccataaaatgtaaaagggaaagatgaactaattatacatttgggttcataagggacaacctgg

SEQ ID NO: 225340 - DNA, 510 bp, Glycine max
gaaggggagacctggaaatggaaaggaataacctcggaaaggactattcccatgctatgtttcattgagcaagtaagaatacttgagtaatgagaattgagaacctcctaccaactaggctaatcttttgggttaggctctttccatgcaatttttacttttctagtttctacatactatataatttcacttgcatatccatcaaacttgaatcttccttgtgcttttgctcaactaaatgtgcatttgtagagatattgtggctgaatattcaaaacaagtaaaagcgttaggtaccacgatctttgagctactgtcagaggctcttggccttgatccttcttaccttgaagaaatggactgcactaaagcactttatgttatgggtcagtactatccaaaatgccctgaaccagaattaactatgggaatttcaaagcacactgattgtgacttcataacaatacttttgcagatcagattggtggtcttcaagttcttcatgagaat

SEQ ID NO: 225341 - DNA, 612 bp, Glycine max
accacgttgaagatggacgtgacaccagatcgagtccagataagtacatccatcacattcttgatttgcaagagcaaggtgccccagttgggggaattggaattcaaggccacatagatagtccaatagggcctattgttagttcttcccttgacaagttgggtattcttggtctacctatatggttcactgagcttgatgtgtcttccgtcaatgaatatgttagagcagatgatcttgaagttatgctacgcgaagccatggctcatcctacggtggaaggcataatgctgtggggattttgggagttgtttatgagtagggacaattcacacttggtgaatgcagaaggtgacatcaatgaggctgggaaaaggttcttatctcttaaacaagagtggctttctcatagccgtggccatgttgatgagcaaggtcaatacaacttcagaggctttcatggaacatatgatgtgcaagttgtgaccccatcaaagaaaatttctaagacatttgtgctcgacaaaggtgattcgccactagtggtatccattgaattataaccataatgcttcgccccaagaactaatatcatgtcttttatatatatat

SEQ ID NO: 225342 - DNA, 512 bp, Glycine max
gaaagacaaatggcaacaagcgaagaagtggttgcggcggcgccggaggcagccgcgctggaggcagggctgaagcacaaactggagagaaaatggacgttttggtgcgacaaccaatccaaacccaaacagggcgctgcttggggtacctctcttcgcaaggtctacaccttcgacaccgttgaagagttctggtgtttgtatgatcaggtattcaagcccagcaagttgcaaatcaatgcggattttcacttgttcaagactgggattgagcctaaatgggaagatcctgagtgtgccaatggaggaaagtggtcagtcaccagcaacagcggcaggaaggctaaccttgataacatgtggcttgaaactatgatggctttgattgtggagcaatttgaggatgccgaggacatatgtgggtgtgtgccagtgtgcgccagtggcaggacaaactttcgttgtggacaaagacagctgcaaatgatgctgcccaaatgagctttggaagg

SEQ ID NO: 225343 - DNA, 558 bp, Glycine max
cggcggtgatgctcgcctgcaccgtcaaggagaaccccaacacgccgatccgctggtggatctgcggctacgcgctgcagtgcctcgtccacgtggccctcgtgtggctcgagtaccgcaggaggaacgacgctcccagggacgaggaatctgctgccagcctccaatacgacgacgtcaacgatagcgacgaggacgatgttggaacctccgggagttcctcttcctccggattcacaaaacgatgtgcgtcattgaataccatgatttcattactttggtggatggtgggcttttattgggttgtctctggtggtgatattctgctgcaagatgctccacgtttatactggttgtctgttgtctttctggcatttgatgtcttctttgctatcttatgtgttggtttggcatgcttgattggaattgccctctggtgttgtttgccctgtattattgctattctctatgctggtgcaggacaggagggtgcatcagaatcagatctcagtattacttcaaaatacagatttaaatgttaacaatgagggaacacct

SEQ ID NO: 225344 - DNA, 315 bp, Glycine max
gaattggtataacgatcagaacgggtttggattcataacccatgacgatggcatggaggaactgttcgttcaccaatctcagatcaaatctgacggctttcgaatcctagctgaacgagagtacgttcagttctctattgaatctgaatctgactgacgcgccacggctgtagatgtcactggacccgaccgagccagagtccagggcaccagacactgcggcgatggtcgccgaagctatggcggtggacgaggaggtgctgtaagtggatatcgctgttgcatcgtctactgtgattgcgttggatctggtgg

SEQ ID NO: 225345 - DNA, 507 bp, Glycine max
ggcgatggacctcggaacttatgaagtgccagaaggagtggacattctaggaagatacgatgcagagtttgcaaaaatcctcacaaaagacgctttgaaattcgttgctgagctgcaacgtgagttcaggagcgatatcaagcatgcattagagagcagaagagaggcaaagaagaagtacaatgaagggactcttccggggtttgatcctgccaccagtcacattagagaccaggagtggctgtgtgcacctgttccaccagctgctgctgataggaaagtggagatcactggccctgtggacagaaaaatggtcatcaatgctctcaactctgcagctaaagtctttatggctgatttagaagatgcactgtcaccgacctgtgaaaatcttattagtggtcaagtgaacttgaaggatgctgtggatgggacaataagcttacatgacaaagtaagaaacagggtttacatgctcaatgatcagacagcatagctttttgtgag

SEQ ID NO: 225346 - DNA, 447 bp, Glycine max
aacattcagatttcaaggtaagaattttattgcacaatgagaaggcagagaaaattgatggttctgtttctcagtacaagttttagaatgaaaaatgaagcaacaagtgtttgtagtggtagtagtagtagtagtaagcatacaaaactacaatggcatggtacatacatataataattgaattaccaattcagaatttgatggctctcacttccacttgttggcaacaatgtcagccaaatccacaaccctttgggagtagccccactcattgtcataccaagcaatcaccttaaccatgtcatctcccatgaccatggtcaacgatgagtcaacggttgaggacacatcagtgcacctgaagtcaacagacacaagtggctcatcacacacagagaggattccctggagctcattgtctgcactctctctgaatgctgcattcac

SEQ ID NO: 225347 - DNA, 485 bp, Glycine max
cttctcttgcggctagggttttagcgcagcttcttctagatttaaggaagatgggtaaggaaaaggttcacatcagtattgtggttattggccatgttgactctgggaagtccactaccactggccacctgatctacaagcttggaagcattgacaagcgtgttattgagagatttgagaaggaagctgctgagatgaacaagaggtctttcaagtatgcctgggtgcttgataagcttaaggctgagcgtgaaagaggaatcacaattgatattgccttgtggaagtttgaaaccaccaagtactattgcacagtcattgatgcccctggacacagggatttcatcaagaacatgatcactgtgacataccaagatgactgtcctggtctcatcatcgatggcactttggccagccattgacattgaagaaacccccatcatggaggaatatccacctgttgaaccttgcatgtcaactgacat

SEQ ID NO: 225348 - DNA, 559 bp, Glycine max
gacacataaatttgattttttaaaagcaaaccaagcaaaaattgaacacaaatataaagttgacatttaaaaagcaaaccaacaacgcaacggcaaagccctaaaactcgctgcgcttaacaaaaatgtaatcagggggttctcacaaacacaacacattaaaacagaatgataaaaggagtcttgccaccgtcgatcaagaacccaattctgggaacaaaagttgcgagatgatggtggagacttcaaactatgtccgaaaaacaagctacctagaaacgaagacacaagggcaagaaaccaacatttattgtaaccataagaaacgacatcccctgatgaaccaaaccgcacgattcacttcttcttctgggcagccttggtgaccttggctccagtaggatccttcttctccacgttcttgatgactcccacagcaacagtttgacgcatatccctgacagcaaagcgaccaagtggggggtactcagagaaagtttcaaccaccatgggtttggtcggaatcatcttaacaaaaccagcatcaccattcttcaaa

SEQ ID NO: 225349 - DNA, 502 bp, Glycine max
cttgaattcacatttcaacaaccatagccatggctttctccttctccaaagcacttgtccttgcctgctccttctgcttatttgcgtctttggcttttggacgcgatttctccattgtgggctattcatcggaggacttaaagtccatggataagctcattgaactctttgaatcatggatgtcaaaacatggcaagatttaccaaagcattgaggagaagcttcttaggttcgagattttcaaggataacctaaagcacattgatgagagaaacaaggtggtcagcaactactggcttggcttgaatgagtttgctgatttgagccaccaagagttcaagaacaagtatctggggcttaaggtggactactctcgaaagagagagtctcctgaagaattcacttacaaagatgttgaattgcctaagtcagtggattggagaaagaaggtgcttgggccccagtcaagacccaaggttcatgtggtagctgctgggcattt

SEQ ID NO: 225350 - DNA, 553 bp, Glycine max
aaattatggtagtcttccctacttaaattcccattctctctctctcttcctcatctcatctcatctcatctcgaacaccataaaagctctcgttgaacaacagacactttctagttcttgaagcaacaactccatcaatcccaagttagaaaccaaagcaacatgccaacataaagtaaataaccaagactcgctctgtcatcattgcgcttgaatccaaccaaaacaaaaccactcgtggcttccattatcggaagattctcattctcctccttataagaccttatctacacagcttgctagaatagatatggaaattgaatcggtcaagtgtgagtgctgtggcctcaaagaggattgcacccaagaatatatccgcgatgtgaaggctaagtttgacagcaaatggttatgtggtttgtgctcagaagcagtgagagatgaagttaacagagcgaaaaggccttttgctatggaggaagctgtgaaggctcacatgtcattctgtgggaagatcaaatcgaatcccgcagtaagagtcgctgatggcatg

SEQ ID NO: 225351 - DNA, 532 bp, Glycine max
gcaaaattttgagaagatcaattcacagttttcttcaaaactaccactatttcacctcaactgcagcttttctagcccttcctttctcagcatcaataatcctatcacaagcttttgtgccagcctcttcatccctcttgcctcagatacacggtcacctaaggactctctttgatgctgcaggctttccttccacatcacaattgtttaccattctcaaccttaaggtttctcaaacaatcacttcctcaatcttcacccttcctttcactctcacattcctcctcattgcaaaagcatccataattcaagctctaagtcaccacaaaccaactttgccaacttccttcacttccatcttgtaccattacaagcctcttctcctcacctatatctacaactctatcttcattctctcagcagatgcatcttgctttggccctccttttttggccacacatttgctgacggctgggatacacttcatcaagtccacacttttatgtctgctgatctgcagtcttattctgga

SEQ ID NO: 225352 - DNA, 559 bp, Glycine max
cctttttgttctttcttcttcctctcttgcacttacatgggggctcgttgctctaaattctctttctgctggttccactcccacctcaaaccttctgtccttgaatcctctgaccaagaaaatggcgagaagggtgagagaaaattgtggccaagttttggtgagttcaatttggagcaactgaaggttgccacaaatgggttctcctcagaaaacatagtgtctgagcatggtgagaaagctccaaatgttgtttacaaaggaaaacttgataatggacagtggatagccatcaaacgtttcaacaagtttgcctggcctgattctcgccaattcctcgaggaagccaaacaagtggggagccttagaagtgaacgtctagcaaatttggttggttattgctatgaaggggaagagaggctgctagtagcagagtttatgccacatgaaactctggccaagcatctctttcattgggaggcacaaccaatgaaatgggcaatgaagttgagggtggctatctacttagctcaagctctagaatattgcactagtaaag

SEQ ID NO: 225353 - DNA, 592 bp, Glycine max
tgatttacaacttttttcttcctcatggtcacaatgcttttaccacttgttctatgtcttactctccctgtgtttttcttgttcttcatccaacaccttagagccttcaagaaaccccccctacctccaggtcctaaaggccttccaataattggaaatttacataaattagataactccattctttgcatgcagctatggcacctctcaaagaaatatggccctatattttcccttcaattaggtttaaggaaaactattgttatttcctcaccgaaattggccaaagaggtactgaaaaaccatgacctagagtttagtggacgacctaaactacttccccaacagaaattgtcctataatgggtcagagattgtgttttccccgtacaacgaatattggagagaaatgagaaaaatttgtgttgcccatatctttagtttcaagcgtgtctctagcttttcatctataagaaagtttgaggtgaagcatatgatccaaacaatatctgggcatgcctctctttcggtgtacaaacttgatgagtactcatattcttcagcactatatatgtaagttgttttggagaggt

SEQ ID NO: 225354 - DNA, 571 bp, Glycine max
ggtttcatctagttttccctctgttcttcttccgccacagttgatctgtctcgaacctttgtgaccaaggttgagaaacgctcactggtgggctatgagtttgagatatggcagtgtggtcttggttgctttagtgcttctgccacacatggcttctgctgcttcaattgtgaagaacctaccgggttacaagggtgatcttccattcaaacttgaaactgggtacataggagtgggagaagaagaagaggtgcaaatatttcacttatttgtggagtctcagagaaatccattcattgatccactgttaatttggtttgttggaggtcctggttgctctgccctatctgcgttcttttttgaaaatgggcctttagtaatgaatgagaattacaatggaaaccttccaaaacttgagttgaacccatattcatggacacacacgttgaatatgatatacatagacatgccagtaggcacaggattttcatactcagaaacgcaagaaggctattacagtagtgacatactctgggtgaagcatacttactgaattctacagaagtggttt

SEQ ID NO: 225355 - DNA, 516 bp, Glycine max
aaattctctgtctctctctctctctctcgatcaatcatggctttgcccaatcagcaaaccgtcgattaccctagtttcaaactcgtcatcgtcggtgacggtggtacaggaaagacaacgttcgtgaaaaggcatcttaccggtgaatttgagaagaaatacgaaccgaccattggagtggaggttcacccattggatttcttcacaaactgtggaaagattcgcttctactgttgggatactgccggacaagagaagtttggtggcctcagggatggatattatatccatgggcaatgcgccattatcatgtttgatgttactgcccgactaacttacaaaaatgtccctacctggcatcgggatctttgccgggtctgtgagaacatcccaattgttctttgcggtaacaaggttgatgtgaagaacaggcaagtgaaggcaaagcaggttactttccacaggaagaagaatttacagtactatgagatttcagctaaaagcaactacaatttt

SEQ ID NO: 225356 - DNA, 561 bp, Glycine max
gattaacgtttggcgatcacagaagagaagggaatggagttttctcaagatgattttgatcggttactgttattcgaacacacgcgaaagactgctgaagcaaactacgcagagaatcctcaagacgctgataatctgaccaggtgggggggagctttgatcgagttgtcgtcattccaagctcctagggatgccaaggcgatgattgatgatgccctttcgaagctggaggagtctttgctgatcaatccaactaagcatgacactctttggtgcttgggaaatgcaaacacgtcttatgcttttctaatccctgatataactgaggcaaagggttattttgacaaggcacttgagtatttccagaaagctgcggaggaggatcccgagaatgacctctatagaaagtccttgcaagttgccgtgaaggccccagaactacacatggagatccataaaaatgggcttggtctgatgagtaatgcgggatcctctgctacttccaaagaagaggaatctaaaaagcagaagagcaatgactttaagtatgacatatttgga

SEQ ID NO: 225357 - DNA, 526 bp, Glycine max
  unsure (1)..(526): unsure at all n locations
ggagattcgtctgcttcctttgaaaagaattgtttgagaggtattcaagctaatagggaaagaatttcaaaattactgcatgagtcacttatgcttgtcacatccttaaacccaaaaatcggttatgacaaggcagcaacagttgccaagacagctcacaaagaggggactactcttaaggaagctgcattgaaactcggagtgctctgctctgaagattttgacaagcttgtggtacctgagaaaatgcttggaccatctgattgattggctcgaatgttttgttcttataattccttgtttcatcatcggctccattgaagtattaagtattatttatacgaaagcaaaaagcttatatacatatatcctagaacaatgcaccaaagaccttagggtcaaggtttataaaattgtggttatgattgcagatgcgattatcgcgattgtggctatagcagcagctacagcgggaaataatcttatgtttgtacctgatactaanaacatgtgattctttatgtac

SEQ ID NO: 225358 - DNA, 402 bp, Glycine max
ataggaacgaaaaatccatttttctcctttttattgaataacgataatcacaaagtcatacacataatcatgtgaatacgataaccaccgtgcacttgtgattttctcacaacagtaactttaagtacacaagacagagtccaagtgatccaaccattaggcaataatgaaccccttaattagttcgaagctttgacggttccttccttggggtgatgcacgactatgtaattataggcatccaaagtgagaaaatcatcaagtgttagggacgtgcattggcgagtgaagatcttgcaagccttcttgtacattcccttctcgaacttctctgttcccacttccttttcaatcctagccatctcttcttcaaccactttatgaaaaaggtctttggtcact

SEQ ID NO: 225359 - DNA, 534 bp, Glycine max
gcgagaagcggcttctttgcgaaattcagcggcggaagatctcatcgccggcgccgtctccgactgcgccgacgacggttacggtgccgatgccgttgaccgcgataccgatcatatcgccgtcgaactctggcgaggagcaggtgatatcgtcgaactcgtcgtcgttgcgagcgccggcggagcttctcgacgagaacgagcggcttaggaaagagaacgttcagttaacgaaagaactcgccgagatgagatcgctctgcaacaacatatattctctcatgtcaagctactgaaacaaaaacggaaacagcaacggcagttaccaaactgacggcggcgccggtggagcacagggaagcagggagtccggcatgacggcggtgaagccactggatttgatgccggagaaacggagctccggcgaggacgcggcggatacggtgccgaaggagataaatctaattccgaatccgcagctgtttggcgtggcgattggagcgaagcgagcgagagagggaggatgaggaagtg

SEQ ID NO: 225360 - DNA, 552 bp, Glycine max
caagttttcttccttcccttcagcatagccaatgttgttcactatgtttacaagcctattcgaaagcattcggactacgaacctattcgcctccaacgcttagtggaagattatattggtgttattgccaataagtatccttattggaatagaagtgaaggggcagaccatttcttactatcatgtcacgattggggtccgaaagtttcatatggcaaccctaaactcttcaagaacttcatcagggtactttgtaatgctaacacctcagaaggattcctacctaacaaagatgtgtcgatacctgaagtgtatttgcccaaaggaaagctaggtccacctaatttggggcaacgcccaaatgaccgctccatactagcgttttttgctggtagagaacacggtgatattcgaaaaatcctattgaatcattggaaaggcaaagataacgacatccaagttcatgaatatcttccatagggcaaaaactacacccaattaatgggacaaagcatgttttgcttgtgccctatgcggtatgaagttgcaagc

SEQ ID NO: 225361 - DNA, 413 bp, Glycine max
cgacagcacagctacctgcatcgacatcctccttgccatcatcctccctcctctcggtgtcttcctcaagtatggatgcaaggtagagttctggatctgtttggtgcttactctttttggttacattcctggaattatctatgctgtctatgctatcaccaagtgatcatattcatcacctcttgtagacaatgaataatttgtcaaagtacaacggttatgcatgtttctcaactccagcattgatataatcgtttgatctcagaacaatgtgattcttttttgttctctgtctatcagactctattcgttttcagttttcattgttgtgtttttaattactgttattgtcttgtatggaaacgaaatgtagacatcgtggcttctagtcttaatatatggtaatcgaattc

SEQ ID NO: 225362 - DNA, 441 bp, Glycine max
atcgggccctacttattctatgggtgttgatgttcaatcctctggtaaagatttcatttgtaccgttcatagcaacacaaagttgaaaaacataaagcacaatattgctgactgtggtgtttccttaacatcttttgctaaaaagtactacgtgggtgcaaaacttgaggatactgtgtttgttgggaagagattaaaatttgttttgaatgctggccgcatggagggtgcaggacaaatggcatatggcgggagttttgaagctaatttacgaggggaagattatcctgtaagaaatgataatgtaagcttgacgatgacagttctctctttcaataaagaaatggtattgagtggaagtttacaatcggagttcaggttatctagaagctcgaaagcatttgttagtgctaatctaatagtcgtaaaatggggcaaata

SEQ ID NO: 225363 - DNA, 525 bp, Glycine max
gaaaaactcaacacaacaccccctctccaccctctttttcttttaatttctcatcttatctattaatcttatatacatatatataaagacatagataatagtcatatagatataattatttcgttatattttccttgcatgggctgttaagatgtctcgcacgtgctcacagtgcggcaacaacggccacaactcacggacatgcaccgacggtggcgccgtcgggtctccgagggagaacggcatcatgctgttcggcgtaagagtcatgacggaagctaactcctccttcaggaagagcgccagcatgaacaacctgtcacagtacgacgcggagttcaacgccgtcgacgccggctacgcctacgacgacgtcgttcacgcctacggccgcacgcgcgagcgcaagcgaggtgttccttggacggaggaagagcatagattgttcctggtagggttacacaaagtcggaaaaggagattggagagggatttctagaaacttcgtgaaaactcgcacgcctac

SEQ ID NO: 225364 - DNA, 539 bp, Glycine max
gtatcggaaaggtgcatgtgagaattgtggagctatgacacatgattctaagtcatgcatggaaagacctcggagagtgggagcaaaatggacaaacaaacacattgctcctgatgaaaagatagaaacttttgagcttgactatgatggaaaacgggacagatggaatggctatgatgcatcaacatatgctcgagtcattgagaggtatgaagctagagatgaagctcgaaagaagtacctgaaagaacagcaactgaagaaattggagaagagcaaccaaaatggtgaggatgctgcaagtgatgaggaggaagaggaagatgaagatgaagatgaagatgatttaagggtagatgaggcaaaggttgatgagagcaaacaaatggactttgcaaaggttgagaagcgtgtgcgtacaacaggtggtgggagtacaggaactgtgaggaatctacgtattcgagaggatactgcaaatatcttctaatactgatgtcaatcttgaactatgatccaagaccagatcatgctgagga

SEQ ID NO: 225365 - DNA, 549 bp, Glycine max
  unsure (1)..(549): unsure at all n locations
ctcacacccacaatagtcgggggcagcttcaaagtacctccacattgtctcctactcttactgttctcttctcttctcatcatttttattttttccaatcaaaccaaacaaaacataagcaccgctcttttctctccgaaatccccatctcccttcacttctgagctctggacgagatcccagatctcaccatctttcacgcactcttccatcagattcaccctttcgtttaacgcaaactcataacttgaaggttaatggctgctccaccggcaagggctcgtgccgattacgattatctcataaagcttctcttgatcggtgacagcggtgttgggaaaagttgcctccttctgcgtttctccgatggttctttcaccactagtttcatcacaactataggcattgattctaagaatagaaccattgagcttgatggcaaacggatcaagctccaaatttgggatactgcatggcaagagcggattcggacatttacaactgcttactactgtngtgctatgggcatatngctagtctatgatgtta

SEQ ID NO: 225366 - DNA, 542 bp, Glycine max
  unsure (1)..(542): unsure at all n locations
ccgagacagaaagcaaggttgcagagttaaaaaaacagttcagagatcaaactgtgctgctcggggtggatgacatggatatcttcaaaggaatcagcttaaaacttttggccatggaacaattgcttttacaacatcctgataagaggggcagagttgttctggtccaaattgctaaccctgcaagaggccgtgggaaggatgtgcaggaggtacaaagtgaaacttatgccacgatgaagaggataaataatgcatttggaaggcctggatacacacctgtagtcttgattgatacaccacttcagagttatgagcgaattgcttattatgtgattgcagaatgttgccttgttacagcagtgagagatgggatgaaccttataccctatgaatatatcatttgtagacaaggaaatgagaagatagatgagattttagggacagacctgcttactcaaaagaagagtatgctggtggtgtctgagtttatcggctgctccccttcgttaagtggngcaaatcgagtgaatccatggaac

SEQ ID NO: 225367 - DNA, 377 bp, Glycine max
aaaaataaaataaaataaaaaaaaaaaaaaaaaaaaaaaaaaaaaaaaaaaaaaaaaaaaaaaaaaaaaaaaacaaaaaaaaaaataaaaaaaaaaaataaaaaaaaaaaaaaaaaaaaaaaaaaaaaaaaaaaaagaaaaaaaaaaaaaataaaataaacaaaaaaaaaaaaaaaaaaaaaacaaaatgaaaaaaaataaaaaatatataattatagaaagagaaaaaaaaaagaaataattagaaaaaacaacaataataaaaacaaataaaaaaaaatatacaccaactgatagaaacaattaagaaaaatagtaaaaattagtaaaatatacatttataataaaagaaacgaaaaatatataaaaaataaaaa

SEQ ID NO: 225368 - DNA, 569 bp, Glycine max
cttcatggttttgattattgccatactcaatgatggtaccattatgactatatccaaggatagagtgaaaccatcaccacttcctgatagctggaaactgagggagatatttgctactggcgttgtgctaggaagttacatggcactaatgacagtagtatttttctgggcaatgaaagataccaacttcttctcgaacaagtttggtgtgaggccattgagagatagccccgatgaaatgatggcagccttataccttcaagtcagcataattagccaggctctaatcttcgtcacaaggtcccgcagctggtcttttgttgaaagacctggtcttctcctactaggtgcattttttattgctcagttggtggcaacttttatagcagtgtatgctaactggggctttgcaagaataaagggaatgggatggggttgggctggtgtaatctggctgtacagtgtggtaacctatatccctcttgatttactcaaatatgctatccgctataatctaagtgggaaggctcgcgataatcttttgagaacaagactgtcttcactacaag

SEQ ID NO: 225369 - DNA, 517 bp, Glycine max
gatagtaaaccctaccaattatgttatttggtgcgtaaagagcatagtatctcctagaaaagatggagacagtgagagaggccattcaaattttcacaggactcatttttttatgtaacttaaagacaaattgaacatggtctttcttcgtctttatatgtgattttttctcaaaaaagcacggttcttcttgaaacttgtccaagctccttaaactgtatagtgctgctgaatcgtgtcaatgtcaagccccttcagcttcaccactgactcgacatgtccctttagagtatgaagctccctaagccttgcaacttcagcacgtctcttggcttgttctgcaatctctgaaagctccctgtagctatttttgtcattgaaaaggttggaagtttccggaggctgaagaccgtgaagtgtcctctgtgcagccgcccattgagcttccctctcttctttaccatagtctttctttgtagtgaaagcagtcttgttctccaaaagattatcccaagcc

SEQ ID NO: 225370 - DNA, 583 bp, Glycine max
ctactacattcccacctttagtcttgttcttagagatggcttgtgaaaccaagtcatggttggttatgtttcttgttttcttggttgctaattgcatgcaacattgtgtccacggggtgtctcaagtgccttgcctttttatctttggggactctatgtctgatagtggaaacaacaatgaacttccaaccacttcaaaatctaatttcagaccatatgggatcgactttccattaggaccaactgggagatataccaatggccgaacagaaattgacataatcactcaatttctgggatttgagaaatctatcccaccctttgcaaacactagtggttcagacatacttaaaggtgttaactatgcatcaggtggatctggtatacgcaacgaaactggctggcattatggtgctgctatcggcttgggattacagttagcaaatcacagagtcatagtatctgaaattgctaccaaacttggaagtcctgacttagctcgacaataccttgaaaaatgctcgtattatgtgaacatatgcagtaatgattacattggcaattcttccttccccgtctaccc

SEQ ID NO: 225371 - DNA, 567 bp, Glycine max
ggctcgtggaaaggcaatggaagagttctagttgttgatggaggcgcgagtttacgctgcgctatattgggtggcaaccctgtggtacaagctcaaaacaatggatgggcaggtattattgtgaatggatgtataagagatgtggatgagatcaatggttgtgatattggagtgagagcccttgcttcccatcccatgaaagccaataagaaaggcatgggagagaagcaggtccccataaatattgctgggacaaggatcagtgatggggaatggctctatgcagacactgatggaattctgatctctcgaacagagctgtctgtttgatttcaattcatgaatacttcatgtaaggactatatttatgggcagcacacgacctagtatagtgcagttcggtacttgtgttcttgacccggttccttgcttccacaaaattataaccgataaaatccccttgataatgaaagtatgttggaatgtttgtccatttcataccaacattatctgtgttggagcttgttttaatggttggctggtactaagtcttgagagatataagtc

SEQ ID NO: 225372 - DNA, 540 bp, Glycine max
acaaccttcttcttcttctcttaaaagttattaagagcttttgcttttctttctgcgcgcttttcccaattaagtagttcttccttttctcaaagcaaaaaaaatgttcatcgagagtttcaaggttgagagtcctaacgtgaagtacacagagactgagattcagtccgtgtacaactatgaaaccactgaacttgttcacgagaacaataatggcacttatcagtgggttgtcaagcccaaaactgtcaaatatgaatttaaaaccaacacccatgtccctaaactaggggtaatgcttgtggggtgggggggaaacaatggctcaaccctcactggtggtgttattgctaaccgagagggtatttcatgggcaacaaaggacaagattcaacaagccaattactttgggtcgctgacccaggcatcagctatcagagtggggtctttccaaggggaagaaatatatgctccattcaagagcctgctttcaatggtgaaccctgatgatgttgtgtttggaggatgggatatcagtaa

SEQ ID NO: 225373 - DNA, 623 bp, Glycine max
ctcccaaacccagtgttggggatgctctgaaaaacccaacttgctctgtttctctgagctttgcgaatgtgaaacttggaagcagaaaccttagggtttgtgcctcaactgtgcctctctcaggggtgattttcgaacccttcgaggaggttaagaagggtgaacttgctgttccaacggctccccaagtctcgcttgctcgtcagaactacgctgatgagtgtgaatctgccattaatgagcagataaatgtggaatacaatgcttcctatgcgtaccactccttgtttgcatactttgacagggacaacgtggctctcaagggatttgccaagttcttcaaggaatctagtgaggaagaaagagagcacgctgaaaagctcatgaaatatcagaatactcgcggtggaagggttgttcttcacgccatcaagaatgtcccctcagaatttgagcatgtggaaaaggcggatgcattgtatgcaatggaattagctttgtctttggagagttagtgaatgagaaacttctgaatgtgcacagtgtggcagatcgcaccaatgacccttaattggcagacttcattgaaagcgaggttttgtctgacaggttgatcaattaag

SEQ ID NO: 225374 - DNA, 512 bp, Glycine max
aatatggttggctgcttactatttggcttaatggatatttatagcaagcttgtaaatgccggtgtaagaaccgtgttttcattttgtgacaggatgttgtgatccttgagcatcaatcatttctttctggaatagctgatgttcatgatcgacacggggatatgcgacttgatgttgataacatgtcttatgaggtaaaatctcatttctgcatctggatgcaaatattaatatatctatacaaccataatgtcagtttatcccttgcttgtctttcaagatagtacttcattttagagagttagtttctcatgtgaagtttgactataacaggagttgttggctctggaagagcgcattggaaatgtgagttctggattgagtgaagaaaccctatcgaactcttgaaacagagaaagcactcggttgaaaaagggtctgagactgatgcagaaccctgttgtgtttgtcaggtaaacctgactaacttgacttatttaaatccccccgat

SEQ ID NO: 225375 - DNA, 473 bp, Glycine max
gtgatgcagtatggtgatgtagggcttagcagagatgttctcttccattatttgggtacagatcctgctaatgataatttcacttttgtggatgaaaactccttatggtcaccttcaaaaccagtcaaccaacgtgatgctgatctcatccatttttgggataagttccgcaaagctcctgagggttctctcaggaaaaatacagctcagaaacaagttttggaagcaatgtctcacagaatgcatgtagacaacagtgtaaaactgattgggaagcttttatttggcattgaaaagggtccagaagtactcaacgctgttagaccggctggatcggcacttgttgatgactggcactgcctgaaaaccatggtgaggacttttgagacacattgtggatccttgtctcaatacgggatgaaacacatgaggtcctttcaaacatctgcaatgtagggataaagaatgaacaa

SEQ ID NO: 225376 - DNA, 578 bp, Glycine max
gttttccaattcgcagagcaactcaacacaacgaaccaaaccaacaatgtcgcagccgcagcctcagtcgcagccgcaacacgggcaagcggcgctggagcaggtgcagtgcttcggtcgcaagaagacggcggtggccgtgacctactgcaagcgcgggcgcggcctcatcaagatcaacggctgccccatcgagctcgtcgagccggagatcctccgctttaaggccttcgagcccatcctcctgttgggaaagagccgcttcgccggcgtcgacatgcgcatccgcgtcaagggcggcggccacacctgccagatctacgccattcgccagagcatcgccaaggcgctcgtcgcgttctaccagaagtacgttgatgaacagagtaagaaggagatcaaggacattctggtgaggtacgatcgtaccttgctcgtcgcggatcccaggcgctgcgagcccaagaagtttggtgggcgtggcgcacgtgcgaagttccagatgtcttaccgttgaaggagaatggtggtgtttttgtgttttttggttttggtccggtcatgtttatgctgggaaa

SEQ ID NO: 225377 - DNA, 498 bp, Glycine max
gttaaaagaagagcatcactgaactaacaaagcaaccctatgtcgaaggtggtttgtgtcaccggagccagcggcgccatcggatcatgggtggtcctactcctcctccagcgtggttacaccgtccatgccaccgtccaagatatcaaggatgaaaatgagacgaaacatttggaggaaatggaaggagcaaagagtcatctccatttttttgaaatggatcttcttgacatcgactccattgccgctgccataaagggttgttccggcgtaatccaccttgcatgtcctaacatcattggtcaagtcgaagatcccgagaaacagatattggaaccggcgataaaaggaacggttaatgtgttgaaggcggcgaaggaagcaggggtggagcgcgtggtggcgacttcatcgatttcctcgattatgccaaggtctaattggccagcttgatagattaagggagaagagtgttggacggaccttgaatactgcaag

SEQ ID NO: 225378 - DNA, 469 bp, Glycine max
taaaaaataaacatatattgagaatggagggttgtgtgaagaagttgctatgccttgttgggtttgtggtgcttgtgagtactattggtggggtggagagtgctggtgaatgtgggaaatctacaacccctgataatgaggcttataagcttgcaccatgtgcctcagcagcacaagatgagaatgctagtgtttctcagagttgctgtgctcaggtgaagaaaattgggcagaaccctagttgcctctgtgcagttcttctctctaacacagccaaaatggctggcgtcaaccctcatgttgctgtcaccatccccaagcgttgtaacctggctaatcgccctgttggttacaagtgtggaccttacactctgccttgaaagagttaaggttgttgctgaaaacaaagatgacagggcgtaaatgcactatggatgttagctacttacaactgtgactacatgtttgt

SEQ ID NO: 225379 - DNA, 477 bp, Glycine max
ctttgatgtgtttgactggtctattccagaagaagtgatggataagttctctgaaattaagcaggatagactaattaagggcactttttttgttgacgagacctatggtgcctttaagaccgttgaagagctttgggatggtgaactctgagcaatatgcttcatagagatgttgacaaatgcactgctcctcaagcagattgattccgccttttacctgttaagatcttaaagctaccagctgtagtgattcaagtatgtttgagattttgagaagagctattgttcataataacacaaagtaaccgagacttatttttcatttataattgttgtatctttaattcaatctaaagaaaccagtgcagtgaattttaaaggtctggtagccaaaataaaaaataaaaataaaataatataacactctaaatttaattcatatatactcgtttattaaaaaataaaaaaggggcggcc

SEQ ID NO: 225380 - DNA, 529 bp, Glycine max
gttgaacttcatctcgggtttgatgcttctcattcgactccacaagaaataaaccatgtgatcactgaagctcagaggcgtgagcttcaccatcaagttttcatcttcaaccatttggcttataatcttcctcctccttatcaccttgtgcaattccctagcaacatgtcagaatacagtttcctgggttttgatcatgggattatggtggatccagaacctcataggtgtagaagaactgatggaaagaaatggaggtgtggtaagaatgtggtgcctaaccagaagtactgtgaaaggcacatgcacagaggtcgaaatcgttcaagaaagcctgtggaaacatctcaagttaactctcctttggcaacaaagccttgtagcaagtcacacaccataccatcctcaaagacacaatttgaaatttcaagtccaaaccttatcgccattccacatattgacacatcaagtaccccatcaaggagcctcagtgtcaccaatggctcttctgctaataataggtcgaaaa

SEQ ID NO: 225381 - DNA, 509 bp, Glycine max
gaaaccatctttaaattgcacataccattctgatacaggatagatgcattacaaagctaacaacaccaaccaactttcaccaaaccagcacttaaaaacttaaacactgtggccaacatatatattttcgccaatcacatgaaagagtccttcaaattgcagagatgtccaataactccaagtcacccaccacatataacaatataataagaacaccaaataaaatgtgaaggaaactcggatcatttcatgatgaaattatgcataacttcatctcaggccatgaaactttgacttcaaatcttagatcttatcaagcttctcagccttgacaactgggtttgctttagctatgacatcccgagcagcagtgcggtaatcaaatgggcaattatgcttgtctgagtagcgatgtacagcacaaaaaaggtcaccacatcgacaattaaaccctgtcaaaccaactcgcttgttgcaactgctgcagcgttttggtccatccttcagct

SEQ ID NO: 225382 - DNA, 618 bp, Glycine max
gggaaccagcttagcagtgactgcagtgacgtccccatcatcaatgcactggagaagggtgtaagggtgattgaattagatatatggcctaatgaatcaaaggataatgtagatgttcttcatggaaggactttgacttctcctgtggcactcatcaaatgtctgaggtctattaagcagcatgcctttgttgcctcagaatatccagttgtaataaccttagaagaccatctaactcccgaccttcaggccaaagtggctgagatgattactcaaacatttggagacatactatttgctcctacctcagaaagcttgaaggaatttccttctcctgaatcacttaaagggaggattattatatcaaccaaaccacctaaggagtaccttgaggcaaaagaagtacaggaaaaggaagaggaatcacaacaggaaaagcctgcagatgatgaagaagcatgggggaaggaagttcctaagttgagaggtggcactatctctgattacaagaacattgaggatgatgatgttcttgatgatgaggaagatattgatgaagcaggaaagtcacgtcaggatgcaacggacgaatacagacgtttaattgccattcatgct

SEQ ID NO: 225383 - DNA, 448 bp, Glycine max
aatggaagacctacccagccttaaaaccataaaactttggtttatgaaccaaaaaagggacaatccttacagggtacaacataaataacagctccttaagggttcctaaaaaaaacaaaacccggggtttaggatccccattttattttttcacagcttttttaaaaatccggggaaaaacactccttgggacaaacaggtttaatttcccccaaaaacattagtctcactttcactcacatttatttttttaggaaaagaccccccaaataaaaagctttactccaaaaaagccacttttacaattttccccagtttcatacaaaccccctttgggtacaacttatagcaaggacgggccaaaaacctggggcataagggtgcccaaaatcaaaggaattcaaagggcttgaaaagcttcacatgggcaaacttaactcctttgggg

SEQ ID NO: 225384 - DNA, 609 bp, Glycine max
aagcaagcaagcgatttgtgaaagcgttgaccagaaagtgtgaactacaaagtgtaggaatgagcatataccaccagatacctgcgttgattctggattcttgaagccattccttctattttctggtgacagcttcgtcttgtgctatactatataacaactcaccctctctccttacctcttcattcccaacacaaaacactctctcctccttcaacctagccctggtcactaccaaccaagtgtcccccctcctctcccttgttaacaggtagctgagttagtgagtgatggcgggaggacaactaggagtgcttaatgcactcgatgtggcaaagacacaatggtaccacttcacagctattgtgattgctggaatgggattcttcaccgatgcctatgatcttttctgcatttcccttgtgaccaagttgttggggaggttatattacacagacataaggaacccgaagcctggtgttcttactcctaatgttcaagctgctgtgactggtgttgcactatgtggcactttagcctgccaacttttctttggatggcttggtgacaagttgggaaggaaaagggtttatggcttaactcttatgc

SEQ ID NO: 225385 - DNA, 540 bp, Glycine max
tgttgtgggtttttatgggcttatttgctggctactcctcagcacgtttgtacaagatgttcaagggcacagaatggaaaaggaacaccttgaaaactgcatttatgttcccgggcattctttttgctgtcttctttgtgctgaatgctttaatctggggggagcagtcctccggggccgtcccttttggaacaatgtttgctctagtctgcttatggtttggtatatcagtacccctggtctttgtgggcagttacttgggctttaaaaagccggcaattgaagacccagtgaagactaataaaattcctaggcaggtacctgagcaggcatggtatatgaaatccgtcttctcaattcttattggaggcattcttccatttggtgcagtgttcatcgagctcttctttatcctgacatcaatatggctgaaccagttctattacatcttccgctttcttttatagtgtttgtgatcctattaatcacctgtgccgagattaccattgtgctttggtactttcaattgtgcaatgagga

SEQ ID NO: 225386 - DNA, 551 bp, Glycine max
aatgcgtataaaaggaaaataaagaaattagcgtcaaaatgttgggtgtgttcagcagctccatagtgtcgccgccggacgagctcgtggccgccggcagccgtactccgtcgccgaagatgacggcggcggcgctgcggaagcggttcgaggagaagaacccctccgccgtgtcggtggaggtcggagagcatgtccagctcgcttatacccaccacaacgagtcgccgtttcagcccagatcctttgctgtcaaggatgaggtgttctgcttgtttgagggagcccttgacaatttgggaaacttgagacaacaatatggactggccaagtcagtcaatgaagtattgttggtcattgaggcttacaaagctttgcgtgaccgagcaccctaccctgctaatcatgttgttggccatctcagtgggagctttgcttttatagcttttgacaaatctacttctaccctctttgtggcatctgatcaatatggtaaggtacctctgtattgaggaataactgctgatggctacgtagccattgctgatgat

SEQ ID NO: 225387 - DNA, 318 bp, Glycine max
tcaccattccattccaaggaaggtttcccgtcatcactgtatgacgtcctccttctttggggtggggggcgggggggggaggcgggggggggggggggggggggggggggggggggggggggggggggggggcagaggggggggcgggggggcgggaggggtgaattgggcgctggggggtatctaggggtcataaaaaaaaaaaaatctgggaggggtgaatatcaatcttacaagatgtgtatccaaaaaaaaaaaaaataggccttaccacatcaaaactatttaatttataatttctaaatacaaaccattttc

SEQ ID NO: 225388 - DNA, 591 bp, Glycine max
ctcagattaccccaacccacgtatctgatgaagaagcaaaccttttcgccatgcaactagccagtgcttctgtccttccaatgatcctcaaatcagcacttgagcttgatctgttggaaatcatagccaaggctggccctggtgttcatctttcccccactgacatttcttctcagctcccaacacagaaccctgatgcacccgttatgttggaccgtatattgcgcctattggcttgctacaatatcctctccttttctctccgcactctccctgatggcaaggttgagaggctctatggtctcgcccccgttgccaagtacttggttaagaacgaagatggtgtctccattgctgcgctcaacctcatgaaccaggacaaagtcctcatggaaagctggtccctattgaaagatgcagtccttgaaggaggcattccatttaacaaggcttattggaatgacagcctttgagtcccatggaacagatccaaggttaacaaggttttcaacatgggaattgctgatcactctacccatacaatgaagatattcttgagactacacagtttgagagtcttaatctctggtg

SEQ ID NO: 225389 - DNA, 138 bp, Glycine max
ctagttctagatcgcgagcggccgcccttttttttttttttttttttttttttttttttttttttttttttttttttttttttttttttttttttttttttttatttttttttttttttttttttttttttttttaat

SEQ ID NO: 225390 - DNA, 546 bp, Glycine max
cgaggttatcatcggcaattggtatacgtcgcatgcaccgtcgtagctcggctcgaggcacaattttgagaagatcaattcacagttttcttcaaaactaccactatttcacctcaactgcagcttttctagcccttcctttctcagcatcaataatcctatcacaagcttttgtgccagcctcttcatccctcttgcctcagatacacggtcacctaaggactctctttgatgctgcaggctttccttccacatcacaattgtttaccattctcaaccttaaggtttctcaaacaatcacttcctcaatcttcacccttcctttcactctcacattcctcctcattgcaaaagcatccataattcaagctctaagtcaccacaaaccaactttgccaacttccttcacttccatcttgtaccattacaagcctcttctcctcacctatatctacaactctttcttcattctctcagcagatgcatcttgcttttgcctcctcttattggccttcacatttgctgaagggctgggatacacttcat

SEQ ID NO: 225391 - DNA, 509 bp, Glycine max
agaaaacgaagattcctgcggaatccgcgtcaccggcatgcaattctcctacgacgtgcagcaaccgccgctcttcctcgacttcaacctcaacgtctctcccggatcccgctgcctcctcgtcggtgccaatggatccggaaagacgactttgctgaagattctggcggggaagcacatggttggaggaagagacgttgtgcgcgtcttgagtggttccgcttttcacgacactcagctcgtttgtagcggagatctcgcttatttgggcggatcttggagcaaaaacgttggctccgctggagaaattccgctccaaggagacttctctgctgaacatatgatctttggagttgagggtgctgatccagaaaggagagattagttaattgagctgcttgatattgatctacagtggcgaatgcataaggtatctgatgggccagcgcgtcgagtgcaaatctggcttgtcttcttcatccgaacaggttctcttgctagatgaggtt

SEQ ID NO: 225392 - DNA, 477 bp, Glycine max
cttcctccctccggtcaatctctccgacttcccgccggacaccaaaatcgaaaccctgatctcccacaccgtcctccgctcccttccttccctccgccaagcattccactccctctccgccacaaacaccctctccgccgtcgtcgtagacctcttctccaccgacgccttcgacgtcgccgccgaattcaatgcctccccctacgtcttctatccctccactgccaccgtcctctccttgttcttccacctccccaccctcgaccagcaggtccagtgcgagttccgagacctcccagaaccggtcagcatccccggctgcattcctcttcccggcaaggacctgttggacccggttcaggaccgcaaaaacgaggcctacaagtggatcctacaccactgcaagcgatacaaagaagccgaggggataatcgggaacagcttcgaggagctcgaaccgggagcctggaacgagct

SEQ ID NO: 225393 - DNA, 595 bp, Glycine max
ctgtggcacaagtggcggcaacaatgcttctgatttttctgatagtgaagaggatgaggaacttgcattggagggtcaagataatgatgaaggtgcaaaggttaccaaaccttctaaacctgttcccaagattggtgccccagcaaaaacagctgatcctaagaaagacgagggtgatgattctgatgatgaatcggatgatgatcttgctggtgaagatgaatttggaagttccgatgagatggatgatgacagcgatagtgatgaggagagtgatgaagagacccctgctaagaaggtggatcagggcaagaagagaccaaatgagtctgcagcaaaaactcctgtttctgccaagaaagctaaaactgctactcctgaaaagactaatggtaagaaaaatgtacatgtagcaactccccatccttcgaagaaaggtggaaagacacccaacagtacaaaaggccagtctcccagttctgctggacaactatcttgcgcaagttgtaaaaagtctttcaccaacgaagtcggtctgcaacaacataagaaggctaagcatggtggtcagtgaatattgatactgcattttatc

SEQ ID NO: 225394 - DNA, 594 bp, Glycine max
cacaatattctaagcattgaatgattaacaaaatttaaatgcagcagttccaatatatagggactcaaacatcaaaacaaaatttcgaagtttcgtttactagcctaatagtgagataaattaccaaccttccgaacctactcactgtaatacaggggaaaattactacatgagtacgataaaatgcagtatcaatattcactgaccaccatgcttagccttcttatgttgttgcagaccgacttcgttggtgaaagactttttacaacttgcgcaagatagttgtccagcagaactgggagactggccttttgtactgttgggtgtctttccacctttcttcgaaggatggggagttgctacatgtacatttttcttaccattagtcttttcaggagtagcagttttagctttcttggcagaaacaggagtttttgctgcagactcatttggtctcttcttgccctgatccaccttcttagcaggggtctcttcatcactctcctcatcactatcgctgtcatcatccatctcatcggaacttccaaattcatcttcaccagcaggatcatcatccgatcatcatcagaatca

SEQ ID NO: 225395 - DNA, 585 bp, Glycine max
  unsure (1)..(585): unsure at all n locations
gtgcataatcctgaagcaccttactacagcaatgaaacatgccattggataatagaccaacaaaactgcttgaagtttgggaggcctgatagagagtacctccattggaggtggaaacctgatgaatgtgagcttccattcttcaatgcaactcaattcttaaatcttgtgagaggaaagaaaatggcatttgttggagactcagtggggagaaaccagatgcagtctttgttgtgcctcctaagtcatgtgtctgaacctgaggatgtttctcataaatattcttctgatgtggtatacttcaaacgttatttctaccatgattacaatttcacccttggaaatctatggtctccatattttgtgagatccagtgatgctgaccccagaggccacacctacaacagcatcatgaagttgtatgtggatgaggcagatgaagcatggacaagccaggttgaaaactttgacatagttataatctcatcagggcaatggttctttaggccactattgttctatgaaaagggtaagcttngttggatgcaacaagtgtgggatggacaatgtgacagaccttacaca

SEQ ID NO: 225396 - DNA, 510 bp, Glycine max
tgaatttacaaggaactcaactaacatggaagcatgctttctctcccacaattcctttaccaaaaccaccgatcaactcatccccacaataagaaacgggtctctaccacaccataagcgatcttctcaacatcttcagtgtagaaaagctagaattccacttcccatatcatattcctggacctcctacttcaaaaggagaaactatagagaacaacaagaaaattggtctttgggcagtgaagttaccttcagcagattcaattgtagttcgacgaacgctagggattctaacagaaaacctccatggtctccctgggctgaacgagagtgctgagacagttgagaaaagggaagccttctggtcatctgtgaagccagctcattttggtgtgaaaataggctcaaaatctttcttgggcattctccgaatcatcatggttggagttttcattggtctttttggaagtattggttttggaaggcagcttcttttgaaatttcctgaaa

SEQ ID NO: 225397 - DNA, 522 bp, Glycine max
tgcagtcaaaggttgatttccagcatagccctttaccctctgatcctagaggtgggggcagatcaattaggcatgattctggtgaatttgcaaagcctgtttctagtaaaggaatatgtattgatgatatacatttaagttcagatgacttagaaatgtacatcgatcttgctccgtttttgaatccctcaccatatattgtaccagaagatatgtctttgacaaaggtatacaatcttttccgtcaacttggtctacggcatttatttgttgttccccgcccatcacgtgtgcttggtttgataacaagaaaagatttgttgattgaggacaaggaaaatgtgaatacgttagagcttcagtcaactagtaatttcgcattagaattaaagaatgatgacaagaaatatagatgtggagcaccctttgtaagcggactgcttcagaatcagatcctgactaacgctggctgtacatactcaaagtccttccgcatacaattttcttgagatcttctttata

SEQ ID NO: 225398 - DNA, 382 bp, Glycine max
gctgcatcgattccgttccaaggaaggtttcccgtcatcactgtatgacgtcctccttctttggggggggggggggggggggggggggggggggggggggggggtgggagggagggggggggggggggggggggggcctttttttttgaaaggtaatgggtaggaaaaccagggtggttgagggggtttaacccccgaagggttaaaaggcacccccggggggtaaaaagtttaggttaaaaaagggcggttgcaaattgaggccaatacgcggttaacaaaaccgataaaacgggtggtacctaaaaagccgtcccccaaaccataggcccggggggttccctaattgccaaattcggggcgagtggtaactattttttgg

SEQ ID NO: 225399 - DNA, 508 bp, Glycine max
gatcgggatccgtgattttgattcatctgtacttgtagagcctttttctactgcaaagggatggatgacaagtgctaactaagcactttcttcttcttcttcttcatcccttcatcgccaaacacaatgaaggaattgggcgtggttgcaatcctcttttcaatagagttcttggacgttatcgtctacactgtaagcaaagcagccatgaagaagggcatgaatgactttgtctttgtcatgtactccaatgccttcgcaacttgcctcctccttcccataaccttcttcttttacaggaaaagacctcttcctccactcacatatttcatagttgcccaattgtttattaatggctttttaagttgcagtgttcagatgctcaggttttttggaataggttacagctctcccactatggccactgctatgtctgatttaatccctgcttttaccttcattcttggcatcgtcttcaggatggaaaaattggatgggaaaactaaca

SEQ ID NO: 225400 - DNA, 556 bp, Glycine max
ctttgtcgcaaagagaagagatctgcctcctttttccttcccaaatcaaatctatctcttcttcaagttgaaaatggggctgtcgttcaccaagttgttcagccggctgtttgccaagaaagagatgcgtatactaatggtgggtctcgatgctgcgggtaagaccaccattctgtacaagctcaagcttggagagattgtcaccaccattcccaccattgggtttaatgtggaaactgtggaatacaagaacatcagcttcactgtctgggatgttggaggtcaggacaagatccgtcctttgtggagacattacttccaaaatacacaaggactcatttttgtggttgatagcaatgacagggaccgagttgttgaagctagagatgagttgcatagaatgttgaatgaggatgagttgagagatgccgtgcttctagtttttgccaacaagcaagatcttcctaatgctatgaatgctgcagagataactggatagcttggtcttcattccctccgtcagcgccactggtatatccagagcacatgtgccaca

SEQ ID NO: 225401 - DNA, 507 bp, Glycine max
atctttgtgttatcaagccaactccaacgaaaccttatccttccaaagaaccgtctttgacgttggggctgtccggtaagggttaccacgtgcccagaaataacgttgccatcaacaaggtttattgtgaggaccctcttgagttctctagacagacatcacctcacagtgttgtttcgtctttctcaactgggagggtcatcaagagggagagagatcttaactgtgaagacatggaggtagacgcagaagaaagggtttcttcacgagtgagtgatgaagacgaagatggaaccaatgctagaaagaagctcagactcaccaaagaacaatctgcactgctagaagagagcttcaaacaacacagcactcttaaccccaaacagaagcaagctttagccaagcagttaaatctccggcctcgacaagttgaaatgtggctccagaatcggagagccagaacaaagctgaagcaaacggatgtggactgtgagttcttaaagaaat

SEQ ID NO: 225402 - DNA, 493 bp, Glycine max
gtctgaacttatcaccaaacactataaacatgctctcacctatctcatcaaagaattcacagccaaactctcctttttcatcaagtaagcctttgcaacatgataagaagaactatgatgatgaagataattggtctatcacctcctctgctatgtctatgcgcacagctagatcaaaggtaactcatggctcagcccctacatttagatgctccgaacgcgcagagaaacgtagggagttttatctgaagttggaggagaaacaccgagctcttcgagaagagaaaaaccagtatgaggcaaggctaaaggaagagcaagaagcagccatcaagcagttgagaaagaacttggtaattaaagcaaatccagtaccaagtttttactatgaagggcctccccctaagaccgaactaaagaagctgccactgacacggtcgaaatcaccaaagctaagtcggagaaggagctttggcgatactgtgaactcgtc

SEQ ID NO: 225403 - DNA, 509 bp, Glycine max
acgtacacttacccaattattttattaatgtcatgtatgccaagtgacatttgataagttaagtgcagataattgaaaggaagaagctactagttgaatttgtgggtccacttgagagccaaattggagatgttggtggtggaggaaccatgttgagcgagagccttagccgcagcctccttgatatccttgattcggtaacgaagcttcttcccttgttcaccttccatgaggcacttgactaggctggctatctcctgtctctccaccaagccactctctgcaacgttgggcctcagcgccaccttgacgtcatgcgtgagcataaaggcgttggtcctctgctccgcgaacagaggccaggctatgaaaggcacaccgttcaccacgctctccagaatagagttccagccgcagtgggtcaagaacccacccgtggatggatggcccaatacctgaggctgcggagcccaagactgaaccaaaaaccctcttccttttggtctttc

SEQ ID NO: 225404 - DNA, 565 bp, Glycine max
atgagaatgaccaatgtgcaactcttgcaccttccacttccttaggcaaaagggtcttcaactcttcctcaaatgttgcaatcttttgcctaaggaagtggaaggtgcaagagttgcatatgagaatgaccaatgtgcaatttccaaacaagatcaaggaatgcaggtcttaccccttgtacaagtttgtgagagaggagttggggacagcattgctaactggtgaaagggttatctcaccgggtgaagagtgtgacaaagtgttcactgctttgtgccaagggaagatcattgatccacttttggaatgccttggggagtggaatggggcacctcttccaatatgttagtttttcttattttctgttttcttgaagagtggtttcttttctgtacacgtgtttgtgttgatattaaagcatttggtttgtctatataaggctgtggcaaataaatccacatacaacaacttcccagtctttcttgatgtatgccatgcaaggaacttgtaattcataatgtaatagaattcccattgtttgccgtagctttgcgtgcaaatatc

SEQ ID NO: 225405 - DNA, 498 bp, Glycine max
gcacgcaaagctacggcaaacaaatggaattctattacattatgaattacaagttccttgcatggcatacatcaaggaaaactgggaagttgttgtatgtggattgatttgccacagccttatatagacaaaccaaatgcttaatatcaacacaaacacgtgtacagaaaagaaaccactcttcaagaaaacagaaaataagaaaaactaacatattggaagaggtgccccattccactccccaaggcattccaaaagtggatcaatgatcttcccttggcacaaagcagtgaacactttgtcacactcttcacccggtgagataaccctttcaccagttagcaatgctgtccccaactcctctctcacaaacttgtacaaggggtaagacctgcattccttgatcttgtttggaattgcacattggtcattctcatatgcaactcttgcaccttccacttccttaggcaaaagattgcaacatttgaggaagagttg

SEQ ID NO: 225406 - DNA, 614 bp, Glycine max
ccaccttcctctccttcttttctcttctttcttcttcttccatctctttttttctgcttaaggtctacaaaagttctcttcttcttctcctcctattgaactttggtcatcacacgagaaaacccacgtctggatcttctggtgtaaaggccattagaagccttttagaaattttcaaattgagttggtgtatagtgttgaagggggtgaaatttggagcccagtttgttacttcatttgaaaggtcatagtttgaaccctctttttctggagatttacctgggaaaagatgatgatgtttgaagatatgggattctgtggcgattcggatatgttatgtggttctcttggggatggggatattgctgtgagacaaactgaaccggatcctgtagttgaggatgactacagtgatgaagaaattgatgtggatgaactcgagaagaggatgtggagggacaaaatgcgtctcaagcgattgaaagaaccaaccatgtccaaggaagggactgatgcagcatagcaaaggcaatcccaagagcaggcaatgaggaaaaagatgtcaagagcccaagatggaatactgaagtacatgctgaagatgatgaggtttc

SEQ ID NO: 225407 - DNA, 577 bp, Glycine max
tattctacttaccttttctcttaatccaaatatcatcatctgaaacgatggctgccatggcaaccacaaccctctcttcaaacccgaaactctcatttttccacggaaagcccgttacatattcttcccgcgtcgcacccaccaccaagttattctcatccaaacaaggcacaatctccatgtccctaacccaacccccatacgacctccaatccttcaaattccaacccatcaaagaatccatcgtctcacgcgaaatgacgcgccgctacatgaccgacatgataacctacgccgacaccgacgtcgtaatcgtcggagccggctcggcggggctctcctgtgcgtacgagatcagcaagaaccccgccgtgagcgtcgccataatcgagcagtccgtgagccccggcggcggcgcgtggctcggcggacaactcttctccgccatggtggttcgcaagccggcgcaccttttcctggacgaagctcgcgtggcgtacgacgagcaagaggactacgttgtgataaagcacgcggctttgttcacgtccaccatcatgagcaggcttctagcgag

SEQ ID NO: 225408 - DNA, 567 bp, Glycine max
gtcaccttcaaaaccagtcaaccaacgtgatgctgatctcattcatttttgggataagttccgcaaagctcctgagggttctctcaggaaaaatacagctcagaaacaagttttggaagcaatgtctcacagaatgcatgtagacaacagtgtaaaactgattgggaagcttttatttggcattgaaaagggtccagaagtactcaacgctgttagaccggctggatcggcacttgttgatgactggcactgcctgaaaaccatggtgaggacttttgagacacattgtggatccttgtctcaatacgggatgaaacacatgaggtcctttgcaaacatctgcaatgtagggataaagaatgaacaaatggctgaggcttcagcacatgcttgtgtcagtattcctttcaatccctggagctctctgcaaaggggtttcagtgcataataacttcctgtaatgtgcactagtatagaccatagtatgattattggtacattatgttacatggtagtactctgatatacatatcttgtcccacctttgtaaatacatttgggacacta

SEQ ID NO: 225409 - DNA, 79 bp, Glycine max
aaaaaaaaaaaaaaaaaaaaaaaaaaaaaaaaaaaaaaaaaaaaaaaaaaaaaaaaaaaaaaaaaaaaaaaaaaaaaag

SEQ ID NO: 225410 - DNA, 550 bp, Glycine max
ccggcgcgtgctaccgcaacaccttcctcatgcgcctctacctcgtcgtcatgttcctcgtcatcgccgtcctcatcgggttcatcatattcgcctacgttgtcactgacaaaggctccggtcggagggtcatgaaccgcgcgtacttggagtactacctcgaggactattcggggtggttggaggagcgcgtggcgagtgagagctactggggaaagattgcttcgtgtattagggattctaaagtgtgtggtaggatggggagaaccgttaatgggatgccccaaactcctgatatgttctacctcacccacctcacgcctattcagtctggttgctgcaagcccccaacagattgtggatatgtgtatcagaatgagacagtgtggatcccaagatcaggattgatgggaaccaacgcagattgcacaaggtggagcaatgaccatgagcagctttgctatgcctgtgattcttgcaaggctggtgtgctggcaagtctcaagaagagttggaggatagtctcagtgatcaacattggttgtatgat

SEQ ID NO: 225411 - DNA, 613 bp, Glycine max
cactcccattttctctctttctctttctctccgacctagcgagaccgagcgatccgatcctaaccccgcgatgctccgccgcgcaaccacctccctcatctccggcgcctcccgccgccgcctctccaccgacgtgccggcgacgccggcggcggattccgtcttcgcggaggcgtggaagaaagtgagccccaacatcgacccgccgaagacgccgctggcgtacatgaagccccgaccacccactccttcgactctcccctccaaactcaccgtcaacttcgtcttgccctacgcttctcaattggccgcaaaagaggttgatatggtcattgtaccagcaacaactgggcagatgggtgttctcccaggacatgtagcaacaattgcagagttgaaacctggtgtcctatctgtacatgaagggaacgatgtgaccaagtactttgtcagcagtggctttgcattcatccatgcatactctgtggctgatataatagctggtgaggccgtgccggtagaccgaattgtgtgaatctggccagagggtcttcaagagtcactcagaactgactcagcacactgattggagaagctgaactcagatggggtg

SEQ ID NO: 225412 - DNA, 612 bp, Glycine max
ttgctgacttcctgtttgtttctgatctatggcttccaaggagttctctggtctttgttccttggtttcttcactctccgagagcattttgtgcactactgggttgaaaatgtatttggtggagagcaaaggaggtgccataacatgcatgttcttggctcttttcttcttggggacatggcctgctcttttgactatgttagaaaggcgtggtcgtcttcctcagcatacctaccttgattactcaatcaccaatttcttgtctgctttactcattgcttttacacttggtgggataggcaagggcactcatgatcagccaaatttcttagttcaacttgctcaggataattggccctccgttctttttgcaatggggggtggtctgttccttagccttgggaatctgtcaagccaatatgcatttgcttttgttgggctatctgatactgaagtgatcacggcaagcataactgttgttataggcacaaccttgaattacttgttggatgacaaaatcaacaaagctgagatccttttcccaggagttggttgttttttgatggcagttttctaggctctgctgatcattcatctaatgctgctgataat

SEQ ID NO: 225413 - DNA, 488 bp, Glycine max
gaaagatccaacactcactcttccaacttccactctctctctttccgaccaaaatgtcgatcaacagcgaatctacgccgccaccggtgatcggaaaaatcgggccttacaccgtcttcatgactccgtcgtctacacccaaacccgacgacgacaaccccgttaccaccaccaagatcgcacctgcgccgactcagattgccaaagccgttccttaccccaaacccaaacctgtctccgatatctgcgtattacgtggtggttatctcagaaacgccgttgccaaggtccaaaccgaccactcaagtttggatgatcatttgacacgttggtttggattgaatcagtcaaagtatcaatgggctcttgatgattattatgagagcaagggagtggaaaaaggagacattagagtgacagaaatatcgagcaaagtacatagtgtttgacttgcctagagttggtggattattcaaagtgaggtgtga

SEQ ID NO: 225414 - DNA, 528 bp, Glycine max
caaggttgaagacttgtcaaggatgttcaggctcttttctaaaatacccagaggtttagatcctgtttccagtatatttaaacagcatgtgactgctgaaggcatggcattagtgaagttggctgaagatgcagtgagtaccaagaaggcggagaaaaaggatattgttggtttacaggagcaggtttttgttcggaaggtgattgagctgcatgacaagtacctggcatatgtgaatgattgtttccaaaatcatacactttttcacaaggctcttaaggaggcttttgagatcttttgcatcaagggtgtcgctggaagctcaagtgcagaactgcttgccactgtttgtgacaatattcttaagaaaggaggatgtgaaaaattgagtgatgaagcaattgaagaaactcttgacaaggttgtcaagttgcttgcctatattagtgacaaagattcgtttgctgaattttatggaagaagctgctcgagggctcttttgacagagttgcatgatgatatgagaga

SEQ ID NO: 225415 - DNA, 496 bp, Glycine max
  unsure (1)..(496): unsure at all n locations
aaaataacagagatgctcagcaagaactttcgtcttcaatggtttcacagacatttggtgtccctgatatggccttcaattcaattgattccacaatagatgatagtaacttcttgaacagtggtccgtgggctccaccaccagcaccgtcacctctgccaccagcacagtttcagcggatgaggacatataccaaggtatataaacgcggagctgtgggaaggtccatagacataacacgatattcaggttatgaggagcttaaaaaggatctagctcgtaggtttggcatagagggacagctggaggatcggcaaaggataggttggaaacttgtctatgtagatcatgagagtgatgttcttctagtgggagatgatccttgggaggagtttgtgaactgtgtccgctgtattaaaatactntctcctcaagaagtgcagcagatgagcttggacggagattttggcaatggtggccttcaaaatcaagcctg

SEQ ID NO: 225416 - DNA, 467 bp, Glycine max
  unsure (1)..(467): unsure at all n locations
agatgaacaccttctataacggtttatataaacatacaatagatgaagaaaaagaaaaaggtaatttcaatcagcagttactactctcaacagtattagctaattacagcttaattttccctggctagacgcatcgccctcaaccaaaaaaatacaatggttgtgggaaataactcttgtcttttttatagaagagtgaaaacctaaccacaataatcaacatgctgcagaaggattggcgaaggggttatagaagtgaggcttgggagccatggagaaggggcttttattcgaaccgttatcgctaacgccaccgagcctctcgcaagaagggcacatggtgagtgtggcagcaggcataggcatgtacaagggttgagctagtttcagtgccttcagctcttgcagcttcttctttagcctcctgttttcgtccgtcaatgtntcacagcatttttttaagaact

SEQ ID NO: 225417 - DNA, 595 bp, Glycine max
ataccctctctctagcttccttcactcacttaattgtgcaatcccaattcaaatcccatcagaatgatgaaatttcaagcatgttcaaaccccatctcaaacttgttctatgcgtgttgtgtccttcttttaccaccaaccatggccttaggagattgcacctgtgacacaaaagaggccacaaagagtgactcaattgaagtcctccactacaaaattggctcaattgcttctgtgcttgttgctggggcacttggggtgagcctcccattgttaagcaagagaatcccaacacttaaccccaagaatgacatattctttatggttaaggcctttgctgcaggggtgattcttgcaactgggtttgtgcacatacttcctgaggcatatgagagcctaacttcaccttgccttaaggaaaatccttggggcaagtttcccttcactggatttgttgccatgttgtcctccatagggaccttaatggtggactcatttgccacagggtattatcataggcaacattttaacccctctaagcaggttcctgctgatgatgaagaaatggaagatgaacatgctggtcacatgcatg

SEQ ID NO: 225418 - DNA, 577 bp, Glycine max
caagattggagaacaggtttggctgaagttcgaaggtctagaaggctgacagtttcttttatatgcactgtggctaactatgagtatggatttttctggcacttttatcaggatggaaaaatagaagcagaggtcaagctcacaggaattctcagcttaagagcattgcaaccaggtgaaactcgaaaatatggcacaaccattgcacctggactatacgcgcctgtccaccaacatttttttgttgctcgtatggacatggcagtagattgcaagcctggtgaagcatttaatcaggttgttgaggtgaatgtcaaagttgaaaagccaggagacaataatgttcataacaatgcattttatgctgaagaaaaactgcttaaatcagaaatggaagcaatgcgtgattgtgaccctttatctgctcgtcactggattgtaagttcttactgattttgaaaccctctttcccaggaaaaaaaatattcagatattaattattttccctgggtgaatattctgctgcaactgtcacttagatgttgagcagggcaattaaaatttctgatctggctgt

SEQ ID NO: 225419 - DNA, 532 bp, Glycine max
  unsure (1)..(532): unsure at all n locations
caaatcatcacacacacatactaagaagcaacaattcttctacaatggatctcctccttctggaaaagaccctcataggtctcttcctcgctgcggtggtcgccatcgccgtctccaccctccgcggccggaaattcaagctcccaccgggcccactccccgtcccaatcttcggcaactggctccaagtcggcgacgacctcaaccaccgcaacctcaccgatttggccaaaaaattcggtgacatcttcctcctccgcatggggcagcgcaacctcgtcgtggtttcttcccctgagctcgccaaagaggttctccacacgcagggcgtggagttcggctcccgcacccgcaacgtcgtcttcgacatcttcaccggaaagggccaagacatggtcttcaccgtctacggcgagcactggcgcaaaatgcgccgcatcatgaccgtccncttcttcaccaacaaggttgtgcaacaataccgccatggatgggaatcggaggctgccgccgtcgtcgaggacgtcaagaa

SEQ ID NO: 225420 - DNA, 539 bp, Glycine max
  unsure (1)..(539): unsure at all n locations
gttttgaagagctatgcatcaagaaagaagccattgagggagaagagaagttttgtgcaaaatccttgggaacagtaattggttttgccatttcaaagctgggaaagaacattcaagtactttcaagttcctttgtcaataagcaagaccaatacactgtggaaggagtgcagaatcttggagacaaagcagtgatgtgtcataggctaaatttcagaactgcagtattttactgccatgaagtccgtgaaacaacagctttcatggttccattggtggctggtgatggaaccaaaactcaggcacttgctatttgccactcaaatacttctggaatgaatcatcaaatgcttcatcaacttatgggagttgatcctggaactaaccctgtttgccatttccttggaagcaaggccattttatgggtacccaatttatctgtggacactgcctatcagaccaacattgttgcttaattagtccatgcatcttgagcaccatgagaatgagatngtgtataaaataaattatcatgtgct

SEQ ID NO: 225421 - DNA, 555 bp, Glycine max
ctcgagccgctcgagccgcgggtttaaaagaaaaactggacagggaacatcagaaatggcgggcagctcaaaccaattatgaaagacaggttgttctccagtccgaaactattcaggagttgacaaaaacatctgaagcactagccttgctgcaggaggaggcatctgagttacggaaactagccaatactcagaaaattgaaaataatgaactaaaggctaagtgggaagatgagaaggtacaactagagaagtctaggaatgatgctgagaagaaatacaatgaaatcaatgaacagaataaaatactacatagtcaacttgaggcttttcatattcaatgggccgagaaggagcgtaacgctgctggtatttcatctggaagtagtagtgcagatgcctttggtgatgctggtcttcaaaacgtgattaattatctcagacgttccaaagaaattgcagaaacagaagtttcattggtaaaacaagagaagctgcgactacagtcacagcatgagagtgctctgaggcagcagagtctgcacatgcatcact

SEQ ID NO: 225422 - DNA, 522 bp, Glycine max
gtttcttacaaggctctactctactgcttcaccttctgctctagaaaattcagtggtgatacatggcttcggctactctctctgtagccaaaccagcccttcaggcaaatgggacaggcttctctgaattctctggcctccgcagctcatcaggcttccttcccttttctagaaaatcttcagaggatttccattctgtcattgccttccagacctatgcagttggaagcagtggaggatacaagaagggtgtgacagaagcaaaactgaaggttgccataaacggatttggaaggattggaaggaacttcttgaggtgctggcacggtcgcaaagactcccctcttgatgtcattgccatcaacgacaccggtggcgtgaaacaagcctgtcaccttctcaagtacgattcgatcctcggaaccttcgatgctgatgtcaagcctgttggcagcgacatcatctctgtcgatggaaaggaaatcaaagttgtctctgaccgaaccctgccaccttcctgga

SEQ ID NO: 225423 - DNA, 388 bp, Glycine max
aaaacgaaaccactatttatttcaatagctttattaatattctagattcaaaattataatgagctcaacaacatatatcagaatagtactcatgtttctccatatcagcagcacagagccataacttttggagggtcaagttcctaaagctttgccgttaacccactctgaattggtttcgaagaaccattatccttaatggcattatctttagaatccatttcacatgcatttggcggaacatctactgcaggggaacagttgaagaatccatgaggcgtgagcataaaaccaatgcgctctactggcataacaggccagtctttcaaacgaggaacgtgtgtgattccaaatatattccaaagaactacattagtttcttccaaag

SEQ ID NO: 225424 - DNA, 483 bp, Glycine max
gcgtgattgcaattctttgactgctcggcattgggttgtaaggaacacgagaacatgcaatagaactggacagttgacaggctataagctggtacctggctctaactgcttgccattggcaggctctgaagccaagtttttaagaagagctgctttcttgaagcataacttttgggtaacaacatattcacgtgatgagttgtttcctggaggagaatttcctaatcaaaatccacgtgttggtgaaggactagctacatgggttaagcagaaccgatctttggaagaaactaatgtagttctttggtatatatttggaatcacacacgttcctcgtttggaagactggcctgttatgccagtagagcgcattggttttatgctcacgcctcatggattcttcaactgttcccctgcagtagatgttccgccaaatgcatgtgaaatggattctaaagatgatgacattaaggataatggttc

SEQ ID NO: 225425 - DNA, 540 bp, Glycine max
  unsure (1)..(540): unsure at all n locations
ctcgagccgctcgagccgcttttgttgctgaattcgatgccactaagctcaaccctggacttaataacaaacccgaaagggaacaagcattagaggctgaggtggagatactcaaagagaagctgaaggaagctaatttggaaaaagctgaaataacatcaaagtacgaaaagctttctgctatctgccgatcacaaaggcaagaattgcaggatctcaagcaagcactcgcagctaggactccttcaccaagtagagagggtttgaaaatctctcccgcagttacatcgtctgcatctgcatctgcatcttcggtaataagcattttgtagtttcagttgtcttgctgattttgtgtaggttgtgtttctgacacaaggttgtgtttcattgcaactgcaggataagtcatggcaagcttttccagaggaaccgcaacaacaaaggtctctttcagccgagaatacctncatatctgtcagggtgaaaaatggtcagcagaacatgcaacctggtcctctagctactgattttgattca

SEQ ID NO: 225426 - DNA, 572 bp, Glycine max
cttttctcaaagcaaaaaaaatgttcatcgagagtttcaaggttgagagtcctaacgtgaagtacacagagactgagattcagtccgtgtacaactatgaaaccactgaacttgttcacgagaacaataatggcacttatcagtgggttgtcaagcccaaaactgtcaaatatgaatttaaaaccaacacccatgtccctaaactaggggtaatgcttgtggggtgggggggaaacaatggctcaaccctcactggtggtgttattgctaaccgagagggtatttcatgggcaacaaaggacaagattcaacaagccaattactttgggtcgctgacccaggcatcagctatcagagtggggtctttccaaggggaagaaatatatgctccattcaagagcctgcttccaatggtgaaccctgatgatgttgtgtttgggggatgggatatcagtaacttgaacctggctgatgccatggtcagggccaaggtgtttgatatcgacctgcagaaacagttgatgccgtacatggaatccatggttccactccccggatctatgacccggatt

SEQ ID NO: 225427 - DNA, 472 bp, Glycine max
aagcacaaaatacttcgataactttatattattttacatgcatgcatagcatagatagcctgctctcaaattagtcagcaggaacaaagatagagagatccaacgatctttaaatttcacatttgccataaatatataacagaaaagagggtatgggatatgagttaagttttgatctcattcaactacagtatcccaaaccattactcttaagactttgaacttcacttgtactccaggatcatgttgttctcaggagctaatccaacacaagcccttaggatgttttccagcatagctcgctgctttgacagtgcattaaccactggcgtactcggtggaaccagaggggccttggtcaggtaactgaggatggtcgcaactgggtggaatgagtggaactttccctcattttcagctttaaactcgattcgagtgctaagctcagcaagaaggaccaagtccaagataa

SEQ ID NO: 225428 - DNA, 557 bp, Glycine max
cctgggttaagaaaactatatgcacccaatggaactttgttgaaagctggggatgtgtgtagaaatgttgaacttggtagcaccttggaggtagtggctgagcaagggccacaagctttctacaatggaaccattggtgaaaatttagtcaaggatgtcagagatgctggtgggattttaacaatggaggatttacacaattacaagttggaagtaacagatgcaacgactgtgaatgtgatgggatacaccatatatggaatgccacctccttcatctggaacacttgctctttctctggttctgaacatcttgggcagttatggaggttctaatgctgcaaggggaaatcttggtctacatcgactaatagaagctctgaaacacatgtgggctgttcgaatgaacttgggtgaccccaactttgtaaacattgatgatactatatccaaaatgctttccccatcttttgcaaaagatattcagcacatgatactcgataacactactttcccttcagagtactatatgaacaggtggagtcaacttagcgatca

SEQ ID NO: 225429 - DNA, 436 bp, Glycine max
tctctctatattccattgccacccagttttgaatatatttttattccttctttgtttcttcactttcttccatacacataaccatgtcttctcagactgttgtcctcaaagttggtacgtcatgtcaagggtgtgctggagcagtgaacagggttttgggaaaaatggaaggtgttgagtcatttgacattgatctgaacgagcatatggtgacagtgaaaggaaatgtggagccagatgaagttctgcaagccgtttccaaatctgggaagaagactgcattctgggtggatgaagcaccacaatctaaaaacaagcctttagaaagtgcacctgttgcctcagaaaacaagccttcagaagctgcaactgttgcctcagctgagcctgatacaggccttagaagctgcaatgttgattcagctgagcctgaaac

SEQ ID NO: 225430 - DNA, 499 bp, Glycine max
gagttaaatcaatagctggttccactaaaaattccgattcaatcatttaagagtaaccacaatttcccaatttaaatataaattaggttttatattttcaacggttttccatctatttgcatacactttcatccaggctgcaattattggattttgctaatctccaaaaattagcatacatgcccaattggagcaaaccaactaactaaccaagcaatttaaccaaatcaatttattctggaaacccataagcaacaatacaacacctatcaacgaatatcgagagtgccgccgctcaaatggctggttgttgctgagtaatgcaatgtatatttccaccggccaaaacaatctccctggcaccttcaattcccacaacttcatgatgagggaaggccttagataggactcggacagcttcatcatcccactttttatctccaaattgtggtgcaatgatagctttatttgcaatgtaaaagtttacataggaagcagc

SEQ ID NO: 225431 - DNA, 578 bp, Glycine max
cggcgccgttcacgcccaacgcgtgtttgcgagggtagcgtcagcaatctcaagattcgagtctgtaacagtttgtgttagttctgcacagtgggagaacgcgcggagtcagctaccggagcatatcagggtcgttgagatgaacatgaacgattcttggttccgtgatattggacctacttttgttgtgagaagaagcaccacgccggaatctggtgatgcagcgagcaggattgcagggattgactggaattttaatagttggggaggcttagaagatggatgttactgtgattggagtcttgatttgcttgtggctaagaagattttgggaattgagaagattcctagattttcacattcgatggtgcttgaaggtggaagcatccatgtggatggagaaggaacttgtcttaccacagaagagtgcctcttgaacatgaacaggaaccctcactcgaagtagaaccaaattgaggatgaacttaagacatatcttggcatcccgtaggttatatggttgcctcgtggatatttggagatgatgacacatatggccatatggtaacatgtgctgt

SEQ ID NO: 225432 - DNA, 502 bp, Glycine max
aagttcaaaatcttttatatagccataacaacttcactttatattaattatacaagtgattcaacaaaccaactaaaaaagacaatacaagatcctgattcacaacactgaaaattgggatgggtccagccgctagctggaacgagacatgaacagtttaacactagcggggacataaatctcaagaaactactgagatatttactagttttcacagttgcagagcatctaaatgagacaaaaaaacagggtaggcgatgttctatatatagcacaagatggagtagttaagcatgagaattggccagctgatttatcaaagccaaggcattactagtcaattgagccacctgaagaatttggcctctcaccgtgttctttacatttgaaccaccagcagcagccgtctcttggaagccatcggtgcacgtgctctcatcggtcaaagcagcactcacccacgtttctacgtcactcattgtcatctcaaaattggagggtg

SEQ ID NO: 225433 - DNA, 592 bp, Glycine max
  unsure (1)..(592): unsure at all n locations
ctcgttcttcttcttttgttgttctgtgtttgtgtttgttttttctctcacctgaaaatgtcttgctgcggtggtaactgtggttgcggaagctcctgcaagtgcggcaacggctgcggaggctgcaagatgtacccagacttgagctacactgagtcaaccaccaccgagaccttggtcatgggagtggcacctgttaaggctcaatttgagggtgctgaaatgggtgtgcccgctgagaacgatggctgcaaatgtggaccaaactgctcctgcaacccctgcacttgcaagtgaggtgttgggagagcaagcttcaagcagagatagcccttaattaggaataatgataaactattaatgtgtagctaaaaacttatgtattatgtctgtgatggttttcgtgcactctggtgttttgtgttaaacaaacatccttagaataaagtggtcatgtcttgcctttcagcaagttcaagtgttttggacttgtgatgggtgtgttaagctcatggttgcttctttnttttttttttaatgtttggtaattggtcgcttctggataaagttcggctaatctgaattatgaatc

SEQ ID NO: 225434 - DNA, 431 bp, Glycine max
aatattataagcagagattcataattcagattagccgaactttatacagaagcgaccaattaccaaacattaaaaaaaaaaaaaagaagcaaccatgagcttaacacacccattacaagtccaaaacacttgaacttgctgaaaggcaagacatgaccactttattctaaggatgtttgtttaacacaaaacaccagagtgcacgaaaaccattacagacataatacataagtttttagctacacattaatagtttatcattattcctaattaagggctatctctgcttgaagcttgcttttccaacaccttacttgcaagtgcaggggttgcaggagcagtttggtccacatttgcagccatcgttctcagcgggcacacccatttcagcaccctcaaattgagccttaacgggtgccactcccatgacc

SEQ ID NO: 225435 - DNA, 490 bp, Glycine max
tagagattcagttctagctcgtgatcttgatagatatcgttgtcaaagacgcctgcttctgacaggaacgcctttacagaatgatttgaaggaactgtggtcgcttttaaatttacttcttccagaggtttttgacaataagaaagcctttaatgattggttctcaaagccatttcaaaaggaaggtcccactcaaaatacagaggatgattggcttgagactgagaaaaaagttatcattatccaccgtcttcatcagattcttgagcctttcatgctcaggcgtcgtgttgaagatgttgagggttcactaccaccaaaggtctctatagttttacgatgtaagatgtcagctgtccagagtgccatttatgactgggtcaaatcaactggtacccttcgtcttgatcctgagggtgagaacagtaagattcaaaagaatcctcattaccaggcaaaagagtacatgactttaaataacagatgtatg

SEQ ID NO: 225436 - DNA, 541 bp, Glycine max
gagaaacccatttctagagagagaaactcgcagtcgcagacatgtcttccttcgatgccttcgccgacgacttgaacgtcaactcttcttccactcgccagcacgacgatgacgaggacaacttctctggctacggcggctactcctccttcaccggaggattctccgccgacggagatgtcgccgtcgatcactccgccgccgcgtcgccggagatctacggcttcactgattcgaatcccgcttactctcagtctcccttcgaatcggccaccgtagagaacgaaaacggaaacggatacggcgacggcgacggtgtttttgtctccgacggtccggtgcttcctccgtcgacggagatggagccggaggaaggttacgctcttcgcgagtggcgccgtcaaaatgccattcagctagaggagaaggagaaaagggaaaaagaaatgagattgatgattattgaagaagctgaggagtataaggtggctctctatgagaagaggaagcctatggtgagactaacaggttcagaatagag

SEQ ID NO: 225437 - DNA, 468 bp, Glycine max
gaacctgaattgatcaatataattaaacagcagctggacatccaccctttctagggtcacttactgctgttagagtgccatgctttgtaagtgatttggtgttttcaccaactttcctattgaagttcataggcgttttgagagtttgcacaataagctgagtcacagctagtgcttcagaacctctcagttgatgacctctctcttctaggaaaagcctactttcttttgaaagctcaatgtgatcgccattatgagcagtcaagttctcataacgaactacatttggtattagcttgtgatagatccttgggctcacaactgcatccaagggtttcattcccaagatgaaatgattaagaaagacttgaactacggctgcaataatgttcattccaccgctccctgcaagtaccccaaccaactgatcatcctttgtgacaataagaggagtcatggaagacaatg

SEQ ID NO: 225438 - DNA, 406 bp, Glycine max
gattaaacataacttacaacgaatatatttaaaactaaatgatgtaacgagcaaaaaaagacattttcttcccacaacagttggaactggacaaaagagcaaaaaacaattattataaaataaataaatatggaagtaataagcaaaaaaaaattattattaacttgaaaaaaaataagggaggaaagggtgcatcactatctagttcaccacactaacaatacatttggactcattgctaaatggccaccaaattttgcatttcatccgagggagaacaaaatactcttctcactgaagcagccgttgctcgttgctctagagtccatatcctgaattgtccatggggtttccagcaggtatggcctcaggttcctttatctcaaacaccacgcaatctgacatt

SEQ ID NO: 225439 - DNA, 522 bp, Glycine max
ctggaggatgctattagaagtggacaccctatattgattattgctgaggatattgaacaagaggctttagcaactcttgtggtgaacaaacttagaggatcactgaagattgcagcactgaaggcccctgggtttggagagcgcaagagccagtaccttgatgatattgccatcttgactggaggtactgtaatcagagaagaggttggccttactttggacaaagctgggaaagaggttctcggatatgcctccaaggtggtgctcaccaaggatacaaccacaattgttggtgatggaagtacccaggaagcagtgaacaagagagttgcacaaattaggaacctaattgaggctgctgagcaagagtatgagaaagaaaagctgaatgagagaattgctaaattgtctggtggtgtggctgtgatacaggttggcgcacatactgagacagagctcaaggaaaagaaattgagagttgaagacgctcttaatgctacaaaggcagctgtcgaggaaggt

SEQ ID NO: 225440 - DNA, 571 bp, Glycine max
  unsure (1)..(571): unsure at all n locations
ctcgagccgtgagagacgaaaccctaggttttagtgagtggcgaaaatggcggtgattttttcaagtgcaataccaggaggggcagcaccagcagcaatcgagcaagtgcagtgcttcgggcggaagaagacggcggtggcagtgacctactgcaagcgcggccgaggcctcattaagatcaacggctgcccgatcgagctggtggagccggagatcctgcgcttcaaggccttcgagccaatcctcctcctcggtcgccaccgcttcgccggcgtggacatgcgcattcgcgtgaagggcggcggtcacaccttccagatatacgccatcaggcagagcatagccaaggctctcgtcgcttactaccagaagtacgtcgacgagcagttcaagaaggagatcaaggacatcctcgtcaggtacgaccgtacccttctcgtcgccgatccccgtcgctgcgagcccaagatgttcggtggtcgcggtgctcgcgccaggtttcagaagtnctaccggtgatttcctccttttgtattaagctattcatcataagttgtaaagtactttctc

SEQ ID NO: 225441 - DNA, 498 bp, Glycine max
gtttcgaatagattatcctaagtctttgggaatagtgctgcaatggcttcaagtcaggaggaggtgacccttttgggagctactggaagcccatttgtgtgcagggttcatattgccctcaagttgaagggagttcaatacaaatatgtcgaagaaaatttgaggaacaagagtgaactgcttctcaaatccaacccagttcacaagaaggttccagtgtttattcacaatgagaagcccatagcagagtctcttgtgattggtgaatacattgatgagacatggaagaacaaccccatcttgccttctgatccttaccaaagagccttggctcgtttctggtccaaattcattgatgataaggtttttggtgctgcatggaaatccgttttcacagctgatgagaaagagcgtgagaagaatgttgaggaagcaattgatgctctgcaagttcttgagaatgagatataggacatgaagttcttggaggagaggaga

SEQ ID NO: 225442 - DNA, 626 bp, Glycine max
gagcagacttaacaacagcacaaagcgggttactgtctgttcaagctaccatctctctctctctttcttagtgcctccttgccagaagttaaaatggcccaagaaactttcctattcacatctgaatcagtgaacgaggggcaccctgacaagctctgtgaccagatctccgatgctgtgctcgatgcatgcttggagcaggaccctgacagcaaggttgcctgtgaaacctgcaccaagaccaacatggtgatggttttcggagagatcacaaccaaggccaacgtggactatgagaagattgtgcgtgacacatgcaggaacattggttttgtctctgatgatgttggtcttgatgctgacaactgcaaggtcctcgtcaacattgagcaacagagtcctgatattgctcaaggtgtgcacggtcacctcacaaagaggcctgaagagattggtgctggtgaccaaggtcatatgttcggctatgccactgacgagactcccgagctcatgcccttgagccatgtccttgccacgaagctcggtgccaagctcaccgaggttcggaagaccggacatgcccttggtgagacctgatggcaggacccagtcactgtgagtactac

SEQ ID NO: 225443 - DNA, 549 bp, Glycine max
gagagaacatttttttttgtttcatcatataaaatatatatgttctgaaagaacacatacaagtacacaaaaaaaagggggaaattcataaaaaaatacagaaaaaaaaaaacagaattgagtaagagggaaggaaacatagagaaaattttagcaatcagataataagaagccagtagtagtgcaaaagtcccttgccaagagtgttggaaccccttttagttaagcaggtacttctcaggaatcacaggcttaatcacgtgttctttaagatcagctgcaatctcatcatttgtgacagtctcatcatgctgtgtggagatgagcacagtgtggacgcggattggaaccatggcacccttgtcattgtagtactcaacagtgacttgggtcttgccatcaggtctcagccaagggcatgtcccgttcttccgaacctcggtgagcttggcaccgagcttcgtggcaaggacatggctcaagggcatgagctcgggagtctcgtcagtggcatagccgaacatatgaccttggtcaccagcaccaatc

SEQ ID NO: 225444 - DNA, 543 bp, Glycine max
gtgagaggttgttcatgctttagacgccaccaccaccaacaacaacaaagacgccgtcgccgccggctacgcctccgccgacgacgccgctcctcagaactccgggcgccaccgcgagcgcgagcgaaagcgaggagttccgtggacggaggaagaacacaagttgtttttggttggattgcagaaagtagggaaaggtgattggagaggaatctccaaaaactacgtcaaaacgcgaactccgacgcaggttgccagccatgctcagaagtactttctccgacgaagcaacctcaatcgccgtcgccgtagatccagcctctttgacatcaccaccgacacggtctctgcaattccgatggaggaagaacaggtccagaatcaagacaccctgtgtcattcacaacaacaacccgtgttccctgctgaaactagcaaaatcaatgggtttccagcgatgccagtgtatcagtttggggttggttcttctggagtgatttcagtccaaggtactggtaacccaatggaagaactactctggga

SEQ ID NO: 225445 - DNA, 340 bp, Glycine max
attataaaaattataatattatataataataaaaaatgttataaactaaatcaaactgcatttaaaaacacagtaacccacaaaaaaaaaaaaaaaaaaaaaaaaaaaaaaaaaaaaaaaaaaaaaaaaaaaaaaaaaaaaagaaaaaaaaaaaaagcgcgcaagacaaccaaaaaaaaaaaaaaaaaaaaaagaacaaaaaagagaacccaaaagagagtaaaaaaaaaaccctgaacccgtaaaaaaaaaaagagggggaaaagacaagccctagaagacaccagagataacggggcgcggactcgggaaccgcaaacaaaggaaaaaaatacggaaa

SEQ ID NO: 225446 - DNA, 499 bp, Glycine max
ggaggctgccgagagcactctctctgcatacaaagccgcacaggacattgcgaatgccgaactgcctcctactcatccaattaggcttggccttgctcttaacttttctgtattttactacgaaatccttaattctccggatcgtgcctgcaaccttgcaaaacaggcttttgatgaagctattgctgaattggatacactgggagaggagtcatacaaggatagcactttgatcatgcaactccttcgtgataacctcacactttggacctctgacatgcaggacgatggagcagatgaaattaaagaagcagcaccgaaaccggatgaccagtaaaaatattttactgctaattagaattgaacttctcctccatatctttttgaagggagaaggtgtttggtgctaatatctctctggtactgggaatttaggcattcatgtctgctatgaattgcggatgtactgggccgttttagtttggtccttcattttctc

SEQ ID NO: 225447 - DNA, 531 bp, Glycine max
gtaactgcagcagcgctgagtcgagggcgttcagtgttcaccacagtttacacacgagtacccattttctcttctcaatttctcagagtgtgcagagaaaatcatggtggacgcagcagaacgtaggtacttggaggatgacgattcatcactcatgaaaactattaagggggcaacaactggtttagttgctggcactatctgggggaccgtagttgccacctggtatgatgtccctcgtgtagagagaaatgttgctcttccagggctgattaggactttcaagatgatgggcaactatggtttgacctttgctgccataggaggagtctacataggtgtggagcagttggtgcaaaactataggatgaagagggatttagtcaatggagctgttggcggatttggtgctggtgcaactattctgggttacagaggaaggagcatcaaaactgcactttctgctggatcagcattggcattcacatctgcattcctcgatttcgtgatcagacaatataacatgatact

SEQ ID NO: 225448 - DNA, 514 bp, Glycine max
tgcagaagaaggcttgcacctgtcagaggctctgatcaagagagaaagaaaggagtcccatggactgaagatgaacacagacgttttctgatgggacttttaaagtatggcaaaggagactggagaaatatctctcgcaattttgtggtcactaagactccgacacaagttgctagccatgcacaaaagtactacataaggcaaaaggtttctggagggaaagataataggagaccaagcattcatgatataaccactgttaatcttacagaaacttctgcatcagataagaacaagcctcagttatttaatgcgtctcctgtgcttgcaccacagcagaagctgaatagcatatcaaaggtacagctgggctggactagtagccactacaatgatggatcattcatggttctcaacccatatagtgatgccttgtttgtgtcatcttcacctgatgtcacttctatggccctgaaaatgcaagggcatgatctctatgactgtgctttacatg

SEQ ID NO: 225449 - DNA, 516 bp, Glycine max
cctcctcctcccttcttcacactgctgttgatctagttaacgagaccaagttggatgatgagatcaagtcatggctagcttttgctgcccaaaaaattgttgaagttaacgcattggctaaagcattgtctggccacaaggatgaggccttcttctctggtaatgctgctgctctggcttcaaggaagtcttctccaagagtgaccaacgaggctgttcagaaggctgctgctgcattgaagggttcagatcatcgccgtgcaacaaatgtcagtgccagactggattctcaacaaaagaagctcaaccttccaatcctgccaaccaccactattggatccttccctcagactgtagaactgaggagggtacgccgtgaattcaaggctaacaagatctccgaggaagagtatgtaaagtcaattaaggaggaaattcgcaaagttgttgagcttcaagaagagctcgatattgatgttcttgttcatggagaaccagagagaaatgatatgggtg

SEQ ID NO: 225450 - DNA, 433 bp, Glycine max
aacaagataaaagcagcattcaagcaattatatttaataacgacataacttaaacttaaccattatataactgtattcagaattcgattgatcttaactcagcgcagaaccaataaaacagagaaagtactttaacaacttatgatgaatagcttaaaaaaaaaggaggaaatcaacggtaggacttctgaaacctggcgcgagcaccgcgaccaccgaacttcttgggctcgcagcggcggggatcggcgacgaggagggtgcggtcgtacctgacgaggatgtccttgatctccttcttgaactgctcgtcgacgtacttctggtagtaagcgacgagagccttggctatgctctgcctgatggcgtatatctgggaggtgtgaccgacgtccttcacgcggatgcgcatgtccacgccggcgaagcggtg

SEQ ID NO: 225451 - DNA, 483 bp, Glycine max
gaaggcaaacttgactacattactactatagaaaaggtacaaagtatgtttgataaccgaggtttcaaaacaaaattaacacaatctcctgaaatgacattaagcctactggctaccggaaagcaatctactcagcagcatcttttttcttcttgggcattctgtatccaccaaccacacaggcatggtccctctcaaatggttcaagggtgacttgctcgaatggtttgaattgatctgccttcaacttgttcacttcgctttcaaacactgcctcggcagggactgtggagtctatgcagttagccttgattgaaataacaaaatgacctcctgctttcagataatatgaagcattcagccccaaaatccttgcctgatcgggctgagcaacatcagaaaatatgacatcaaccattccgaccagcatcctatacttagctggatgtctagcatcttaataatgggaataacatagttcgc

SEQ ID NO: 225452 - DNA, 580 bp, Glycine max
ttttgaggacacttggagctgctagcactagttttcccttttccccttgtttgtttttttaggataataattgaccaattgggtatcttgtcagttgagacatttttcaagaagtagcaaagctccttctacaatatttgacttggtgctttccttttggatcttacaatgggaaacagtgaggaagagaaatctaccaagactgaaaaaccttcttcacctgtaacagtggatcaagccaatcagaccaaccagaccaatattcatgtctatcctgattgggcagccatgcaggcatattatgggccaagagtcaccatgccaccatactacaactcagctgtggcttctggtcacgctcctcacccatacatgtggggaccaccacagcctatgatgccaccttatgggcctccttatgcagcaatttatccacatggaggggtttatactcaccctgcagttcctattgggccacatacacatagtcaaggagttccatcttcacccgacgctgggactcctttaagcatagagacaccacccaaatcatctggaaatactgatcagggtttaatga

SEQ ID NO: 225453 - DNA, 449 bp, Glycine max
aagccaaaataattacttatttaagatcccattagaaagtccacagcaatcggtaatacatacccaattttgtaacgggtaaacaaacccatccaaactgaaatttttagttctcttcattttacaaacttgggcatccatttttggcaaatttaatagaatacagagttttggcctaagtaaacaatgaattagttctgattttgagggatttagatactaaaattcaggtgatccatcccttaggaaattggtagtagaaattttgggcttggaatatgccaaaactacctttgatcagccagtacaattacgggttttctggataaaccaggtgccacagcatcagctttaggacttggggccagtaattgatgcagttttgcaccaaagtttgggttatttttgcaaaaaccattcttattcttcacaggtttatcattagaacc

SEQ ID NO: 225454 - DNA, 301 bp, Glycine max
ggactccattggggtctctatggctatgtagtgctcatgtagttcttcttgctgtagaatgtaataataaacaaagttggtcttccttttgagaagttaccagcttttgctgtccaaaattactcaatttgcagctgactagaattcttttctctcttcagtttctgcagatgagtaggtaggcaatttgtgatcactcccttcccttttcatgtcttctgtgttcccttttccatgcttgtttgtgttgttagttatgaccttatgaggaaataaaagaatagtacaattctagtccctc

SEQ ID NO: 225455 - DNA, 346 bp, Glycine max
acgagataaccactcggtaccatatatatatagttagtgagaaaacgacatacactgttcacaggatgaagctttatttcagtgtggaatccattatacacagaacacatacgtaggttgaaaacttagctatggcactctatctatagacggttgatctaggacaacacacaggacatgatcttacatatgctccaccatctactattaagggtgctgaacaggcatgggctacgtttggaacaatggtggtgtgatctgcaatatccacagatttatggggaacccatttgggggcattgtttacgacgatacggctggcaaaggtagcgccggcatcaactcc

SEQ ID NO: 225456 - DNA, 398 bp, Glycine max
cactgactacttgccagaatggctcttcgggtgttggtgatgtgcatctctcgcgtcttcactctcgaccttgcgagataaagccatgccatagacgaacatttttggcatgctgaccggcacaaacaatcgcattccaatcgcacttgcagatcttatcaggctctgagcctgcgcgcgttgatatcactgactaccctatgcaaattgaacaaccacactgctccgataaccttgttctataagaacaccttcatccaggtcgaccgatagcatgtcaactcagcacaccttcctttgatcaaccatgggatgctggtgcatgggctaaggatattcaacacactactatagatggacatacgcctggagagctatgcttaaccaaagaatccatt

SEQ ID NO: 225457 - DNA, 478 bp, Glycine max
ccgcttcttggtttcattcactccatccaaggaagaatcgtctattgagtaatttgttatggtgaactaacacaatagcacatttattggaatttaaccagttcagcaccagcaacttacaaaagaaacaatatggaaagatagcccagtatgtaattccaactcaacaaacaactgggtcaacaaaagagtgatccactctttcctatcaacttgaaatgtcttcaatcataaaagtgcacattaacaattatgcttcagtactgggtcttttctttgtggtgtaagccgcgtactccttcccagtatcatgtcttattgtctgatcaccgaaatcaaggaatgcagatgtgaatgccaatgctgatccagcagaaagtgcagttttgatgctccttgctctgtaacccataatagttgcaccagcaacaaatgccgcaacagctccattgactaaatccctctttatcctatagtt

SEQ ID NO: 225458 - DNA, 491 bp, Glycine max
cgaatccctctctctctttctctttctctctcatccagatcttgcaaaaaaaaaaaaacacaatggcagcgagcgctcccactccacgcgaagagttcgtgtacatggcgaagctggcggagcaggccgagcgctacgaggagatggtggagttcatggagaaggtctccgcctccgccgagagcgaggagctgaccgtggaggagcgcaacctcctctccgtcgcctacaagaacgtaatcggcgctcgccgcgcctcctggcgcatcatctcctccattgagcagaaggaggagagccgcggcaacgaggaccacgtcgccgtcatccgtgactaccgctccaagatcgaggccgagctctccaacatctgcgacggaatcctcaagctcctcgacacgcgcctcgttcccttcgccgtcttcggcgactccaaagtcttctacctcaagatgaagggagactaccacaggtacctcgctgagttcaag

SEQ ID NO: 225459 - DNA, 524 bp, Glycine max
aaaaaaaaaaaaaaacatttgtcaatttttttctctttctttaactcctctctcttgggaatcccagatctccaaaccagtgttcaagccccaccttcatatggttctagatggcaaaaccaagttcagctgatggtaggactagaagttctgtgcagatctttatagtagttggtctgtgctgtttcttctatattttaggtgcgtggcagagaagtggtttcggaaagggagatagcatagcattggagattactaagactaacacagaatgtaatatagttccaaatttaagttttgattcccaccatggtggagaagttaacgaatttgatgaagctgattcaaagcctaaggtatttgagccatgtgctgctcgctataccgattacactccctgtcaagatcaaaagcgtgccatgacctttcctagagaaaacatggtctatagagagagacactgccccccagaagatgagaagttgcagtgtatgatccctgcacccaaggggtatgtaacacca

SEQ ID NO: 225460 - DNA, 589 bp, Glycine max
gcacaaaactggtaaaattccagatcaataaggattgcggcgaagccgcaaagatacaacattcattagggaaaacaggagtggggaaaaataaggggggaggggttgaggaagaatcaattgctcacagagcatgctaagacacctaaatattccacacacagttattgaaacaacccaatatagagaaaatttttctttggtgtattataatataaagcagaaccaaatgacttggaagattctactttcttataccattcacttggcaagttcgttgcggatgagttttgctgcggcaaccatgtttgtgagggctggcttcacctcagtgtacttacgggtcttgagcccacagtcagggttcacccacatgatgttcttctcgagcactgccagcatcttgctgattctgtcagcaatttcttcagttggtggtatacttggggagtggatgtcatagacaccagggcccattccagcaccatacttcacaccttcgcggaagactgacagaagctactagtcggaacgagagttctcaatggtgataacatcggcgtccatgtccatgatggattgatgatgt

SEQ ID NO: 225461 - DNA, 558 bp, Glycine max
acacaacaaaacacacataataatcatattacaacttcttcttcttcttccattgaccattgttgttgttgttgcttttgttcgttctcgccatgccaatgttgtcttcgagaggcttcatcgcttatctcgtatctgctttctcttgtgctgttctgtctgcgctttttctcaccaaccacatccatcatgatgataacaagccaattactttgttagcctctcgtgtgtctgaaactcttaaagtttggccagacttggagccaagttggagacttgtgttggcaacggttattgggtttcttggatcagcatgtggaaccgttggtggggttggaggtggaggcattttcgttcccatgctcaatctgcttcttggctttgatactaagtctgctgctgctctttctaaatgtatgataatgggggcatcagcatcatcggtttggtataatgtgagagtgccgcatccaacgaaagaggtgcccatattagactatgatctggctcttctgttccagcctatgctcatgcttggaatcactgatggtgttgctc

SEQ ID NO: 225462 - DNA, 532 bp, Glycine max
actaaataaacacaggtaccctgtcaacgttctcatccaccagcatcaatacccacacacaccttgttttcctttctatagagacacacagagagagcaataaacacccttcaatggctaccactaccactaaagtttacattgtttactattctatgtacggacatgttgagaagctagctgaagagattaaaaaaggagctgcttctgttgaaggagtagaagcaaagctatggcaggtacctgaaacactgcctcaagaggtccttgggaaaatgggagcaccttcaaagagtgatgtaccaattattacacccaatgagctacctgaggctgatggcttattgcttggtttccccacaagatttggactgatggctgctcaattcaaagctttcctggatgcaactggaggtctatggcgcacacaggcactagctggaaagcctgcaggaatcttttacagcactggctctcaaggaggtggacaagagactatctcgttgacatctattactcagctggttcacca

SEQ ID NO: 225463 - DNA, 463 bp, Glycine max
cctactccaatgaacatgacaatttcatatattattattatacttcacaatcagcatttctttgttcaagactgataataaccattaaattattgtcattgtaacaatcggaaaacgagggaaaggaatagaagaaaacaatgaacaacccttgccagttagttgcaccaaccaacaaggcaccaaccatagtaccaatcaaaaggtaaaaagagagagagaccaaatcctactaagaaaagcataactgttcctttccatccaaagggagaaaacatgcaggttttgctcatggcttccacagaatggttgtgtctgcaatcatggaagtaaccacgtatgggtccatgttggaagctggccttctgtcctcaaaatatcccttccctgctttctctgtgtctctcccaaccctaacagaagctccacggtttgcaactccccataagaaggtgttgatgtc

SEQ ID NO: 225464 - DNA, 469 bp, Glycine max
  unsure (1)..(469): unsure at all n locations
ctcagaattctctaaaagagatctttttctgctctttgaagaaagaagggtctttgcttgattttggagatgtctctgctctcagatctcatcaaccttaacctctccgataccaccgagaaggtgatcgcagagtacatatggatcggtggatcaggaatggacctgaggagcaaagcaaggactctcccaggaccagttagcgacccttcagagcttcccaagtggaactatgatggttccagcacaggtcaagctcctggtgaagacagtgaagtgattttatacccacaagccattttcagggatccattcagaaggggtaacaatatcttggttatctgtgatgcctacactcctgctggagaacctattcccactaacatgaggcacgctgctgccaaggttntcagccatcctgatgttgctgctgaagtgccatggtacggtattgaacaagaatacacct

SEQ ID NO: 225465 - DNA, 304 bp, Glycine max
gagggactaaaattggactattcttttatttcctcataagggcataactaacaacacaaacaagcatggaaaagggaacacagaaaacatgaaaagggaagggagtgatcacaaattgcctacctactcatctgcaaaaactgaaaagagaaaagaattctagtcagctgcaaattgagtaattttggacagcaaaagctggtaacttttcaaaaggaagaccaactttgtttattattacattttacagcaagaagaactacctgagcactacatagccctagagaccccaatggagtccctt

SEQ ID NO: 225466 - DNA, 606 bp, Glycine max
  unsure (1)..(606): unsure at all n locations
cttcgattgcaacgccaagcaaatcaaagagtccatagcgaaggccaaagaagccggcgctgccattaggctcggacccgaactcgagattcctggttatggctgcgaagaccacttcttagagctcgacacagttaaccattcatgggagtgcctgaaagatttactgcttggagattggactgatggcattgagtgtagctttggcatgcccgttatcaaaggctccgagcgctacaattgtcaggttttctgtctcaatcgaaagattattatgatacgacccaagatgtctcttgccaatgatggtaattatagagaactgagatggttcactgcttggaagcagagggatcaactcgtcgattttcagttgccacctgaattttccaaggcaataggccaaaattctgttccattcggttatggcttcattaagtttcaagacacagctattgcggctgaagtttgtgaagagctttctactccaactcnccctcattctgaacttgcattgaatggcgctgaagtgttatgaatgcaagtggaagtcaccaccaacttagacagctcgatgtccgcttcgtgctttataggtgcactcaa

SEQ ID NO: 225467 - DNA, 486 bp, Glycine max
accaaaaaagacaaaagccaaaaatatattaagaaggattctttgtacgcaatacataatcatttctcaatcaaattaaataaataacacactagttcatcatctttttggttccctagcgatttacataagccagcatcaggaactttatttatcgcaacactaacaatacaaataaaaaaaatcactaaaaaggaaggaatagcgatcggaagttaatccccccccatgcacgtacaattagaaccacactctgatcaatagaatttgaagaagaaaaaatggaaagccacaactagagcaaacccgaagcaaaagaagatttaagatgatatgttatacttatagtataagcttagtaggcacattggaaatcacgtggggctttccttgagcaaacattgagaagcaagctgagtgagatcggaaggttgaggttgatgcccaaaatgtttgctctgagagcagtgcaaaggcacactgcag

SEQ ID NO: 225468 - DNA, 491 bp, Glycine max
aatttgctagagaattagaagaataaacataataccccagatggcttcaaaaacttgttcctcccttgcccttttcctcacactcaacctcgttttcttctcacttgtctctgcatgcggttatacaccatgccctggtccaaacccaaagccaaggcccaaccccaaccctaaccctaaccccagcccaagtggctcgtgcccccgtgacgcactcaaactaggtgtatgcgccaatgtgctaaacttggtgaacgccactttgggtcaaccaccagttaccccttgttgctcccttctcgatggtctcgttgaccttgaagctgcagtgtgcctttgcactgctctcaaagcaaacattttgggcatcaacctcaaccttccgatctcactcagcttgcttctcaatgtttgctcaaggaaagccccacgtgatttccaatgtgcctactaagcttatactataagtataacatatcatcttaaatctt

SEQ ID NO: 225469 - DNA, 550 bp, Glycine max
  unsure (1)..(550): unsure at all n locations
attcaaaactacagtcaattaaattaaaacttgaaacaatcaaaatccatacagagacataccaccgtctatcaaaaccaaaagtaaagcacagaaccaacaaaggtaaataacaatgtctctaaaacatccataaaaccaaaactagcaaatcaagcatccaccctttcctcctccaagattagagtcttccctgttggttttgccaatagatctgtgtactcttggaatggagatttggagaagcgagtctccttccagaattctggtgtcaggaatccataggttttcatcaagcaatcaaaagtagcctgtaaataatacaaagcatcatcattattatgggtactaaaaacaacatcatagcaattctttcatgaacattagcctctccaccaaaggatcatgcacacaaatacacattagcctctctaacaaaagatcatccacataaacacacatacacaggtaacaaatcacacaagtgatgatacantgtgaatgccaataattgcagcaaaaacaccatagactaacacatattaagtaa

SEQ ID NO: 225470 - DNA, 497 bp, Glycine max
agaagaagggacttttttatccaagaaatctatcaggatccatagagtcacgctcatacacaatacaagtccagcacactgggatttacaacaataactgccaaaagctttaaacccatcagccttcagattcatattagtggaggtatattcctgtggcaagatgggttctattgatgacaaagcatgaagaggtaattcattaaaagtaaaactttaaaacctagtagattctgataagaaaatgaattcagtgcttaaacatttcaatgtgcacggtctctcagtacttcaagatccatttctgtggggtcagtagcctgaatttcataatggacaccatctagctcccgtctaaacctgtctttagtagtggcatagagcatcttggctcggattcgagacgttgaaggggaccatgcaatgaagaagattttgctcttttgacagttctcagaagtgacgaaatcatagtcaacgacagcatatctgcaatc

SEQ ID NO: 225471 - DNA, 547 bp, Glycine max
gggaagttgtggttgagaagactggtgacccggctgagagctatgaggatttcgctgcatctttgcctgagaatgattgcagatatgctgtctttgactatgatttcgtcacttctgagaactgtcaaaagagcaaaatcttcttcattgcatggtccccttcaacgtctcgaatccgagccaagatgctctatgccactactaaagacaggtttagacgggagctagatggtgtccattatgaaattcaggctactgaccccacagaaatggatcttgaagtactgagagaccgtgcacattgaaatgtttaagcactgaattcattttcttatcagaatctactaggttttaaagttttacttttaatgaattacctcttcatgctttgtcatcaatagaacccatcttgccacaggaatataccttcactaatatgaatctgaaggctgatgggtttaaagctcttggcagttattggtgcaaatcccagtgtgctggacttgtatcgcgtatgagcgtgactctatggatcctgatagatttc

SEQ ID NO: 225472 - DNA, 515 bp, Glycine max
ggaaactttttcgattttcgctttctgggtcggttccataatctgtgtcagcaaactctttcacgagtttttcactctcttgttgttaagtgatttctattgacaccatgcatctaactagttttttttcttgcccccttttgggatttattcaatttgcttaattttagaggtgtgaattgttatttgaaagtcacaagcaatggtgaaggacactgcatattatgacatattaggtgtcaattttgatgcatctgctgcagagatcaagaaggcttattatgtcaaggctagaattgttcaccccgataaaaatcctggggatcctaaggccgcagaaaattttcagaaacttggtgaggcttaccaggttttaagtgatcctgggaagcgtgcagcatatgatgagcatggaaaggagggagtaccacaagattccatgatggaccctacaactgtatttggaatgattcttgggagtgaatattttgaagaatatattggaaaacttgcac

SEQ ID NO: 225473 - DNA, 522 bp, Glycine max
  unsure (1)..(522): unsure at all n locations
gaaatgaaatcaatatgccttccttgatttttattaaggacaagagagtgcaattatggcagcttaatccaatccataagtccaagtgaaattacataccatgcctattaacagcactgtaagaaacaatgttcaaaatccactgagtcagaaggccataagaataccgctcatgacaaactgaacaagatgactatgatgaggaagcagcatctgatgttttgtcactttccttgcgtaggctgttttctctgttataagcagacttagcaccttgaaagatagttcctaactttttcaatgctttggctcgagacttcagaacatctttggaggcacttggatctttaagaacagcttggcaaacacgtgacagagttgattcaatatcaataacattgatctgccatagagaattaatcatggcatccttcttatcttcaatagctttgactatgctntcttctttggtttctcctggtttagcttcttgagttcttcttgtatttgaatgagggacac

SEQ ID NO: 225474 - DNA, 437 bp, Glycine max
tcgatcatcacttcacttcactaatacatcatggcagacgagacccagaacaagtatgagagctctgaggttgaggtccaggatcgtggtgtttttgactttctcggtaagaaaaaggatgaagaagacaagcctcatcctcaggaggaggtcatcgccaccgagtttcaaaaagtcactgtctcagaccaaggagagaacaagcacagcctcttagaaaagcttcaccgatctgacagcagctctagctcttcaagtgaggaggaaggagaagatggagagaaaaggaagaagaagaagaaggaaaagaaagggctgaaagagaagatcgaggagaaaatagagggtgatcatcatcatcacatggatgaggacacaagtgttcctgttgagaaagttgaggttgttgaaacagcacatgctgaggaaaagaaggg

SEQ ID NO: 225475 - DNA, 559 bp, Glycine max
  unsure (1)..(559): unsure at all n locations
gccgcctgggccttccaggaagcaaaattccagaaaggcgacgtggtcctcgtgctccactacgcctacggcgccgtcaagaaagccatcgaggcctacgtggtgcgcgccggaggcaccgttatcgaagtccccctccccttccccgtcacctccaacgacgacgtagtcaacgaattccgaaaagcccttgagaggggcaagtcccgaggcaacagaattcgcttagcggttatcgaccacgtgacttccatgcccagcgtggtcatccccgttaaggacttggttaaaatctgcagagaggagggtgtggagcaggtattcgtggacgcggcacactcgattgggtgcacgcgcgtggacatgcaggagatcggagcggacttctacaccagcaacttgcacaagtggttcttctgcccttcctacgtggcgttcctctacgcacgtgcctnctctaaggcacgtgacctgcaccatcccgtggtgtcgcacgagtacgggatggtgttggccgtggagagctcgtggaccgggaacagggactacagcgcgcagc

SEQ ID NO: 225476 - DNA, 504 bp, Glycine max
attcaatccagagactttacctcttcatctaaatatgaaaataaataggtatacatgctcacaaaaattatggtgaaaaggacataagatgagtttatacttgagtgctacggtttacatttgtatcttgcaagctttattaagctatacaattccatgtacagatggaagctcaacctaatggctttgtgtataaaactgccctttgcaaactaataaaggtattggaagaaactaccatgcagcaaagaatcctgaatttcaaatgatcatatttgtaaccagcttcaaaccctgatgatccggtgacatattgtttattaagcattgagtagcatttgcaagattatgtcattccatgagtcaattggtcctggcaaacaccaatgtagacaatcattctgaactttggcattcttggcttttgcaaatggctgaaactttctgtaaggtccaggatgtccatctggtctcagcagtgaaaggagagttgtgtccaaaagt

SEQ ID NO: 225477 - DNA, 546 bp, Glycine max
gagaaagtagcatagttttttgtggttccatttccacctttgctctgtttctgacacaagatggtgaagagagtgaggtctgattcgggtccattgtccctgcaaaagcacaaccattggtgtgtgaagttaggagtctcaatcttcttggtgggtcttgtcgttcgccttctcttgtgggattcattcagtttctcatcagtggtggtggagacacctcctcctctggaagaggcaaaagcagagtccccggttttcgcttcctctgttcttcaggattctgatgacttcccagaaaatgatcagaaccagacacaaatctccaagaatgaaaaatgtgatctttttgtgggaaattgggtgcaagacctatctgggccagtgtacactaatgagagctgccgtgtgattgagcctcatcaaaattgtatgaaaaatggacgtcctgattcagggtacctctactggaggtggagcccacgagactgtgtattgcctaagttcaatcccagaaagtttctcaaattcatgagaaataaatcaatg

SEQ ID NO: 225478 - DNA, 564 bp, Glycine max
  unsure (1)..(564): unsure at all n locations
agttaatcctctttctcaatattgtcttggattcagatgatgccttgttcggtggcttcagtcggctcaatcacactgctgagtacttcacctcagaaggatggtatgatgaccgacctcgatcctttcttatctatgcaccttctagaacagcagtggtttatgcccttgcagatgatgttgaacctaccctagcagatgaagctgaacctgccctagcagatgaagctgaaccagagccagttgatccttgatgacaattttctgggatgctgaaatgttacaagtgcacaacggcatggatgcagtaaatccctaatcaaactagccaaccaacgtctggtggattaaccgacactgaaacaacaaagaagctgaattgaagtggaataaataaagcgctagttcatctttagttgagagcaggagactagcctcgaaatcttgtacatgtgccttgctaggtaataagttgtgatatcacacccatcttnctgttttactntttatgatttaacgtcttgacatgtataagttgcgtcacgatcgacaaatgtgaatcac

SEQ ID NO: 225479 - DNA, 565 bp, Glycine max
tgaccagatcgccgagttcaaggaggccttcagcctcttcgacaaggacggcgatggttgtattactactaaggaacttgggactgtgatgcggtcactagggcaaaacccaactgaggcagaactgcaggatatgattaatgaggttgatgctgatggcaatggaaccatcgacttcccagagttcctcaacctgatggctcgcaagatgaaagacaccgactccgaggaggagcttaaggaggctttccgtgtgttcgacaaggatcagaatggtttcatctctgcagctgagctccgccatgtcatgacaaatcttggggagaagctgaccgatgaggaggttgatgagatgatccgcgaggccgacgtcgatggtgatggacagatcaactatgaagagttcgtcaaagtcatgatggccaagtgaggaccattcaaccataacctaaatttgaaaagcatataaagagaagagggacagtgcagataagttttgatgagaattctatttccattacgtccatcttgatttggggttattagcttttgttagttgagtgtc

SEQ ID NO: 225480 - DNA, 535 bp, Glycine max
ataaaatattaacagcattagccaaccacatgtaaaaaacacaaatgcatccaattgttctaggttcataataataaccaaaaaataaatatgaaaatggagagtaacaaagcatggtgagacacagctaaccgaagctactaaaaacaaggaacaaagcaaacaagtaggataactagggagcagaagtagtaccagttaaagcaaacaagaaaaacagacactcaactaacaaaagctaataaccccaaatcaagatggacctaatggaaatagaattctcatcaaaacttatctgcactgtccctcttctctttatatgcttttcaaatttaggttatggttgaatggtcctcacttggccatcatgactttgacgaactcctcatagttgatctgtccatcaccatcgacgtcggcctcgcggatcatctcatcaacctcctcatcggtcagcttctccccaagatttgtcatgacatggcggagctcagctgcagagatgaaaccattctgatccttgtcgaacacacgg

SEQ ID NO: 225481 - DNA, 311 bp, Glycine max
ctcgagcctctcgatccgcttttgatgctgaatctaacgccactaagctgaaccctgtactcaataacaaactcgaaagggaacacgcattataggctgccgtggagatactcaaagagtagctgatgagatgcttaattggtaaaagctgaaataacattgtagtactaatagctctctgctatctgccgatcacaaaggcttgaattgcaggatatcaagcacgcactcgcagctttgtctttcttcaccgagatgtgagggtttgaaaatctcttcctgagttacatcatccgcatatgcttctgcat

SEQ ID NO: 225482 - DNA, 544 bp, Glycine max
aaaagcaagaacaattactttagtgttttctcttgtcacataaaagtcatctaagaagaattacaagatcatcatcacaataacaagatgagttcaggaattagagcatggagtgtggcagcaagtgttggaattgtggaggccttgaaagaccaaggcatatgcaggtggaatcatgccttaagatcagctcaacaccatctcaaaaaccatgttggctcattctctcaagctaacaagctttcttcttctgctatgatatccacaacactaaaacatgagaaggcaaatcaatcagaagagtctttgagaactgtcatgtacttaagctgctggggtcccaactagatatcataagcccaacaacaaaatattcttttctcttttcaattctaggaatcaagcaagcttaattagtctcaaatgatgatgagtattgaaagaatattgcttgtctttatggcagtcattatgtaaattttgatattgatagtgttgagctgttgcccaaatttattggtagtggttcttatggtaaagattg

SEQ ID NO: 225483 - DNA, 341 bp, Glycine max
agcttattcattagttctcatccattaatttccattgaagtccgaaaacagaaaccaaaaatacaggatgatgaaatctcataaagcaaaaacaaatgggaatgtagtttaagtacaacaaacaaagtggggtggctacagatgctttgcaaatttttcaatgacttagaagcctgggggcttgtaggcgatgaagctgatgcactgcacttggcgaacgttgacaaatccaatgatacggatgaagccattggggtatgcagtcttagcctcttgaagctccttcaacacctgagaagcatcagtgcagccaaacataggcagcttgcacatggtccagt

SEQ ID NO: 225484 - DNA, 341 bp, Glycine max
actggaccatgtggaagctgcctatgtttggctgcactgatgcttctcaggtgttgaaggagcttcaagaggctaagactgcataccccaatggcttcatccgtatcattggatttgacaacgttcgccaagtgcagtgcatcagcttcatcgcctacaagcccccaggcttctaagtcattgaaaaatttgcaaagcatctgtagccaccccactttgtttgttgtacttaaactacattcccatttgtttttgctttatgagatttcatcatcctgtatttttggtttctgttttcggacttcaatggaaattaatggatgagaactaatgaataagct

SEQ ID NO: 225485 - DNA, 506 bp, Glycine max
gtccactcaaatacttggatatatagacaatgaaattttcaacagaccgggcaaaatagcgcaatcagcaaagtgcaaacttaacatttgcaaatagtatcccacatataaaatggacgaatatgttattgaggagttaattaaaactaagagcagagcataggctaccccaatttcaagccgaaagaagagcacaagtaaacccatcttgcacaagttgattaaccgcattcctgaacttataatagtcctcaaccttgttgtaaacctgacgagaaattcgtgcatacgcagtaacagagccatcttccccaccacgaaaataaattggtacttcaacatcaaattcatccctcaaacgggtcctaagcttttgagcatcagagtcactcccaatacccaaagaaggaggcaaacccaccatcaccatgctagcactcatatgcgaaggactctcaaggtgggtcccccaagccttcaccaacatctcccccatctcaacaacc

SEQ ID NO: 225486 - DNA, 373 bp, Glycine max
gaacccttttgatttgttgggtgacgacgctgaggacccttctcagctcatcgccgccgagcaactcaaggcggcggctgctgctgcggctgccaccgccgctcccaagaaggcgccggctcagcagatcaagccggctcagctccctagcaagcctcttcctccggctcaggctgtgagggatgccagaaatgagtctgttcgtggaggccgtggaggtggacgaggtgggggacgtggatttggacgtggtcgtgggtttagtcgtgactcttccaatgacgagaactcattccctaccagcggagctccttataatcaggtttcttttgaaagagatgctgggaagtcttctgaaagacgcggttatggt

SEQ ID NO: 225487 - DNA, 557 bp, Glycine max
gagtaaaagtaaaaaaaaaaaaaatatagaaaattagtagaaaatatttacaccaagcaacaaaaaaataaagacattttcacggaaaatgtcatcatcactatgagagaaaatccagagaatgcaacaaactaagaaacgaatccctaaagctaaactatacagctctatgatttaccatttactctatctagatttattactgtgataactattagacattcactatacaaggtagtttgttactaaggtcatataaaaatgatcaaatgtgtagttgtgtgtgcagacaagtttttacctacgcagagcaattcacatatacaaagggtatataacaatttaaaaactgttttagagattcatctgcggccctttattgtataactttccctaaacattgaatggcaatttgaagtcatagagcagctttaagcatcaacatcagggcctggatatgctggtaaactcattatacgcttgtctaagacaggacctccaacggtaaaatgataaaggctctggaatgttgacccttttaacccaagcaactgatg

SEQ ID NO: 225488 - DNA, 514 bp, Glycine max
gaagttatttataggactgctgaggctgtgaagaagcctttgacattgggggaaagattcttggttgagccatttcagaggagtggtgtttgtggggagagtgcgtataagggattgactgtgagggaagttgttaggaagcgtaggagtgctgttgatatggatggagttactgaaattgagagagatgccttttatcagattctgttgcattgtcttccttcaggttgccagggtggagggaggcaagggagggagctggcattgccattccgagcacttccatgggatgctgaggttcatgctgctttgtttgtgcatagagtggtggggttgccccaaggattgtattttctagtcaggaatgaagatcattctgataaattgaagaaagctatgcttcctgactttttgtggaccaaacctgaaggctgccctgatgatcttcctttgtatgaactacttagattggattgccggcatacttccaagcagctttcatgccaccaggaca

SEQ ID NO: 225489 - DNA, 376 bp, Glycine max
  unsure (1)..(376): unsure at all n locations
gtttgcagtcactgctttgtttagatcagaaccagatcgtgttctcttcttccattggcaaacatggcaactcaaatgagcaagaagagaaagtttgtggcggatggagtgttcttcgccgaactgaacgaggttctgacacgtgagttggcggaggacggttactccggcgtggaggttagggttacgccgatgcgcaccgagattatcatcagagccaccagaacccaagccgttctcggtgagaagggaaggagaattagggaacttacctcagtggtgcagaagaggttcaaatttcccgagaacagtgtcgagctttatgctgagaaggtcaacaacagaggcctctgtgccattgctcangccgagtcgc

SEQ ID NO: 225490 - DNA, 516 bp, Glycine max
  unsure (1)..(516): unsure at all n locations
cacacactctctttcttctgctgcaccagcaacaacagagaatgaacagtactgaggaggggatgcaaggcataggcataggcataggctgcttccaaaacgacgtcgtagggcagctggagctgagtcccactatgagcaactcctcctcctcgctatccatggagctggacgagtccccggagagcagaatccaacggttgatatcggagcacccggtcatcatcttcacccgatcctcctgctgcatgtgccacgtcatgaagaagctcctcgccaccatcggcgtccaccccaccgtcatcgaattggacgaccaggagatcgccgtccttcccgacaccagcgccctctcggcctttataggcggcacctgcatcggcgggctcgaatccctggtcggcctncacgtcatccgccacctgatccccaaactggtncaagtcggcgctctctgggatgattaattntatatatgctacgctaagctattgctagtagcttgctagctagcta

SEQ ID NO: 225491 - DNA, 553 bp, Glycine max
  unsure (1)..(553): unsure at all n locations
cccttctcttcttcctcaacacacacaaaatatctcttccaatttcaatttctcgtcgtccctcatcatggctcgtctcgcgatcgctgtcgccgccgtgctcctcgtggccctctccgcctccaccgcgacggcgcgtccctgcaggaccttcataatctcctcctactcgttccgcaaccctaactccaacaccttcgccaccatcaccgagatccgatccttcacccctctctacatcaccgacaaacccaccggcaaaccctcctcctcctacgacctcttcttcccccacgcgactcacctccctgagcccgagcgcgtgaacccacgcgctcccctagggttcgcctccgcgtacgatttctcctccctccgcgaccgcaccaaggacatcctcagcgtcgccctcgccctcctcttcggtgtcggctgcggcgccctcaccgtcgtcaccatgtacctcgtctggtccgtcttcttcacgcgccatnccaccgtcgncttcgacgacttctnctncgacgaagacgagatcgagagccccaagaag

SEQ ID NO: 225492 - DNA, 528 bp, Glycine max
gataaacgagttatttgccaatctttaccataaagaacactacaaataaaatttggcaacagctcaacactatcaatatcaaaatttacataatgactgccataaagacaagcaatattctttcaatactcatcatcatttgagactaattaagcttgcttgattcctagaattgaaaagagaaaagaatattttgttgttgggcttatgatatctagttgggaccccagcagcttaagtacatgacagttctcaaagactcttctgattgatttgccttctcatgttttagtgttgtggatatcatagcagaagaagaaagcttgttagcctgagagaatgagccaacatggtttttgagatggtgttgagctgatcttaaggcatgattccacctgcatatgccttggtctttcaaggcctccacaattccaacacttgctgccacactccatgctctaattcctgaactcatcttgttattgtgatgatgatcctgtaatcttttagatgactttatgtgacaga

SEQ ID NO: 225493 - DNA, 573 bp, Glycine max
caatcatcaagataggaaaagaatggaggccatttgttccaagcaccttatgacatcccttgtcataattcttgcttctagtttgaccttatcacagggtgccaagaaaggcagtgacagtgaaaggccataccaagaagcgagcacggtgttcattagaacatcttgcagctccacgacctatccaagactctgctacagctccttagtgaagcatgcagacttgatccaaacaaaccgtgtggttctgacaggcacagccctgaatgtgacccttgcgtctgccaagtcgacctcggcaatgatgtcgacgctggcaaagaggcaaggcctgaagccaagagaggttgcagcgatgaaggactgtgtggaggagttggctgactctgttgatgagctcagaaggtctatttctgagatggctcaactaacacccttcaattttgagatgacaatgagtgacgtagaaacgtgggtgagtgctgctttgaccgatgagagcacgtgcaccgatggctttcaagagactgctgctgctgtggttcaaatgtaaagacacggtgagaggccaat

SEQ ID NO: 225494 - DNA, 565 bp, Glycine max
gaacactacaaatagaaagttgacatttaataaaccaaagcaacacaacgcagcaaagtcctgaaactcgctgcgcttaacaaaaatgtaatcaggggttccgacaaacacaacacattaaaacacagataaataaaagcaattttgccaccgtcgatcaagaacccagttctgggaacaacagttgcgagatgatggtggagacttcaaactttgtccgaaaaacaagctacctagaaaagaagacacaagagtacagaaaagaaaccaacatttattgtaaccaacatcccctgatgaaccagcccgcacgattcacttcttcttctgggcagccttggtgaccttggctccggtaggatccttcttctcaacgttcttgatgactcccacagcaacagtttgacgcatgttcctaacagcaaacctaccaagtggaggatactcggagaaagttcacaaccatgggtttggtggaatcatcttaacaaaccgcatcaccgtcttcaaaacttggctccttctaagctctatgcggatcgctgcaatttgtcatgagttcaca

SEQ ID NO: 225495 - DNA, 506 bp, Glycine max
  unsure (1)..(506): unsure at all n locations
caaaggatgaccctgcaaaggaggctgctaacttcacagcccaagtcatcatcatgaaccaccctggtcagattggaaatggctatgcccctgtcctcgactgccacacttctcacattgctgtcaagtttgctgaactcatgaccaagattgacaggcgatccggcaaagagcttgagaaggagcccaagtttttgaagaacggtgatgctggttttgttaagatgattccaaccaaacccatggttgttgaaactttctccgagtatcctccacttggtaggtttgctgttagggacatgcgtcaaactgttgctgtgggagtcatcaagaacgttgagaagaaggatcctaccggagccaaggtcaccaatgctgcccagaagaagaagtgaatcgtgcgggctggttcatcangggatgttggttacaataaatgtctggttcttttctgtactcttgagtcttctttctaggtagcttgtttttcgacaaagtttgaagtc

SEQ ID NO: 225496 - DNA, 465 bp, Glycine max
tttgtttttttttttttttttttttttttttttttttggggatgagaaaccaaaaattgaagcaaaactgagatgtctatctatgaagaaaagggaactcaacaacatttatgtcttaccccgaccatattcccccaaaatatcaaacgcggggaaaatgaagcacaaggaggaacaggcttcaagggatacatgaccgtatgaagaacaacctaaatttacacttttaaggcataaaattaaatgaaccttctaatccaggaaatccaattaccatagttcctttcctgcttaagttcaaataagagaacccaaaattgaaaattggacagagatatgtcaaaagggttctgggaaggcctcacttggcactcaaggttgggaaatgcccgggatcttcaatggatggagcaagtgcattgctggtggcactttcatggtaaccgccttcgcctcgtgaaccac

SEQ ID NO: 225497 - DNA, 492 bp, Glycine max
ttggcttcagagggaacagacagaaaacaagaatgatgtggttgattgacgaattggggatagaagtattcaggtcagaggtggaaaaaagaatgccagggaagcagctggagagagcatctgaggaagaactggttaagaaaaaatgggaaagaagagactacttaggtgttcatccacagaaacaagatggcctaagctatgtagggattcacattccagttggtagagttcaagcagatgatatggatgagttggcgcgattggtggacaaatatggaactggagagctcaggctcacagtggagcaaaacataataatcccaaatgtggatagcaacaaaattgatgccttgctcaatgagcctctcttgaaggagagattctcacctgaaccttctctattgatgaagacactggtggcatgcactggcaaccagttttgtgggcaagccataattgagacaaaggaaagagcattgaaagtgactg

SEQ ID NO: 225498 - DNA, 534 bp, Glycine max
aatgttaaaataattcttaagcatttgccacaagaaaatgagaaatatatagcatacatctttgaagaaataaagtgtaacttagggactagcaaagaatgtacatgtcttatccaaaagtgtacatgcatatgatataatgcatgtctcatgatcatccctttttcttttatgtagaggacactgatacttttgttcagggacaatggtagatttagtaaagaaactaaaattgccaatggccataaagtttaatcttccccttcctctctattcctttggacagcaccaaaatgctttactagtatgtctaccacaataggcaccaagttcttgcaaggcacacccttcttatacacctcagctagatgtgaatcacttccaattctccctcccaggaaaatatccacaccttcagtggccttaccattctcatccctagccatgcaccccatgaaaccaatgtcagcaacttgcacctggccacaagtgttggggcagccagtccaatgcattctcacaggcctagtcaca

SEQ ID NO: 225499 - DNA, 569 bp, Glycine max
gctgtaatcgacgatgggttgattaacaaggaagagtttcagttggcattgttcaagacaaataaaaaagaaagtctgtttgctgatcgggtatttgatttatttgacacaaagcacaatgggatactaggttttgaagagtttgctcgtgctctctccgtttttcatccaaatgcccctattgatgataagatcgaattttcctttcaactatatgatctcaagcagcagggttttattgaaagacaagaggtgaagcaaatggtagttgctactcttgctgaatctggcatgaacctatcagatgacgttatagaaagtataattgacaagaccttcgaggaagcagatacaaagcatgatggcaaaattgacaaggaagagtggagaaaccttgttttgcgccatccgtcacttttgaagaacatgacccttcaatacctcaaggacatcaccacaacattcccgagctttgtatttcattcacaagtagacgatacttgaagataatttctcccatggcttcttccttagggctgcatggccacttttgtacaaaaaagggcatg

SEQ ID NO: 225500 - DNA, 612 bp, Glycine max
gaccataaagaatttcaaaatattctgaggtcatgacatactcataatttaaaacaaactctacacaaccttggaatcttgcttttgaaatttgaaaaatgggaaccaaatgtgtctagaagtttgaagaaaaaatgaaagtaaaatcccagcaaaagaatccacaaaacaaaatacattattcaaagatataacaaatgtaaggtaaaagcaaggctgtctgccatgcccttttttgtacaaaagtggccatgcagcccaaaggaagaagccatgggagaaattatcttcaagtatcgtctacttgtgaatgaaatacaaagctcgggaatgttgtggtgatgtccttgaggtattgaagggtcatgttcttcaaaagtgacggatggcgcaaaacaaggtttctccactcttccttgtcaattttgccatcatgctttgtatctgcttcctcgaaggtcttgtcaattatactttctataacgtcatctgataggttcatgccagattcagcaagagtagcaactaccaattgcttcacctctggtctttcaataaaaccctgctgcttgagatcatatagttgaaaggaaaaatcgatcttatcatcaa

SEQ ID NO: 225501 - DNA, 553 bp, Glycine max
  unsure (1)..(553): unsure at all n locations
gtacttttgatgtctctttacttaccattgaggagggtatctttgaggtgaaagccacagctggggacacccatcttggaggtgaggattttgataacaggatggtcaaccactttgttcaggaatttaagagaaagaacaagaaagatatcagtggcaaccccagagcacttangaggctgaggactgcctgtgagagggcaaagagaactctatcttcaactgcccaaaccaccattgaaattgattctctctatgagggaattgatttctactccaccattactcgtgctagatttgaggagctcaatatggatctcttccgcaagtgcatggaaccagttgagaagtgtttaagagatgctaagatggacaagaggactgtccatgatgttgtacttgttggtggctccaccagaattcccaaggtgcaacaactcctgcaagatttctttaatgggaaggcagctctgcagagcatcaatcctgatgaggctgtggcatatggtgcttgagttcaagctgctatcttgagtggtgagggtaatgagaa

SEQ ID NO: 225502 - DNA, 505 bp, Glycine max
aacataagctttaaagcctgtatgtgtccactaaaacacagtgaaaactgaaaagggtaacatgatactgaaaacataaatcgacatgacatactaccaaatattgtctttcttgagaaactaaatccaaccaaaggacatgaaatcagacatttaaaaataaatagtaaatcaaaagcagaaataaactaaatttagtctacttcctcaatctttggccccgcaccgcttccagcagcaggaacatcatcgtccattgcaccacccacgtctggaccagcaccaccctggtacatcttggcaatgatagggttgcagatgctttccaactccttcattttgtcctcaaattcatctgcctctccaagctggttgctgtctagccactggatggcctgctcaatggcatcctcaatctttttcttgtcagctgggtcaagttttcctccaatcttctcgtctttaatggtattcctcatgttgtatgagtagttctccaatgcat

SEQ ID NO: 225503 - DNA, 552 bp, Glycine max
  unsure (1)..(552): unsure at all n locations
ccgggaggctcttgaacttcttcacaaattggtggatgagttgaaatctagccagtctgaaattacacaaagattcaaacctgaggatattgtggagtacctcaagccactatgtgggacagaccccatacttgttctagagttctcaatgcttgctcttgaaagcttgccatctcaaactatagacctctttctgtccggaaatattccagcagatatggtgagctcatatttgaagaagcattctccaaacatgcaagctaggtacttggagctcatgcttgcaatgaatgagaatgcagtatctggcaatttgcagaatgaaatggtgcacatctatctttctgaagtactcgattggcatgctgatttaagtgctcaacanaaatgggatgagaaagatcattccccaacaaggaaaanattattgactgccttagagagtatagcaggatacaatccagaggctttgctaannacgtcttcaccagatgcttcgtatgaagagcatgctatattgttggggaaaatgacccgcatgaactggcttat

SEQ ID NO: 225504 - DNA, 540 bp, Glycine max
cgtgttgtcttattttacttgtggcaagttttgccaatatttacatcacaaaaaagaaaaagatagacacatcacgctcttcacatatcaaatctcacttttcacacgaattgactgggcaaaaaagcaaaaaaagaaaaagagagacctctgaagataaattacggtgccactttcatcataatccacacctaccaacaggtaccgtgggtaaaagcacgctaaaacaagacaactggaccaccaattggtatggcatttcagcttcataatcgcttcctcaattgagaccctttgcccactgctttcatattttgagaatctctgaaacagacaaagtgcacgagagtgctaccatttgggtagacagcaaaaacacttgtccctattttcttatggcacagagaacacatgctatcaccagttatcttcacaacttctttcctctgactatagagttcatctttcacctgaaggttctcactttgtctcaagctctttatcaccgaacaatttccgtacatttcactagattttctc

SEQ ID NO: 225505 - DNA, 501 bp, Glycine max
gctcaaggcgaggcacgagataaccactttttaccatatatatatagagagagagaatacgaagcacactgatcacaggatgatgctctctttaagtagggaagcagatcttatcagtacacataggtaggttgaaattctagctctagcaatctagctagagaaggtagtacttgcacaacacacagcacatgataatttattttatacacaatctcattctcatggtgctcaagatgcatggactaattaagcaacaatgttggtctgataggcagtgtccacagataaattgggtacccataaaatggcctcgcttccaaggaaatggcaaacagggttagttccaggatcaactcccataagttgatgaagcatttgatgattcattccagaagtatttgagtggcaaatagcaagtgcctgagttttggttccatcaccagccaccaatggaaccatgaaagctgttgttcacggacttcatggcagtaaaatact

SEQ ID NO: 225506 - DNA, 112 bp, Glycine max
aattttgcatgttaggttctctacatgccaattgtcaaacgggaacacatttgttttcttgtctgtgcataagcaccgacacatatgcaatgcctagattgagatcatttat

SEQ ID NO: 225507 - DNA, 112 bp, Glycine max
ataaatgatctcaatctaggcattgcatatgtgtcggtgcttatgcacagacaagaaaacaaatgtgttcccgtttgacaattggcatgtagagaacctaacatgcaaaatt

SEQ ID NO: 225508 - DNA, 549 bp, Glycine max
  unsure (1)..(549): unsure at all n locations
ccgattccttcgtgcgtgcgattcttctgatattccaaggcgacgcaccgacaccggacccatctccggcgacatctcaccgatctccggcgaatccccggtccccactttcttccctcgaaatgaatcccgagtatgattatctgttcaagctccttcttattggagactctggtgttggtaaatcatgccttcttctgagatttgctgatgattcgtacatcgagagctacataagcaccattggagttgattttaaaatacgtactgttgagcaggatggaaagaccattaaactacagatctgggacacagccgggcaagaacgatttaggacaatcaccagtagctactatcgtggggcccatgggatcattattgcttatgatgtgacagatgaagagagcttaaataatgtgaagcagtggctcagtgaaattgatcgctatgcaagtgataatgctaacaagctnttggttggaaacaagtgtgatctggaagcaatagagctgtgtcatatgaaacagctaaagcattcgcagatgaaat

SEQ ID NO: 225509 - DNA, 492 bp, Glycine max
aacataaatggtttggtttcatttaatctcccatcaaagaatgttgattgcataacatagttgtatatttgtgagtttaaaattcttacacatgcaaagtggagtataacaagagattggttatgcagttctatgacagcacattttgagggaataaaaaacaaaatagtcccaaatgaaaagataggaatatatatttagcattaatgagtattatactttgcacaagccatatcatttttagtataaagtatattcaacgaatgggatcatctagatcagttccaaaccaacagagaaattctgacactggtccactagtgaaatattataaaaaaaaaatctaacatgaaataggtaaccaaatgaaatggatcggagtcactagtggttaggaagagcagcacccacctttctgtgcaactggctgtcccctgatctgcactgttggaggccttgcattgtttgcaggttggcttgccattctatcct

SEQ ID NO: 225510 - DNA, 259 bp, Glycine max
aataactttgacccagcaaataagataggtgaaggaggctttggaccagtattcaagggtgtactatcagatggtgctgtgattgctgttaagcagctctcctccaaatcaaagcaagggaatcgtgaattcatcaatgaaaataggcatgatatcttgctttgcagcatccaaaccttgtgaaactttatggctgctgcattgaaggaaaccagctgctgctagtatatcagtccatggagaacaatagtctggctcg

SEQ ID NO: 225511 - DNA, 567 bp, Glycine max
  unsure (1)..(567): unsure at all n locations
tggtgtttgaattgaagttaaagggccatggcttcaggatccaaatcagtagcctctatcctcttggcactgaatctagtgctgtacttcattgtgcttgtaattgcttcttgggcagtgaatcatgggattcaaaggtctggcgaaacagcatctgttntgtccattccggctcgcatatttccaatatatttcccaatgggaaacatgacaactggttttttcgtaattttgtctctggttgctggtgttgtgggattcaccacctcactcactggattgcaaaacattttccagtggaatgctcccaacttacatgcagcagccatgtcttcattgactacatgggcactcactctactagccatgggatttgcatgcaaagagattgaacttggctggacagactccaacctgcgcaccttagaaacgatcacgatcattgtaagcgcaacacaactattatgcacgggagttatccatgttggagtttcagaagttgttgcgcagagaatgggaggaagagtatgagtttcagctggtgcatgcttatacgaatactatctt

SEQ ID NO: 225512 - DNA, 517 bp, Glycine max
ctgaaaaagtatatttataagtttcctcaaatgaaactaaagtatatagttacaattaaatatttttatcgtacatgaatgaatgaaacaactttgtgcaaagaaagagttacaattaattctgcagtcatagaggataattttcctgaaagatagtattcgtataagcctgcaccagctgaaactcatactcttcctcccattctctgcgcaacaacttttgaaactccaacatggataactcccgtgcataatagttgtgttgcgcttacaatgatcgtgatcgtttctaaggtgcgcaggttggagtctgtccagccaagttcaatctctttgcatgcaaatcccatggctagtagagtgagtgcccatgtagtcaatgaagacatggctgctgcatgtaagttgggagcattccactggaaaatgttttgcaatccagtgagtgaggtggtgaatcccacaacaccagcaaccagagacaaaattacgaaaaaaccagttggcatggtttccc

SEQ ID NO: 225513 - DNA, 566 bp, Glycine max
  unsure (1)..(566): unsure at all n locations
ctaggcatgattcaacaaatgcaacatgtctgtcctgactgcagaggatctggtgaggtcattaacgagagagataaatgtcctctgtgcaaaggaaacaaggtttcccaggaaaagaaggtgctggaagtgcatgttgagaaggccatgcagcagggtcagaagattgtttttgaaggacaagctgatgaagctcctgacacaatcacaggagacattgtttttgtattgcaagtaaaggatcacccaaagttcagaagggagcaggatgacctctatattgatcacaatctcagcttaaccgaggcactctgtggcttccagtttgctgtcaaacatcttgatggtaggcaactattgatcaaatcanaccctggggaagtcatcanaccaggtcaatataaagcaataaatgatgagggaatgccacaacacaataggccattcatgaagggtcgcctttacatccagtttaatgttgatttcccagactcagggtttctttcccctgaccaatgccagttacttggaaaaggtgttacctcataagagcagcangcatgtgt

SEQ ID NO: 225514 - DNA, 484 bp, Glycine max
atgaaactgggatatgcaagcgctattgcgcgccttggaccaaaacatttaattttcatatattacaacaaagaacagactttagaaatctgccaagactaaataacggtaccagccaaaacctaaaggggaaatttatcacgcagttataactgcattatgcaaacaaaagataaaaaccatgcagaaattatagaacctttactaccataaattgcactactggtgagcacattgcactcggtgaccagatggctcatcatcatcttcatcatatgccttgcgatattgctgatgctgctttcgtctcatctcctccttaaaggtgacatcatgcaaaggggtctccttacaatcatccagctccatggctgacacatgcttgctgctcttttgaggtaacaccttttccaggaactggcattggtcaggggaaagaaaccctgagtctgggaaatcaacattaaactggatgtaaaggcga

SEQ ID NO: 225515 - DNA, 397 bp, Glycine max
gaggatgggaggcaagagggggaccaccgctgggaaaaaaaacaccaaaaaaaaaaaaacaagaaggaaaaaaaacaaaaaaaaaataataaccaccattaacaaaataaaaagctgcaaaaaaaaaaaaaaaaggtggaaataaaagacgcaaaaaaaaacgaggaaaaaaaaaaagagggaagcaaaattagaagaagaattgagaggagaagtagggaggaaaaacagaagaccacaaaaggggggcccccaacaaggagggggggaacaacttagggatcaaaagagggaacaacaagaggggggggcaataaagggggcaacaagaataagaacattaagctggacgcggagttcctgcggggaaagatgacccctcctaaaaagaagcccg

SEQ ID NO: 225516 - DNA, 507 bp, Glycine max
  unsure (1)..(507): unsure at all n locations
aacacatattccttacaataggataattgggaagcttgattccaagtttttgttgtggccttcttgtgctcatatcaaacccagaagaatttctacctcaattcgggcaatgggttcctccgcttcttcccactcccaatcacaatatgcagacagcgttgaatctgaagcaggagctgatactattgactataaatctttaaccgatgaagagtggaagaagcggctcacaaatgaacagttctatattactcgtcagaagggaactgaaagagctttcactggggagtactggaatactaaaaccccggggatttaccattgcatatgttgcgacacacctttattcgaatcatctactaagttcaatagtggaactgggtggccatcctattaccagacaattgggaaaaatgtgaaatcaaagttggattngtcaattattttcatgccgcgccaggaggttctctgtgcntgttgtgatgctcatcttggacatgtgtttga

SEQ ID NO: 225517 - DNA, 458 bp, Glycine max
tttttttttttttttttttttttttttttttttttttttttttttttttttttttttggttttttttttttttttttttttttttttttttttttttttttttgaaaaaagggggggggcccggccccccctttttgaggataaaaaagggggccccacataagggaggggggcctgaaaatttaaaaaaagggggggttaaaccccaaaaggggaaaaaaaatatcaggggggggccccgaaaaagggggaaacccccacagggggtaccccaattcgaaaaatttcccccccggggccccgggggaaggggggggtttccccggccccccggtcggggtgggcctaagggggcccctcttgggcccaaaaacctttccccgggggggggggcccctttggaaacccgggacccagaggggtgctcaacaaggggaaagaaaccctggggggcgggt

SEQ ID NO: 225518 - DNA, 552 bp, Glycine max
ccatcatatcattcattcagaatcactttccatgcttcccatagccttcaaccctcttggtctcttcttgttacttttcttctccctaacttcatatctctcttggcacatatcagtcaaccacgccccgggactcaccaaaagtaagcttctttgaatgattttggccctctttttgggtcgctgaggaagcttgcaacccttcatggccagaaaatcttcctctttctccttgcttgagagagtgatgtagagcttgggccaaactagggctcgttcttcgccgttgatgccttcgccgtcggcgaccttgccgctctcttccgccgaaccccgcgtcgtgtagtaccggtcctgcttctacggcgacgccgatttccttgactcgccggccgatgaccggagaatcgccccgtcggaattccttgtaaggcgattaagttgctgatgatgatgatggtgatgatgttctttttctggacagtgaggccagagcgatgatgctgcattgcagaaccaagtttccttctgattcaaccgtgagcctcgctg

SEQ ID NO: 225519 - DNA, 567 bp, Glycine max
atgacatccaaggtgttatcaccttgcgcatgtacacccccgagtcagaaatcaaaagaaattttagttctaggtggaacaaactgagccaaaagaaggatcctgaagagggtccttttgcattgaacacctttggcctttacgcctatgacacggtttggttgcttgcttctgcactagatgcattttttaagagtggtggaactttgtcattttcaaatgattcaagcttaaacatgttaaaaggggacacccttaaacttgatactatgggggtatttgttgatggagtcatgttgcttgaaaagattttaaaagtgaacataactggtttaacaggccaaatgatgtttagtcctgatggaaacttggtgcatccatcatatgaagtcattaatgtgataggcactggaattcggaggatcggttattggtcccaaacctttggccttcacactggggaaacttccaatcattccaatttcagtgaaggactatttggtgtcatctggccttgccaaacaacccaaaccccgcgaggttggtttttgccagaatggaagacac

SEQ ID NO: 225520 - DNA, 547 bp, Glycine max
tcttcactctgcccgctgcatcaatggcttcagagaagaaactttcgaacccaatgagggagataaaagtgcagaagctcgtcctcaatatctctgttggcgagagtggagatcgtctcaccagagcctccaaggtgttggaacaacttagtggccaaaccccagtgtttttcaaagcaaggtacactgttcgttcctttgggattagaagaaatgagaagattgcatgctatgtcactgtcagaggtgacaaggcaatgcaacttttggagagtggtttgaaggtgaaggaatatgaacttctcagaaggaacttcagtgatactggttgcttcggctttggtattcaggagcatattgatttgggaatcaagtatgatccttcaactggtatttatggaatggatctctttgttgttctggagcgacctggctatcgtgttggacgtcgccgaagatgcaagttccgtgttggaattcagcaccgagtcacataggaggatgctatgaagcggttccaggtgaagtacgagggagtgatccttaa

SEQ ID NO: 225521 - DNA, 487 bp, Glycine max
gcataacgcggggttcaggagttctttgcaataaaagtgccgtttaaacagggctaatccatacccttcatcacgaaactgaaatgacaaacattgattcaaaacctgccttaaaattaacataatatcacagaaagatcgagctataggtgacaaaactgataacacactcctaaagtgaactcaatctaactaaagaatagcctgggacttgttaaggatcactccctcgtacttcacctggaaccacttcatagcatcctcctttgtgactcggtgctgaattccaacacgggacttgcatcttcggcgacgtccaacacgatagccaggtcgctccagaacaacaaagaaatccattccataaataccagttgaaggatcatacttgattcccaaatcaatatgctcctgaataccaaagccgaagcaaccagtatcactgaagttccttctgagagttcatattccttcaccttcaaaccac

SEQ ID NO: 225522 - DNA, 411 bp, Glycine max
ggaaactgctgcgccacgccgtccacggacgaaacggcgaacaagaagggcaaaaagggaaaaaaggaaaaccccttcgcgatcgattacggttttaacgccgccgccgccgccaacgggtcgaagcttaccgttctgaagtccccgacgggccgcgagatcgaggcccgctacgagctgggccgcgagctgggtcgcggtgagttcgggataacctacctctgtacggacaaggagacgggggaggagctggcctgcaagtcgatctcgaagaagaagcttcggacggcgatagacatcgacgacgtgaggagggaggtggagatcatgcgccacttgccgcagcatccgacatcgtgacctttgaaggtacctacgaggacgacaatgccgtgcatctcgtcatggagc

SEQ ID NO: 225523 - DNA, 603 bp, Glycine max
tttttttttttttttttgtgcaaaatggcatattacacataaagcttgataatttaacatatttacagccacaaatgaaaacttgttcaatgtccagtccctccaaccctctctcctatctcctaccacaacctcaacaaaccaaaaaaagacatacttcaaatcacagacaacactgctggggccaatatcctatcttttttcacccaaaaatggggtattagagaaaagaattacaatgaagagagttaaaattaaaaaatagacttctttatcgaattttcctttccaaagtaaaaattggcatttctaaagtagtcatctaccgttattgtttttcattgtttaaatgcaatgacccgtccctcatcaacgttaggctcagactggcaaacctctctcgcgaatactgccttgatgcttttctccaatctgtgccagccttcatcattgtagcaaattcgtcgtaacttatccttccatccttgtctgtgtccacatcatgcataattgcactgataacttcttcactggttgtgtcaagatcatcagataaggcgctacgcagctccttaatctcaatatactcacttttgtctgaac

SEQ ID NO: 225524 - DNA, 572 bp, Glycine max
ggggatgaaaatcttcctcgtccatggagtcgacattcgaagaagaaagacgataaagtgactgccccagatgtggagaaacctgctagagctaataagggacaaggagagaattcaaagggcagtgttggtgattatgttgatgacccgcagcttcaggattttcttcaggtcatgcagcctcgggttaagtctaaaatgtgggcgaatgatacatcaattgcaactaatgttgacaacaggcaggcaatgccaaataaggataacgacggggcatcggttgcaagtgatcagagtggctcattagaagatggttttctggaggattctgaacccaagaacaagtcacatgagcctgaacgcgataaagtcatttctgatatggattatttcaagagtagggtgacgacagagtggtctgattctgaaagtagtgatggtgaagatgatgatgatgacaatgattcctcatgcattgacagtgatagagatgatcatagtaatgctggtaaagatgaagacaattgtgattcaagaaatggtgctcgagaggtagatgtagatctagaggg

SEQ ID NO: 225525 - DNA, 551 bp, Glycine max
ggtccttcaaaacattgttctcttgattatcagaatgtctttgtaaggctggcattacatgcaataatcttccttgaaagattgaattgtctaactcttcttgagccctggctgcaatatttggggctgtataaagaatgtatgctattcctttggatcgctttgtatctttattaacaactagatgaacctgtgagacacttccaaagcgactgaaatgttcttccagttcctcctcagtggtcgtatatggcagattacggacaaacaaccgacaggaatcaaaaactcctttctcgtcttctgattttgataattgccccccttgctcagtcacgttcacttgagtctttccattggtaacattctctccactagtatcttctatgccctctagatctacatctacctgtcgagcaccatttcttgaatcacaattgccttcatctttaccagcattactatgatcatctctatcactgtcaatgcatgacgaatcattgccatcatcataatcttgaccatcactactttcagaatcagaccactct

SEQ ID NO: 225526 - DNA, 160 bp, Glycine max
attttatgatgtaatactgaattttcatgaggatagcctggtgtcataatcttaattttcagaatttgttgtattaaaaaaaaaaaaaaaaaaaaaaaaaaaaaaaaaaaaaaaaaaaaaaaaaaaaaaaaaaactctctaaccgggccccccctcgccc

SEQ ID NO: 225527 - DNA, 564 bp, Glycine max
tttgggtttctcttcctcccttggagaaaaagaagagccaccgctgcgacgccgttcgtgcatttttgaggtgccgctgtcatgtttgggcgtggtggaccaaggaggagtgataacttcaaatattatgatattcttcgggatttccaaaatgccagtgaagatgaaatcaagaaggcctatagaaaggcggctatgaagaaccattcagataagggaggagatcctgaaaagtttaaggagttaggtcaagcatatgaagttttaagtgatcctgagaagaaagaactgtatgaccagtatggtgaagatgcccttaaagaagggatggggggaggaggctcgtttcataatccatttgatatatttgaatcattttttggaggagcaagctttggtggtggtggtagttcccgaggtagaagacagaagcatggtgaagatgtggtgcattctttaaaggtttccttggaggaacgttataatggcacaacatagaaactatctctttctagaaacatattatgcccaaaatgtaatgggaaatgttcaaaaagtggaact

SEQ ID NO: 225528 - DNA, 481 bp, Glycine max
gcaatcgttattgcgcgccttgtaccaaaacatttaattttcatatattacaacaaaaaacagactttagaaatctgccaagactaaataacgttaccagccaaaacctaaagggtaaatttatcacgcagttataactgcattatgcaaacaaaagataaaaaccatgcagaaattatagaacctctactaccataaattgcactactgttgagcacattgcactcgttgaccagatggctcatcatcatcttcatcatatgcctcgcgatattgctgttgctgctttcgtctcatctcctccttaaagttgacatcatgcaaagtggtctcctcacaatcatccagctccatgtctgacacatgcttgctgctcttttgaggtaacaccttttccagtaactggcattggtcaggggaaagaaaccctgagtctgggaaatcaacattaaactggatgtaaaggcgaccctttatgaat

SEQ ID NO: 225529 - DNA, 575 bp, Glycine max
gggacaccctgacaagctctgcgaccaaatctccgatgctgtcctcgacgcttgccttgaacaggacccagacagcaaggttgcctgcgaaacatgcaccaagaccaacttggtcatggtcttcggagagatcaccacccaggcccaacgttgactacgagaagatcgtgcgtgacacctgcaggaacatcggcttcgtctcaaacgatgtgggacttgatgctgacaactgcaaggtccttgtaaacattgagcagcagagccctgatattgcccagggtgtgcacggccaccttaccaaaagacccgaggaaatcggtgctggagaccagggtcacatgtttggctatgccacggacgagaccccagaattgatgccattgagtcatgttcttgcaactaaactcggtgctcgtctcaccgaggttcgcaagaacggaacctgcccatggttgaggcctgatgggaagacccaagtgactgttgagtattacaatgacaacggtgccatggttccagttcgtgtccacactgtgcttatctccacccaacatgatgagactgtgaccaacgac

SEQ ID NO: 225530 - DNA, 500 bp, Glycine max
aacttggaacattctttttgatactgatattaagagacacaatggtcggaaaacagagagtacattttttagttgatcatgtaaaaaattacaaatgaaaggcaggagaaacaaaattggaggaggacgacgagagaaaaacacatagcaagggacgtggaaagttatggataatagacattataagggcaacgctaaaaaactcccagcacattgcagtggaatgaatggtcttaggtcttatgacacattgaggggcttgaccacttcccatgtgaagtcagggtcctctatgccgaagtgtccatatgcagcagtctacaagaacctgggatttccacccctcttgagatcaaggttgatggagatcataccgggcctgaaatcaaagttctccttcacaatgttgagaatctccttatcatggatcttaccggtgccataggtgtcaacaaagactgacaaggcttgggcacaccaatggcatatgacacttgcac

SEQ ID NO: 225531 - DNA, 535 bp, Glycine max
catcatcataaaccccctccagagaacaagaatcaaagaatggcaactatgactggtgtgagcctttcaagccccagggttttcttcaacgcatcaccctcaccgcaaaacacgtacgccgtaaagttcgcagttccacttcagtcaagggatgcgacttggtagtgtcaggttgggtcgggtgatgaggatccgacccgttcgcgcagctccagagcgcatttcggagaaggtggaggagagcataaagaacgcgcaggaggcgtgcgccggcgacccgacgagcggcgagtgcgtggcggcgtgggacgaggtggaggagctgagcgcggcggcgagccacgccaaatacaagcaaaaggaaaaggactccgacccgctcgagacctactgcaaggacaatccggagaccattgagtgcaaaactttcgaagactgagaaagcgcttcttacgtgcatgatgatctccacatgtctgtctgtcaactaaaacactattgcgtttcatgatatatcaaattgtgaacatgctat

SEQ ID NO: 225532 - DNA, 392 bp, Glycine max
gaataataaagaacagatcacgcaaaagtgcagtaatcgcggtgcacggtgcacctgtaaagatctacactttcacgcaatcgatatttgtttccttaatttgatttagcattcacaaaaaaaaaaaaactagggcataattttggtttgattaaacataaggggctatggattatgctttaaagaaacattaacacatagcatgttcacaatttgatatatcatgaaacgcaatagtgttttagttgacagacagacatgtggagatcattatgcacgtaagaagcgctttttcagtcttcgaaagttttgcactcaatggtctccggattgtccttgcagtaggtctcgagcgggtcggagacctttcccttttgcttgtatttggcgtg

SEQ ID NO: 225533 - DNA, 531 bp, Glycine max
tctttttcttctctctcaacaacttcaccttcttcctcctcgatcatgtctcacttcaagggcaagtaccatgatgagcttatcgccaatgctgcgtacattggcactcctggaaagggtattcttgctgctgatgagtcaacagggacaattggcaagcgtttggccagcatcagtgtatagaacattgaatcccacaggcgagctcttagggagctgcttttcactgctcctggtgttctttaatatctcagtggtgtcatcctctttgaggaaaccctctaccagagcacagctgcaagcaagccctttgtgaatgtctcgaatgaagctggtgtgcttcctggcatcaaggttgacaagggcacagtcgagcttgctggaactaatggagaaaccaccactcagggtctagatggccttggtcagcgttgtgccaagtactacgaagctggtgcacgttttgccaaatggcgtgcagtgcttgagattgtcccaacgagccatctgagctgtctattcatgagaacg

SEQ ID NO: 225534 - DNA, 494 bp, Glycine max
aacacaaagcctcattcacagcacggtggtgtctttcaagaaaacaaagttacattcccttccctgttgcacaggtttgaccaaatacactgaattactaaaattgacataaaaggaacactaggaaaacaaaaagcaaaattccaaacgattattctgggaagagtcaaaccacaataatacttatcaacaagaaattcggttgttgtacccataataccgattcctactcgcactagtctcttcaaacaacaccaacttcgattgatcagtagctgtagttcgaaacatggaggctctctgaggcaccatcagcaagctgtgagttacccttgtaggttcccagagttgcctctgagttagccttggctcttaccaaaagggcttcctgagccttcttcacattctcttcttttccgccccatgccttaagggtgctctgctgaagtgcccttccaaggagaaagagagtgaccatggcttcttcccattga

SEQ ID NO: 225535 - DNA, 576 bp, Glycine max
gtgaaaactcatggaggttggcctcaacaagaaggagaacatggggtttgaggaaactgagctaaggcttggactgcctggaaacgtaggaggcactggcactgaagaagtgctcatcaggaagagaggtttctctgagactgaaactgaaactgaggaggatgagtctgctaccactgtggatttgatgcttaatctttcttctaaggaagctgctgctgctgcagatccaactgataagcacaagactttgcctaaggagaagactcttctgcctgcagatcctgctaagcctccagccaaggcacaggtggtaggttggccacctgtgcggtccttccggaagaacatgttagctgtacaaaagagcgtcggagaagagaacgagaagaacagcagcagccctaatgcaagctttgtcaaagttagcatggatggagcaccttaccttcgcaaagtggacttgaagatgtacaagagttaccgagagctctctgattctttaggcaaaatgttcagcttcttcaccataggcaattgtgaatcccaaggaatgaagatttcatgaatgagagc

SEQ ID NO: 225536 - DNA, 541 bp, Glycine max
aacaacatgattgagagtcattatgttcctgttcatgattagtacttaattagacatgcatctcattgttttgtttgatgaaatattataacaaaccataatgacacaaattaactataattcaaccacttagcaatgtccatccgtgtctgctgcagcttaattatccttactttagtaactaagccaactgggcaccgcaattacaaaggatggggcaggtcatgaattgtgcgactagtctagctcctgttcttggattttgccatggctcttggtgcaagaccaagaccaatggcctcctttcctttcatgatgcgtaaacgcttgcatgattcaacaaacatctcccatgggacatcaccgacaagcatccagtcaccatccttgtcctcataggttgggacataatcagagctgttcaaaagatcattcagcttgctctcattcatgaaatccttcattccttgggattcacaattgcctatggtgaaagagctgaacattttgcctaaagaatcagagagctctcggtaactct

SEQ ID NO: 225537 - DNA, 568 bp, Glycine max
  unsure (1)..(568): unsure at all n locations
gttcccaaattcattttaatcctaattctgcacttcttgatcattcgatttttctcctcaagatgcagatattcgtaaaaactttgaccggcaagaccatcacccttgaggtggaatcctccgacaccattgacaaccgtaaaagctaagattcaagacaaggaagggatcccacctgaccagcagagacttatctttgcgggtaaacaacttgaggatggtcgcacccttgccgattacaacatccaaaaggaatcaaccctccatctcgtgcttcgcctcaggggtggcatgcaaatctttgtcaagactttgaccgggaagaccatcacccttgaggtggaatcctcggacaccattgataatgttaaggccaagatccaggacaaagagggcatcctcccagatcagcagaggctgatttttgccggtaaacaacttgaggatggaagaaccctngcttgatacaacattcagaaggaatccacccttcacttggtgcttcgttggagaggtggtatgcagattttcgttaaaactttgacccggaaagaccataaccttggag

SEQ ID NO: 225538 - DNA, 441 bp, Glycine max
aactatgatacgatattgatatttaattcttttggcgaaacgagctcaatacatcatattaaaacataaaaagcagcacctaaaccagaacagcaaacaagttcaagggagaaattgaacataacagacatgacatacaagaacacttgaaaaaagacacgcttaaaacaagaacacttgaaaaaaaacacgcttaaaaaccaccgcgaaggcgaaggacgagatgcaagggggattccttctgaatattggaatctgccaaggtacgaccattttccagttgcttcccagcaaaaataagcctctgctgatcaggtggaatgccctccttggcctgaatctttgccttcacattatcaatggtatcagaactttcaacctccaaagttatggtttttccagtcaaagtcttaacaaagatttgcatgccaccacgaagcc

SEQ ID NO: 225539 - DNA, 509 bp, Glycine max
tggaaggctatttcaagaacagcgactcccctttacctactgctccgggttatgatgttgctggagtggtggttaaagtgggaagtgaagtgaagaaatttaaggttggggatgaagtttatggtgatatccaatgtgaaaggcctttggaatatccaaaggtgattggttctttggctgagtacactgctgcagaagagaggctattggctcacaagccacagaatctgagctttgctgaggctgctagccttcctttaacacttgagactgcttatgaaggccttgaacgaaccgggttttctgctgggaaatctatccttgtgcttggaggtgctggtggagttggaacccatgttattcagcttgccaagcatgtttatggagcatccaaggtagcagctactgctagcactaggaaactggaactattaaggaatttgggagctgactggcctattgattatacaaagggagaattttgaagacctgtcttgaaagtttgatgt

SEQ ID NO: 225540 - DNA, 488 bp, Glycine max
agttaaaaaaaaaccatgtgattatttcattagccaaaactacaaaccacagtatgcacaccaaaaacaaattacaaaccacactatgttaaagccacagttgcaggcacgcttgtaaaacttagttattccactacacactcttgaagagtaagtgggtagctttaggctatggagaacatgtactaatgtgcctcactcttttaacacaaaccttaaatcacagacagaagcatgtagattgtagtggagcttatgcatgttcatggaatgggatagacaactatttttgcagttgctctgtttgtttccagatgggcaaacgcttcaacagtctgagaaaatggaaacgggctcttcgggtcaagtattggcttcagcttaccactctcaaaataggggtttagtttctctaagatcgccccatcagtagagagtatgaaaaggatagctggatgaaatccaggtggtactattgtcacaacttt

SEQ ID NO: 225541 - DNA, 585 bp, Glycine max
gaagatttcggcgtatcgagatagaaggttccccgggacgcaagaggagtttgagcacgcgcttctgacctcaaccaccgtttacgtggggaacatgtcgttttacacgacggaggagcaagtttacgagctcttctcgcgtgctggggaaatcaaaaagatcatcatgggcttggacaagaacacaaaaacgccttgcggcttctgtttcgttttatattattctcgtgaagatactgaggatgtttgcaaatacataagtgggacgatactggatgatcgtcccattcgagttgattttgattggggatttcaggatggtagacaatgggggcgtgggaggagtggtggccaggtccgtgacgaatatcgcactgattatgatcctggtagaggtggctatgggaagctggttcagaaagaattagaagtacaaaggcagcttgtagattatggcactggttctttgggttcttttccaccagttattccaacttcctatggtagacatggtggaggtcatggtcatggtggttcccatcgacatggtagagattactataggaagagacaccgagatgatga

SEQ ID NO: 225542 - DNA, 605 bp, Glycine max
gctccatctccgaggccattaaggagtatcctgatttggtgagaaagcatttgggaagagttgtcccctccgacgacaactactacgccgcgttgaacgccgccgtcttcagcgacgggtcgttttgctacattccgaaagacaccaagtgtcctatgcagatttcgacttacttcagaatcaacgcgttggagacagggcagtttgagaggactttgattgtcgccgatgatcggagctctgtggagtatctggaagggtgcactgcgccttcctatgaccggaatcagctccatgccgcggtggtggagttgtattgcggcgagggggcggagattaagtactccacggtgcagaattggtacgctggggatgaagaagggaagggtggggtttacaatttcgtgacgaagagagggctgtgtgctggtgccgggtcgaagatatcgtggacgcaggtggagacgggttcggcgatcacgtggaagtacccgagcgttgtgttggagggagatggcagtgtgggggagttttattctgtggctttgacgaatactatcaacaggccgatccaggacgaagatgatcacaaagggaagaacaca

SEQ ID NO: 225543 - DNA, 535 bp, Glycine max
ggattgcaatgatcatttattaaggttcaaaactggctatgtttcaggccacttttgcagggtgcagttgaagacagcatctatatacaaacatatacacatccttccgaatacactacctataaggactttgacaatttcaggaacaaatggcctgagcaaattccatataatgatatgcttaacaagctgtttaagtttaacctactgatccctcaagcttcaagctcatgagttggttcacctcagaaccaaattcatcaggaagctcattaaagacatcacggcaaaatccagagatcatagcagccattgctttttcatagtctattcccctttgctgaaaataaaacaattgatcttcaccaattttggacgtactagcttcatgttcgattcttgctgttggatttttcacctgaatgtaaggataggtatttgcagctgcattgtcaccaatgagcatagagtcacactgcgaggagtttcgggcatgctcggccttggacagaacctgaaccagccctctataaca

SEQ ID NO: 225544 - DNA, 582 bp, Glycine max
  unsure (1)..(582): unsure at all n locations
catcatcataaaccccctccagagaacaagaatcaaagaatggcaactatgactggtgtgagcctttcaagccccagggttttcttcaacgcatcaccctcaccgcaaaacacgtacgccgtaaagttcgcagttccacttaagccaagggatgcgacttggtagtgtcaggttgggtcgggtgatgaggatccgacccgttcgcgcagctccagagcgcatttcggagaaggtggaggagagcataaagaacgcgcaggaggcgtgcgccggcgacccgacgagcggcgagtgcgtggcggcgtgggacgaggtggaggagctgagcgcggcggcgagccacgccaaatacaagcaaaaggaaaaggactccgacccgctcgagacctactgcaaggacaatccggagaccattgagtgcaaaactttcgaagactgagaaagcgcttcttacgtgcatgatgatctccacatgtctgtctgtcaactaatacactattgcgtttcatgatatatcacnatgtgaacatgctatgtgttaatgtttctttaaagcataatccatagccccttatgtttaaa

SEQ ID NO: 225545 - DNA, 394 bp, Glycine max
gaataataaagaacagatcacgcaaaagtgcagtaatcgcggtgcacggtgcacctgtaaagatctacactttcacgcaatcgatatttgtttccttaatttgatttagctttcacaaaaaaaaaaaaactagggcataattttggtttgattaaacataaggggctatggattatgctttaaagaaacattaacacatagcatgttcacaatttgatatatcatgaaacgcaatagtgttttagttgacagacagacatgtggagatcattatgcacgtaagaagcgctttttcagtcttcgaaagttttgcactcaatggtcttcggattgtccttgcagtaggtctaaagcgggtcggagtccttttccttttgcttgtatttggcgtggc

SEQ ID NO: 225546 - DNA, 389 bp, Glycine max
ctgagtttccacactgcataccttaggtcttccgaattcgaagttaatttgcaagatggctaaggaaaaggctcagatcaacattgtggtggttggtcatgtggaccctgaggaggcaaccaccattaacgagctgaagaaaccctggtgtggagaaagaagctccagggcatgccatatgagggcatgcacgtacggcctcggaggggaaccagaaaattatgttaacaaaataatctggaaccctaatgtatcagtgtcatcatcagtgtgtagtttaagctagctttgctatggttacgttctttgagatgagagtcttgatgaacagtaccattctgatgtattgctttccttgaaagttaatgcatgcttcttatcttctgtct

SEQ ID NO: 225547 - DNA, 388 bp, Glycine max
agacagaagataagaagcatgcattaactttcaaggaaagcaatacatcagaatggtactgttcatcaagactctcatctcaaagaacgtaaccatagcaaagctagcttaaactacacactgatgatgacactgatacattagggttccagattattttgttaacataattttctggttcccctccgaggccgtacgtgcatgccctcatatggcatgccctggagcttctttctccacaacaggcttcttcagctcgttaatggtggttgcctcctcagggtccacatgaccaaccaccacaatgttgatctgagccttttccttagccatcttgcaaattaacttcgaattcggaagacctaaggtatgcagtgtggaaactcag

SEQ ID NO: 225548 - DNA, 510 bp, Glycine max
gtgccttctcagaactcaaagcagggtttctcaactctctttctgatggacaaaagctcgagctcttacagttccatgttctttcagactatgtctctagctccaactttgatacactgacgaaccctgttagaacactatacaggggctaaacctggaaaggtggaactgaatgtgataagttacggagggagtgtgaacatctcaacgggtgaggttaacaccaccatcactggcattatatataccgataagcatcttgctatttataaggtggggaaagtgcttcttcctacggacttctttgcagttaccaaggcacctgcaaaatcaccctctttggctccagaaccttcaagtgacaccgcaaaggcacctaaagctgataaggacgagtcatcatcttcagattcgtcacaagttaatcccactgaacagaactctggcaccgagaagatcgctgtgtacggaatgtggatgtcacttggacttggagtacttctcatgagt

SEQ ID NO: 225549 - DNA, 558 bp, Glycine max
tgagaaagcacttctgggacacttaaagttttttccttggaatcctgatgctgatatctttaagaattggagacaaggtaggactggctttcctttggttgatgcaggaatgagagaactttgggcaactggctggattcacaacagaataagagtaatagtttccagttttgctgtgaaaatgttgcttctaccctggaaatggggaatgaaatatttctgggacacacttcttgatgctgaccttgaaagtgatatcttgggttggcagtatatctcaggaggcttaccagatggccatgagcttgagcgcttggacaatccggagattcaaggggttaaatttgatccagaaggtgaatatgtgagacaatggctacctgagttggcaagaatgccaactgagtggatccatcatccttgggatgcaccgcttactgttcttagagcagcaggagttgagctgggtcaaaattatccaaagccaataattgatatagaattggccagagaaagactcacttgagctatattcaagatgtgggaatctgaagcagc

SEQ ID NO: 225550 - DNA, 553 bp, Glycine max
aatggaacaaacatgaatcacccaatacaaggagtgtcatttatacactgtgtgctaacattgttgattaaattaccatggctaaacagcacagcacagtcacttgaaagtgctaaacatgaaataagattgcatcaggaaatcaatggtactttatttacagcgacagggaaactagaaaggaaggggaatttccccccttatccataataagctcacatgtggtgaggtgaattaacagaactagaagaagaacatcatgtacagataaaatgcaaagttaagaacaggacatgcatgcaaagctaggggtctgctttaccaacaacctgttcatcactagaatcatattcatcttcactcatctcctcatcactggatttctcttctgtggcttcccctatgtcttcgggtttagcatacttctcacagtactctttaaccctttgttcgtaacttggtcggtcacgcatcattaaagcggcagcttctcctttcaaggggtctgatggattgggatacagcagaagtgaggtagaacacctcaacacat

SEQ ID NO: 225551 - DNA, 383 bp, Glycine max
attctgttggggagttgagagggctgttcaaattgcttatgaggccagaaaacagtttcctactgagacaatttggcttaccaatgaaatcatccacaaccccactgtcaataagcggctagaggagatgaatgttcaaaaatattcctctcgaagaaggtggaaaacaatttgatgttgtcaacaagggtgatgtagtcatattgccagcttttggagcggcagtggaagagatgttgactttgagcgagataaatgttcagatcgttgatacaacttgcccatgggttgcaaaggtatggaattctgttgaaaaacacaagcaacgagattatccctctgtaattcatggtaaatatgcccatgaggaaactgtagcaact

SEQ ID NO: 225552 - DNA, 437 bp, Glycine max
atgatactgcaactggcaacatttataagagctcttgaacttttgttattgatacattccacaatacatggggctgtaagcctgttatagattctatggattaagttcctcgattcatttatacattgccaatgtatgcatgcagaccgactttatgcaagttgcattgccttttcccgtttcaagtcaaaaaccctgatgagtgcattttcaacaaccttgtctggtgtggatgcaccaaatgttacaccaattggtattggaccctctggaagccagttttctttctccaccagctctccatgggtcaacttgcatgctattttgattcctggaccaattctttgctcactgtcaatccaataagaaggaattccacgttgctgcgctatttcttgcacgtgtgatgtattgctagagtttcattcaccaactac

SEQ ID NO: 225553 - DNA, 390 bp, Glycine max
cgagaagcagaaggccgcctcaaagggaagccagctggattcaaacaagaaagcaatgtcgatccagtgcaaggtgtgcatgcaaacatttatgtgcaccacatcggaagtgaagtgtagggagcatgctgaagccaaacaccctaaatctgatgtttatgcttgttttcctcatctcaaaaagtgaacatattggagagtgcaaatagagaaaaactttatatcatcatggcctcttccttaaacctattgacagagatcttccccattttctatctatataaaatgtgtttttctgtgtttgtgccttgggaatttaggagggacaaggagaggaagactattttattatgattccccttgatgacaggacaagaaactgtgtgaagc

SEQ ID NO: 225554 - DNA, 444 bp, Glycine max
ctgtaacactttaatattaacacgaaccatcattaaacagttacaccttgacaagcatcacacagtttcttgtcctgtcatcaagggaaatcataataaaatagtcttcctctccttgtccctcctaaattcccaaggcacaaacacagaaaaacacattttatatagatagaaaatggggaagatctctgtcaataggtttaaggaagaggccatgatgatataaagtttttctctatttgcactctccaatatgttcactttttgagatgaggaaaacaagcataaacatcagatttagggtgtttggcttcagcatgctccctacacttcacttccgatgtggtgcacataaatgtttgcatgcacaccttgcactggatcgacattgctttcttgtttgaatccagctggcttccctttgaggcggccttctgcttctcg

SEQ ID NO: 225555 - DNA, 495 bp, Glycine max
gaacaattactttagtgttttctcttgtcacataaaagtcatctaagaagaattacaagatcatcatcacaataacaagatgagttcaggaattagagcatggagtgtggcagcaagtgttggaattgtggaggccttgaaagaccaaggcatatgcaggtggaatcatgccttaagatcagctcaacaccatctcaaaaaccatgttggctcattctctcaggctaacaagctttcttcttctgctatgatatccacaacactaaaacatgagaaggcaaatcaatcagaagagtctttgagaactgtcatgtacttaagctgctggggtcccaactagatatcataagcccaacaacaaaatattcttttctcttttcaattctaggaatcaagcaagcttaattagtctcaaatgatgatgagtattgaaagaatattgcttgtctttatggcagtcattatgtaaactttgatattgatagtgttgagctg

SEQ ID NO: 225556 - DNA, 483 bp, Glycine max
  unsure (1)..(483): unsure at all n locations
caacaaattacctcagcaaggagtgttctttcttctgttcaaattgatcaagatctcaaggtgaaaatctccaaggtgtgtgctgagttgaatgtggatggattaagaggagacatagtaacaaatagagctgcaaaagcttttggctgctctgaagggaagagacaacgtaagtgccgaggatattgctactgtcatccctaactgcttgagacaccgtcttagaaaggatcccttggagtctatagactcaggtttacttgtcactgagaaattttatgaggtattcagctgaggatcatagatgtaacacggtttgtattctgtggtattccatgagtataatgctacttcattatttacattttaccttttctgtggagattttcatcggccgtaaacatcaatacgattcatgagttccttttacacnaggatattccgagcatttaacgtgcaaaaaaaaaaaaaaaaaaagggcgg

SEQ ID NO: 225557 - DNA, 456 bp, Glycine max
gcacgttaaatgctcggaatttcctgtgtagaaggaactcatgaatcttattgatgtttaacgacaatgaaaatctccacagaaaaggtaaaatgtaaataatgaagtagcattatactcatggaataccacagaatacaaaccgtgttacatctatgatcctcagctgaatacctcataaaatttctcagtgacaagtaaacctgagtctatagactccaagggatcctttctaagacggtgtctcaagcagttagggatgacagtagcaatatcctcggcacttacgttgtctcttcccttcagagcagccagagcttttgcagctctatttgttactatgtctcctcttaatccatccacattcaactcagcacacaccttggagattttcaccttgagatcttgatcaatttgaacagatgaaagaacactccttgctgaggtaatttgttg

SEQ ID NO: 225558 - DNA, 612 bp, Glycine max
  unsure (1)..(612): unsure at all n locations
gtcacagccttcacatttcactttaatgtgcaccccattgggtttgagcttgccaaggcatcccaaatgacaacagcagttcgattagcattattgctttgtgctgtgatctaccttgcaataggcttatttgggtacatgttatttggggattcaacccagtcagacattctcatcaattttgaccagaatgctggttcagcagttggttccttgctcaatagtttggtccgtgtaagctatgccctccacatcatgctggtgtttcctctcttgaacttctctttgagaaccaacatagatgaagttctcttccctaagaagcctatgctagccacagacaacataagatttatgatcctcactctggtgctgcttgtattctcctaccttgcagctatagcaatcccagatatttggtacttctttcagttcctgggatcctcatccgcagtgtgccttgccttcattttccccggctctattgctttaagggatgttaaaggtatatcaacgagaagagaccaaattatcgcactgataatgattatactagctgtggttacaagtgtgcttgccatttncaccaacatatataatggctttagtagc

SEQ ID NO: 225559 - DNA, 566 bp, Glycine max
aagggctcatggattgtacgccagagtgttggtagtactccttgtttactgggaaaggcagttgattgcaactatattcgtggtcccaagtatttagaaattgatgttgatattggttcttctactgttgctaatggagttttggggtctggttattggtgtgattacaacattggtggttgatatggcttttcttgtacaggcaaatacacctgatgaattgccggagaggcttattggagctgttcgtatttctcatttagagctcaaatctgccatcatcccaaaactggaatcagatccatcatgactgacgagttgtttcagttcttctatacagaatcatttgtttgaaatatgcaggtgtaccattttttttcccactgggatgtaggttcattgttttataattgggttcttctatgaaatcttataaggaaattcttctttccttcagcaagatattgtagtaatgtagtttctttctcattcctaaggttttatacgtgaatatgttgtacacttactatgtttactaatgagggcagaatggatggtgtcattct

SEQ ID NO: 225560 - DNA, 407 bp, Glycine max
ccctcctcctcgccttcgtcactgcctcccctgttccagcattcgggctttccgctggagtcggagttggcaacgctttggtgttggagatcgtgatgaccttcggtttggtgtacacagtctacgccactgccggtggaccccaagaagggcaatttgggaattattgctcccatcgccattggtttcattgttggcgctaacattttgttgggtggggccttctccggagcagccatgaaccctgctgtgacatttgggcctgctgtcgtgagctggacctggaccaaccactggatctactgggccggccctctcatcggaggtggaattgctgggcttatctacgaggttgtcttcatcagccacacccacgagcagcttcccagcactgactactagagggg

SEQ ID NO: 225561 - DNA, 406 bp, Glycine max
cccctctagtagtcagtgctgggaagctgctcgtgggtgtggctgatgaagacaacctcgtagataagcccagcaattccacctccgatgagagggccggcccagtagatccagtggttggtccaggtccagctcacgacagcaggcccaaatgtcacagcagggttcatggctgctccggagaaggccccacccaacaaaatgttagcgccaacaatgaaaccaatggcgatgggagcaataattcccaaattgcccttcttggggtcaacggcagtggcgtagactgtgtacaccaaaccgaaggtcatcacgatctccaacaccaaagcgttgccaactccgactccagcggaaagcccgaatgctggaacaggggaggcagtgacgaaggcgaagaggaggg

SEQ ID NO: 225562 - DNA, 556 bp, Glycine max
aagtgaagaaaattcatttgcatacagaaaatacaaaggctataaatccaaatacgtaaaagttagaataccaaggaataaactacaaaaacataaataactcaaaactattgaaaattgtgtccttgcgggtgatcacttccctcccgcattatcagcatcagctgcaggatctgaactggcactacctgcttccgtcttggttgtttcatcaatcctcctactagaatcatcgtctaattcatcatccatcatgtcatcctctcccacatttatatcttccacatcatcatcgtcgtcattattgttttcgtcagggatctttcttttcttgggaccatgctccagcctatgagtatccaactctttgtccattgtctcctgtaaattctggtcattgttaactttccttgcgttccttgcattctgccatctctccaattccttctcaacattggcaagatactgctccccaatctggttctgatactcggacacttcctctcttcttgcattcttccattctagaaaagcctcttctttgctcttctcaagt

SEQ ID NO: 225563 - DNA, 547 bp, Glycine max
tcgcgatctagcaacaacacacacactcctcacacaataatggaagaagggcaaagaaaaacaacaacactacttctatgctcccacattgtggttcttcttttactctccctagtggccgagactagtgccaaggtttcagcagtgatcgtcttcggcgactcctccgtcgacgccggcaacaacaacttcatccccaccattgcacggagcaattttcagccatatgggcgtgactttgaaggtggaaaagccactgggaggttttgcaatgggagaataccgacggattttatatctgagtcttttgggctgaaaccttatgtgccagcatacttggatcctaagtataatatttcagattttgcaagtggggtcacttttgcttctgcagcaactggttatgataatgcaacctcggatgtgctgtctgtgataccactatggaagcaattagagtactacatgggataccaaaagaacttgagtgcatatcttggtgaaagcaaagcacaggagaccgtagctgagcattacacctcatgag

SEQ ID NO: 225564 - DNA, 483 bp, Glycine max
gaacaattactttagtgttttctcttgtcacataaaagtcatctaagaagaattacaagatcatcatcacaataacaagatgagttcaggaattagagcatggagtgtggcagcaagtgttggaattgtggaggccttgaaagaccaaggcatatgcaggtggaatcatgccttaagatcagctcaacaccatctcaaaaaccatgtcggctcattctctcaggctaacaagctttcttcttctgctatgatatccacaacactaaaacatgagatggcaattcaatcacaagagtttttgagaactgccatgtacttaagctgctgggggccccacctagatttcataagcccaacatcataatattcttttctcttttcatttctaggaatcaggcaagcttaattagtcttcaatgatgatgagtattggaagaatattgcttgtctatatggcagtcattatgtaaatcttgatattga

SEQ ID NO: 225565 - DNA, 460 bp, Glycine max
cagtagtgtcatttacgcttctcttctctgcagcaactatgcctaaccctaaggtcttcttcgacatgaccatcggcggtcaatctgctggccgcatcgtgatggagctctacgccgacgtcactccccgcaccgtcgagaactttccgggcgctttgcaccggcgagaagggcgtagggcggagcggcaagcccctccactacaagggctcgtccttccaccgcgtgatcccgagtttcatgtgtcagggtggcgacttcaccgccggaaacggaaccggcggcgagtcgatttatggcgccaagttcgccgacgagaacttcgtgaagaagcacaccggtcccggcatcctctccatggcgaacgccggtcccggaaccaacggatctcagttcttcatttgcacggagaagacagagtggctcgacggaaagcatgtcgtgttcggacaggtcatcg

SEQ ID NO: 225566 - DNA, 445 bp, Glycine max
aggcgaattatagatgtcctaattttattgaaggtagctcatcatgttttttttatgcttctcataacagactccattcactcactctatgaaccccaaccaaccaaccacatgatactgatattgaaaaggaaaggggaagggtttcgaaatgatatccttaacaccacaatcccctaaacgacgacacgagaaagaaaagaagagaaaaaaaaggcaaaaacgacaccgaaagaaataacacagattcagagattaaagccgcgggtcaacgtcgtctaagagagttgaccgcagttggcgatgacaacgggcttggaggtcctgccggagctggatccgaccttctcgatgtccttgacaacgttcaatccttcgatgacctgtccgaacacgacatgctttccgtcgagccactctgtcttctccgtgcaaatgaagaact

SEQ ID NO: 225567 - DNA, 529 bp, Glycine max
tgaggacattcaacctcttgttgttgataatggaactggaatggtcaaggctggttttgcaggtgatgatgctcctagggccgtgttccccagcattattgggagaccacgccatactggtgtaatggttgggatgggtcaaaaatgatgcttacgtgggtgatgaagcccaatcaaaaaggggtatactcaccttgaagtatcctatagagcatggcatagtcagcaactgggacgatatggagaagatttggcatcacacattttacaatgagctacgtgttgcccctgaagaacaccccgtacttcttaccgaggcaccactcaatcccaaggccaacagagagaagatgacccaaattatgtttgagactttcaatgtgcctgccatgtatgttgcaattcaggctgtcttgtctctgtatgccagtggacgtactacaggtattgtgcttgattctggtgatggtgtgagccacacggtgcccatatatgaagggtatgctctttctcatgcaattcttcggtt

SEQ ID NO: 225568 - DNA, 550 bp, Glycine max
  unsure (1)..(550): unsure at all n locations
ccattgagacacttctgataaccgatgatctttataggaacgaagatgttgagacgagaaaaaagtacgcgagtttggtgaagtcggtgaaagagggtggaggaaaggctttggtgtattcgtcgatgcatgtttctgcaccgcaactcgctcaactcacgggtgttgcggcaattctcaggtttcccttgcctgaactcgaagatgtaaatgggtgctgatttattgtacatattggttttagttatttgtttgtcatgtttaattaatgtctttttaatttcgccaattgttgattatataatctccggatgaagccagggagaatgtgaattgtcgttgctacagcatgtaattatctgggtttgtgtatatatgtgttctaaatattattgtttgcattgtgtgagaaattgagaatgcgagttggagaaaactcanaaaataaataaaaccattgtccttctcaaaaaaaaaaaanaaaaaatataatatataaattcttctttattactttttttctttttttctttactttctctcctttaat

SEQ ID NO: 225569 - DNA, 579 bp, Glycine max
  unsure (1)..(579): unsure at all n locations
agacccctctagtatcccttatgaagtcactaaggctgggatgaagttgccattagttgcaaaaccgctagttgttgatggcactgcaaagtcacatgaactatttcttgcttatgatgaattctctctttcagcggtttgaccctccactggttctacaggagtttgtcaatcatggtggtcttctctttaagatttacattgttggggaaaccataaaggttgtgaggcgtttctctcttcctaacatcagtaagcgtgaactatcaaaagttgctggtgtattccgttttccaagagtttcatgtgcagccgcttctgcagatgatgctgatctagatcctaatatcgctgaacatccaccaagacctttattggagaggcttgcaagggagctccgtcatagattgggactccacttgttcaacatagatatgattcgagaatatggaaccaagggatgtgtttacgtcatcgacatcaactactntcctggatatggaaaaatgccaggctatgagcacgtatttacagantttctacttagcctagtggagagtaaatgtagtaataagaaac

SEQ ID NO: 225570 - DNA, 576 bp, Glycine max
actaatgaaatttaaatcttagcagttatttagcaccaccaaaactttcattgatttggatataagcatatattataacttacaataaaggcattttcgctcattattgagagggagaaattagacagaccctatttcgacctttttcaacattttggtggcttcattgaaattccatactaatttgcataaatttttaagaaagccaccagcaagaacagccctgttcaatgcatctactaacctgctctagtttaggcagcaagtttcttattactacatttactctccactaggctaagtagaaaatctgtaaatacgtgctcatagcctggcatttttccatatccaggaaagtagttgatgtcgatgacgtaaaacacatccttggttccatattctcgaatcatatctatgttgaacaagtggagtcccaatctatgacggagctcccttgcaagcctctccaataaaggtcttggtggatgttcagcgatattaggatctagatcagcatcatctgcagaagcggctgcacatgaaactctcggaaaacggattacaccagcaactttt

SEQ ID NO: 225571 - DNA, 564 bp, Glycine max
  unsure (1)..(564): unsure at all n locations
ctctctctccctcgcaaatgcgattcgttcgtgacgcgttcggcatttagaagataagaaaaataaaccaatggcggaggaaaaacggttccgaatagggtacgcactgttgccgaagaaacaaaacagctttaatccgagactcgctcgtgaatctcgcgagatctcgagggatagacctggttcgagtcgacccgaaccggaacctaacggatcaaggtcccttcgattgcgtcctccacaagctctacggcgacgattggaagcgtcaattaacggagttcactgttaagtaccctaatgccgtggttctcgactcgccggaatcgatcgagaggctccacaatcggatttcgatgctgcaggtggtgtcggagctgaacatcgacgacgggagcgagacgttcgggattccgaagcagattgtgatatacgacanagagacgctcttagaccggcggaactgggaggcgctgaattttccggtgatcgcgaagcccttggttgccgacggcagcgcgaagtcgcacaagatggcactggttttcaaccacgacgggttga

SEQ ID NO: 225572 - DNA, 510 bp, Glycine max
gtatgagatgagggcaattctgaatctccttctggataaattgagttgtaatgcacctctgcccaaaagctcagaaatatcactctttcagacttctgtatctgtggaagaatctcgatgtaacatgtatccttaaaagacgtaataacaaaaattttgacgccataccaatctgcagcagcctgcaatgtgacatgatcaccccattcgccacttttgctcatatttctcaaatagtcactatacgccaagggaacataaccagcatacagatctgggtaatatttgagctgttgaataatttgctcccgcacaaatttgtggtggtccggagaacgatagagttgatctgataaagaacgaaactggcagttaccatctccttgaaccttgcattcaatcagatcatataactgcaatctgtctagaagtctttgatgatctgagtattcttcggcatcagatggtattatctcattggttttaggaacatgaagaatgggaaccctt

SEQ ID NO: 225573 - DNA, 539 bp, Glycine max
ggaaaccgagttcatcagaggatttttggaccaccagcacgcatgatatggacaacagcgctgttcagtcacaagggagcatctcttcagccagtctaacaaaccaagctgtggtttctcatgctggttcttccaaaagccaggaccaaccccactgaatttgtaaatcacggtgtaattctttggaatcagactcggcaacgttgggttggaaataaaaagcctgagaaccaaacacaacaattacaagaacctaaattgagttggaatgcaacatatgaaagtttacttgggagcaacaagccattccgtcagcctatccctcttgctgaaatggtagattttcttgtggatatatgggagcaagatggcctatacgactgagatattgaagattgaggaagtgctgaaaataattctagttcttgcttgtaggaaggactattgggcatatactgcaagttggatatcaattgtcgcatgcctatgaatatgatgaggaaaaatttgtgtcttgggaacatgagataactggatta

SEQ ID NO: 225574 - DNA, 485 bp, Glycine max
gaaactatatctcagttattgactatttacacaacataatttcggtctaatttcacggaaaagcaggcagagcaaataaaagttgcagccactcatacatgcaagcaaaaggctgtcaacaaaggcaagagttttccaaaacttgcctcttgagatagtagaggcagccaaggcaatcaattaacaaaaggataatacagttatctcatgttcccaagacacaaatttttcctcatcatattcataggcatgcgacaattgatatacaaactgcagtatatgcccaatagtccttcctacaagcaagaactagaattattttcagcacttcctcaatcttcaatatctcagtcgtataggccattttgctcccatatatccacaagaaaatctaccatttcagcaagagggataggctgacggaatggcttgttgctcccaagtaaactttcatatgttgcattccaactcaatttaggttcttg

SEQ ID NO: 225575 - DNA, 542 bp, Glycine max
  unsure (1)..(542): unsure at all n locations
ggcttcttgtgctgggaagactgaggtttcaaagagttttgggagtggagtgcaaggggctgaaaagaacaagctctttttctttgaaggttcctctcatagctttgaccttgaggatttgctgaaggcttcagctgaagttcttggaaaaggaagctatggaacagcatacaaggctgttttggaggagggaacaacagtggtagttaaaaggttgaaggaagttgtggttggaaagaaggagtttgagcagcagttggagattgtggggagagttggaagccaccccaatgtgatgcccctaagggcttattactactccaaagatgagaaacttctggtttacaactacatgccaggtggcagcttgtttttcttggtgcatggaaacaggggagcaggaagaaccccactagactgggactccagagtgaagattttgctaggagctgccaagggaatagctttcatccactcagaggggggtccaaagttcgcacatggncacatcaagtcaacaaacgtgctcataaaccaagaac

SEQ ID NO: 225576 - DNA, 468 bp, Glycine max
actaagaagaaaaatgccagactgttaaaagttaaagtttaacctcggaacacaaaaaattgaaatggtggccaatgcaattctttctgagtaattttgtataaacaaaaactagaaagaaataaacttctcttatttacctttgacagaaaactaaacttcaaaggaattaagcacggcttttagagtctcctcagaagtttgccactgcttgtcattggcactaaccacaaacaaaacaacagtgtttccctttgctgttgcttttgcaagattgtgtgtgcctgtgagagcatatggtgtttcgagcacgtatttgtagtatgtctgatcaccaagctttttaactgaagtctcaaggagctcttctggatcaaaagtgtttccagtgacaaatggtccaagagaagcaatcagtttttctgggctcccaatgtcctcaattgttgcatttggtttgttggtaag

SEQ ID NO: 225577 - DNA, 558 bp, Glycine max
gactgatgccaatgatgttgaaggagatggtgcctcattgccatattcagagcgctttcttgtcactgtaaagcctctggcaaaacatgttcctccagtgttgcatgacaaacaaaggactgttcgagtcttttatggaaaatgattccttttatgtgctgtttagacttcatcagacattgtatgagaggatccaatctgcaaaggttaactcatcatctgctgaaaagaagtggagggcttctaatgatacaggctctagtgatcaatatggcaggtttatggatgccctttacaatttactggatggttcttctgatagtacaaaatttgaggatgagtgtcgagctattattggaactcagtcatatgtcttattcacattagacaagctgatatataaacttgttaaacagcttcaggttgttgccaccgaagagatggataacaagctgcttcaactatatacatatgaaaattcaagaaaacctggaagattcgttgatttagtttatcacgaaaatgcccgtgttcttctccatgatgagaacatatatc

SEQ ID NO: 225578 - DNA, 582 bp, Glycine max
ggggcccttcgatgtcttcttgtgtttcaatgaggcagagacacgccacagcttcacaggtactctctatcacgctttacagagcgccagattcaagacttacatggagaatggcaagttgagacgtggcgacaaaaatcgaacccgctattctcactgcaatggaagcatcaaggatttcaatcgtcgttttctcaccatactttgcctcctccacctgctgccttgatcaacttgtccacatccatcgctgtatgaataccaaaaaccaactcattttgccaatcttttacgacgtcgaccagtccgatgtaagagatcagctaaatacatttggccaagccatgcttcaacaccaacatcgtttcggaaagagctccgacaaagtgctccagtggagctcagttttgtctcatgtcgccaacttgaccgccttctgtttctccagtactggggaccaatatgaatatcaatttgtggaagagatcgtggattgggtcaccaagaccgttccccgcaatgatgtttttctgagtttctgtggaagagatactcggtactcccttacaggttttctctaca

SEQ ID NO: 225579 - DNA, 443 bp, Glycine max
ggtacatagaatccattttaaattttaatggccctttccacaatttcttcaataacttcatattcatacctacaaaagcgcaatgctttttttttggttactacatacataaaaaaaattgtaattggcccacaacaaaatacagagtttgggttgtacccggtttcaaaggtccatcctttcaagtttgcggcttcaaacaaagctgatctccatttctggaccttctcaaagtccttacccaacatattttcatgttcagtcatggcttcaccataactatttctttgacgccttatatccctgggctccactttgtaaaatatgggccaaaccagttggtttttcatcttcatgcattcaaggattgccaaaagctcattaagacaccaccaggaatgtgcctaatttttagaaaatacactgattgaaagccttgattt

SEQ ID NO: 225580 - DNA, 361 bp, Glycine max
ggatttacagctagcggatttgatcattgaggcgattgtggaatccgaagatgtgaaaaagagtttgtttgcgcaactcgataggattgccaagagttctgcgattttggcgtccaacaccagttccatttccgtcacgcgtctagccacctctaccagcaggccacgtcaggtgataggaatgcattttatgaacccacctcctgtgatgaaattgattgagattgtacgaggtgcagacacttctgaggagacattcgttgctacgaaagcattgtcagagaggcttggcaaggtagtgataacctcccatgattattcaggcttcatagtgaatcgaatcctaaggcctatattaatg

SEQ ID NO: 225581 - DNA, 439 bp, Glycine max
ccagtcaaacacaataaaataaaatgaactatgcatgaagatttaactatgcatgttttactattagttcctgcaattttctttttgcttgtatgcataaaagaaatagaagacacattcaagtattcaacttcagccgtgtgcaccacccccacggtcagacacaaggtaattaaaatgggggtgttgaaaacttgttcttccaagtgaaacaaacattttagagacgggaagatgattttgtagaccttggatctttactatattcatacacaccaataccttgttttcttccaagtcttccagcatcaacatactgcacaagtagagggcaaggtgcatatttgttgtcaccaaggccagcatgaagaactctcattattgacaagcacacatgcaatccaatgaagtcttgcaagctttaaaggacccattggat

SEQ ID NO: 225582 - DNA, 480 bp, Glycine max
ctgaaccggtggttctctacatgaaagttggtgaacagaaatttgtcttgggaaccctttccagggagaaaatccctcaaatatctctggaattggttttggaaaaggagtttgagctttcccacagttcaaagagtgccagtgttcatttcttggggatacaaggcatattacgatgccgataatagtgactaggatgaatttactgatagcgatgaggatgatgaggatgttccattgattaacacagagaatggaaaacctgaaacaaaagctgaagacttgaaggtacctgaatctaaaaaagctgttgccaaggctagtggatcagcaaaacaagtcaaggttgttgaaccaaaaaaagataacgaggaggactctgatgatgattctgatgatgatgaatttggatcttctgatgacgagatggaggatgctgatagtgacagtgatgatgaaaagtgtgatgaagatgatgat

SEQ ID NO: 225583 - DNA, 591 bp, Glycine max
gaagccagcagcagaagagaaatcagaggagaaaactgaagaagtgaaagaagaagcagaagagcctaaagaaactactgaaacagaaacagaatcagcaccagcagcaaccacagaggaagagaacaaaccagctgagacagtggaagccccagtagaggttcctggtgagaaaactgaagcttaaacttatggacagtgtgagtgagaaaaacacgtttaaaaatggtcctagttgtggtgatcattaggtctaccattttgcatgtcatgttgaaaagctttttgttttatttatttctttagtttactttattattaatatattattattatatgatggttaagtctttggttgtattatggagggtatacctacgtgtgagcacaacacttggctccacatcagcgtgcttaccacgtggtgacatgagaaattctaggagttgtgtattgaagtgagcaagctgctgctggtgctggagtttagggatgagggtttattttattggcagggttacatgagtttgtgatgatgtgttatcgtggtttcttaggtttgaataaatgatattaccttataactggctt

SEQ ID NO: 225584 - DNA, 526 bp, Glycine max
aagcaagttataaagtaaatatcatttattcaaacctaaagaaacacaataacacatcatcacaaactcatgtaaccctgccaataaaataaaccctcatccctaaactccagcaccagcagcagcttgctcacttcaatacacaactcctagaatttctcatgtcaccacgtggtaagcacgctgatgtggagccaagtgttgtgctcacacgtaggtataccctccataatacaaccaaagacttaaccatcatataataataatatattaataataaagtaaactaaagaaataaataaaaaaaaaagcttttcaacatgacatgcaaaatggtagacctaatgatccccacaactaggaccatttttaaacttgtttttctcactcacactgtccataagtctaagcttcagttttctcaacaggaacctctactggggcttccactgtctcagctggtttgttctcttcctctgtggctgctgctggtgctgattctggttctggttcagtagtttcttta

SEQ ID NO: 225585 - DNA, 476 bp, Glycine max
tcgcgatctagaacctcaaactcttcggaaagattaacattaatggctccaagggatatcaatagatccaacgttgttgttgttgccggagtatccaacccgacccataaagagatccgttaccgcggcgtgaggaagcggtcgtggggccgctacgccgccgagatccgcgacccaggcaagaagacacgcgtgtggctaggaacgtttgacacggcggaggaggcggcgcgtgcgtatgacacggtggtgcgtgagttccgcggcacgaaggcgaagaccaatttccccacccacgcggcggcggcgcgtagtcccagccagagcagcacgctggactcctcgtctgcgccgtcgatggaccttactcttgccggcccactcaccgtcgcgggcgcgttggttttctccggtggcgcgtcccgtggtgttcttcgacgcttttgcgcgtgccgaggtgcgcgcgtcgttcgatc

SEQ ID NO: 225586 - DNA, 528 bp, Glycine max
cgatctccaattccacctcgacgacgacaataaaattgcgctacagagatacggccagtacctctacgacgccctaattctcttttccctcaacattgaacgtggaggaggatccatggacgcggttgctattttgggattttgttgctttgaggttattgatttgatcgttgcttgctgatagtaatgcattatatttgatcagggaaatagccaccgagtggggtgtggactttgatgaggatcctgcagctgtggttgtggatcattcggcatatgcagtctctgctgctgaaggagatcatacattgattgctagtgatgatattatcaaggtcgacgtcatatttggaagcaaaaaagttgatgcttcagtactgggacaggggattgggcattcactaaatcctaccaatagcctggagaagaaagttctctctgcatctcctttagccttttctgcaaactcaaaatttaaagtgacaggtacttcattgatcactgaaactacaatcataatagtttcaa

SEQ ID NO: 225587 - DNA, 538 bp, Glycine max
aaaagtaatgcatctataataaattagaaacgtcagttagtatcattgccaaatcaaaattttcgatctcaaaataagttcaaccccgcactacaaactacagtatcttaaagcaaaggtttacatctacttgctgtatagatgaactgcagtgaagatgaagaaacccaccatcattgaaaatgatgctccataatagggataggctgctggtataaatctttcatattcattgtgtctaaagggacgaacaggaatctgctttgataaagataagcttgtatatccaagtttttcgtactcaactttgaattggaaaaccccatagacatctggaaccttaaatgatgtgaaataacggcccttgccatcagttgataaagtcttcaagacataggggctcatcatgtaaaattgcacttgaacatcatcagctacgtaaggttcccatgctgtcccagaccactcataaacttcaacagagtattccaaattatcattgatccgatagatggctggttcattagcttccccaact

SEQ ID NO: 225588 - DNA, 558 bp, Glycine max
cctgtgtctgtgaaacaacaaggagagcgggaacgcgttgcgtacacctcacatcctcctcctctacataagcgccctcgcatcccattctttgcagactcaacaagcattccactcacacctcatcgtttctctctctagaactctggttcttctttttctccaaccttcgtttcaccaccacacttacattactttgtcgaaatggctccaccaattgagaccccaaacaaggtttccagctatcaacagtccccaaaccctcgtcttaacgagaggattctttcatccatttccaggagacacgttgctgcacacccgtggcacgatcttgagataggacccgaagctccaaagatcttcaactgtgtggtcgaaatagggaaaggaagcaaggtgaaatatgaacttgacaaaagaactggacttattatggttgatcgtatactttactcatcagttgtttatcctcacaactatgggtttattccacgtactatttgtgaggacggtgatcccatggatgtcttggttattatgcacgagccagttcttccg

SEQ ID NO: 225589 - DNA, 542 bp, Glycine max
gttgtaaaaatgctttatataagatgtaagaatcccatatgctccaaatatttggtagagtgagctacaataataaaactttgatattaataaatgaaaaaatcattcactcaaaactaagcacatgtgtagaatatgcatgttgcagccctgagaccaatgcacacgcgacaaggatagaaagcttttgttatcgtcataatcgtaattataatagcagcctttgaatacatgtaatgtatgtcttcacaaccaaacaaaattccaagcacccaggaatcaacactaccgcctcaagttctccacaacgtattccgcatataaggtcatggaatgcttgatcgcttcataggcagctgaggcaggaagaaagtcgttcactgcaacttccttgttctcattcttcttgtaatcttcaaagaaacgacgaatttcagctaaacggtgtggaagaagctccttgatatcattgtaatgcctatactcaggatcatcagcacagacagcaattatcttgtcatctttctcaccctgatcaatca

SEQ ID NO: 225590 - DNA, 609 bp, Glycine max
cggggcttgtcgagtggtacgggaagaacgcacgcctccgcgagttggtgaacctggtggtggtggctggagacaggaggaaggagtcgaaggacttggaagagaaggccgagatgaagaagatgtatggccttattgagacctacaagttgaacggccaattcagatggatatcctctcagatgaaccgtgtgaggaacggagagctctaccgtgtcatctgtgacacaaggggtgcctttgtgcagcctgcagtttatgaggcctttgggttgactgtggttgaggccatgacttgtgggttgccaacgtttgccacatgcaatggtggtcctgctgagatcattgtgcatggaaaatctggttaccacattgatccttaccatggtgaccatgctgctgagatccttgttgagttctttgagaagagcaaggctgatccatctcactgggacaaaatctcccagggtggactcaagcgtattcatgagaagtacacatggcaaatttactcggacaggctcttgacactcactggtgtgtatggcttctggaagcacgtgaccaatcttgtacgccgtgagagcaacgttacctcgagatgtctat

SEQ ID NO: 225591 - DNA, 595 bp, Glycine max
gaatggaagaaggcatatctttaaattgaattgatggggtggaaaacccgaatttaaagatttccaatcatacacaatattgcaacaacaaaaagaattttaaaaaaaaaagactttctttttttactttttttacccaaaacctaagcaaaatataaaaacaaacgacacttttttttagactctttaaatccaaaagctgatcacaatcaaaatcaatggcgttatttatgaaagctccataagacttcaaacgaccaaaagccggtttctccattgatgttctcttcaaacatgaatttactcttcaatagcaaggggcacagactcagccaatttgcggtacttgagagcatagaacatctcgaggtaacgtttgctctcacggcgttcaagattggtcacgtgcttccagaagccatacacaccagtgagtgtcaagagcctgtccgagtaaatttgccatgtgtacttctcatgaatacgcttgagtccaccctgggagattttgtcccagtgagatggatcagccttggctcttctcaaagaactcaacatggatctcagcagcatggtcaccatggtaaggatcaat

SEQ ID NO: 225592 - DNA, 518 bp, Glycine max
caggtccagacaaaggagtggaattggacaacatcattcgcaaaattgatgatgatggtcgtttggttggaattgtgaatggcatggatgttcaggagtggaatccaaccactgacaaatatatagctgtcaaatatgatgtttcaacagtattggaagcaaaggctcttctgaaagaagccctccaagcagaagttggattgccagtcgacagaaatattcctctcattggtttcattggtaggcttgaagagcaaaaaggttctgatattcttgcagaagccattccccaatttatcaagcagaatgttcagttggtagccctaggaacaggaaaaaaacaaatggaaaagcagcttgaggaacttgaaatatcataccctgataaggccagaggagtggcaaaattcaatgttcccctagcccacatgataatagctggagcctgatttatattggttcctagcagatttgagccttgtggtctcattcagttacaagctatgcgctatggatct

SEQ ID NO: 225593 - DNA, 458 bp, Glycine max
gtgtcatatctagactattaagaaacgctttaatttatgctaatcttgaaagacctgcactcattacactgattcgaatagtgtaatttccgtgtccatgtacatttctataatctatttagaagaaaacaaaaatttggaagaaggatataaaacataatattaataacaagcaaggggctgggagaacttcacgagactcagactaggagaggcttccctcacatctttgttcttattattatggtgttgccacattttcctttgcctgtggagcaatttcttctccatcacttccaggttcactgccaggaactcccaagcttagcagcacttccttccactccttagcaggccccttccatgaaagatcttgagccatgcagttcttgataatttctgtaaaagctggagttccatagactgcaagggcccttttgacagtctttgatatagca

SEQ ID NO: 225594 - DNA, 539 bp, Glycine max
  unsure (1)..(539): unsure at all n locations
ctttatttgactcttcggtaattaatttattggttttgcagtatgtaccttacgttggggacagcaagagggccatggatgagtactcttctgagatattcatgggcggaaagaacacaattgtgttgcacaacacttgtgaggattcactgttagctgctcctattatcttggacttggtccttcttgctgagcttagcactcgaatcgagtttaaagctgaaaatgaggtttgccatatgttgcttaaccattcattccaacctctatttcttatctttagttttttaaagactcaaatgagtttatggctttaacagggaaagttccactcattccacccagttgcgaccatcctcagttacctgaccaaggcccctctggtaagtataatgtatctgattcataattgttcagtgaattttttcatcccccctttgattaattntctcatattgtgtgaacaacaattattaaattacagggtccaccgagtacgccagtggttaatgcactgtcaaagcagcgagctatgctgg

SEQ ID NO: 225595 - DNA, 570 bp, Glycine max
  unsure (1)..(570): unsure at all n locations
aagcacaaaatacttcgataactttatattattttacatgcatgcatagcatagatagcctgctctcaaattagtcagcaggaacaaagatagagagatccaacgatctttaaatttcacatttgccataaatatataacagaaaagagggtatgggatatgagttaagttttgatctcattcaactacagtatcccaaaccattactcttaagactttgaacttcacttgtactccaggatcatgttgttctcaggagctaatccaacacaagcccttaggatgttttccagcatagctcgctgctttgacagtgcattaaccactggcgtactcggtggaacctgtaatttaataattgttgttcacacaatttgagaaaattaatcaaaggggggatgaaaaaattcactgaacaattatgaatcagatacattatacttaccagaggggccttggtcaagtaactgaggatggtcgcaactgggtggaatgagtggaactttccctgttaaagccataactcatttgagtctttaaaaacttangataggaaatgacgttggaatg

SEQ ID NO: 225596 - DNA, 194 bp, Glycine max
tgactgtgctgttcagagttgtgatgcttcactgttgctggactccacaagaaggagcttgtctgagaaggaaacagatagaagctttgggttgagaaatttcaggtacattgagaccatcaaagaagctttggaaagagaatgcccttgaagttgtttcatgtgctgatatcctcgttctctctgccagagat

SEQ ID NO: 225597 - DNA, 429 bp, Glycine max
aacagtgtataatgcccatgggccatgatttatttatttagaaagaacaacctagctttatgagtatgaatatcataagcattggcactgccatcataacagcactcacacgcatacataacataattaacaccatgaacatgcccttctacccaactctaagctacttgcatagtactacatatataatatccttattgaaattaaaaaaaaaaacaacagtaacatcggaagattaaaaaacatagcctcttaatcctcccatccccatgaacctgcagtggtctcggttcattgaaccagcccatttaaaggaaaagaccttaattattttttgcataatatattacagattttcttcctcgatcatagacaaggggaggaaaattcaagggtcctgatcatggtgcttgttggcaacattgcact

SEQ ID NO: 225598 - DNA, 409 bp, Glycine max
gttttcactaggtcagaaaaagggatggtgttttacatgtgagtttgaatatctaattcagaaggcgaaagaagggatttctccactttcaccaattgggatattatctaagatacacaagattggaagccatctagggcgtgggagggaagaagatgctcatgaatttttgaggtgcgtggatgatacaatgcaatctatttgcctcaaggaagttggtgtttcaagtcctttggcagaagaaacatctctagttagttacacctttggaggttatcttcgatctaagataaagtgcttaagatgcctggggaaatctgagaggtacgagagaatgatggatcttactgctgaaattgatggggatattgggactttggatgaagcttttggacaatttacagcacct

SEQ ID NO: 225599 - DNA, 448 bp, Glycine max
agacggagctcaccttaggctcttgccggcaccaaaactagatggcacaaaacgtgggttctgcgacacccttaacacttctcataataaaatgttgcgccccacctgcagggaacaagtggcggggtggccgccggtgagggcaagcaggaaaaatgctatgaagatgagttgcaagttggtgaacgtggcggtggatggagctccttatctaagaaaagtggatcttgaaatgtaccagacttatgagcattggatgagggaattagagaccatgttttgtggcttagccattcgtaatcatttgatgaatgagaggaaactgctggagtctggaaatgggattgaatacatgcccacctatgaggccatagatggggaccggatgttggtcgggatgtaccctggaagatgtttggcgaatcatgcaagatgataatacttatga

SEQ ID NO: 225600 - DNA, 540 bp, Glycine max
aagccatttatgacatctgctgacgctctctcgacattgagcgtcccacctacaccaacctcaaccgccttgtttctcaggtgatttcatctttgactgcttccttgaggtttgatggtgccctgaatgtggatgtgactgaattccagaccaacttggtcccataccctagaatccatttcatgctttcctcctatgcaccagttatctctgctgagaaggcctaccatgaacagctctcagtggcagaaattaccaacagtgcttttgagccatcgtccatgatggccaagtgtgatcctcgtcacggaaagtacatggcgtgttgcctgatgtaccgtggtgatgttgtgcccaaagatgtaaacgctggctgtgccaccatcaagaccaagaggaccattcagtttgtggattggggccctactggtttcaagtgtggtattaactaccagccacctaccgttgttcctggaggcgaccttgccaaggtgcagagggcagtttgcatgatttcaaactccaccagtgtggctgaag

SEQ ID NO: 225601 - DNA, 488 bp, Glycine max
gtgccccacgtctgcttgcagcaatagccaatgatgatattttacctattttgaactactttaaagttggagatggcggtgaaccacatgttgctaccttttttactgctttcttatgtattgggtgtgtcgttattgggaatctggatcttatcactccaactgtaactatgttttttgttctatgttacactggtgtgaacttatcctgcttccttctggatcttctagatgcccctagttggcgtcctcggaggaaattgtaccattggagtgtgtcccttgtgggagcattactttggatagtgatcatgttcctaatctcttggtcattcaccgtggtgtctttgctccttgcaagcctcatatatatgtgcgtgagcattaaaggaaaggctggtgactggggagatggtttcaaaagtgcatatttgcaactagcacttcttagccttttgtccttaggagcagccaagtgcaccccaaga

SEQ ID NO: 225602 - DNA, 397 bp, Glycine max
gtctcgtttacacatctctccaacctttcactttcgtttctcagttttattcgaatccctgtctcaatctcctttccaaatggccagcgttgaggttgcacagcaaacaccaacaacagttccagaaaatgaaacaaccgaggtaagctagacccaggaaacaaccccagtcactgaggctcctgcatcagaacaaccagcagctgaggttcctgcaacagaacaaccagccgctgaagctcctgccccagaatcaaccaccgatgcaccaaatgaagaaaccaccgaggcaccagcagagacagtggaaaaaacagctgacagagtagccccatatgaacctaaagaagttgcagttgaaaccgaagatgttgtggccaaggagacagatgaagag

SEQ ID NO: 225603 - DNA, 448 bp, Glycine max
aaattataaagtaaatatcatttattcaaacctaaagaaacacagtgacacaccatcacagactcatgtaaccctgccaataaaccatcacccctaaactccagcaccagcagcttgctcacttcaatacacaactcccagaatttctcatgttaccacgtggcaagcacgctgatgtggagccaaatgttgtgcttacacgtaggtgtaccctgcataatacaaccaaagactgaagcatcatataataagattaatcaagtgaactaaagaaatgaaaggaaaaaagcacaaagagggttttaaacatggcatgcaaaagggtggacctgagccccacaactaggaccatttttaagctcgtttttctaactcagagtgtccataggtctaagctgaagtcttttcaacaggaacctaaactggggttgaactgactcagctggaa

SEQ ID NO: 225604 - DNA, 408 bp, Glycine max
agctcaagctcggagagatcgttactacaattcctaccattgggttcaatgttgggactgtggaatacaagaacattagcttcactgtttgggatgttggtggccagtacaagattcgtgccttgtggaggcactacttgcagaacactcagggtcttatttttggtgtacacagcaatgatcgggacagagttagtgaggccagagatgagttacataggatgttgaatgaggatgaactgagagatgccgtattgcttgtgtttgcaaacaaacaagatctttctaatgctatgaatgctgctgagattactgacaagttgggtctccactctctgagacagggtgactggtacattcagagcacctgtgcaacctctggggagggcctttactaatgggtggact

SEQ ID NO: 225605 - DNA, 448 bp, Glycine max
aggagatgcttgtcccgcactcggatttggctgagaataatcaccaacctatggaggttgtggctcaacctgatgctgccaacactgtggagagtcagcctgtcgaggatccttcgacgtgaaggttcacatggaaaattgaaaactttcctaggatgaatacaaagaagctctattcagaaatatttgttgttggtggttataaatggcgagtactcattttgccaaaagggaacaacgtggactatttgtccatgtatatggatgtgtgcagattcagctaggttgccctatggctggagtagatatgcacagtttagcttggcactcgctaatcaaatgcataataaatactgtgtgagaaaagacacacagcaccaattcaatgcgcgggagaaggattgtggttttacctgtctgatgccacttggcggattgcatgatccta

SEQ ID NO: 225606 - DNA, 586 bp, Glycine max
gttgataatacatacgagtattttatgtatgatggcctgaaacactcttgtgttgagggaaatcatattgttaatgttttctcattctcaaaagtatatggaatgatgggatggcgggttggatatatagcgtacccctctgaagtaaaagacttcgctgaacaacttctcaaagttcaagacaacattcccatctgtgcttcaatattatcacagtatcttgccctgtattcattggaagtggggcctcaatgggttttagaccaggtaaaaactcttgaaaagaacagagaaattgttttagaagctctctcccctcttggagagggttctgtgaaaggaggagaaggtgctatatacctgtgggcaaagctcccagacttagacgctcacgatgattttgatgttgttcgctggctaactaacaagcatggggttgcagttatcccaggaaaagcatgtggtgggcccaagcatcttagaatttcatttggaggctagactgagaatgactgcagagctgccgccgaaagacttgagaaaggcttagaaaattggtagagactgactgcggagtaactgaacc

SEQ ID NO: 225607 - DNA, 522 bp, Glycine max
tgcaattgaatttcaatttccctaggggcttaatatctcccctcacttgtgcctagccttatgtcatagtattatcattcattctcatctttctctcttctctctccacccaaaccctaactcccgaccctgttcccctctcgtatccgtcatgaaaggaggaaagtccaagaccgaatctaagagagccgatcccaaacttgctgcgaataagaagggagccgtcaccaaggctaggaaacccgccggcaaggggaaggcagcgaaagaccctaacaagccaaagaggcctccaagtgctctcttcgttttcatggaggagttcaggaaggtattcaacagagaacatcctgaatacaaagcattgtctgctgtgggcaaagctgctggagcataatggaagaccatgtctgatgctgaaaaagcaccttatgtggctaagtctgagaaaaggaaagtggagtaccagaagaacatgagagcctataaccagaaacaggccggaatgtcctactggtgggg

SEQ ID NO: 225608 - DNA, 475 bp, Glycine max
acagcagaaagcgaatgataagccaattatattgatacaaacttaaccagatttcaacaagaaaactctaaatcaaactaaaagctctacaagagataaacaccccttaactaaacagttggatttagaagtacaaataaagaactcccttctttaaactattcacgttttggaaagacaaccaatttacggagggagcagggaaatattttttggaagcaagaaatatgttcatcaggaaatgaccagaccacctacaacagatgatcaaaatcatcagaacctacataaatgcaattatcagtccattctctaatcgtcatcctcttactcgacactgccttcctcatcatcatcttcatcattcacctcagatacagacttctcagattcttcttcattcccaccagtaggaccttccgcctgtttcttgttataggctctcatgttcttctcgtactacactttccttttt

SEQ ID NO: 225609 - DNA, 501 bp, Glycine max
cttaacccttatttcttcagaaccctcgctcctcgccagaaattgtattgcagaggaaagaccgagaaaaaagaagaaggaattttgatggtaaagtaatattctaatttccaaaattcgattttgttgccgaaggaagaaaagaaggaaatgggaggttcatcggatacgaagctcctgcaagacctgttgttgtacgcagcgagcgcagcgctgagttgcttggtactattcgcgggtttgagacacctggaccctaatcgcgaagcatcgaagaaggctctcgagcacaagaaagagattgcaaagcgtcttggtcgtccccttattcagactaacccttacgaggatgtaatagcctgtgacgttataaatcctgatcacatcaatgtggagttcaactctattgggggactggaaacaatcaagcaagctttgtttgagcttgttattctgcctctaaaaagaccagacttgttatcacatggcaagcttcttgga

SEQ ID NO: 225610 - DNA, 547 bp, Glycine max
tgtttccattccaccattcattgatcgtacaatacttcgtgctagagatccacctggacctgtttttgatcacattgaatacaagcccccaccagccatgaagactcaacaacctactaaaccaggctcagactcggataatgcagcagcagcagcagcggtgtctattttcagactcacacgtgagcagctcaacacactgaaagccaagtctaaagaagatggcaacacaatcagctacagttcttatgagatgttggcgggtcacgtgtggagaagtgtatgcaaagcaagagcacttcctgatgatcaagaaaccaaattgtacattgcaactgatggaaggtcaaggttgcaacctcctcccccaccgggttactttggcaatgtgatattcacaaccacacctatagctggggcaggcgatctcatgtcaaaaccaacatgggatgctgcaagcagaatgcacaatgcattgttacgaatggacaacattatttaaggtcagctcttgactatctagagctgcaacctgaactaaaagctc

SEQ ID NO: 225611 - DNA, 335 bp, Glycine max
gtctttttctacaaaatgaatggggactattaccggtacctcgcagagttcaagtgcggtgatgagagaaaagaggctgttgatcattccatgaaagcgtatcagttggcttccactactgccgaggctgagtgagcatccacacatcccatccgtttgggcctggctttgaacttctctgtcttttattatgaaattttgaactctcctgaaagggcctgtcaccttgctaagcaggcatttggtgaagcaatctgtgagttggatactctgagcgaggagtcttacaaagacagcaccctaattatgcagcttgtgagggacaatctcaccct

SEQ ID NO: 225612 - DNA, 381 bp, Glycine max
cacagcaaaggttggttacggctggctgtgttggaagactcctgtaaacagtgcggggtgcttgcagccatacaatgaagaacctgcctaatccagccaagctgattgcattgcagcatatacactttgggagcaggtcaacgtgacccgcgattgttcagattattcgtggtatatgacatatgtaaacgtaggtgctcatgaatgatttggaatgaatggacaatcttctgttctaactgtatttgtagctgaccatgttgtacatgtgttcattaacggtcaagttgcaagaactgtgtgcgggggattgggaaatcctatcttgtcatgtgaatgacaatgtgaggctaacggctggcaataacagtcttgttttac

SEQ ID NO: 225613 - DNA, 449 bp, Glycine max
gctcaaggacatctttggaatccacacctacacaaaaacccaccaacggggcctgggcctagggatccccctctgcgaccgccacgccaaccccaccattgatcacgccatcgacggcgccgacgaggtcgacccctacctcaacctcgtcaagggccgtggcggctccctcctccgagaaaaaatggtcgaaggcgcatgcgagaagttcatcgtcatcgttgatgagtccaagctcgtgaactatttggggggtagtgggttggccatgcccgttgaggatattaagttctggtggaggttcaccgcggcgaggctgcagaaaccctttgaggaggctgggtgcgttgccaggctcagaaactttgggagaacgaaaaggaagaaccttatgtgacggattatgggaactttattgtgcactttgatttcaagaggagaatcgggca

SEQ ID NO: 225614 - DNA, 495 bp, Glycine max
caactactctccctccctatactcaaacgggttatcatccatacccgggaccacccaaaacttaattggtttcgggcaagggcagcccacatctcttgtgggcctgaaccacctaaccccatctcagatctctcagatccaggcccaaatccagatccagaatcacagcaacacgctgagcttcctagggccgaagcccatccctatgaagcacgtgggcatgcctccgaagcccacgaagctatacagaggggttcgacagaggcactgggggaagtgggtggctgagattagactcccgaagaaccggaccaggctatggctgggaaccttcgacaccgtcgaggaagccgctctggcgtacgacaaggccgcgtacaagctccgaggtgacttcgccaggctcaacttccccaaccttcgacaccagggttcctccgtcggtggtgacttcggggagtataagcctcttcattccgccgttgacgccaagct

SEQ ID NO: 225615 - DNA, 408 bp, Glycine max
acaataataaatccatatttttataattaaaagtagtagattacagcgatgcacttgagaaacatattaagtggactaattctccctggtcaagcaagaaaaaaaccagctatgacccaaggtagagagagattatacacagaatactagtaattaactaagactggctctgcaattgccaaaaactccattgcagtagcagccacctgagaagacactaagacctagactagaccatacataatgaagattaatacccttacataacaacataggacactaagaaaacacggcttcacagagaatcccagtcgatctcataagaagggtacttctggagattaaaattatccgaatcaccttcccactgcggctcgctgacgtcagcgaaagtcagaaccgaaagcg

SEQ ID NO: 225616 - DNA, 520 bp, Glycine max
aacaatattattctcctcattccttcatttttaaacctagctccatctccctccactcaccataacatggcatcagaagcaaatgctgccaacaccaacttctgtgtaaatgttagcaacaatggctacattagtgctaatgaccccttgaactggggtgcggcggcggaggctatggctgggagccacctcgacgaggtcaagcgcatgctagaggagtaccggaggcccgtcgtcaagctcggtggagagaccctgaccatctcgcaggtcgcggcgatcgcggcccacgaccagtgggtgaaggtggagctggcggagtcctccagggccggtgttaaggccagcagtgactgggtgatggagagcatgaacaagggcactgacagctacggcgtcaccaccgggttcggtgctacctcccaccggagaaccaaacagggcggtgccttgcagaaggagctaattaggttttagaatgctggaatatttggcaatggtacagagttcaattgaccct

SEQ ID NO: 225617 - DNA, 514 bp, Glycine max
gcacgcaaagctacggcaaacaaatggaattctattacattatgaattacaagttccttgcatggcatacatcaaggaaaactgggaagttgttgtatgtggattgatttgccacagccttatatagacaaaccaaatgcttaatatcaacacaaacacgtgtacagaaaagaaaccactcttcaagaaaacagaaaataagaaaaactaacatattggaagaggtgccccattccactccccaaggcattccaaaagtggatcaatgatcttcccttggcacaaagcagtgaacactttgtcacactcttcacccggtgagataaccctttcaccagttagcaatgctgtccccaactcctctctcacaaacttgtacaaggggtaagacctgcattccttgatcttgtttggaattgcacattggtcattctcatatgcaactcttgcaccttccacttccttaggcaaaagggtcttcaactcttcctcaaatgttgcaatcttttggaag

SEQ ID NO: 225618 - DNA, 432 bp, Glycine max
ctttttctttaggcctttccgttttaagtacttgtttcattgtctctcgaagcaagagggatgttcatcgagagtttcaaggttgagagtcctaacgtgaagtacacagagactgagattcagtccgtgtgcaactatgaaaccactgaacttgttcacgagaacaagaatggcacttatcaatgggttgtcaagcccaaaactgtcaaatatgaatttaaaaccaacacccatgtacctaaactaggggtaatgcttgtggggtggggtggaaacaatggctcaaccctaccggtggtgttattgctaaccgagagggtattttatgggcaacaaatgaccagattcaccaagccaattactttgggtcgctgacccaagcatctgctattatagctgggtctatcccaagggaggaaatatatgccccat

SEQ ID NO: 225619 - DNA, 395 bp, Glycine max
ggaaaaccgggtattattttattacaaacatgcctaaaaagcccggtttcaaaaaaagcggggggaacaaagattggggggttcaacggacttcaaaattcacatttgccaaaaatttttaccagaaaaaagggggttgggaaatgagttaaggtttgaacacattaaactcccctttcccaaaacggtgcttttaaaactttggacttcacttggaccctaggaacaaggtggtctcaggggcttatccaaaacaagccctcaggggggtttccaacataaatcgggggtttgacaaccggtttaccacggggggacccgggggaaccaaaggggccttgggcagggaactaagggtgggcccaaccggggggaaaggggggaattttccccca

SEQ ID NO: 225620 - DNA, 518 bp, Glycine max
agcctccgcctctctatgctaactcgtatgtcgagcgaattattaggggatcgcgagcttctagacggacaacagtcctttgacgatttaaccccaaatttttgctctgcaattgcaatatgcagatgatttcggggtttcttttcaacggaagcgccgtggtggctatggccgacatgaactgcttcgccaatgccagtgaccgaaagctcggtgttcagctccaaactatagccacggattttcaacgcatttccaagattcacgatcagctcttcgttgctctctctggtctcgtcacccgactgctaaacattgtatcaatcgccttagattccggcacaaactgctccagcctgcgtgaagagagggatatgaaaccagagacctttgcctgttcagtctttgttctgctctatgagaaatagtttgagtcatatttttgccagcccgtaattgctggattaggggatgaagaccaaccattcatttgcccaatggattgtattggcccaaag

SEQ ID NO: 225621 - DNA, 532 bp, Glycine max
  unsure (1)..(532): unsure at all n locations
cagaagctggttgacatgttctcaaagttgaatcctttggcgaaggagtttttcccttcatcatattctgccaatcatgataatcgctttcagggctttaatcagctctcaccaacccactttctggtcagcactaagccctctgctgatgagaatttcccgaacaatcgaaggagaagaaatagttttaaccaaggaaggagaaaggtgagtggaagatcactaaaggctcagagagaagatagcattagaagaacagtatatgtttctgagattgatcagcatgttactgaggagcggcttgctgctttattcagcagctgtggacaagtaattgattgccgaatttgtggtgatccacattctgttctccgatttgcttttgttgagtttgcagatgagtatggtgcaaggaccgctctaaatcttggtggtactgtgcttggatactatccagtcagggttcttccttcaaaaactgccattcttccagtgaatcctacattcctncctaggtcagatgatgagcgtg

SEQ ID NO: 225622 - DNA, 534 bp, Glycine max
  unsure (1)..(534): unsure at all n locations
aacaaaataaactgaaactagaccatttcaatgtagatacggtataaatacttcacaatcaaagactggatgctaggaagtttaactagtgcatgatagttataagctctggtaacaaaaaagtaactgctgttgacagaaaaaggatggaaatactgaaacaaacaaagggaagtttcaccaccctttctacacaagtctcaactggaaagttgaagcaaatatccactcacaaatctttcacgaagacgatcagttaatgagacgccggacgagtgacccttggcctcaccggagtctttgaaggactcacccttattggctgggtccccaagagcatcccactacagtttagtgcaataatagcactttcagccattgcaaattccacaaaagcaattcgagttgaatgcacgtggtcccccaagagcctcaggcgcataacctcgccacaagctgattcaaaaaaattcttcacttcagcttgagaaacctttntatcaatatttggacaatagacagtccgggcacaca

SEQ ID NO: 225623 - DNA, 434 bp, Glycine max
accctacttattctccataccttaacgaagaggttaaagagacggcaacactttgctgtccgccttgaccgagcagagcttcgtcttggccctcgattttgccctaaagtactctcagtcacaacagacaccgtcgtcgtcgtcgtcgtcatcaatggcaccgaagcagaccaaggctgagaagaagatcgcttacgatgcgaagctgtgcgacctaatggaggagtacggccagatcctcgttgtgaactccgataacgtgggatcgaaccagctccagaacattcgcaagggtctccgtggcgactccgtcgtcctcatggggaagaacaccatgatgaagcgctcagtcaggatgcacgctgagaaaaccggaaacaacgcctatctcaaccttatcccgctccttgttggcaatgtgggattgattttca

SEQ ID NO: 225624 - DNA, 461 bp, Glycine max
aataccacaagagacagaaacgttgaagctttaattaactatggaaattaaaagtagttgcaatgtaacatgaatacactaaaataacacctgaaatgaaaggcaaacacaacttcaattctaaccaaataaactcaacaaaagcattacataaattagtcaaacagactgaaacccatgtcatcatcagattcttcagctggttcttccttcttttcctcttccttggctgcagcaggagcaccagactcagcagcaggagcagcaacagcagcgacagcaaatttacttggatccttcagatactccttgaccttgtctgcctcagggaaagaataatctgtctcaaccgcaacagcaagaacattcttgtaggcattgacaaacatgtgtggtgcagcagcaagtgttgggtatgagatagctaatgaaagtgaagttaccattgagacaccagcagc

SEQ ID NO: 225625 - DNA, 440 bp, Glycine max
ctcgttcttcttttccttatggcaatcttctccgccatgaccactgcgtcaacctgggcgatcgacaccttcatcttcggcggctgctcccaggccaagttcacgccgggttccgcctacgaaaacaccgtcaactccctcctaacctcgctggtcaactctgcggccttcgccaactacaacaacttcaccgttccagcctcttccgacaccgtctacggcctcttccagtgccgtggcgacctccccaacgaccagtgctcgcgctgcgtctcgcgtgcggtcacccagctcggcaccctctgctttgcctcctgcggcggtgccttgcagctcgacggctggttcgtcaagtacgacaacaccaccttcattggggttgaggacaagaccttggtcagcatgaaatgtgggccgtccgttgggttgaccttcgatgc

SEQ ID NO: 225626 - DNA, 538 bp, Glycine max
gtccctccagatttcattgctgaggcttttggcattaaacgcgcgattcctgcatacttggatcctgcttttacaattaaggatttcgccactggggtttgctttgcctctgctggaactggatatgataatgctacttctgctgtactaaatgtgataccactatggaaggaattagagtattacaaggagtatcaagccaaattgagagcccatgttggtgtagaaaaagccaacgagatcataagcgaagcgttgtacttgatgagcttgggaaccaacgatttcctcgaaaactattacgtgttcccaacccgaagacttcacttcaccgtgtcacaatatgaggactttctattgcgtattgcggagaatttcgttagggaattgtacgcacttggagttaggaaattatccataactggtcttattcccgtaggatgtctcccattagagagggccacgaacatctttggcgaccatggttgcaacgaggaataccataacgtggctatgagcttcattaagaagttggaga

SEQ ID NO: 225627 - DNA, 525 bp, Glycine max
aaataaaagatcaaaggttgaatttgatccttaaatttatatcaagtgacatgtttttcaaaatttatttccatatataattacagttcaatagaaaatgtaaagataaattcatttaaaaaaatgacaacccgacattaaatcttgctatatgtatattttgatgttgccctatgcaagactatgtgatcttttaaatggaaaataatggatcatcatcatctaaaggttgctaaaagctttggaatcaaataatttgagacaatgcggtttgtcttctccgtaggatgaaaggcatcccaaaacacgtacttttcggcgtctgtgcatgtaagtggattcttgtcactgcacaagtagctcatttcaaatgttcctgtcgaacaacacgccttctctacaacctcaaatccatatgtggaaggttttgtaatgatatcactgaagatggaatatgcatttgccgacaaagctttcaattgtggaaggtccctattaagcttcgttatcacattctccaacttc

SEQ ID NO: 225628 - DNA, 524 bp, Glycine max
  unsure (1)..(524): unsure at all n locations
catcaaatcgctgaaatgattgtacttagaaatgaatcttacctcattcaagctggggttcgaactatactagacataggttgtggctatggtagctttggagcacatctcttcgacagtcagcttttgactatgtgcattgcaaactatgagccttctggcagtcaagttcagctcactctggagaggggtcttcctgctatgattgcttctttcacttcaaagcagttgccatatccatctctttcctttgatatgttacattgtgcaagatgtggcattgattgggaccagaaagatggccttctcctgattgaagccgatagactcttaaaaccgggtggatactntgtttggacatcaccactcacaaatgctcgtaacaaagagaatcagaaaaggtggaagtttatacaggattttacattaacactntgctgggagcttttgtcacagcaagatgaaactgtcgtatggaagaaaactagtaaaaaaagttgctatgcatcaagatagtctggttc

SEQ ID NO: 225629 - DNA, 539 bp, Glycine max
aatctatataaatataaaaatattatatataaggtacaaatagtaaatcgaggtacccattttatgataaactttccttccatttttgttcctctagtaggcctagtatttccggcaattgcaatggcttctttatttctttatgttcaaaaaaacaagattttttagatacagaaaacaaagtaaaattctggggttttttattccccaattataatactaaattcaaaaaaaggagagtaatgagtataatctttcgctcagacgatgtactgatatattctatggcggaggttcgaagaacaagcaatttattttgggccgttttcactttgttaggttcattggggttattgttcgttgcaatttccagttatcttggtatggatttgttctttatttctgagaaaattagtgatttttcttttaattccgactttatttattttccatttattccacacggggccacgatggctttttatggaatcgcgggtctctttagtagttcttaatcttgggtcgatcattttttggga

SEQ ID NO: 225630 - DNA, 432 bp, Glycine max
tgtgttggcgccggtctggtcggtgtagagggagacagtgcgccaccagtcggagacggagggagagggggaggcgcggtggtggtcgtcggagattgagttgaggaagtccttgatgaggagcttctgggattggggccacttgccgtaccagatgaggtagatgttgatcggagacgatagcacaggtcccatgtggtatttgagcttcacgaactccgaggaaccctcgaaccgcttcgaggaagagagggttcggaggggtgggacctgtgggttgaagtgagtgtttgtgtttagggtttgcacctcttcatttgttgttgttaccctgcaattgcatagaccgattagcagggataggaagaggagcaagttggtgaataatgacaacatggtcgtgacaatttcagctagggactagttctagat

SEQ ID NO: 225631 - DNA, 435 bp, Glycine max
tcgcgatctagaactagtccctagctgaaattgtcacgaccatgttgtcattattcaccaacttgctcctcttcctatccctgctaatcggtctatgcaattgcagggtaacaacaacaaatgaagaggtgcaaaccctaaacacaaacactcacttcaacccacaggtcccacccctccgaaccctctcttcctcgaagcggttcgagggttcctcggagttcgtgaagctcaaataccacatgggacctgtgctatcgtctccgatcaacatctacctcatctggtacggcaagtggccccaatcccagaagctcctcatcaaggacttcctcaactcaatctccgacgaccaccaccgcgcctccccctctccctccgtctccgactggtggcgcactgtctccctctacaccgaccagaccggcgccaaca

SEQ ID NO: 225632 - DNA, 572 bp, Glycine max
  unsure (1)..(572): unsure at all n locations
cttttcttttaggtttccactctctctcacacacacactctgcaataatctctcttctgttcttcagtctctcaactactgcctaaccaaaccttccatttccgcaggcagtttcttaaatttggagtctgatgtctccgccactgctggttactgaagaagacgaaggacagagcaatgcctcgatggtagcatctgcatcttcaccctcctcggagtgtttcaccctaaatgaggctagattgaaagaacgcaattacctgggattgtcagattgctcttcggtggacagttctattgtcccgagtttgtctgatgagaaaaaggagaatctgaatttgaaggctactgagttgaggcttggacttcctggatcccagtcacctgaaagggatccggatcttttctcgatgagctcaacgaaactcgatgagaagccactgttctctttgcttcctacaaaggatggaatctgctcactgtcccaaaaactgtggtctcaggcaacataagaggttttgctgacacaattgacccagagtttcctggcaatgcanggataaacatgatgc

SEQ ID NO: 225633 - DNA, 470 bp, Glycine max
ataatacactgattgcaacatacattcaacttatccaaacaaacaggttcctataaagattacagactccacaattactaatattcaaggtagcttcatagggtattatagtagaaacaaatgtaacacaagcaaaagaccaggaactattctgggacttgtaatcatagacaacatcttgaatagcagttaaccatcaaaacccagcattcagtcatttatatcataatttctctttccacaccctcataatatctccagcaacttcaccttagtaaacaaaacgaagtcaacagttccaataccaactagcacctgctcctggatttttccatggccctgggagctaagccaatagcatcagaacccttcatgattttcagtcgtttgcatgtgtcgatgaacatattccatggtacatcttcaacaagcatccagtcaccatctttatcttcataagtgagtacata

SEQ ID NO: 225634 - DNA, 572 bp, Glycine max
aaagagaagtagtagcagtatttgtaggaagaggatgatcggcgtcggaaagatcaagcagtacagtaacgtcctcgacaagcccctcaccaagggcaagcaagaggttagtttgagcgcattcgcgttcttgttctcggagcttgttcagtacaaccaaacgcaggtcgacaatattggcgagcttgaacgaagactggaggatgctggatatgcggttggggctcgagttcttgagctgctttgccacagagataagggaaacagaagggagacacggctgttgggtattctttcttttgtacacagtacagtatggaaagtattatttggaaaggttgctgattcactggagaaaggaactgaacatgaagatgaatacatgatcagtgaaaaggagctcctcgtaaacaaattcatttctatcccaaaggacatgggaacgtttaactgtggagcatttgttgctggaatagtacggtgcgttttggatggtgctgggttttcagctgttgtaacagctcattttgcgcccatggaaggtcaacaaccgaccgtggacaacaattttg

SEQ ID NO: 225635 - DNA, 445 bp, Glycine max
gaaaatcctaaattactttttcacatgcataggtgtaagttccacttctttctatattggtgtagagcattacaaatatcttaattgaaaattcttggtataaacatcagcctaatcttgcttctctttgtaacacctcttcagcaaattttatcaaaattgttgtccgcggtcgttgttgaccttccatgggcacaaaatgagctgttacaacagctggaaacccagcaccatccaaaacgccccgtactattccagcaacaaatgctccacagttaaacgttcccatgtcctttgggatagaaatgaatttgtttacgaggagctccttttcactgatcatgtattcatcttcatgttcagttcctttctccagtgaatcagcaacctttccaaataatactttccatactgtactgtgtacaaaagaaagaatatcccacag

SEQ ID NO: 225636 - DNA, 558 bp, Glycine max
aatctaaagcatctggatcttttatctaatggtcttacgggaagcatcccaaagcaacgtcttttcagttgcattgtttaactttacagatacgcaacttcagtgtggccctggcttcgagcagccttgcgcttctaaatctgaaaatccagcttcagctcacaaatcaaaattggcaaaaattgtacgttatgcaagttgtggtgcatttgcacttctgtgtcttggggctatctttacgtatcgacaacatcaaaagcataggcgaaaaattgatgtctttgttgatgtttcaggtgaagacgagagaaagatttctttcgggcaattgagaagattttcttggcgtgaacttcaacttgccactaaaaatttcagtgaaggcaatgtaattggtcagggtggctttggaaaagtgtacaaaggagtactctctgataacacaaaagtcgctgtgaaacgcctcattgattatcacaatcctggtggagaggctgcattcgagagagaagttcaactaatacgtgttgcagttcatagaaacctcctacgactaat

SEQ ID NO: 225637 - DNA, 479 bp, Glycine max
ccatcgtacatccagcattatataaacacaggcttttttagttaattatacatttttctttagagaacattaaattacacataagtatagtatatcagtatatgttatattctatgccataccaagcaaccaaatttcaaaattgactctccagctctgcttatcttgctctggaaagctgtatggcttcttgatcaagagtagactcatcattccaaacaaattggtgagtcatgagtgagaattcttgattcctagcctcttcaagttgctgccagtcagcccatctatctgccaagccaactccctgcagcattttcaccacctctgacatggttggacgatcctcgggatagccttgggtgcaaagcaatgcaacctgtagaatcgtctcaacttcctttggatcataactctccaaatttctatcaacaatgtcctgcaaccttttctcctcagcagctttttcacataatcaa

SEQ ID NO: 225638 - DNA, 505 bp, Glycine max
agacagcttgacctcaccctcatcagccttattagcttcttcttgctctctttcccccctctcaaattcttcctggcacttgtttaacaataatctcttgaaagttatcttttcattgtcttgactgagatcaggtaacacagctgccagatgaaaacagaaattggcatacatttcacagaaggtaggttccatcaaggccttctcaaagatttgcgagatgacaccattgagagtgaccacattgtcaatattaactgctctaacctgatcaaaaagcttctcaaaattctgaggagttaacttgtttaatatacccttcaattgcctctgctttgcctgttcctcatctgtcactttacccacctcatatttcttttcagctttgtgcatcatctgtaaaggagtttgaggagtagacggagatggaattaaacccctctgctggaagctattagtgcgctgccacctttctccatcaggggctatttcttgattcctccct

SEQ ID NO: 225639 - DNA, 330 bp, Glycine max
ggctagggttcagaaacgaattagggttcggtgttctgttcgcgatgagagccaagtggaagaagaagcgtatgaggaggttgaagaggaagcgccgaaagatgagacagagatccaagtagtgcgttaaacctagtttgtttctgttgcttttacaattgcttatgttgtcgaatgggacacccagttgttagtggcactggtttctcctttttgatgtttgatacattttgttggattcaagtagtttatgttcgtcttatgttattagctcaaaacaatgttgttactgcttttgctaatcaacatgatctcctatttgcatctctg

SEQ ID NO: 225640 - DNA, 333 bp, Glycine max
cagagatgcaaatgggagatcatgttgattagcaaaagcagtaacaacattgttttgagctaataacataagacgaacataaactacttgaatccaacaaaatgtttcaaacatcaaaagggagaaaccagggccactaacaactgggtgtcccattcgacaacataagcaattgtaaaagcaacagaaacaaactaggtttaacgcactacttggatctctggctaatttttgggggcttccttttaaacctcctaatacgcttttttttccacttggctttaatcgggaacagaacaccgaaccctttttcgtttctgaaccctagccctt

SEQ ID NO: 225641 - DNA, 529 bp, Glycine max
ccctcagtgttccgttacctttgattttcctttctctcttgcaaatttcatatctctgtttctttctcagccaagcatttctccctttttcgtttccaatttccccttctcttaactcacctatttcgcctccttcgtgtccctttctcttcaaattaaggctcggtagggttaggttaggataggttttcggtgaggcgagagaaagagagagagtatgaggttgagggaggaggtagcgtgtaaaaacgacgacgtttgtgagaaagaggaagtggtgatagagaatgacgtaaccgtggcccaaaatcattggtgtcccgtggtgaatgcggcgttttcttcgcccaagagagtggttgtggttggttacgctcttactactaaaaagattaagaagcttgtgcagcctaagcttgaaggtttagctaggaacatgggaatactattcgtggctattgaccataataggcctttttcagatcaggtccttttgatattgtcttgcataaggtatcaggcaaagagt

SEQ ID NO: 225642 - DNA, 515 bp, Glycine max
attggaaccaggaccgagctcttggacgtgaagttcacgccgtttcagccctacagcgaggtgtttgggctccagaggttccgtgagtgcgaactcatccatggaaggtgggccatgctcgccactctcggagctctcactgttgagtggctcactggtgttacatggcatgacgccggaaaggtggagctagtagaagggtcatcataccttgggcaaccacttgcattctcaatcaccacactgatctggatcgaggtactcgtaattggctacatagagttccagaggaatgcagagctcgacccagagaagaggttgtacccaggtggcagttacttcgacccattgggcctggcctcagacccagagaagaaagccacccttcaattggcggagatcaagcacgcccgtcttgccatggtgggcttcttgggctttgcagtccaagcctgcgccaccggcaagggcccgctcaacaactgggccacccacttgagtgacccacttcacac

SEQ ID NO: 225643 - DNA, 488 bp, Glycine max
aacatctagcagaagcatttctgcttagcctctccaatttcacgttacaagttgttcacaagtactactaatccaactaagtgaaaatgttctaattacaaccaaaagccgaagaagaaaagacttttacaatatgctagtaatagtgacgaggcacaagaaagactcttcttcttaagaggaggatgagaaggtgtcaatgatggttgtgtggagtgggtcactcaagtgggtggcccagttgttgagcgggcccttgccggtggcggcggcttggactgcaaagcccaagaagcccaccatggcaagacgggcgtgcttgatctccgccaattgaagggtggctttcttctctgggtctgaggccaggcccaatgggtcgaagtaactgccacctgtgtacaacctcttctctgggtcgagctctgcattcctctggaactctatgtagccaattacgagtacctcgatccagatcagtgtggtga

SEQ ID NO: 225644 - DNA, 310 bp, Glycine max
aattgaaatggtgactgaaaaggtttaggaagagttggcagtgagagatactcctttgtgtacttcttgtcagatgctagttctttggatccagaatcaactaaaacaaaaggcaacgaaggacagagtattcaactatgtgaatcaactgtgagagagcctgccaagtccatctggagagtcagtgataagctgcaatagtctttccaagatgccatacattacgttcacaattggaaataaaccttttgtcctcacaccagagcagaatattctaagaactggagatggcattacagaagtctgcctt

SEQ ID NO: 225645 - DNA, 549 bp, Glycine max
accaaatcatcacacacacatactaagaagcaacaattcttctacaatggatctcctccttctggaaaagaccctcataggtctcttcctcgctgcggtggtcgccatcgccgtctccaccctccgcggccggaaattcaagctcccaccgggcccactccccgtcccaatcttcggcaactggctccaagtcggcgacgacctcaaccaccgcaacctcaccgatttggccaaaaaattcggtgacatcttcctcctccgcatggggcagcgcaacctcgtcgtggtttcttcccctgagctcgccaaagaggttctccacacgcagggcgtggagttcggctcccgcacccgcaacgtcgtcttcgacatcttcaccggaaagggccaagacatggtcttcaccgtctacggcgagcactggcgcaaaatgcgccgcatcatgaccgtccccttcttcaccaacatggttgtgcaacaataccgccatggatgggaatcggaggctgccgccgtcgtccaggacgtcaagaaaaccccgacgccgcc

SEQ ID NO: 225646 - DNA, 460 bp, Glycine max
agagacaaaagtgtaggtttattagaaaaccatctcaaaaccgtgcatcacttcaagttcagagatttacaatacccattagcaggccaaatatatatgacatttttggaacaaccccattttcaagcattgatacaatacagagtaaagaaaagggaaaagaaaaaagaaaaaattaaggggattgatcatatgatcatgatcatgtggtggagtctaaaatgaccttggctttgccacaatggtggaatgcttgagtatgtgcaagctaaattgccctcctttctcactagtgtcaatctgtgactggccagggggaggcaagagctcaaagttttggaccaaacgtcccaaagtgatgccaagaattggcaatgcaagaatgattccagggcagcttcttctgccaacaccaaagggaaggtacctaaagtcattgccattggctttaacaagcgac

SEQ ID NO: 225647 - DNA, 562 bp, Glycine max
ctaacgtggggaaaagttcaactattaatgctctggttggtcaaaaacgcactggtgtgcacctctaccccagggaaaacaaagcactttcagacattaattatctctgatgagctgaccctttgtgattgtcctggattagtttttccatccttctcaagctcaagatatgagatgattgcttgtggggtgttacctattgataggatgactgaacaaagggaatctgtccaagttgttgctgatagagtcccgagacatgtcattgaggagatttataagataaggcttcctaaacctaagtcatatgagtcccaatcgcgcccccctctagcatctgaacttttgagagcatactgtacttctcgtgggtatgttgcctctagtggactccctgatgaaaccagggctgcccgtcagatgttgaaagattacattgatgggaagctgcctcactatcaaatgcctcccggagcgtcagatgaggaacatgctttggaagacctgctggacatgactcggttgacttggatgcatcagattcatctgctattgaagattc

SEQ ID NO: 225648 - DNA, 542 bp, Glycine max
tgcaaaatctttcccgatttttatatctggctatctgatttgatttgattttgaggaattagggttcgtggtttgatttgattctgtgattcgcttgttatatgtaaaatattcccggttcctaattttagggtctgcgatttattttcttttatcacttttgaggaatcagggatcgtggtctgacttattgtgcattatttagttgtatgctgcaaaatctttccttattttttaattagggtttacggtttgcgatttgtcatttttgggaattatggttctgtggtttattgattatgcaattcgggtttgctttctttccggtttttaatcagagttcctgactttgatgtttcttttttgtgattgaacagatgcagatattcgtaaaaactttgaccggcaagaccatcacccttgaggtggaatcctccgacaccattgacaacgtaaaagctaagattcacgacaaggaagggatcccacctgaccagcagagacttatctttgcgggtgaacaacttgaggatggtcgcacc

SEQ ID NO: 225649 - DNA, 487 bp, Glycine max
aactatgatacgatattgatatttaattcttttggcgaaacgagctcaatacatcatattaaaacataaaaagcagcacctaaaccagaacagcaaacaagttcaagggagaaattgaacataacagacatgacatacaagaacacttgaaaaaagacacgcttaaaacaagaacacttgaaaaaaaacacgcttaaaaaccaccgcgaaggcgaaggacgagatgcaaggtggattccttctgaatattgtaatctgccaaggtacgaccatcttccagttgcttcccagcaaaaataagcctctgctgatcaggtggaatgccctccttggcctgaatctttgccttcacattatcaatggtatcagaactttcaacctccaaagttatggtttttccagtcaaagtcttaacaaagatttgcatgccaccacgaagctcgaacaccaagtgcagggtagattccttctggatgttatagtcagc

SEQ ID NO: 225650 - DNA, 515 bp, Glycine max
gaaactttctttcaaatttgcattaggttattctttgcaccaagctttccattctcatgccctattccagctgccatcgttgctgagtgctttggctttggaagaccttggatttttatattaagcttacttggacttacaccacttgctgaacgtgtgagcttcattacagaacaagttgccttttacactggtcccacagttggaggacttctgaatgctacatgtgggaatgttactgagctcataatagcaatatttgcccttagcagtaacaaaattgccgtggtcaagtattctctgttgggttctattctttcaaaccttcttctggttcttgggacctctctattatgtggtggcattgcaaacgttggagtggaacaaaaatatgatagaagacaagcagatgtgaactcacttatgctgttgatgggattgttgtgctacttgctttcaatgctgttcaaatacagtggtgccctagctgctctcactgtagaccctcactacac

SEQ ID NO: 225651 - DNA, 447 bp, Glycine max
aaaattcttcattgcaagacctaatggaattggccaattctcaagaggaatccacaatctctgaacagaccccaaatggggacactggggtgaagccttccccttatgtgaattctaggaaaagaaaaggtccatccaaaggaaaagccaaagaaacttcagcctctattaacccccctatggctgctgaagctagtgaagactggaatgcgaaacgcagcaagcctaatgccggtgaggggaatgaaaatggccaagttaaggcagaggaagagtccaaagggggtaatagtaatgcaaatgatgagaaacagaacaagagtaactcaaaacctcctgaacctccaaaggattacattcatgttagagcaagaagaggtcaagccactgatagtcatagtcttgcagaaagagttccgagggagaaaatcagtgaaagaatgaagc

SEQ ID NO: 225652 - DNA, 496 bp, Glycine max
gggtcacctctacatcactgttatggtggttgttatccaaatcttcatggcaagggagctgttcaatctactcaggagagctcatgaagataggcagctgccaggatttaggctattaaattggcattttttcttcactgcaatgttatttgtttatggacgaattctgagtcaatgcctggttaacacagtaacttcagacatggttttatattggctagtgagcaatcttataaagtatcacatggttatctgctactccctgtacattgcaggatttatgtggttcattctcacgttgaagaagaagatgtacaagtaccaatttggccagtatgcttggacacacatgattctaattgttgtatttggccagtcctccttcaccgtggcaagcatttctgaagggattttctggtttcttctcccagcaacacttattgtcataatgatattgctgcttatatctttggtttcttctttggaagaacccctt

SEQ ID NO: 225653 - DNA, 552 bp, Glycine max
cctcaagcctttgaacatcgttttgcagccatggtaacaggcatagcatgctacactggcgggcctttcctgcctagtgtttcttccaagcactctccaccctccatctctccatcttttggcttgaggagtctgaaatcgagctctttatttggagaatctctaagagtggcatccaaatcaacactaaaggtttcaaagacaaagaatacttcactcgtgaccagatgtgaaattggtgacagtctggaagaattcctcacaaaagcaacaccagataaggggttgatcaggttgttggtgtccatgggagaagcattaagaacaatttccttcaaagtgaagacggcttcttgtggtggaacacaatgtgttaatacttttggggacgagcagcttgcagtggatttgctagctaatcagcttctttttgaggccttagattactctcatttctgcaagtatgcttgctctgaagaaaatcctgagctcctggacatgcgaggtccagttgaaggtggatttagggccgcatatgatccccttgatggc

SEQ ID NO: 225654 - DNA, 512 bp, Glycine max
agtgattaacagaaatgtgactaaattgcaggtacttgtctgaagatagcatatatctttttctaaaagcagataaaaatagacaatgaattgcaggtttaacagattaagcagctgctccaacagctacaccacccttgagcctggatttaccatacagggtttcttcaaaccggattatctcattcttggacccataagcaacttgagttctgtcatcaatgttactgatgactttgtctagcacagactgatgaccatcactgctgtaacctccagctttttcaatcaagaaccccaaaggagctacctcaaacaacagtctcagtttggctttggctgatggtgatgacacgttggtgaagattcctttttcttttacaataatctggttgacgtctggcaccattcctccagtgtatctcaatgtgtacttttcattgacatagtaatcgatcaacttagcataatcggggttgtcagatgtggctctcaaattcctggggagaaca

SEQ ID NO: 225655 - DNA, 602 bp, Glycine max
  unsure (1)..(602): unsure at all n locations
gttgtgaagtccttcttacatattatagacattctcaagccatgatttgtagactttgtcaccatctacttcactttcttcttatgtttgctttttaccttcttcgttccttatgttcatagcaataaccagcttgataccaatttctatgatggatcatgccccaatttggccacgattgttagatatggtgtttggtcagccattaaaaatgacaacagaatggctgcgtccctccttcggttgcactttcacgattgcatagtaaatggttgtgatgcttctgtgcttcttgatgataccccatatttcacgggcgaaaagaatgcttctcctaatcgcaattcacttcgggggatggaagtgattgataatataaaagaacaagttgaaaggcaatgtccatcaacagtttcttgcgctgatatcttatccttagcagttagggaagctattgatctggttggaggaccttcttggcctgttgcattaggccgaagagatgcaacataagccaatcggatggaagctaatcaacatattccttcaccgttcgagcctctagantacatcatngcaaagttactttaaagggtcttaac

SEQ ID NO: 225656 - DNA, 476 bp, Glycine max
aaaattataaatagtgatgtcatcaaggtttcatatttcagcagaatgatcttgacataaaagttaacatggctaatctgaatattcctgtggtaacgccaacacctacaatgatgatggacttgacataatatacagaaggatagcatttatgctccaagtgacttacattggcttcctcaattacattgttgaggttttgctaagaagttgaaaatacaagcacttaatagtttacagagccacatttccttctaatttgcccttgtattcctgtaagtactccaacattactaagcttcaccatggatgcagcaaaatcattatagaaggaatattggtcggtgctgtaaaaataagccatagaagaagtccttcgatccgaaagtagtgccatgtcagattctagaagccctttgttggataagagatttctataatactcattgtcgaaggtcaaagtagtattagaatca

SEQ ID NO: 225657 - DNA, 382 bp, Glycine max
ccaacacccgtttggggagctgggacaaatttgaggattcatacagagtaatggtgttttctaatggtgataaatgctggaatggtcctgataggagtttgaaggtcaagctaagatgtgggttgaaaaacgagattactgatgtagatgaaccaagccgttgcgaatatgtagcagtattatctaccccagccctttgtcaagaggaaaggctgaaggagttacaacacaagctagacttgttgaattcggaaataccatcaaaccatgatgagttgtgaacaaccgggatggagtttaacaggtagtatgatggttataaagcaactgaagaagtggtgccctaagttttgtatgctagagcttacacaaatataatatt

SEQ ID NO: 225658 - DNA, 507 bp, Glycine max
ctcaacatgttcctcttctccatcattggcggcgttgtcgctgactacttgatcaccaggagaatattatctgtcaccaaaaccaggaaattcttgaacaccttaggattcttggttgcttctcttgccttggtggtgattcccagtttcagaacttctggtggtgctgtcttctgttcttctgtggctcttggtttcttggcacttggcagagctggctttgcagtgaaccacatggatgttgctcctagatacgctggaatagtgatgggtgtttctaatactgccggtacgttagctggtattgttggtgttgacctgactgggaagcttcttgaagctgctaaagctgctaattctgatctttcaagtcctgaaagctggagaatagtgtttttcattcctggttttctatgcgtctctagttcttttgtatttctactattttcaactggggagagaatttttgattgatgtagccttgtcattttcatggctcgtgagctg

SEQ ID NO: 225659 - DNA, 393 bp, Glycine max
gggaaaaaaatattaaccccaaaaattcatatccagttttgacaacatgacctttcctatccaagaatggttttataaggggatggaataaaaattaaatccccagaataacaacaggttacgagccctgaaaatgacaagggttcctcaatcaaaaattttttccccagttgaaaataggtgaaattccaaagaactaaaaacgcattgaaaacccggaatgaaaaacacttttttccagcttttaggacttgaaagatcagaattagcagccttagcagctttaaaaagcttcccagtcagggcaacaccaacaattccagcttacgtaccggcagtttttgaaacacccattactattccagcgtttttaggggcaacatccatgggggt

SEQ ID NO: 225660 - DNA, 605 bp, Glycine max
gtcgagtgtagctgatattgaatttaacactgtggatggttttcaaggtagagaggtggatataatactactttctactgtaagagcagctcattcaggcattactgcttctgaaataaactcaaactctattggatttgttgctgatgtaagacgaatgaatgttgccttgacaagggccaggttatcactttggattttgggtaactctagaactttacagactaaccagaactgggctgctcttgtgaaggatgctaaagaaagaaacttgatcatgaaggctaagatgccataccattcaatgttcaaaacagataaaaataagtcttatgctgaaaattctgataatcatgcaagacgattgaagcacaagaaggttaaggatactggtcagagtgtaacaaaaattttggttcacggcaaggatattgttgagaggaaaacgaaatgtgttgcctctgaagatagggacaggaagggtaatgtggatgagaatacttcttcagctctgagaaaatatactccatgtaaagaaaggaaatctgaagatgagcatatttccattacgaaggatatgggatatgacgttgaaaatatgaaag

SEQ ID NO: 225661 - DNA, 580 bp, Glycine max
ctgtttctttgttctctccttctcttacagagcacacgccgcttgcaaaaccgattcttgacgctactcacgacttttgacagaagatggcttcaagattctggactcagggtggaagtgattccgaggaggaggagagtgattatggtgaggaagatgaacactcggcgggtgaacaagctccgaatcaagacgtgacaagcaagtactttgtggacaatgcaagtgacagtgatgattccgatggccaaaagcgcgttgtgaggtcggcgaaagataagcgattcgaggagatggtatccactgttgaccagatgaagaatgccatcaagatcaatgactgggtgagtttgcaagagagctttgacaagattaacaaacagcttgagaaggtcatgcgtgtcaccgagtctgagaaggttccgaatctgtacatcaaggcgcttgtgatgctggacgatttcttggttcaggctctggctaataaggatgccaagaagaagatgagtagtagcaatgccaaggccttgaactccatgaagcagaagttgacagtgattggtcaaatgacacagtgaaa

SEQ ID NO: 225662 - DNA, 492 bp, Glycine max
cttctcccctttcttctcctcctttttctcttcctttttttcttcctttttctcctctttcttttcttctttcttctcttccttggcaggtccaactgatattatatccacttttcctactttcttcagcttcttcactattttcactgtgtccatttgaccaatcactgtcaacttctgcttcatggagttcaaggccttggcattgctactactcatcttcttcttggcatccttattagccaaagcctgaaccaagaaatcgtccagcatcacaagcgccttgatgtacagattcggaaccttctcagactcggtgacacgcatgaccttctcaagctgtttgttaatcttgtcaaagctctcttgcaaactcacccagtcattgatcttgatggcattcttcatctggtcaacagtggataccatctcctcgaatcgcttatctttcgccgacctcacaaacgcgctttggccatcggaatcatcact

SEQ ID NO: 225663 - DNA, 518 bp, Glycine max
ctcgagccgaatcggctcgagctttcttcttcttctcttaaaagagcctttgctttgtctttaggcctttccgaattaagtacttgtttcattttctctcgaagcaagaaaaatgttcatcgagagtttcaaggttgagagtcctaacgtgaagtacacagagactgagattcagtccgtgtacaactatgaaaccactgaacttgttcacgagaacaagaatggcacttatcagtgggttgtcaagcccaaaactgtcaaatatgaatttaaaaccaacacccatgtccctaaactaggggtaatgcttgtggggtggcgtggaaacaatggctcaaccctcaccggtggtgttattgctaaccgagaaggtatttcatgggcaacaaaggacaagattcaacaagccaattactctgggtcgctgacccaggcatcagctattagagttgggtccctccaggcgaggaaatatatgccccattcagaacctggttcaatggtaaaccctgatgatg

SEQ ID NO: 225664 - DNA, 396 bp, Glycine max
aagcacataagacgtggataacttgatattattttattacatacatgcatagatagcctgctctcaaataagtcggcaggaacaaagatagagagattcaacgatcttcaaatttcacatttgccagaaatatataacagaaaagaggggtatgggatatgagttaagttttgatcacattcaactacactatcccaaaccgttactcttaagactttgaacttcacttgtactctaggatcatgttgttctcaggagctaatccaacacaagccctcacgatgttttccagcatagctcgatgctttgacaacgcattcaccactggtgtacccggtggaaccagaggggccttggtcaggtaactaaggatggtcggaactggctggaatgagt

SEQ ID NO: 225665 - DNA, 487 bp, Glycine max
aaaattctttattgcaagaccttatggaattggccaattctcaagaggaatccacaatctctgaacagaccccaaatggggacactggggtgaagccttccccttatgtgaattctaggaaaagaaaaggtccatccaaaggaaaagccaaagaaacttcagcctctattaacccccctatggctgctgaagctagtgaagactggaatgcgaaacgcagcaagcctaatgccggtgaggggaatgaaaatggccaagttaaggcagaggaagagtccaaagggggtaatagtaatgcacatgatgagaaacagaacatgagtaactcaaaacctcctgaacctccaaaggattacattcatgttagagcaagatgaggtcaagccactgatagtcatagtcttgcagaacgagttcggagggagaaaatcagtgaaagaatgaagcttctgcaagatcttgtcccaggttgcaataaggtcacggg

SEQ ID NO: 225666 - DNA, 539 bp, Glycine max
ctcaaattgtctattcagaatgggtggagctgcagtcctcctctgcaacaagtcttctgatcgcagaagagccaaataccaactgatccatacagttcgtactcacaagggtgcagatgacaaatcatatggttgtgtcttccaagaagaagatgagaagaaaacaattggtgtggcactctcaaaggacttaatggctgttgcaggagaagccctcaagaccaacatcacaacacttggcccattagtccttcccatgtcagagcagcttcttttttttgcaactttggtggctagaaaagtgtttaagatgaaaataaagccatacatccctgactttaagctagcttttgagcacttttgcatccatgctggaggaagagcagtgttggatgagttggagaagaatctagagctctctgattggcacatggagccttcaagaatgacactaaacaggttcggcaatacttctagcagttccttgtggtatgaatcggcctacactgaagctaaaggaaggatccgaagggtgacag

SEQ ID NO: 225667 - DNA, 377 bp, Glycine max
aattggaaatataaaaaagaaaaaaaaaaaaaaaaaaaaaaaaaaagggaaaaaaaagggggcaaaaaggaaaaaaagggaaaacacaacaaaaaaaaaaaaacacaaggaaaaaaaaaaaaaaagaaagggaagaaaacccactaaaaaaaaagagaaaaacctaaaaaaaaaaacgaaaaaccaaaaggtaaaaccaaaaaaccgaggggggaaaaaaaggggaccaggggaggaaactggggaaaagaaaacaggaaacgagaaaaactcacggagggaaggatggtccccaatggaggggaaaaagggccgaagggcccgaaacacggacccgaagcactgggcccaaggccaaaacgccatatgaaaagccc

SEQ ID NO: 225668 - DNA, 498 bp, Glycine max
tttcccatgtagttttcagcctggttcctaggcacagtcatggcaatctatgttttggtgggacaaaagttgaacctctagtaaaaatcaggcacacattcttccctagtaggataagagttgctgaagaatatcaagaaggtttgtctgatgaagatgatgatctctgtcccgttgaatgtgtaagagaattcaccactgatgaagagttcagcaaaattctggacaaggctaaagaaactggatctttggttgtggtggatttctttcgcacctcttgtggaagctgcaagtatatagagcagggttttgcaaaactgtgcaagaaatctggtgatcatgaagctccggtaatcttcctaaagcataatgtaatggatgagtacgatgagcaatccgaggttgctgaccgacttagaatcagggccgtgcctcttttccacttctacaaagatggtgtcctgttggaagcattcccaaccagagacaaagatagga

SEQ ID NO: 225669 - DNA, 579 bp, Glycine max
  unsure (1)..(579): unsure at all n locations
tgttgttcaggtatttgaaggttcatctgggatcgacaataagtttacaactgtgcgatttactggagaggtgttaaaaactcctgtctcactggacatgcttggacgcatatttaatggttctggaaaaccaattgataatggtccaccaattttacctgaggcttacctggatatttctggaagttccatcaatcctagtgagagaacctatcctgaggagatgatacagacaggaatatctacaattgatgtcatgaattctattgctagaggtcaaaagatccctctattctcagcagctggtctcccccataatgaaattgctgcacagatctgtcgtcaggctggcttagtcaagcgactagagaaatctgataatcttcttgagggtggagaagaggacaattttgctattgtgtttgcagctatgggagttaacatggagactgcacangtttttcagcgtgactttgaggagaatggatcaatggagagagtgactcttttccttaatttggcaaatgatcctacaattgagcgtattatcactcctcgaattgtcttactactgctgaa

SEQ ID NO: 225670 - DNA, 591 bp, Glycine max
gaaaaagttagggtttgtaactttgtcttttgcttgcgaatctgaatcgaataatagggaatcaatcatcatgtcgtcggcgaagaagatcacactgaagagttcggacggcgaggctttcgaggtggacgaggcggtggcgctggagtctcagacgataaagcacatgatcgaggacgactgcgccgacagcggcatccctctgccgaacgtgacgagcaagatcctggcgaaggtgatcgagtactgcaagaagcacgtcgaggccgcgaatcccgaagacaaaccctccgaggacgatctcaaagcctgggacgccgatttcgtcaaggtcgaccaggccacgctcttcgatcttatcctggctgcgaactacttgaacatcaagagcctgctggaccttacatgccaaactgtagccgacatgatcaaggggaagactcccgaggaaattcgcaagacctttaacattaagaatgacttcacccctgaggaagaagaggaagttcgtccggacaatcaatgggcatctgaatgatttgttgagctcataaatatgaatcaagatctgccatgggatttatgctatgc

SEQ ID NO: 225671 - DNA, 634 bp, Glycine max
cttctccacttctcaatcctctgtaacttcaaaacatacacctcttctctctgtttctcttcactctctctctccctccctcttcaactaacatggcaattgaaaaccaagacaccgctgtcagagaaatcaagcccaagaacaggagaatcatgggtgctggagggcctgatgatgaggacaataggtggccaccgtggttgaagccactgctgaaagagagcttctttgttcaatgcaagttgcatgctgattctcacaagagcgaatgcaacatgtattgcttggactgtatgaatggccctctctgctctctctgcctcgcccaccacaaagatcaccgtgcaatccagattaggaggtcctcataccatgatgtgatcagggtctctgagattcagaaggtgttggacatcactggtgtccaaacctacattatcaacagcgcaagggtggtgtttttgaacgagaggcctcaaccaaggcctggaaaaggtgtcacaaacactcgtgaagtctgcgagcgtagccttcttgattctttccgcttctgatctcttggttgcaagattgttggaacatctaagaacttccagaagaggaagaagcatcaatggcaatgtcatcagaatct

SEQ ID NO: 225672 - DNA, 541 bp, Glycine max
  unsure (1)..(541): unsure at all n locations
gtgacagtggatgaacacaagataaagaagaagatgaagaagaagaagaagaaaagggttttgtgtgtgtcgaagtggataattccttccttcaattaatctccgatccgaaaccgtatggggattctatacgcactggtaggtcgcggatcggtggtgctggcggagttcagcggcaccaccaccaacgccagcgcaatcgcgcgtcaaattctcgagaaaacccccggcaacaacgacatgcacgtttcttactctcaggatcgctacatcttccacgtcaaacgcaccgatggactcaccgttctctgcatggccgacgataccgccggcaggagaattccttttgcttttctcgaggacattcatcagaagttcgtgcggacttacggacgcgccgttcactccgctcagccttatggaatgaacgaagagttctctaggattttgagtcagcaaatggagtattactncagtgatcctaacgctgataggatcaatcgtctcaaaggtgaaatgtctcangtaccgaatgtcatga

SEQ ID NO: 225673 - DNA, 418 bp, Glycine max
tgcaagtgcaaaaggaaacttggggcgtttcattaatcatagttgtgatcctaattgtgggacagaaaagtggatggtgaatggggaaatctgtattggactgtttgcattgagggatattaagaaggatgaagaattgaccttcgattacaactatgtgagggtttttggtgctgctgccaaaaaatgttattgtggttcacctaactgtcgaggttatataggtggtggtgatccacttaatgctgaactgatagttcaaagtgattcagaagaagaatttacagaacctgtcatgctcaccaaagatggtgaaattgaagattctgtacctacacccgagtattctaataatgttgatacacaatctgctaaacatatgttgaaagacagggatatattggacaattctacaact

SEQ ID NO: 225674 - DNA, 317 bp, Glycine max
tttctctagtcctgttatttcttagcgcgtaaagcatggctttgttggtggagaaaagcacgagtggtcgcgagtacaaggtcaaggacctttcccaggccgacttcggccgcctcgagatcgagctggccgaggttgagatgcccggcctcatggcctgtcggaccgagttcggcccctcccagcccttcaagggggcccgcatcaccggctccctacacatgaccatacagaccgacgttctcattgagaccctgaccgaccttggcgccgaggtccgttggtgctcctgcaacatcttctccacccaggaccac

SEQ ID NO: 225675 - DNA, 394 bp, Glycine max
attacttacttcacaattactaatattcaaggtatctttatatggtattatattagaaacaaatgtaacacaagcaaaagaccaggaactattctgggacttgtaatcatagacaacatatagaatagcagttaaccatcaaaacccagcattcagacatttatatcataaaaactctttccacaccctcataaaatctgcagcaacttcaccttagtaaacaaaacgaagtcaacagttccaataccaactagcacctgctcctggatttttccatggccctgggagctaagccaatagcatcagaacccttcatgattctcagtcccttgcatgtgtcgatgaacatatcccatggtacatcttcaacaagcatccagtcaccatctttatc

SEQ ID NO: 225676 - DNA, 615 bp, Glycine max
tatacactttcaaagactttgtccgaagatgctgcctggaaattcgtaaaagagaacaacattgacatggttactattaacccagcaatggtgataggacctctcttgcaaccagtccttaacacaagtgctgcttcaattttaaacgtaattaatggtgcacaaacatttccaaatgcatcttttggttgggtcaatgtgaaagatgttgcaaatgcccatattctagcatatgagaatgcttcagctaatggaaggtattgtttggtggagagagtggcacactactcagaaattgtgaagattttacgtgatttgtacccgacattactacttccagagaagtgtgcagatgataacccatatgtgccaatatatcatgtatccaaagaaaaggcaaagagcttggggattgaatatactcctttggaagtgagcctcaaggagactgtggatagcttgaaagaaaagaagttaccaacttttaatttgtgatatctcctagaggagacaacggttataatagaaaccttgtgtggttggtaactggcttgtgatgctcatgctttgacaaactactattaataagactaaatcagattggatagtctgaag

SEQ ID NO: 225677 - DNA, 517 bp, Glycine max
ggaaacgcatgtttgaaacttaattgtcaccggtacaaatcagaccaagaatggtttctttcagtacttataccaatcttgatttaagtcttatttaatagtaagtttgttcagaagcatgagcatcacaagccaagtgaccaaccacacaaggtttctattattaacgttttctcctctaggagatatcacaaattaaaagttggtaaacttcttttctttcaagctatccacagtctccttgaggctcacttccaaaggagtatattcaatccccaagctctttgccttttctttggatacctgatatattggcacatatgggttatcatctgcacacttctctggaagtagtaatgtcgggtacaaatcacgtaaaatcttcacaatttctgagtagtgtgccactctctccaccaaacaataccttccattagctgaagcattctcatatgctagaatatgggcatttgcaacatctttcacattgacccaaccaaaagatgcatttggaaat

SEQ ID NO: 225678 - DNA, 489 bp, Glycine max
cacacacacacacacttttgtcaaggcataggattggtgaggtaaacttgaattgaagtgaagaaggagatggctgcaacctcttccttgtgctcatcgaccctccaatcccagatcaatggattcttccttcacaaaacctctctttcccatactccttccctcactttctccaggaggaaaatttcaaccacagtgaaggctacatctcgagtcgacaagttttcaaaaagcgatatcattgtctctccgtccattctttctgcaaacttttcaaaattgggagagcaggtgaaagcagtggaattggctggttgtgattggattcacgttgatgtaatggatggtcgctttgttccaaatattacaattggacctcttgtggttgatgcattgcgccctgtgacagatcttcctttggatgtacacctgatgattgtagagcctgaacacaaggtaccagattttattaaggcaggagctgatata

SEQ ID NO: 225679 - DNA, 508 bp, Glycine max
ctactagtattgagtaattatcagtcagatacatgtgatgattgagccacaagcataacttaattatataatatagttgactttgaaactggcgcataagcaatgtctgccattattttacttgattgtttctcatactggcagtcaattttgcttatattcaaccacccaatcagtaaaacgatatgccaaaatttaatggagaaacctctatggggcaaaaaatacagcttacattggagcgtacggtgaatatggaaccacacaggcatttcacacagcaactacttcaggtcttttgctggttttgattcctcttatagcttcggcataatctttagctccaaaaacagcagagccagcaaccagtgcattggctccagcctcaatcaccttgtatgcatttgctggaccaactgcaccatctacttcaatccatggattcactcccttctccgacacaatcttttcaaatcagaaattttctttacttgactctcaataaaac

SEQ ID NO: 225680 - DNA, 288 bp, Glycine max
ctcgagccgctcgagccggattctttgagggcatgaattaggttgcagtggtggcacctatatataagaatgattgtgcaaactcatcaaatatatattctcttctgatatgaatgatagcatcatcttatctttaatttattgtagcttttgcattgcatatgtcagttaatgtaaaatagaattatgcgtgtcaatttactttggattgttgtcaaacattcaacaaagaagttgtagtttgctgaattggttatgatcgcgcaatggtttttgaaaattagcttc

SEQ ID NO: 225681 - DNA, 288 bp, Glycine max
gaagctaattttcaaaaaccattgcgcgatcataaccaattcagcaaactacaacttctttgttgaatgtttgacaacaatccaaagtaaattgacacgcataattctattttacattaactgacatatgcaatgcaaaagctacaataaattaaagataagatgatgctatcattcatatcagaagagaatatatatttgatgagtttgcacaatcattcttatatataggtgccaccactgcaacctaattcatgccctcaaagcttccggctcgagcggctcgag

SEQ ID NO: 225682 - DNA, 519 bp, Glycine max
ctctgctcgtgcctctagggttatcatatctccatttccatttcctctctctcagtgggcaagaatcttaagctatgggaaagtcttacccaaccgtgagcgctgattaccagaaggccgttgagaaggcgaagaagaagctcagaggcttcatcgctgagaagagatgcgctcctctaatgctccgtttggcatggcactctgctggaacttacgacgtgagctcgaagaccggtggtcccttcggaaccataaagcaccccttcgaactcgctcacggcgctaacaacggtcttgacatcgctgttaggcttttggagccactcaaagcggagtttcctattttgagctacgccgatttctaccagttggctggcgttgttgccgttgaggtcaccggtggacctgaagttcccttgcatcctggaagagaggacaaacctgagccaacaccagagggtcgattgcccgatgccactaaggggtctgaccatctgagagatgtgtttggcaaagcta

SEQ ID NO: 225683 - DNA, 540 bp, Glycine max
aatatcgcaatcgctgaacaatgttatttaacaaaaggatcgaccacaaataaaaacaacccaactccaatcatcatcaccagtccagcaaaatacattcaaaagctatctaaaaatttgaggaacccacagtggcgcattagaaaccatgaccatagaatttatgagagaaatattatgggcaccgtgcctctccaacaatccccaaaacgttgcttaggcttcagcaaacccaagctcagaaagcttttggtgagcctcagcgtaatcagcgaagaaggcatcttcgtccgatgcatatttctcaacaagagggcggaacacagggtcagacaaaagtgccttgtcagaaggtagctgaaggaggccttctttctcaccactcaacaactccttgaagtatgagttgtcgaaaataagaggattagaggtccagggaccctcgaatccagaacgctccttgtgcgcagctccaatagtgtgacccccagacagagcaacgatatctcggcactaagccccatagctttgccaaacaca

SEQ ID NO: 225684 - DNA, 456 bp, Glycine max
ttcattttcagaagcctctttgggaatcaaatccgaagcatgatgcattgtgcgagcattgtctcggctgcgtcctacgcgttcccttttctctctggctccgcttccactactccaactgcgatctcgctcactaagcgcagttggaagccacctgcgagcatggcaaaaggcccagtcagagccaccgtttctatcgagaaagagaccccggaggccaatcgtcccgaaacgtttctcagaggagtggacgaggcccagtcttccacttcggttcgggcccgcttcgagaagatgataagggaggcccaggacaccgtgtgcagtgccctcgaggccgatgatggtggggcccagttcaaggaggacgtttggtccaggcccggtggcggcggtggcattagcagggtccttcaagacggtgccgtttgggagaaggctggggttaatgtctct

SEQ ID NO: 225685 - DNA, 464 bp, Glycine max
cagtcaatagtattatatcaccttcaacagaattaccaatttactagtctgaggtgttgtgcaatactggcattaaagaagctgccttttgttttcttacatgggattgaggagttacttgtagaaagaacaatggttggcagtaggtatactacagacgcagcctagacatttgtaattttctgcattttcacgctttacgcggatgactctagcaaaatacgtgatttacaatccacctagtacaacaagctaacattctgactcatcataacaagcacttgatatacaccgaaaaaagaaacaagctcccttattattaaattaaaaagctgacaaattggggggtcaactgatgaattagatccattccttggggttgatgcatgcgtccaagagtttccattcttcgcttccttcttccggtttatgatcgtattcccaccgagcagtcagtgggagag

SEQ ID NO: 225686 - DNA, 335 bp, Glycine max
tatacactttcaaagactttgttcgatgatgctgcctgtaaatgtgtaaaagagaacaacattgacatggttactattaacccagcaatggtgataggacctctcttgcaaccagtccttaacacatgtgctgcttcaattttaaacgtaattaatggtgcacaaacatttgcaaatgcatctttaggttgggtcaatgtgaaagatggtgcaaatgcccatattctagcatatgagaatgcttcagcttatggaaggtattgtatggtggacagagtggcacactactcagaaattgggaagattctacgtgatgtgtacccgacattactact

SEQ ID NO: 225687 - DNA, 507 bp, Glycine max
ggaaattcatgtttgaaacttaattgtcaccggtacaaatgagaccaagaatggtttctttcagtacttataccaatcttgatttaaggcttatttaatagtaagtttgttcagaagcatgagcatgacaagccaggtgaccaaccacacaaggtttctattattaacgttttctcctataggagatatcacaaattaaaagttggtaaacttcttttctttcaagctatccacagtctccttgaggctcactttcaaaggagtatattcaatccccaagctctttgccttttctttggatacctgatatattggcacatatgggttatcatctgcacacttctgtggaagtagtaatgtcgggtacaaatgacgtaaaagcttcacaatttctgagtagtgtgccactctcttcaccaaacaataccttccattagctgatgcattcttatttgctagaatatgggcatatgcaacatgcttcacattgacccatcgcaaagatgc

SEQ ID NO: 225688 - DNA, 492 bp, Glycine max
aatgaatcgtggtattgcctgtcatcaagtcataccctggaatgaaataagacagataaaccttcgtcttaaattccttggtagttacataatacaattttagatattcattgaaaaaaatgttgacttgaaccttttctgaatgccaggaggattgcacaagtaaaagagaaccaatgtcaaattgctgtagaagatgttatgtacttgctgattttttacaagttttctgagatcagggtccctatggttccaaagctttctagttgtctttataatggcaggctagagatattgccttctaaggactgggaactagagtctattcatagctcggaagttttggatatgataagggaacacataactactgtaactggcttgagagcaaaatctagtgtaactgagtgttgggcaacaacccaagttagacaattcttacttgcccgggtttacgttgccttcatattatatggttactttatgaagtca

SEQ ID NO: 225689 - DNA, 241 bp, Glycine max
atgaaaaacttgagatactctttctcgaaatatggacaaatggaagtttaactcctaaggaagcgctttatgaagcctcccggaatttgattgatttatttattccctttttacacgcagaagaagataactttaatttagaaaacaatcaacacaaagttactttgcccctttttacttttcatgatatattggctaaggaaaaactaatgaaaaaataaaattttataataatcaaaaa

SEQ ID NO: 225690 - DNA, 244 bp, Glycine max
gaaccttcttgctgcagcctattctggaataatatcatcaggtatcacctactatgttcaagggattgtcatgcagaaaaaaggtcctgttttcgtaactgctttcagccctttgatgatgattatcgtagccatcatgggtgctttcatccttgcagaaaaaatatatctcggaggggtcgttggtgctattctcatagtaatgggactttactccgatctatggggcaaacacaaggagaac

SEQ ID NO: 225691 - DNA, 535 bp, Glycine max
aaggacaacattatttgacgacttaaccccaaacaaaggctctgcaattgcaaattcagaggatgtcgatcttcgagtacaacggaagcgccgtggtggctatggtcggcaagaactgcttcgccattgccagcgaccgaaggctcggcgttcagctccaaactatagccacggattttcaacgcatttccaagattcacgacaagctcttcatcgctctctctggcctcgccaccgatgctcaaacattgtatcagcgtcttgttttccggcacaaactgtaccagctgcgtgaagagagggatatgaaaccagagacctttgccagtttagtctctgctctgctctatgagaaaaggtttggtccatatttttgccagcctgtaattgctggattaggggatgaagacaaaccattcatttgcacaatggattgtattggcgcaaaggagcttgcaaaagattttggtgtttctggcactgcatctgagtctctgtatggtgcttgtgaggcaatggttaagcctgacatgga

SEQ ID NO: 225692 - DNA, 429 bp, Glycine max
gtatgccatttttgcacttgaaaaacatttcaataggccacttcaaatggcacaacatgcccaactcaagtatctccttttcactgataatctaaatatagaacaagtgaaaccgccaatatataaatttcagggcccattttatctaaagagccacaataacaaggtaccctttaaaacaaaggagggccaatgtcatgacattcaggtgcaagcttaacagaaatcccccgtggcttatagttcaatccatacttaccttgagaatcctttccttcacttcatttggcgtgacaacatagacatgtgctgcccagccactcaaacaatcacgatctacaaatgatagcagtgcttgggagatggactcaaacaattactctggctccatgtcaggcttaaacattgcctcacaagcaccatacagag

SEQ ID NO: 225693 - DNA, 548 bp, Glycine max
attttaaggcatggagacaaggtagaactgggtaccctttggtggatgctgggatgagggagttgtgggccactggttggctgcatgatcgaatacgtgttgtagtttctagtttctttgtgaaggttctgcagcttgcttggagatggggaatgaagtatttctgggatacccttttggatgccgatcttgatagtgatgctcttggttggcagtacatatgtggtagtctccctgatggtcgtgaaattgaccgaatagataatccacagtttgagggctacaaattcgacccaaatggagaatacgtgcgacgctggcttccagaactgtcaagattacccactgagtggatacatcattcttggaatgcaccatagtcagtgctacatgctgctggaattgagctaggatcgaactattctcttctaattgtgggaatagatgcagcaaaaaacagattactagaagcactatcaaaaatgtggcaacacgaggcagcttctagagctggcatggaaaatggaactgatgaaggacttggagac

SEQ ID NO: 225694 - DNA, 555 bp, Glycine max
aaacaatggagttcccacactcccttcaatggcaatacggcatcccttctcaccttctctttccctacaatttcatccctgaaaaccatgttcactggacagaaacccctgactctcacatattctcagctgacatccctggtgtgaagaaagaggagcttagagtggaggttgaggactcaaagtacctcataatcagaactcaagcagtggataaatccacagaacctgcgaggaagtttgagaggaagtttaggctgccagggagggttgatcttgatggcatctctgcagggtatgaagatggagttttaactattacagttccaagatcacttagtagaggtttctacattgacccttctgatgtgcctgagaatttggaagttcttgcaagagctgcttaattgaatgaatgaatggtccttgttttaattaggaactaccatttactgattgtgattgattcttctaggttctaaggaaattaattaatgaaacattggttatggtgtctttgcgtgatttgggccatgttcttcttatctgagtgat

SEQ ID NO: 225695 - DNA, 553 bp, Glycine max
aaaagttagctaaatatctgcgagttgaagtcttggatccatgttacttctgaaaataatagaacacaattggatcacaatccacaatcattttgtacacaagaatcactcagataagaagaacatggcccaaatcacgcaaagacaccataaccaatgtttcattaattaatttccttagaacctagaagaatcaatcacaatcagtaaatggtagttcctaattaaaacaaggaccattcattcattcaattaagcagctcttgcaagaacttccaaattctcaggcacatcagaagggtcaatgtagaaacctctactaagtgatcttggaactgtaatagttaaaactccatcttcataccctgcagagatgccatcaagatcaacccttcctggcagcctaaacttcctctcaaacttcctcgcaggttctggggatttatccactgcttgagttctgattatgaggtactttgagtgctcaacctgcactctaagctccttttttttacaccagggatgtcagctgagaatatgtgagagtcagggg

SEQ ID NO: 225696 - DNA, 537 bp, Glycine max
attaataacaagctagctattttttcgattttgttgtaagtgaggtgccaatatggtgaagatagctcttggtactttggatgactcttttagcgctgcctctcttaaggcttatttcgcagagttccacgcaactctgattttcgtgttcgctggtgttggatcagccatcgcttacaacgagcttacaaaagatgcagccttggatccaacggggctggtggcagtagctgtggcacatgcatttgcactgtttgtaggtgtctccgtcgccgccaacatctcacgtggccatttgaacccagctgtcacttttggattggccattggaggcaacatcactctcatcactggtttcttatactggattgcccaattgttgggttctatagtcgcatgcctcctgctcaatttgatcaccgctaagagcattccacgccactcgccggctaatggtgtgaacgatttgcaagctgtagtgtttgagattgttatcacatttgggtcggtttacactgtgtatgcaactgcagtaga

SEQ ID NO: 225697 - DNA, 450 bp, Glycine max
gaaaaacaaggggaccttccaacaattcatgtttcaagttcgaattataatttacataatttttgcaagcgggggataatagataaagtagagtttaaaatgcaagaagccaagaggcttatgacatgaaacggggaacagagatgaaacttgaaggaacccccaagggaagttgaagctcaagggtaggtttcaaaggctgggacaggggctttggaaccaatgaagacgtttccataaatcaagccagccaaaccttctccaatcaatgggccaacccagtagatccagtttgcagccaagtttccactgaccacagctgggcccaatgagccagctgggttcattgaaccccccctgaatgggcctgctgctaaaatgttggcacccacaacgaacccaatagcaatgggtgcaatgatacccaatgaccccttttttgggtctact

SEQ ID NO: 225698 - DNA, 574 bp, Glycine max
  unsure (1)..(574): unsure at all n locations
caacaaacactaacaacatacatactacttctcactttcttcggacttgtggcctctgcaactgtcatttggcacctggccgagatatctatatgtataggggggacacggcattttgcagtttggagtgtagggagaagcagatgaagcaggaccagaggaaagagaagtggaaggcggggtctaataaggagcaccaccgtgcatcgccaccgggcgccaccgcgaaggcttcttgtaattgaagggtaatttgaaaggtcattgcacaattataaggtgaaatagtacaatatatttgaggagaaaattaagaaagaaaaaggccaagcaagctaattaactggtgcctcatgtcatgtgcacttaccacaaggctagctatatcatctcatatcttccgccgtccctcttaatttcatctatatatggttcttgatttcacacctacgctacttgttcgttcttattgacataattctgctaggaattaaattgtacaaaattaaggtgtggtacgctgttgctgtatggcttatgtcaattntaatctttcaatctaaaaatcccccct

SEQ ID NO: 225699 - DNA, 600 bp, Glycine max
aaaggaggcaatcgtcatgcatgatttgcgcatgattcatactgacctgaagcctgaaaacatactactagtttcacccgagtatgtcaaagttcctgactacaagagttcatctagatcatcatgttcctatttcaagagagttcccaaatcaagtgctataaaggttattgattttggcagcaccacttatgagcgagaagatcagaactacattgtatcaactcgtcattatagggctcctgaagttatccttggacttggctggagctatccatgtgatatatggagtgtgggatgtatattggttgaattatgcacaggtgaagctttgtttcagactcatgaaaatttagagcatcttgcaatgatggaaagggtacttggttcattaccacagaccatgatgaagagagtcgaccgacatgctgagaagtatgttagaaggggtagattagactggcctgaaggtgcaacctcgagggagagtatcaaagcctgtatgaagcttcctaggcttcagaaaccttgtatgcagcatgtagatcattcagctggcgatctcatacatctcttgcaggggttacttagatatgaccc

SEQ ID NO: 225700 - DNA, 550 bp, Glycine max
  unsure (1)..(550): unsure at all n locations
aaaacgtgaagacccctgacgttcacactttcttgcagcacgtcgttaccttcgggattgtcaagaacgaggactccgatttgtaccggaagcttgttattgcttccgcttggaggaaacagatgccgaagctcgcgctttcgcttggtctcgctcagcaaatgcctgatatgattgaagagttgatcagcaaagggcagcagcttgatgcggttcactttacatatgaagtgggtcttgtggaaaagttccctcctgttcccttgttgaagtcttttctcaaggatgctaagaaagttgcggcttctattttggaagatcctaacaatgcaggccgagctgcgtacctagctgcaaggaaagagcagtctgcactcagggctgtgattaaatgcattgaagaatacaaacttgaggatgagttcccaccagagaatctgaagaagcgacttgaccagttggagaaggtgaagacggtgaagaccgagaaaaggaaaccggttgctgttcctgccaataagagaactcgagcangcaacagcaatggagg

SEQ ID NO: 225701 - DNA, 455 bp, Glycine max
ttgggattttgtctgagcaatctggttggtagaacctttggtcttagagagtcaaggtttatgtctggattagacgatcaaattcctactgccttcgatccttttgctgatgcaaatgctgatgactcgggtgctgggtcaaaggagtatgtgcatattcgcgttcagcagcgaaatggtaggaaaagcctgacaaccgttcagggattgaaaaaagaattcagctataacaagatacttaaagacgttaagaaagagttctgttgcaatggaacagttgttcaggacccagaactaggacaggttattcaacttcaaggtgatcagaggaagaatgtttctactttcctagtacaggctggtatcgtgaagaaggatcatatcatgattcatggtttctgagcgattggagtctcaagtggcaagccttatctgcctgactatgtgttaggcat

SEQ ID NO: 225702 - DNA, 362 bp, Glycine max
ggggggccattgaaccggtttcaaatttggcttcaaagcaaataacccccaatggtctgaaatccaaaatcccacattacatagtaaaaccttagaaccgatcaaaaataccccaatcacatacccaactccgattatctatctattatgcctaacacatagtcaggcaaataagggttgccacttgagactccaatcgctcaaaaaccctgaatcttgatatgaaccctttttacgaaacccacccgtacttggaaaggagaaacatttttcctctggtcaccttgaaggtgaaaaacccggcctaaatctggggcctgaacaactggtccattgcaacagaaccttttcttaacggcttt

SEQ ID NO: 225703 - DNA, 495 bp, Glycine max
aaaacccccaactccaacctctgttcatcgtctaccgcgctttcttttcaaccagaactatgattaagctttttaaagtaaaggaaaagcagagagaacttgcagaaaatgcaagtggcggaccacctgttaagaagcaaagtgctggagagttgcgtcttcacaaagatataagtgagctgaatctaccaaaatcatgtaccatgcaattccccaatggcaaagatgatctgatgaactttgaagtttcaattcgacctgatgatggatattacttaggtggcacatttttgttttcctttcaagtgtctcccatctatccacacgaagcaccaaaggttaagtgtaagacaaaggtctatcatccaaatattgacttggaaggaaatgtttgtctcaacatcttacgagaagattggaaaccctgccttaatataaacactgtcatctatggcttggatcatcttttcacggaaccaaattacgaggatccac

SEQ ID NO: 225704 - DNA, 530 bp, Glycine max
  unsure (1)..(530): unsure at all n locations
gacagctgaattcattttctgcttggtccactttagaataatacgttaacattcaattaaagcacatgttacaataacattccacttgtttggctttttgaagcttggtggtcttaagaacttggcctgtttctccaccaagaaaaataacataactgacgaaagtaaaatccaattttttgataaattttacaaaccacgggccttcatgcattgataacatatttgaacaggatcttgaaggtatcgtgcaaaaggtctaaatacagcgtgggaaaaaggtttgcccgacatacccttcagccattgccctcctcacgttagattcaaacatctttgggttctctctcaacacagcagcggcatcgtgattcagtggatcctcgtaatttggttccgtgaaaagatgatacaagccatagatgacagtgtttatattaaggacaggtttccaatctttctcgtagatgttgagacaaacatttccttccaagtcaatatttggatgaatagacttngtcttacactta

SEQ ID NO: 225705 - DNA, 523 bp, Glycine max
ccgttgtcgagttgagccatgataccatcacccgtgcctcagtcactcatcaccattctgctcttgctcctccccaccacaaccctctcagtagtactatccctccctctcgacccaaagcaagtaaaagccctccaatccctcaacatccccagcccaaaagacccatgctcccaacccacctgcttcctctgcgacacctacacacccttgcgacacctgacctgcctccaactcacgaactgttccacttccatccaccactccctctgctgcacagccctcaaatccctctgcaccctgctcaccctacacctgctcaactgccccatcacaccctcctcccccacccacttccctccccaactcctgtccctcacctccatcaacagcctgccgcacctgtccggcgcctgcctgtgccgcctaaaaaacctgacccacctgaccctgtcctacctgaccatgaaaccctacctgatgctctgccacttcaccggcctgcaaaccctaatcatctgcc

SEQ ID NO: 225706 - DNA, 531 bp, Glycine max
acaaaaccctgaagaaagacactgccattgtttacttttcattgattgagccaaagcgttgtattttctgcgataattttccattgggtggaagaaagtctcaacctttattcgaaagagcaaggatctgagttgagttgagtgatcatgtgtggtggtgcgattatctccgacttcataccggcaggtcccgccagcggggcgcggcgcgtgaccgccgacatcctgtggccgagtttgaggaagcgcttctcgaagccgctgctggacgatgatttcgaggctgggttcagagaattcaaggatgattcggaaatcgaggatgttgatgacgaggacgatgaagacgaggaggagttgaagaagaagccctttgggttctctcgctccagcaacaaggctgcttctaagcctctctctcgtggatcagcaactgtggaatcaaaggggcatgctgagaagtgtgccaagagaaagaggaagaaccagtatcgtggaatcccgcagcgtccatggggaagtgggctgctg

SEQ ID NO: 225707 - DNA, 550 bp, Glycine max
tgttacaagaagcatttggatggtttctctgtcgtttctgtgattattgtagcctatcttatgttcataagggttttacagaacttagttagtttaccgaactggggacggatgtttgcatttgtgattcttatggttctgctagcaacaccttttggaattgctataaaggcccattgggaagagtcacggaagttttcgcaatcctacacaattgagaggggttcttctactaataagggtaccacttactgcagtcattctgcatcagtggatcaagtggagtaccatgaattgcctagtgatgaggggcaggttcatgtgacttcagatgacaaattgccccgtgaagaagataagaatctcttgcaagctatgtgcacggttgatttttggatgctgtttgtgatcatgatatcagggttgggttctgggcttgcaactattaataatatgagccaaataggacaatcccttggatatagcgccattgagattaataatttggtgtcactgtggagtatgtggaactttcttggtcgttttgagg

SEQ ID NO: 225708 - DNA, 498 bp, Glycine max
ctcatcagcaacaacaacaacctccacaccaaaaaaccttctcacgtctccagagcactcatccaatcaaaccacaccacaactcctcaacatgctcttaactctccagaatctttgaagaagttgaaggtgtttgtctacgaccttcctccgaagtacaacacggattggttgacgaacgagaggtgcagcaaacatttgtttgcgtcggaggttgcaattcacagggctttgttgaccagcgaggttcgcacgtttgacccatacgacgctgactttttcttcgtccccgtttacgtgtcttgcaacttcagcaccgtgaatggcttccccgcgattggccacgcgcgctccctcatcgcgtccgcggtaaacctcatctcctcggagtaccccttctggaaccgaagcagaggctccgaccacgtcttcgtcgcgtcgcacgatttcggctcgtgtttccacaccctggaggacgtggcgatggctgatggcgtg

SEQ ID NO: 225709 - DNA, 537 bp, Glycine max
gacaaaatggactcagaaccttacagcagaaggttcctcctgtgaggaaaaataggagaggaccaaggtctcgcagctcgcagtaccggggtgtcaccttctaccgcaggactggtagatgggagtcacatatttgggattgtgggaagcaggtttatttgggtggatttgacactgctcaagctgctgcaagagcatatgatagggctgctataaagtttcgtggagtagatgctgatataaactttagtttgagtgattatgaggaggatttgaagcagatgagaaatttgagtaaggaagagtttgtgctcttacttcgtcgacaaataaatggaatctctaggagaagttcaacatacagaggtgcattagcccttcgcaaagatgctcaaggagaaccacgaatgggaccatttgttggcatgacatgttatcctaagccatccatcaattgtgatgatggaaaagcggaggcaagttttaagccctgttcctattagggagaaataattgtgaattccaacatgacaggca

SEQ ID NO: 225710 - DNA, 542 bp, Glycine max
actccttttagcaagttaacaacacttttgtcttcgttccattatctagttctcaatgctcttcaccctttgcctctgaaagaaatgggtagtcttgaagcggaaagaacaacagtaggattggcagcaagagacccttcagggattctctccccatacacctacaatctaagaaacacaggccctgatgatgtttacattaaagttcactactgtggaatttgccattctgatctccaccagattaaaaatgatcttggcatgtccaactatcccatggtcccaggacatgaagtggttggtgaggtactggaggtgggatcaaacgttagcaggttcagagtgggagagttggtgggagttggactcctcgtaggttgctgcaaaaactgccagccatgccaacaagacattgagaattactgcagcaagaagatctggtcttacaatgatgtttatgtcgatggaaaacccacacagggtggctctgctgaaaccatgatcgttgagcaaaagtttgtggtgaagattccagagggttt

SEQ ID NO: 225711 - DNA, 471 bp, Glycine max
gatatcaaatactatattttaatgaacgtcgtgtaaccaaaacagagaaaacagagcactctttttaataaacaaaacacagcttcttttttagagtgaacaacaaatacagctttagttctcaattaattaataacttttccagactcttcatgatggaaggatggatgttgcgtgtgtcgtgctagtagtatactttctttcttttactgatcgacaagtttgctgcctttgacatccacaacaaacctgtatcttacgtcattcttctccaacctttcaaaggctttgttaatggaatccatggttaccatttcaatcatcgaactcagacccttctctttccagaactccaacatcttctcgggctccttcatgctcccaatgaagcttcccgttattgacttcctccctagcatgaccatggggctaacaaattgaagaggggtgttgatgacccccatcaagatc

SEQ ID NO: 225712 - DNA, 549 bp, Glycine max
ggaacccatactctatcaaccgtagggggaaattttgtcccaggagcgagtgtatttgccgttggcaatggcactgcaaagggtgggtcaccaagagctagggttgcagcttacaaagtgtgttggtctccaactgatcctgcaagttgttatggcgctgatgtgttagctgctattgaccaagccatagatgatggcgttgatatcatcagtctttctgctggtggaagctacgttgtgactccagaaggaatattcacagatgaggtttccattggggcatttcatgcaattgctagaaacagaattttagttgcctctgcagggaatgatggacccacacctggaactgttctcaatgtggctccttgggtcttcacaattgctgctagcacattagacagagactctagcagtaatgtaaccatcaacaataggcaaattacgggagccagtcttttcgtaaatgtgccacccaataaagccttttctctgatccttgcgactgatgcctagcttgctaatgcgacattttgagatgctgaactt

SEQ ID NO: 225713 - DNA, 488 bp, Glycine max
aatgtcataacatgaaatccttgctatatatatatatatagtgaaactcgcttatatctaaacatgcacacatgcatccacacaatacaaaaaaaccaaaccacatgataaccaaggaacaacacagtcatgtcataacatgaaatcctaggtatatatatagagtctaactagcttatatctaaacatgcatccacacaatacaaaaaaaccaaatccattggggaattttcatctgcgcttaactgtaataggactccttactatatgctttccatctgtccaacgcaaatccccgaattgatactttctccgcgtagttacactgcttgcctgcacaataacttggaatttcttcttttccccaattttcgtgaaagtcaaggatcttggcacaacgacaatggtatatccagcaggcgagtggacatttgcagtgtatgtggctggtggtccaacatttgtgactgtgcgagtaatggttacgg

SEQ ID NO: 225714 - DNA, 487 bp, Glycine max
cagaattctctaaaagagatctttttctgctctttgaagaaagaagggtctttgcttgattttggagatgtctctgctctcagatctcatcaaccttaacctctccgataccaccgagaaggtgatcgcagagtacatatggatcggtggatcaggaatggacctgaggagcaaagcaaggactctcccaggaccagttagcgacccttcagagcttcccaagtggaactatgatggttccagcacaggtcaagctcctggcgaagacagtgaagtgattttatacccacaagccattttcagggatccattcagacggggtaacaatatcctggctatctgtgatgcctacactcctgctggagaacctattcccactaacaagaggcacgctgctgccaaagttttcagccatcctgatgttgatgctgaagtgccatggtacggtattgaacaagaattcaccttgctgcagaaagatatccca

SEQ ID NO: 225715 - DNA, 444 bp, Glycine max
actccaatgaacatgacaatttcatatattattattatacttcacaatcagcatttctttgttcaagactgataataaccattaaattattggcattgtaacaatcggaaaacgagggaaaggaatagaagaaaacaatgaacaacccttgccagttagttgcaccaaccaacaaggcaccaaccatagtaccaatcaaaaggtaaaaagagagagagaccaaatcctactaagaaaagcataactggtcctttccatccaaagggagaaaacatgcaggttttgctcatggcttccacagaatggttgtgtctgcaatcatggaagtaaccacgtatgggtccatgttggaagctggccttctgtcctcaaaatatcccttccctgctttctctgtgtctctcccaaccctaacagaagctccacggtttgcaactccccata

SEQ ID NO: 225716 - DNA, 542 bp, Glycine max
ggtgctgaaagtcaccctctctatttgcatggctttaacttctttgctgttggtcaaggttttggtaactttgatccaaataaggaccctgcaaacttcaatcttcttgacccaattgagagaaacacagtgggagtcccatctggtggatgggttgctatcagattcctagcagataatccaggggtatggttcatgcattgtcacttggaagtgcacacaagctggggtcttaagatggcatgggttgtgttggatggaaaactcccaaatcagaagctgtttccaccgtcagctgatcttcccaagtgttaacaaagcctcgaattccttcagtttgtttcaacaatgagcaattgcttctaaccagttgcttcaatttttttattttttatttccgttttcgggtgacaaagaagttgaggcttgaattgagattgaagttggactttttcctttctttggctgagaattttatttatagatggcgtcttggctacaaaatgtaatcaataattcggatgaaaaatctcatgaataaa

SEQ ID NO: 225717 - DNA, 469 bp, Glycine max
attcatgaagatttttcattcaaattaattgattacaattttgtagacaaagacgccttctataaataaaattctcagccaaagaaaggaaaaagtccaacctcaatctcaattcaagcctcaacttctttttcacccgaaaacggaaataaaaaataaaaaaattgaagcaactggttagaagcaattgctcattgttgaaacaaactgaaggaattcgaggctttgttaacacttgggaagatcagctggcggtggaaacagcttctgatttgggagttttccatccaacacaacccatgccatcttaagaccccagcttgtgtgcacttccaagtgacaatgcatgaaccatacccctggattatctgctaggaatctgatagcaacccatccaccagatgggactcccactgtgtttctctcaattgggtcaagaagattgaagtttgcagggtccttatttgga

SEQ ID NO: 225718 - DNA, 446 bp, Glycine max
gtttgttgttgtaactcgttcttcttcttttgttgttctgtgtttgtgtttgttttttctctcacctgaaaatgtcttgctgcggtggtaactgtggttgcggaagctcctgcaagtgcggcaacggctgcggaggctgcaagatgtacccagacttgagctacactgagtcaaccaccaccgagaccttggtcatgggagtggcacctgttaaggctcaatttgagggtgctgaaatgggtgtgcccgctgagaacgatggctgcaaatgtggaccaaactgctcctgcaaccgctgcacttgcaagtgaggtgttgggagagcaagctataagccgagatagcccttaattaggaataatgaataactattaatgtgaagctaaaaacttatgtatgatgtatgtgatggttttcgtgcactctggtgtattgtgttgaacaaa

SEQ ID NO: 225719 - DNA, 466 bp, Glycine max
ccagtaatagtatttaatattataagcagagattcataattcagattagccgaactttatacagaagcgaccaattaccaaacattaaaaaaaaaaaaaagaagcaaccatgagcttaacacacccatcacaggtccaaaacacttgaacttgctgaaaggcaagacatgaccactttattctaaggatgtttgtttaacacaaaacaccagagggcacgaaaaccatcacagacataatacataagtttttagctacacattaatagttaatcattattcctaattaagggctatctctgcttgaagcttgctttcccaacacctaacttgcaagtgcaggggttgcaggagcagtttggtccacatttgcagccatggttcttagcgggcacacccatttgagcaccctcaaattgggccttaacaggggccactcccatgaccaaggtctcggtggtggttga

SEQ ID NO: 225720 - DNA, 210 bp, Glycine max
gtcttctgtttcgcctcttattttaccccttcaggatgtgatcaggatggcatggaagggctactgcgcctgtgagacaggctgcgactggtgtctctgaacctgtaatggcggtgacttttgtaccaactggactgccaaccgaagttcaggctctcgaaatgcaccatgatgcactgacagtggctcttaccggtgatcatgttggat

SEQ ID NO: 225721 - DNA, 399 bp, Glycine max
cctcagttttaacctgaggagttaactgccatcatgaatgactgtaatgagcctggatcacttgctccaactggattgtatctcggtggcaccaaatatatggtcatccagggtgaacccggtgctgtcattcgagggaagaagggtcctggtggtgttactgagaagaagaccggtgcggccttgatcattggcatttatgatgaaccaatgactccaggtcaatgcaacatggtagctgaaaggcttggtgattatctcattgaacagggactctaatctttgcttaatgtcttgttatcatgcatatctcattggctcctgtacaagattttgcatcgacctggactggaatgcttcgattgcagaggaatcatcttgtgagtatgaaaagtcacg

SEQ ID NO: 225722 - DNA, 512 bp, Glycine max
gataaatatgccaaccattataccatagcattaaaaatttaaaaccagtgtaatgtatacaggtaccccactaaaaaagtacaaagatagagattatagtcatcatttctcaagcatcaaacactttcttcgcaacacgcagatcccgtgacttttcatactcacaagattattacactgcaatcaaagcattccagtccaggtcgatgcaaaaacttgtacagaagccaatgaaatatgcacgataacaagacattaagcaaagattagagaccctgttcaatgagataatcaccaagcctttcaactaccatgttgcattgacctggagtcattggttcatcataaatgccaatgatcaaggccgcaccggtcttcttcacagtaacaccaccaggacccttcttccctcgaatgacagtaccgggttcaccctggatgaccatatatttggtgccaccgagatacaatccaattggagcaagtgatccaggctcattaagtcattcatg

SEQ ID NO: 225723 - DNA, 468 bp, Glycine max
agctcatcagtgcttacacattctttaataataatgtctaacatccacactgcaacaggcagcatgaaaaggttgtcaagttatttgcattccctatcccaaacccctcacaggctcagaaagagaatgctagccacttggaccccagaacaggaattcaaccaagtgaggcacagatctggtgctgacatgaagaggaagctcaagtggcatgatcttgtggctcttggtgttggaggaatgcttggtgttggagtctttgtcactactggctctgttgcccttcaccactctggtccttcagtcttcatttcctacatcatagcaggaatttcagcccttctctcctctttgtgttacactgaatttgctgatcaagtaccaattgctggaggagctttcagttatttaagattaacttttggggaattctcgggatattttgctggggcaaatatactaatggag

SEQ ID NO: 225724 - DNA, 516 bp, Glycine max
  unsure (1)..(516): unsure at all n locations
agctcatctttgcttacacattcattaataataatgtctaacatgcacactgcaaggagcagcatgaaaaggttgtcaagttatttgcattccctatcccaaacccctcacaggctcagaaagagaatgctagccacttggaccccagaacaggaattcaaccaagtgaggcacagatctggtgctgacatgaagaggaagctcaagtggcatgatcttgtggctcttggtgttggaggaatgcttggtgttggagtctttgtcactactggctctgttgcccttcaccactctggtccttcagtcttcatttcctacatcatagcaggaatttcagcccttctctcctctttgtgttacactgaatttgctgttcaagtaccagttgctggaggagctttcagttatttaagattaactcttgcggaattcttgggatattttgctggggcaaatatactaatggagtatgtgttctcaacnctgccgtggcaaggagcttcacagaatatttga

SEQ ID NO: 225725 - DNA, 463 bp, Glycine max
  unsure (1)..(463): unsure at all n locations
ataatcatttatggcttccttatccctctcctctcccccatctgggtcttccgcacggcacaacgcctccacgcgccttattctacgcacccctaactaccttaaactgcgcactncaccccactccctccccgccatnnncgccatcactctcacccaggacgacctcaagagactcgccgccgacaaggccgtggagtccgtcaagagcggcatggtcctcggcctgggcaccggctccactgctgccttcgtcgtcgccaagcttggcgcccttctcgcctccggccaactctccgacatcgtcggtgtccccaccttcaaacgcacggaggagcaggcccgctccctcggcatccccctttccgnnctagacgacaacccccgacttgatctcgccatcgacggcgccgacgaggtcgaccccnacctcacctcttcaaatgccgcggcggcgcccttc

SEQ ID NO: 225726 - DNA, 463 bp, Glycine max
  unsure (1)..(463): unsure at all n locations
ccaaataacgcaataattattattattccactgaaaacaaaaataatacagagacaagaatgagaagaagaagaagaaacgaattacttcagagtctcacttggccttgacttcaacgccagatttgccagcgatgatgacagaagtggccatgttgaggaacaagccatgctcgacgacgccttccagagcggaaatttcagcgcctgcggccaatgcatccctaattggagtcttgaagtacaaatccacgatgtaattggaattatcggtgacgtagggtttcccactctcctccaatctcaattntgcttccacaccttcttccttgaaaagctcctgaagccgatccagattgtacttccagcagaactggaccaccttcaccggcatggccagcccgcttccgccgaggccgtccacgagcttggtgtcgtcgacgaccacgacgaacttgtcggag

SEQ ID NO: 225727 - DNA, 460 bp, Glycine max
cacacacaaaagtcattgtgcttgtgcccaccaactagtctcctctagaactagaagaaattcactcagttctgttcttctgcttatgaaattaaagcaaaaattaatccatttcaaaattgtgtcaagaatgagattctcagcggtgtattttgtcttattattatttgtggcggcagaactagaagcaaccacatgtttcactttcaacaaagagaaaaagctgtcagaattcaagaccaaagttcatgaaaagattcaaaagttatcagcacctgcttcttcatcagaaacaaagaagagtgggagggtgctgtacgtgagtgaatatggtgcagacccaacagggaatgaagagagcagcgatggcattttgaaagctgttgaagatgcttttgcgttgcagaaaggtgttgagattgttggaggagtgaatgaccttggaggagttgtgattgat

SEQ ID NO: 225728 - DNA, 527 bp, Glycine max
atcggaaaacttctgaaactattactattatttaatacattaattaatgagtacaaatacaatcactctgtcttctttcttattgttcaactttgaaggagacgaaccctttagcttctttctcactctccacaacaacaacattatctgacacattggtcatagaaagtgctacaaatttagcctcatcttgagcataaaatgaatattgaaaatgactaatcctattaggaaacaccaaaactgatgaaaaatcagccacccacttcgtgccatttccgctcgcagttaacttcccaactgttgatctcaagctcatgccattcacattgttgcgatcaatcaccacttgttcaatgctactaaaatctccatctagttttacaataggaaccttcttattggggtcaccattaaacatattatcaactatatttaggccaaaaatttgacctttaatggacttcaatacaatattagcatcccctaaaaacaacccattagtgacatgaacttgcacaggatct

SEQ ID NO: 225729 - DNA, 392 bp, Glycine max
gatcacattttctctctatcttataaagaagaaggtggacgccgtgtatatgctcggcgacctcggaggcaacaacaactccaaaagccgatgtcatccccgaaactcttggctacactggagtaaaagcagatgacgataggatcgaatcattgctgactgaagatcagggttacgaaatagttgagactattgccgccggaaggcaaaagtaggccacggttccttctggaggcggaggtccctgttgcctgtgtcctattctactgagggatgtgctgctgttgctgatccctctgcagacgcacagaatgatgtaaaggttgaggacaaagaggaatcttatgagaaggaaaaaaacatgacttttcattaaacgggggaacctatgc

SEQ ID NO: 225730 - DNA, 381 bp, Glycine max
aagcttgactgaaatttaccaaaatgaaattccataacatcaaaacactaaaatatcaaaccaaattcatccaacttggttggtcattgatattaaaaaacacagtaaattactccttagaacaaaactttgacaaactcatgctctagtgttaattaagaatatgttctgaacaaaaaagctgaatagactacaccaattaatcgaagagactgaaacccatatcatcatcagattcctctttctcctccaccttttcctccttctttgcctcaacagcaggagcagcagcagcagtacctccctcaggacctgtggcgacggaaacggaccaccaccaccagagggaaccgtggccaatttttccctacgggcagcaat

SEQ ID NO: 225731 - DNA, 479 bp, Glycine max
aaaaaacccttctttctttcatgttcattacttgatcagtgtcaaaagggtagttgcaaattgcaatggctaagcatgatgttgagggtggttccttctcagcaaaggactaccatgatcctcctccagcacctttgattgatgctgaggaactcacacagtggtccttctacagggctttgattgctgaattcattgccacattacttttcctttacatcacagtgctcactgtgattggttacaagagccagagtgatgtcaaggccgggggtgatgtgtgtggtggagttggcattcttggcattgcttgggcctttggtggcatgatcttcatccttgtttactgcactgctggaatctccgggggtcacataaacccagcagtgacatttgggctcttcttggctcgcaaggtatctctgattagagccataatgtacatggtggctcaatgcttgggagccatatgtggagtt

SEQ ID NO: 225732 - DNA, 425 bp, Glycine max
gagtaaaagcatggatattatataattttttttttcatgaatacattgagtagaagagattaattacctaaaagaaaagaacacacactgaagaaaggaaagtgcttgaaaatactaaagggtatttaccaaaggctcttgtcttgaaagaacctttaatctacataggatcaaagaaaagcttgcaataaaagcacaagcaattgccattattaataacattattattcttacaatatcaagtcattttgcttccaattatctcctttttgaaacccatgattatgaagaggaaattgactcaaatagtggggttgctcctgaatgatccaagagccttagcagcacctgctctcaagataaattggtggtagaaggctgcaatggctgctccaataaatggtccaacccaaaagatccaatgg

SEQ ID NO: 225733 - DNA, 461 bp, Glycine max
atttacacttgattgtgttgttttgtttcaatggcagaaatgtgacatgtcggaagggtcgaatttcgtcaacgggaaaccgatcattccggttctcaacgaacggactctgccgaagttcatggaatccgcgagggaggcgaagaccgtcagcagaaacagtaaccggttgaaattgttctctggcagggccaatcccactctctctcaggaaatggctcggtacatgggcctggaacttggaaagatttccatcaagcgatttgttgatggggaaatatatgtccagttacaagagagtgttagaggttgcaatgtttaccttatacagccaacctgccctccccaaatgagaatctcatggagcttaaaataatgattgatgcttgtcggagagcatcggccaaaaatatcactgctgggattccatacttcggatatgccagagctgatagaaagac

SEQ ID NO: 225734 - DNA, 457 bp, Glycine max
  unsure (1)..(457): unsure at all n locations
aagatggtcaaatagcatttattcattaaattaactccgaaagtaactgattgttcactgaaaaatactactaacagaactatcatcatgaacacgccaaatagtttcacccaaaaggtttgctacagtaataatcgttaactggggaaaatagttcttctccgcaactggaatggtgtttgtgataatcacctcgtgaaacaagccactggacaacctctcaattgctggaggactgaaaatagcatgagtgcagcatgcatacacttccctagccccctcttcatgcaagagtgctgcaccctcagcaatggtccctacgtccaaaaccaacatttgaaccagaaaatgcaccaacatatataaatggttaaaagagcaagagtttacaactataaaattctagtgcaaatactttaaaaggtangaataccaaaatatgctaaggatcatttgg

SEQ ID NO: 225735 - DNA, 299 bp, Glycine max
gaaggctgtttatcccgagggattcgaagaggccgccatcggatgctatcctcaaggagactctcaaggcgttggagtatactccatcgacacggacacattcaccgggacgttaaggccgggaatattcttctagacgatcacggtctgatcaagctcgctgactttggtgtttccgcttgcatgtcctgacaccggcgaccgtcagcgctccagaaacaccttggacggaactccgtgctggatggcgccggacgtgctgctacctggaaccggccacaattccaaggccgatattt

SEQ ID NO: 225736 - DNA, 477 bp, Glycine max
aatcaaattagttcattctctttgcgcagttccctacctctcctttcaagatgcagatcttcgtcaagaccctcaccggaaagaccatcacccttgaggtggaaagctctgacaccatcgacaacgtcaaggccaagatccaggacaaggaaggaattcccccggatcagcaacgtctcatcttcgccggaaagcagctcgaggacggccgtaccctcgccgactacaacatccagaaggagtcaacccttcaccttgtccttcgtctccgtggtggcatgcagatcttcgtcaagactctcactggcaaaaccataaccctagaggtcgaaagctctgacaccattgacaacgtcaaggccaagatccaggacaaggagggaatccccccagaccagcaacgtctcatcttcgccggaaagcaacttgaggacgggcgcaccctcgccgactacaacatgcagaaggaatcaaccc

SEQ ID NO: 225737 - DNA, 481 bp, Glycine max
gataacaaacagtagtaacattaatgggacaatagagttcaacacaaaccaaacttattttcaaaggtcattacagacccattacacatcacatttcttcttaaaatgtttgggaaaatccaacatcgaacatcacacagaaatcagctccagcttaaaaccccccacgaagacgcaacaccaagtgcagagttgactccttctggatgttgtagtcagcgagggtccttccatcctctagctgtttgccagcaaaaataagcctctgctggtccggtgggattccttccttgtcctggatcttcgccttcacattgtcaatggtgtcggagctctccacctcgagggtaatagtcttacccgtaagggtcttgacgaagatctgcataccaccacgaagacccaacaccaagtggagagttgactccttttggatgttgtagtcagcaagggtacgtccggccttgagctgtttgccggt

SEQ ID NO: 225738 - DNA, 568 bp, Glycine max
  unsure (1)..(568): unsure at all n locations
catgaccacagcataagtgtttagagagagagagagaaatggcttgcaggcaattgggggcttcaagagctgcctcttacctgaggatctctgtgtttcacagaggcttttctaatgttattaaagatttcaagtatgttgattctcatgagtgggtgaaagttgatggaaattacgcaaccatcggcataactgatcatgcccaagatcatttgggtgatgttgtatatgttgaattgccagaagtgggagcagctgtgacacaaggaggtagttttggtgcagttgaaagtgtgaaggctactagtgatattaactctcctatttcaggaaaagttgttgaagtcaatgaagcgcttaacagctctcctgctttggtcaattcaagtccttataaagatggatggataattaaagttgaaatatatgacagtggtgaactaaacaacttgatggattcagaacaatactccaagttctgtgaagaagaagatttcaagcactgatggtcttgccaagatctttcagcactctccaatcttcatggngtagatcatgttttattggg

SEQ ID NO: 225739 - DNA, 467 bp, Glycine max
ccattgcaaagagtgaaaaatatcatcccactggttcagaagcttatgaaaaataaaaatagagcagtggtcaaaccatgacacaaggagaaaaaggaataagtaatttagcagctttcccaataaaaacatgatctacaccatggagattggagagtgctgaaagatcttggcaagaccatcagtgcttggaatcttcttcttcacagaacttggagtattgttctgaatccatcaagttgtttagttcaccactgtcatttatttcaactttaattatccatccatctttataaggacttgaattgaccaaagcaggagagctgttaagcgcttcattgacttcaacaacttttcctgaaataggagagttaatatcactagtagccttcacactttcaactgcaccaaaactaccttcttgtgtcacagctgctcccacttctggcaattcaacatatacaaca

SEQ ID NO: 225740 - DNA, 521 bp, Glycine max
gagagtgatttcagtgagtgatcggtgttcacttgatctcatcgtaatcgtcagcggcaattgaagaagatgccgatcagaaacatcgccgtcggaaggcctgaagaggcgactcaccccgacacgttgaaggcggctttggctgagttcatctcaaccttcatcttcgtgttcgccggctcaggctccggcatcgcctacaacaagctcaccgacaacggcgctgccacccctgccggcctcatctccgcctccatcgcccatgcattcgccctcttcgtcgccgtctccgtcggcgccaacatctccggcggccacgtcaaccccgccgtcaccttcggcgccttcgtcggcggcaacatcaccttcctccgcggcatcgtctacgtcatcgcccagctcctcggctccatcgtcgcctccctcctcctggccttcgtcaccgcctccactgttccagcattcggactctccgctggagttggaagtggcaacgccttgggtgtggagatcgtgatgac

SEQ ID NO: 225741 - DNA, 488 bp, Glycine max
gatcatcaaccatccaaggatttaagacgaaaggaacaagtacaaccctcgaaagtgaattaggaagaaaacacaaggaaggaaaaccatacacagaagaagattccagagaaattcaataatacacaatttttttttttttattttcatttccccccctctagtagtcagtggtgggaagctgctcgtgggtgtggctgataaagacaacctcgtaaacaaggccagcgattccaccaccgatgagaggcccggcccagtagatccagtggttggtccaggtccagctcacgacagcaggcccaaatgtcacagcggggttcatggccgctccagagaaggccccacccaacaaaatgttagcgccgacaatgaaaccaatggcgatgggagcaataattcccaaattacccttcttggggtcaatggcagttgcgtagaccgtgtacaccagaccgaaagtcattacgatctccaacaccaaggcg

SEQ ID NO: 225742 - DNA, 429 bp, Glycine max
ccgaggaagagtatgttaagtcaattaaggaggaaattcgcaaagttgttgaacttcaagaagagcttgatattgatgctcttgttcatggagaaccagagagaaatgatatggttgagtacttcggtgagcaattgtcaggctttgccttcactgttaatgggtgggtgcaatcctatggttcccgttgtgtgaagccaccaatcatctatggtgatgtgagccgcccaaagccaatgactgtcttctggtcatctctggctcagagctttaccaagcgcccaatgaagggaatgcttaccggtcctgttaccattctcaactggtcctttgttagaaatgaccaacctagatctgagaccacctaccagattgctttggctatcaaggactaagtggaggaccttggaaaggctggcatcactgtta

SEQ ID NO: 225743 - DNA, 482 bp, Glycine max
gcaagctcatcctagagttttaaaaatggcagcagcctcctccatggctctctcttgcccatccttggctggcaaggccgtgaagctgggcccatcagcccccgaagtcgggagggtcagcatgaggaagaccgtcaccaagcaggcctcctccggaagcccatggtacggcccagaccgcgtcaagtacttgggcccattctctggcgagcccccgtcctacctcactggcgagttcccaggtgactacggctgggacactgctgggctttcggccgacccagaaaccttcgccagaaaccgtgagctcgaagtgatccactccaggtgggccatgctcggggccctgggctgcgtcttccccgaactgttgtcccgcaacggagtcaagtttggagaagctgtgtggttcatggcccggtcccagatcttcaacgagggtgggctggactacttgggcaacccaagccttgtccacgccc

SEQ ID NO: 225744 - DNA, 451 bp, Glycine max
gtaaaaagcaagtaacattaagttggattgggatacacaagataattcacattatctgaagtacattgcaataacatatacttcaccaaacacaaatctaaaaactctcaaaagtccacaagtcatccttttctttcatgctcacttgccggggacgaagttggtggcgtaggcccaggcattgttgttgactgggtccgcaaggtgatcagcaaggttctccaatggacccttaccggtgacaatggcctgaacaaagaacccaaacatagagaacatggccaatctcccgttcttgagttccttcaccttaagctcagcaaaagcctctgggtcatcagcaaggcccaatgggtcaaagctgccaccagggtagattgggtcagtgacctcaccgaggggcccaccagcaatacgataaccctcaacagcacccattaggataacttgg

SEQ ID NO: 225745 - DNA, 436 bp, Glycine max
ctctgtggcttgcgtgccaatgctaccattctcctcatgcccaaggtcgatattaactgcttgcttgctctcattcacaagcacaaagtcactattgcccctgtcgtccctcccattgttctcgccatttccaaatcacccgatctccacaagtacgacctgtcttccatcagagtcttgaagtccgggggagcccctctgggtaaggaactcgaagacactctcagagctaaattccccaacgccaaacttggccagggatacagaatgactgatgcagggcctgtgctaacaatgtctttagcttttgctaaagaaccggttgacgtgaaaccaggtgcatgtggaaccgttgtaagaaatgcatagatgaagattgtcgatcctgaaaccgtcattctttacccagaaaccaatccgtgaaatttgcataaga

SEQ ID NO: 225746 - DNA, 431 bp, Glycine max
  unsure (1)..(431): unsure at all n locations
aaaaaataaatataatttgatattatagaaggtgaaagtccttgacagattgaaatctttacagaagatagttctgtaagaaaatcacactggtaacttatacacggttgttacgtaagagaaaatacgtaaaagctagcgggatcaagcaacagcgcctcttccttttgtgttgaagcttgcttatgcgggcatcgtataataacaccataacatgatgggtttggtttaatttcattttggaacacttgccgctatctttgctcttagatccttgcgcaagattttgcctgacggtgacttgggaattgcatcaatgaagaatactcggtttattcttttgtaaaacaccacctgtttggagataaactgcttaatttcatcctcggttgtgtcggtataaccatttgatatgaccacanatgcaacag

SEQ ID NO: 225747 - DNA, 501 bp, Glycine max
ctctgtggcttgcgtgccaaggctaccattctcctcatgcccaagttcgatattaactccttgcttgctctcattcacaagcacaaagtcactattgcccctgtcgtccctcccattgttctcgccatttccaaatcacccgatctccacaagtacgacctgtcttccatcagagtcttgaagtccgggggagcccctctgggtaaggaactcgaagacactctcagagctaaattccccaacgccaaacttggccagggatactgaatgactgaggcagggcctgtgctaacaatgtctacagcttttgctaaagaaccgatagacgtgaaaccaggtgcatgtggaaccgttgtaagaaatgcagagatgaagattgtcgatcctgaaaccggtcattctttacccagaaaccaatccggtgaaatatgcataagaggcgaccagattatgaaaggttactctaaatgatggggaggcttcagagaggaccctttacca

SEQ ID NO: 225748 - DNA, 500 bp, Glycine max
aaaaaaaaaatataatttgatattatagaaggtgaaagtccttgacagattgaaatctttacagaagatagttctgtaagaaaatcacactggtaacttatacacggttgttacgtaagagaaaaatacgtaaaagctagcgggatcaagcaacagcgcctcttccttttgtgttgaagcttgcttatgcgggcatcgtataataacaccataacatgatgggtttggtttaatttcattttggaacacttgccgctatctttgctcttagatccttgcgcaagattttgcctgacggtgacttgggaattgcatcaatgaagaatactcggtttattcttttgtaaaacaccacctgtttggagataaactgcttaatttcatcctcggttgtgtcggtataaccatttgatatgaccacaaatgcaacaggtacctttcccgcggcttcatccttcattggaacaacagcagcatcagagatcttaggatgagtgaga

SEQ ID NO: 225749 - DNA, 283 bp, Glycine max
  unsure (1)..(283): unsure at all n locations
aaagaaaatcctcacccattttcttcgcaccctttctctgtgaacaactcagttatggcgtcgcaagcggctgtggatgagcacctactgggtgacctactgtgtgaccacctaactcaccccgttatcatccgccaagactggngcgttagggctcagagcgccaacttacctcagatcaaacctgaggaaatcactgccatcaatacatgactttaatgagcctggatcacttgctccaactggatttgatactggaggcaccatatacatggccatccac

SEQ ID NO: 225750 - DNA, 366 bp, Glycine max
agaataagcaaacttttgataaatatgccaaccattataacatagcattaaaattttaaaaccactgtaatgtatacaggtaccccactaaaaaagtacaaagatagagattatagtcatcatttctcaagcatcaaacactttcttcactacacgcagatcccgtgacttttcatactcacaacaagattattacactgcaatcaaagcattccagtccaggtcgatgcaaaaacttgtacagaagccaatgaaatatgcacgataacaagacataaagcaaagattagagaccctgatcaatgagataatcgccaagcctttcaactaccatgttgcattgacctggagtcattggttcatcat

SEQ ID NO: 225751 - DNA, 494 bp, Glycine max
ttaagccttttaaatgcccaacattttgttcttgatgtttgagattgatgtattcagggctgagtgaaatcttcttttccgggtgtatgatcaattccactgtgagacgcaggacccatttagttcaatccttctctgttgctttcctttactggctctactacgtttcatgatttctaaccccctctccaattattaattaaataaaaccctattatatgtctcttacatatttttatctgcaaaaaaaaataatctttttttgttcttgttcttgtttagtgtctgggtcctgcgaactccaagtacaagaagggtcaatttttgtttttctgttaacttttgattactatggcttgttcaagtggaacatcttcaggggcgacgtcgacgatgcttcaaaataactcaggttcggaggaggagctgcaggcactcgtggagcagaggaagaggaagagaatgatatcgaaccgcgaatcggctaggcgatc

SEQ ID NO: 225752 - DNA, 463 bp, Glycine max
gcggcggcgatgggttgccgttcctgatcgtgagcggagaccagaggcactggggggagttcatcacacccggaatactattcctgtacatctcgggatggatcggctgggtgggtcggagctacctgattgcgatcagggacgagaagaaacccaccatgaaggagatcatcatcgatgttcctctggcttctcgcttgctcttcaggggtttcagctggcccgttgctgcctacagagaactcatcaacggcgacctcattgccaaggatgtctagataagagagggtggatggctacattggaggaaagcctggagaatttgtatgtggatgggatctttacgcgctctttttgtaattactttttttataaatggtacatgatatgatgtaatctaatgcatgtgaaccacaatcaacctcatcttccaattcaattaatggtaagaagagttcttgct

SEQ ID NO: 225753 - DNA, 401 bp, Glycine max
atcaagaactcttcttacattaattgaattggaagatgaggttgattgtggttcacatgcattagattacatcatatcatgtaccatttataaaaaaagtaattacaaaaagagcgcgtaaagatcccatccacatacaaattctccaggctttcctccaatgtagccatccaccctctcttatctagacatccttggcaatgaggtcgccgttgatgagttctctgtaggcagcaacgggccagctgaaacccctgaagagcaagcgagaagccagaggaacatcgatgatgatctccttcatggtgggtttcttctcgtccctgatcgcaatcaggtagctccgacccacccagccgattcattccgagatgtacaggaatagtattccgggtgtgatg

SEQ ID NO: 225754 - DNA, 581 bp, Glycine max
  unsure (1)..(581): unsure at all n locations
atctctggtgccattctcttttaggaaactctctaccaatccactgtcgatggaaggaagatcgtcgacgtacttgttgaccaaaacattgttcccggtatcaaggtcgacaagggtttggtgcccctagctggttcgaacgatgagtcatggtgccaaggtcttgatggtcttgcgtctcgctcagctgcatactaccagcaaggtgcccgtttcgccaaatggcgtactgttgtgagcatccccaacggtccctctgctctggcagtgaaggaagctgcctggggtctagctcgctatgctgcaatttcacaggagaacgggttggtcccaattgtggagccagagatcttgcttgatggtgagcatgggattgacaggacattcgtagtagcccataaggtgtggtcagaggtattcttctacctggctgagaacaatgtcctgttggaaggtattctcctcaagcctagcatggttactccaggagccgagtccaggaacaggccactcctctgcaagttgctgattacacccttaagctcctcacaagagaatccanctgctgtcctggatcatgt

SEQ ID NO: 225755 - DNA, 479 bp, Glycine max
cgtaattgattggctagaagttcattaagtagaaaaggtacaagtaataatcatcattaaaaatagtgtccaagactatataaaccacaaacacaatttagacaaattaatgttggatccttgggttactgtagcatgtgtggcaagatgatcttagtaggagtaacctttgacgaacattccccgagtggcttcctcagattcaccctcggcagtgtactttccaagctgagcgagtgagttggacttggcacggaaaaggagtgcatcttgagcagcctttacgttctcagggagtccaccccatgtcttcaagcaggtgttttggagagctctggcgtaggagaaggacacgtgccatgggtttggagactggttcatagcattcaagttcaaggttgcttcaacctcagattgtccgccagacagaaacatgattccagggacagcaagtgggattcttctgtgaaggagcttga

SEQ ID NO: 225756 - DNA, 507 bp, Glycine max
acccaccatctaatttctgattcacaggcctatcctttgagataggagcacacgtgggacaaaatgctattctctatttgtcatcactttaatcacgcactatcagtacaacaactcactcactaagctaaacaatttcatcaagcctgccatggcttcctcgtgtgcttcctctgccattgcagctgttgccatctccacaccaagttcccagaagaatggatcactcttgggaagcacaaaagcttcttttcttagtgggaggaaactgaaggtgaacagttttacagcaccagttggagcacgatccagcactacagtgtgtgcagttgctgagcctgataggcctctgtggttcccaggcagcacccctcctccatggctagatggcagtttgccaggagattatggctttgatcccctaggtcttggatctgatcctgagagcctgagatggaatgtccaagcagagcttgtgcactgcaaatgggccatgttgggagctgc

SEQ ID NO: 225757 - DNA, 446 bp, Glycine max
acttcctgaatttacattaaatgcatctaaacttaaataggtatttgtacattgaataatcaatctgtgcatgacaatagaagtaccattttacaagctttcaccaacataaaaactcccccctaaagacatttaagccttacaacttagttaaacaagtttcccaatgtttctccaaggcttgcaatcatagagttgttccaacccttctcacttgggagtgaaagcagcaaaaatagtagcatgaccaggatctgcaaggtgagcaaagaggttgtcaataggaccagtgccagtgtaaatgtgctggaaccatgcccccatcacagccaacatggccaacctgccattcttgatctgctttgttctcaactccttgatctttttaggagaacccatttcccagccaagtggatcaaaccaaagcccacctgggtacccaacat

SEQ ID NO: 225758 - DNA, 569 bp, Glycine max
ttcttattgaaatacaggattctttgaagtcgcctccaccagaaaacgtaaccatgaagagggcctcaacaatatcagtcattgtcacaacatttttctacctctgctgtgggtgttttggatatgcagcctttggtaatgatacaccaggaaaccttttaacagggtttgcactctataaaaaacattggcttgtagactttgccaatgcttgtatagtaattcacctagttggtgcatatcaggtgtatagccagccactttttgccaatgttgagaattggcttcgtttcaagttcccggacagtgaatttgtgaatcgcacatactccttgaaactccctttgctgccagctttcccgctaaattttcttaggctgactttcagaactgcatatgttgcatcaacaactgggattgcaatgatatttccctacttcaatcagattttgggagttttggctggcataatctactatccattatctatatattttccagtggaaatgtacttgagtctgggcaatattgaagcatggacagctaaatggctcatgcttaggactttt

SEQ ID NO: 225759 - DNA, 459 bp, Glycine max
ggaatcttacgatgtacggagtaagtcattgacgcatataccaatgatgctatgatctgtcgtcatgcatcgtcgctacgtagaggctctggatattcaggcatccgagctcactgtttcttcttactcagctatttgacgtattcatgctgctgcagttaggggcgtcgtcgtaaggcgaaaaacatgcctgaagattctgctgcataggggcttgatatgaggggggtacaccactggcaaaccttgcagctgaaatgcccctgaattgaagtggctgttactgacatctctaaatccaggagcgcagcattgaacagcgaccagctacctatctatcacccaggccctgatgatgtgatgaagcaatgacctcgcacgaaccatttcttcgcactgatggtccaaacatgtctatgaggccaccgtaatgctcgtatccgttgacaccccgacaaa

SEQ ID NO: 225760 - DNA, 430 bp, Glycine max
ttattgtgttttttttttttaacaccatgctaatcaaataacatggaaaaaaccgggtaaactcaaaacatccaaatagtagtgatgacttgcagcacaaggaaacccaaaacatatgacctcctactttggcaaagtttatactcatttatgccaactattatgggaaagtgaagaatggggaccaagaaaagtgttgcaaaaaacaatggccaggatgaataaaattgaaccaaactgaatgatgccttagaatgcttgagatgaaatgtttcttttatgccacagctggcatgtccttgagccatggatccaatggctcgccaactgagtacacagtgaatccaatctgaggtaggatttacagatccacagtggttcttccatcaaaaacaaaagctgggtgtttgatgatgtcatacaccttctg

SEQ ID NO: 225761 - DNA, 484 bp, Glycine max
acactctgtaactaacaacatctataaaagaccatgtcggtgaaggagtgcgagcaccacaaggggaagaagaggaagatcttccggcatgtgttctggtgcttagtggtgttccttttcatcgtgctggtcacaattcttttgatatgggcaatccttagacccaccaaacccaccttcacgctacaagacgtcaccgtgtacgccttcaacgccaccgtggcgaacttgctcacttcgaattttcaggtcacgctcatctcgcgttacccgaacgaccgcatcggtgtttactatgatcgccttgaaaccttcgtgacctaccggagccagcaggtcacgtaccgaaccgccatccctacgacatatcaaggccataaagagagcaatgtttggtctccgtttgtttatggcaccaacattcgcgtcgcgccgttcaatttcctcggcctcagtcaggaccagagtaacggtaacgttctcg

SEQ ID NO: 225762 - DNA, 561 bp, Glycine max
ccaaattgaaacaagaaattttattgccatcgtagctcaattacatttagtctccatcttgcatcttgtaattttgctatatctgagactcttttgtctgcttcacatttctatagcaaaacgtaaaatagaaacatctaacgaccaattcgtacacaaggtacacgtacaataacaacagtggaagaagaaattggtacctataaaaatacactggatcggatcgagtagagtatacataccacaagtgtcaataacatattctttattacactcattttaacacattttttatgattagtttaaatttattaaaaactataaaatcacataaaaaaaataaccatgaattttccagatttaattttcaataaattttagtgacgaaatatttcatatgtaacttttgaaaaattcatcactaaagtttttgtaactttagaattagtgacgaaaaggcaatacatcactaaattccgtcactaataaacatatttaaaagagtgtattagaaaatatgttattaacatttttcttgtctgagataaagttagacactaa

SEQ ID NO: 225763 - DNA, 518 bp, Glycine max
cgccgttctcattgagacccttaccgcccttggcgccgaggtccgctggtgctcctgcaacatcttctccacccaggaccacgccgccgccgctattgcccgcgacagtgccgccgtcttcgcctggaagggtgagaccctccaggagtactggtggtgcaccgagcgcgccctcgactggggccccggtggtggacccgacctcatcgtcgacgacggtggtgacgctacccttctcatccacgaaggcgtcaaggccgaggagctctatgagaagaccggcgaactccccgaccccaactccaccgacaacgccgagtttcagatcgtgcttaccatcatcagagatgggttgaagaccgatcccaccaggtaccgcaagatgaacgagcgtctcgttggggtttctgaggaaaccaccactggagttaagaggctctatcagatgcaggcgaatgggactcttctcttccctgctattaatgtcaatgactctgtcaccaagagcaagtttgaca

SEQ ID NO: 225764 - DNA, 461 bp, Glycine max
aagaaacacaaattttagtatttaataaagcaaaatgcacacatcccccaaacaaaacaagccttattcaacccaaattggtttcatatcacagaaaccaacaggatgccgccttcctccttactggtcccacccactcgaacaaaagttctacagaaataaaaatggctacaattcttctaccacaaatctgaaaagtctaacaccaaaaatcaaaaaaaggaaaattaaacaatcaaatccgattgataaaaccgatttttgtctttccctcactcacttttcagttgatcatctcaatcacttagtacctgtagtgagcaggcttgtatggaccctcaacaggcacactgatgtaatcagcctgggacttgctaagctgggtcagcttagctccaagtttgcccaggtgaagtgcagccaccttctcatcaagtgcttgggcaaacgtaaaccttctt

SEQ ID NO: 225765 - DNA, 530 bp, Glycine max
atccatttttgggataagtttttcaaagctcctgagggttctctcaggaaaaatgcagctcagaaacaagttttggaagcaatgtctcatagaatgcatgtagacaacagtgtaaaacttattgggaagcttttatttggtattgaaaagggtccagaagtactcaacgctgttagaccggcaggatcggcacttgttgatgattggcactgccttaaaaccatggtgaggacttttgagacacattgtggatccttgtctcagtatggcatgaaacatatgaggtcctttgcaaacatctgcaatgtatggataaagaatgagcaaatggctgaggcctctgcacaagcttgtgtctctattccttccaatccttggagttctctgcataggggtttcagtgcataataattcctgtaatgtgcaccagtaaagaccaaagtatgattattgttacattatgctatatgattgtacttgtatatacatattttgttccgcctttgtaaatacaatctgggacactacta

SEQ ID NO: 225766 - DNA, 534 bp, Glycine max
atccatttttgggataagttcttcaaagctcctgagggttctctcaggaaaaatgcagctcagaaacaagttttggaagcaatgtctcatagaatgcatgtagacaacagtgtaaaacttattgggaagcttttatttggtattgaaaagggtccagaagtactcaacgctgttagaccggcaggatcggcacttgttgatgattggcactgccttaaaaccatggtgaggacttttgagacacattgtggatccttgtctcagtatggcatgaaacatatgaggtcctttgcaaacatctgcaatgtagggataaagaatgagcaaatggctgaggcctctgcacaagcttgtgtctctattccttccaatccttggagttctctgcaaaggggtttcagtgcataataattcctgtaatgtgcaccagtaaagaccaaagtatgattattgttacattatgctatatgattgtacttggatatacatattttgtcccgcctttgtaaatacaattgggacactactaggatt

SEQ ID NO: 225767 - DNA, 466 bp, Glycine max
agttattccgatattcggacgcatcaacttgttatgaaatcacattgatagcctctactcgtgtcctagctcgtctaagagctagatttgcctcaattgtttgtctcttgccttccgccttattcaaattagcttctgctatttcaagagtttgctgtgcttcttgtggatcaatgtcactacccttttccgcatcatttactaaaacagtgatctcattattgtttattctagcaaaaccgcccatcagagccatcgttaaccattggtctttaagaagacgtattctcaaaatacctatatctacggctgtggcaataggcgcatgatttggtaatactccaatttgtccgctattagtagataaaatgatttccttcactttcgaatcccaaacaattcgattgggggtcagtacaccaagatttaaagtcatttcttcaaattgctctccatttctaagttc

SEQ ID NO: 225768 - DNA, 485 bp, Glycine max
atttcgaactccgccatggctgccaccaccgccaccgccacgtcatacttttttggcacccgcctcaacaacccgacaaccttaaacaacggaagattccacgcgctcctcaacttcggcaaaaagaaggcggcggcgccgccaccgaagaaaaaggaagtgaaagtgaaaccctccggcgaccggctggtgtggtttcctaatgcggagccgccggagtggctcgacggaagcatgatcggcgaccgcgggttcgacccgttcggtttcgcgaagcccgcggagtacctgcagttcgacctggactcgctggaccagaacctcgcgaagaacgtcgccggcgatgtgatcggaaccagtgtggaggtcgccgaccgttaaccaacgccgttttagccctactcggaggttttcgggattcagaggtttcgcgagtgcgaactcattcatggaaggtggccaatgctgggtgctctcggtgcttt

SEQ ID NO: 225769 - DNA, 495 bp, Glycine max
attccaaagttatttttaagaagcataggtttcatcaaagtaccaatactgaatatcatacagaagcatacaacagagtacaaacatacatacataattataagtagcagttttcatcttttgggtgtacagaaaagaattaataaaattagatgaggaggtgagtaacttaatagaggagaatgagaatacggtgggaagttttcatttataaagttatatattatatgatatgatgtcacttgttgaaggtagcaagaaaactgatagggccttttcctgttacagcagcttgaattgcaaagatgaggaagaccaccatggctaagcgagaatgcttgatctcagcaagttgaagtctggccttttcttcagggtcgttggccaaacccagaggatcaaagaacctgccacctgggtacaaccttttcttctgggtaaagttctggatttttttggaaatctatgtaccctataactattaccttaatccag

SEQ ID NO: 225770 - DNA, 495 bp, Glycine max
ggtggttgaagaaccactttgatggcagcgtcaaagacggctttcacattctgctgtgtttttgaactacactcgatgtaggcaggagcaccaatcagttttcttaattcttctccctgtgctgtagtaattggtactgcaccagggtggtccataaaaaattgcttatcttcccgaagatctaactttgttccaacgagaattattggaacaccaggggcataatgccttagttcagggatccacttctttgcaatattttcatagctagccttgcttatgagagaaaaggcaagtataaaaacatcagctcctcgatagctcaagggtctaagcctattataatcttcctgaccagcagtatcccacaatgccaagtttacggtgcttccatccaccacaacattagcactgatattgtcaaaaaccgtgggcacgtagtccgtgggaaaagtgttgctggtgtaggaaatcaacaaagcaggtttgccgaca

SEQ ID NO: 225771 - DNA, 396 bp, Glycine max
ctccctccattttacctcgagccttacaggcattgttctatgggtggatcgaactgtgatctagggatgaatcgcgtcctggctcattaacctgcgacacccgctagcgacttgtgctgacggcaaaagcatgtttgttgatatcctacaccatccacactcataccacggactccgtgcccacggtatctgacagtcactgtgctaatgctgaagtggatgagcgcacctgaaacttggcattgtggatactgatggacggatgatttcatgggcttagacccttgagctatctaggagctgacgttcacatacttgactttgacctcataagcacggctagctatgaaaactattgcagagaagtgcatccccgagctcatgcattatgcccct

SEQ ID NO: 225772 - DNA, 336 bp, Glycine max
agcttaggaggcagaagaaccacttcgatggcagcgtgaagcacagacctgacatactgctgaggggtgaaactacactcgctgtaggcaggagcaccaaccagattgctcaattactgtccctgagctagagtagttggtcctgcaccagggtggcccataaaaaatcggttatgtttccgaggatctaactttggcccaccgagaatcatctgaacaccatgggcataatgccttaggtaagggatccacttctttgcgatattttcatagctggcctcgcttatgagagaataggcaagcatggaaacatcagctcctgcatagctcaagggg

SEQ ID NO: 225773 - DNA, 126 bp, Glycine max
aaacatttgaagaactttgatgtttaatgggtctgtaataatgtcccttgaaaataagttcggtttgtgttgaactcaattgtgtcccattaataatagtactctaatatcccacctacgtttgtt

SEQ ID NO: 225774 - DNA, 126 bp, Glycine max
aacaaacgtaggtgggatattagagtactattattaatgggacacaattgagttcaacacaaaccgaacttattttcaagggacattattacagacccattaaacatcaaagttcttcaaatgttt

SEQ ID NO: 225775 - DNA, 537 bp, Glycine max
ttcctattcaaacaaatcaaattattatgatacgaatggagataagaaaacagctgcggacaattatttattcttggtgaattggttggagagatatccagaatataaggaaagagatttctatattgctggggaaagctatgctgggcattatgtgcctcaatttgcacataccattctctatcataacaaaaaggcaaataagaaaatcatcaatctaaaaggaatcttgattgggaatgcagtgatcaacgaggaaactgactcggacggactgtatgattatcttgccagccatgcaatcatctcagacaaagcagcttatctcaacaaagcttgtgattcatcatcatcaaagattcaggaaagtgtgtgcgatgcagccggagatgaacttggggaggatattgaatacattgatttatacaatatttatgctccactatgcaagaatgcaaatctcacagccctgcccaaaaggaacacaattgtgactgatccatgtagtgagaattatgtgtacgcatatcttaatag

SEQ ID NO: 225776 - DNA, 553 bp, Glycine max
ggaggaggaagactcattgctttggcaagtggaaatatggaggtacatgacatgcttcacggactccgtggccttgaaagctgtcatagagcttcgtatagcggacatactagaccgttatggtaaaccactatccttgtcgcaaattgtggagaacatagaagacgcaccctccccagatgcctctcttctccagagagtcctgagagtgatggtgcgcagaaagatcttcagtgcacaagaatcagagacaggagaaaccctcttcggcttgacacgagcctcgaagtggatccttcgcgacacgaaaatgaccctagcacccatgttgctgctggagaaccacccaattcacctgaaccctgcgcactacatcagtgagattattagagaaggcacaaaaaatggcactgctttctttaagtgccatggacatgagcaatctgagatgacgggtttggatcctgagtataataggctgttcaatgagggcatggtgtgcactgctagggttgtgtccaaggctgtgatcactggctacaaagatgggttc

SEQ ID NO: 225777 - DNA, 468 bp, Glycine max
cacaccaaaggatctgattcattaagagcaatagattcttgacaaccacacaccactcacttgacatatatggaacacatacataatccatatagcattacttagtggtggggcatttcttacttttatttaatgcacaaacataacaagggcaggaaggaaaaccacaaaattaaaacgaagatcatatagctgttaataataacaacaacacatgcaacataaaaaccacatgcagttgtggtagtggcatcttcttcagattggaaacgcctcaatgatggaagggagagcgttgaacttgatgatgttggaacgcgcgaaaccggtttccttgaacagccactttcagttctcttcggacctttctttgccaccggcgttgtgagcgagaagcatcatgtcgaatgcgatgccaacgtctgtgaagagtttcgtgccttcgggtcgaagaacgtgatccacgat

SEQ ID NO: 225778 - DNA, 509 bp, Glycine max
aacatgtgtaccgacaatgagattcactatcaatcaccaattcttcatgtataataaaacgagtggacattaagattttctgtaactgcataatgcatactggcatccataataccatgaatacaaattctttcatagaaagggggggaattaactaccctgaatgttcacaaaacctaactaagtagatctttgaatcgtgagaagcaagtttcagtctgcacgagagccactgctacttgcagaagatttcttaccgctatacttctgcttccccaagttgaaggggatatatttgtatttcatcatgtgtgcaacttggcgtctcattgtaaggacaaagagaacaaaccagtaacagagtaatataggccaaaagacaggaacatcaaacagggaaaaaaaagtcatcacaaatgctatgcagagagccttcgtgaaagaataccagaacttgaactcggggaggcggcgaatgaagggtttgaactcatcggagcctttggtgg

SEQ ID NO: 225779 - DNA, 527 bp, Glycine max
ctttgatcttagttctgctgcatttgccattgtaactctcaatgggaggaatatttgtgggcagcctattaaggttaactgggcttatgctagcagccagagagaggatacctcaggtcactttaatatttttgtcggtgaccttagtcctgaggttacagatgcgacattgtatgcttgcttctctgtatatcctagctgttctgatgcaagggtaatgtgggatcagaagacaggccgttccaggggatttggatttgtttcttttcggaatcagcaggatgcccaaagtgctataaatgatttgactggaaaatggcttggaagtagacagattcgttgtaattgggcaaccaaaggggccagtgcccgtgatgaaaagcagagttcggattcaagaattggcgtggagttgatcaatggatcattcgaagaagggcaggatacaaccaatgatgacactcacgagaagaatccttaatataccactgtttatgttggcaatcctggcttcggaggttactttt

SEQ ID NO: 225780 - DNA, 370 bp, Glycine max
gttagtttgtgtgcattcgcgttcttgttctcggagcttgttcaggacaaccaaaggcaggtcgacaacattggcgagctcgaacgaagactggaggatgctggatatgcggttggggctcgagttcttgagctgctttgccacagagataagggaaacagaagagagacacggctgttgaatattctttcttttgtacacagtacagggtggaaagtattatttggaaaggtagctgattcactggagaaaggaactgaacatgaagatgaatacatgatcagtgaaaaggagctcctaggaaacaaattcatttctatcccaaaggacatgggaacgtttaactgtggagcatttgttgctggaatag

SEQ ID NO: 225781 - DNA, 489 bp, Glycine max
gacttcaaagcagaacatacattagaatgaaaagcatgagttcaattgacaaatcaatagggtaggctggtgaaaatcctaaattactttttcacatccataggtgcaagttccaaatctttctatattggtgtacagcattaaaatatttttaattgaaaattcttggtataagcatcagcctaatcttgcttctcttcgtaacacctcttcagcaaattttatcaaaattgttgtccgtggtcgttgttgaccttccatggggacaaaatgagctgttacaacagctggaaacccggcaccatccaaaacgccccgtactattccagcaacaaatgctccacagttaaacgttcccatgtcctttgggatagaaatgaatttgtttactaggagctccttttcactgatcatgtattcatcttcatgttcagttcctttctccagtgaatcagctacctttccaaataatactttccacactgtact

SEQ ID NO: 225782 - DNA, 540 bp, Glycine max
caaccctctctctatattccattgccacccagttttgaatatatttttattccttctttgtttcttcactttcttccatacacataaccatgtcttctcagactgttgtcctcaaagttggtatgtcatgtcaagggtgtgctggagcagtgaacagggttttgggaaaaatggaaggtgttgagtcatttgacattgatctgaaggagcagaaggtgacagtgaaaggaaatgtggagccagatgaagttctgcaagccgtttccaaatctgggaagaagactgcattctgggtggatgaagcaccacaatctaaaaacaagcctttagaaagtgcacctgttgcctcagaaaacaagccttcagaagctgcaactggtgcctcagctgagcctgaaaacaagccttcagaagctgcaattgttgattcagctgagccctgaaacaagccttcagatactggtgatgaaactgttgcttaaggcatttgtggttctatatttctatgtggaagtaggtctgtatcatatagtatttcat

SEQ ID NO: 225783 - DNA, 416 bp, Glycine max
gtcaaactgtcgttaatgctgttacatggggtgtcttcccagctagaggagatgattgaaccaaccattgtggatcctgtcagcttgaatgtatggaaggatgaggcatttgaaatttggtcacgaggatgggcaagcttgtaccctgaggatgaggcatccaggaaattggttgaagaggttgggggcagccacttcttggctaggatggtcgacaatgattacatcaatggagatctttttgccgtctttgcagatttctgacatgagcttattattgattagtactttagctatgtcaactctgatggttgacatgatcttttcctttctatggctttcttctcagtatgatgattgatattacacatggctctaagatgaagtgccacattattgttctgggctatgtccct

SEQ ID NO: 225784 - DNA, 469 bp, Glycine max
cacagttcactcattatatatattaagaaacatccaattcagaggaaggagtaacttgtccttatgtcaacgtacaggttacccatgcgactttgaagaatgaaaatataaagacgttagggacatagcccagaaaaataatttggcacttcaacttagaaccatgtgtaatatgaatcatcatactgagaagaaaacagaagaaaggaaaagaacatgacatccaacagaagtgacatagctaaagtactaataaataataagctcatgtcagaaatctgcaaagacggcaaaaagatcaccattgatgtaatcattgtcgaccaaactaaccaagaagtggctgcccccaacctcttcaaccaatttcctggatgcctcatcctcagggtacaagcttgcccatcctcttgaccaaatttcaaatgcctcatccttccatacattgaagctgacaggatctacaatg

SEQ ID NO: 225785 - DNA, 417 bp, Glycine max
attttctaagcattcagtaaatgaactaaccatggcagagaccattcgcttgggtgttgctgttcttggcaatgcagcctcagttgccctttatgctgcaccaatggttacctttagaagagttataaggaagaaaagcacagaggagttttcatgctttccttacatcattggcctcttgaactgtctccttttcacttggtacggtttgcctattggtagctacaagtgggaaaatttccctcttgtcacagttaatggagtcggtattcttctcgagttatcctatgttctcatttacttctgggatgcttcagcccaaggaaaggtgaaggtagccatgactgctataccctttgcgcttgtgttcttcataattgctgcagtatcagctttagcattccatgataatcatca

SEQ ID NO: 225786 - DNA, 433 bp, Glycine max
ggaagttattgctgaccttattgcagctggtgcttcatggattcaatttgatgagcgtacccttgtcttggaccttgaatctcacaagttgcaagctttcactgacgcatatgcagaacttgcacctgctttgtctgatctgaatgttcttgttgagacctactttgctgacatccctgctgaggcgtacaagacccttacatctctgaatggcgtcactgcatatgggtttgatttggtccgtggaacccatactcttgatttgatcaagggtggatttcccagtggaaaatacctcttcgctggagtggttgatggaaggaacatctgggccaatgaccttgctgcttctctcactacattgcagggtcttgagggcattgtgggcaaagataagcttgttgtgtccacctactactaccttctttacact

SEQ ID NO: 225787 - DNA, 513 bp, Glycine max
gcacaaaactggtaatatttcatatcaataaggattgcggcaaagccgcaaagatacaacattcattagggaaaacaggagttgggaaaaataaggggagaggggttgaggaagaatcaattgctcacagagcatgctaaaacatctaaatattccacacacggttattgaaacaacccaatatagaaaatttttctttggtgtattataaaagcagaaccaatgaacttgtagattctactttcttataccattcacttggcaagttcgttacggatgagttttgctgcggcaaccatgtttgtgagggctggcttcacttcagtgtacttgcgggtcttgagaccacagtcagggttgacccacaagatgttcttctcgagcactgcaagcatcttattgattctgtcagcgatttcttcagttggtggtattctaggggagtggatgtcatagacaccagggccaatttcagcaccatacttcacacctttacggaagactgacaggagc

SEQ ID NO: 225788 - DNA, 445 bp, Glycine max
accatatatatcttgagagagagaatgcgaagggcactgatcacaggatgatgctctctttaagtagggaagcagatcttatcattacatattggtaggtcgaagttctagctttagccatctagctggacaaggtagatctagcacaccacacagtacatgatcatttattgtatgcacaatctcattctcatggtgctcaagatgcatggactaatttagcaacaatgttggtttgattggcagtggtcacagattgaccgggtccccataaaatggccttgctttcaatgaaatggcaaacagggttggtatcaggatcaactcccataagctgatgaagcatttgatgattcattccagaagtatttgagtggcaaataacacgtgcctgagtttgggatccatcggcagccaccaatggaaccctgaaagctgttgtttc

SEQ ID NO: 225789 - DNA, 370 bp, Glycine max
ctgaaatgcacgtcctaggaattacctactttgttgacaccactgctcaagaacgggggacccttgggggtctgaatggcttcactgaacatggattagacttggtccgacgaaccccatctcatggatatgatcaaagattggatttccccagaggtaaataccttctatgctggagtgcttgacggagggaacatttggaccaatgaccttgatgcttctctcactacattgcagggtcttgagggcattgtaggcaaagataagcttgatgagctcacctcatcctcccttgtatacactgctgatgatcttgataacgagacccagtaggatgacgagatcaagacatggctatcctctgctgtac

SEQ ID NO: 225790 - DNA, 382 bp, Glycine max
caatgagggttgccgaagggccgtgatgatacgacattcattagggaaaataggagttgggaaatattcggggcgagttggtgaggaagaattctaggtttacccagcttgctagaacatgtaaatcttgcacacacggctgttgatgcaacccaatatagtacactattctatggtgaaggagcaaatcatgaccggtgaacttgtagattatacttgcttataccattcactgggcacgttcgatcggatgagctttgatgcgctaccatgtttgagacggctggcttgactgcattgaacatgcaggtcttgagaccagcagacagggttgacccataataccatcagctttagcactgcaagcatcttatggattatg

SEQ ID NO: 225791 - DNA, 542 bp, Glycine max
gttaaaattcaaggtttcaagatagcttataaaaggagagaacatctgtttttatcaagctctgatggcagggttaaattttgaagccacatatactgacaaccatgatattctgaagatatttgcagctgaaggtgttgaattccttttatcttgtgaaggaaaggtacccgtatcagaatgcaatgggaaaattatatgcctatttttcactgcaaactggtgtagaccttgcagagctttcattccccgtcttgttgaactttatgaaacactgagaaagaggggaataaatctagagatcatcttcatctcctttgaccgtgatgaggatggatttaaagaacacttcaagaacatgccatggctagccgtcccatttgatgtaagtttgcacagaagactgattgacagataccgaattgatcgaatcccatcattcgttccattatgttcagatggcataaccattggagaagacttgattggatgcattgaggattatggtgctgatgcattttctttcacaaggaagaggcttg

SEQ ID NO: 225792 - DNA, 342 bp, Glycine max
gcaggtatggcaacatactgataggatacaaagatatatatagtgtttaaagtttcttaggtattacaactttatttccatcaccacaaaaatagctagttgatgtaattggtagcaaacttgtgtgtttctgttctctatcaactttagtccttgttgaccttttctagacaacttgggtgaaggtcatagtcacagacatcacaagagaatgtccaaaacttgccttgctttttacatgaatcacatacatatgctttggccatatccaatttcagtacatgttcatgcttcacatcctcaacctgctgaggcaaagcctatccttcctttctaagagct

SEQ ID NO: 225793 - DNA, 535 bp, Glycine max
acagaatattacaaagtaacgtctttctgagtggagcgcttgatttcgtttggtgggtcaacttcaaggttcgattttgttcatttttctctcgtcgattgagaaggctcagttgcagagacagtgggggtgggacggttatggctttttgcccaattttttgttgcggaaatggttcggatcgcaaaggacgagggaagaaacaacctccatggcgggtgttttctttgaaggaattacactccgctactaataatttcaactatgataacaaacttggcgaagggggattcggcagtgtgtactggggccagctctgggatggatcgcaaattgcagtgaaaagattgaaagtttggagcaacaaagcagacatggaatttgctgttgaagttgagatgttggctagagtacgacacaagaatcttctcagtctacgtggctattgtgctgaaggtcaggaacggttaattgtgtatgattatatgccaaatttgagcctgctctttcatcttcatggacagcactcagcaga

SEQ ID NO: 225794 - DNA, 452 bp, Glycine max
cgccgattgtcttcttccattttccaagtccttcaacgacgtcaggaccacacgcgcgcgtgacgtcgtcgccgtcgccgtcgaggagattcaatccgaacaacatcaacctcctaagaagaaaaaactgagccgctgcaagacggcacctgcgatggtcaccatgcgagaccttaaacctaagacaccccaactccccaaacctcaatcaagttccataattcgacaaggcatgtggttactcgccgtgtacctctccataggagtagtcatatactccttcaacagggaccgtttttccggcatcgaaacacaccctgtggtcgacgcactctacttttgtatagtcaccatgtgtaccatagggtacggagacatagcgccgttcaccccattcaccaaaatcttcggttgcgcttttgtgatggaggggcttgggttcatagacatac

SEQ ID NO: 225795 - DNA, 466 bp, Glycine max
gtcagcagctctttcaaggagggggatctcattaaaggaaaagatctggagagcggatgtagttctgcagacaatgtctcagcaggaactgcagtttttctcgcggagcttgaggaaaaaagagctattaatgtttttgggaagagcactttgattggattggctctaacattctttgctggactttgcttctctatgttctcaccagcattcaacatagcaacaaatgaccaatggaatactttgaaaaaaggggttccccatttgacagtttatactgcattcttctatttttcaatatcttgttttgttattgccatgattctaaacattacctttctctaccaccctgtgctaaacctacccaagtcattatttaaggcttatttggcagactcagatggcagagtcctgggctctgtggctggactactttgtgggtttgggaatggtctttaatttatgg

SEQ ID NO: 225796 - DNA, 472 bp, Glycine max
caatcacgtaatttgtttcaactattatgttgaaagcataggacacgacaaatagtacacaatataaagccagaacaaacattggagatattatatatatatatatatatatatatatataatcgtacaatttttcattttggaagtccaaatatacagaaaaataaaaaacataaaagcatttcaataagaatatatcaactatgctccctgctttatttctttttctgcactcttttcttaatagattttgtcttcttctcttattcacaccaatgaacactgagaattgttctgcctttgcactaggcaatctataaacaacttgtgtgtagtccaattattacttggcagtgctgtttctttgccctgatgatgccattagcacagggacagccactataaacgtaaacaacatacttcctagcagtatatatgatcttactgatgatttcctggactcttcaaacag

SEQ ID NO: 225797 - DNA, 501 bp, Glycine max
atttgaggaggaaatctactctttttagcagattcagtccagcagatagttcttctgctagcaatgctaagaatacgagtgcttcaagtagtaacaagagaatgagttcatctgtttcccgaaaattgaaccataagaattgggatgctcaaattgccgtggctgatcagggagatcttcaggagagggatggaattgtttcggaaaggagcaaaatggataaaagcggagtttcaaagccagaaacgaaaagggcactgctaaacaaaagttctgaggataaaatacaaaagtatggtgggtccaaagctggatctcgtgtggttccatatcaagaagatgagagccaagactcagttcctgtcagtatcgtctctaaagatctccaaaggaatgacaaagagagtgaagatttatcgctgatccgtgatcagttacattagattgagaaccagcagtcaagtctacttgatcttctgcagaaattcatgggaagcttac

SEQ ID NO: 225798 - DNA, 479 bp, Glycine max
  unsure (1)..(479): unsure at all n locations
ctgttgtgtgttttccttgtttcccctattattatctcgctctcacaaaatcatggcattctctagtgctttgattctgtggtcgttgctagcaatcaacatggccctgccaaccctcgcaaccgtctacaccgtgggagatacttcaggttgggcaattggtactgattatagcacttggactggcgacaagatcttttcagtgggtgatagtctcgcgttcaactatggagctgggcacacagtggatgaagttaaagagagcgattacaagtcgtgcaccgcagggaattctattagcacagacagtagtggtgcgaccacaattgcccttaaaagtgcaggcactcattacttcatatgttctgttcctggacattgttctggcggtatgaaacttgccgtcactgtcaaatcaggaacagcctctgatgccacacccactacttccactactaccgncactaaatcaaactcgt

SEQ ID NO: 225799 - DNA, 496 bp, Glycine max
  unsure (1)..(496): unsure at all n locations
ctgttgtgtgtttaccttgtttcccctattattatctcgctctcacaaaatcatggcattctctagtgctttgattctgtggtcgttgctagcaatcaacatggccctgccaaccctcgcaaccgtctacaccgtgggagatacttcaggttgggcaattggtactgattatagcacttggactggcgacaagatcttttcagtgggtgatagtctcgcgttcaactatggagctgggcacacagtggatgaagttaaagagagcgattacaagtcgtgcaccgcagggaattctattagcacagacagtagtggtgcgaccacaattgcccttaaaagcgcaggcactcattacttcatatgttctgctcctggacattgttctggcggtatgaaacttgccgtcactgtcaaattaagataagcctctgatgccacacccactacttccactactaccgncactaaatcaaactcgtcttcagcgagtagtgtc

SEQ ID NO: 225800 - DNA, 401 bp, Glycine max
ctccgattttagatagaaggttcatcatctcatctcaaactggctgttgtgattgataatcagttctggatttgatttgatcggaacagtacagaggcatgggtcaagcttttcggtagctcttggacaccttgttgggcaatcccgagatgcggcttgtgatgcttggtctagatgctgctgtcaaaacaactatactgcacaagctgcacattggacaagcattatctactgttcctacaataggttttaatgtggagaaagctcagtctaagaatgctgctttcacggtttgggatgtcggagggcaagagaaattaagggcactgtggaggcactatcttaacattactgatggatagatatatgtcgttgacagtctggaccgcgaatggatcggg

SEQ ID NO: 225801 - DNA, 319 bp, Glycine max
cttgcaccatccaagactggttttgcaacataggccatacattgtccagctattgaggctcctggaatcttctatactaatgaggcaagctactcatttgctggttaccctctgcatatcctgtcacaacctgtagccacagctgtcccctgaggcttgatgatcatcgtcggagatgcaaaccccaaagctgggttcaacacggctgacgatatcggaactcatacaatcaattctgcacatgatcctataaccttgcaaactttccttttcatgagaccaccagcagataccttgacgcatgatgagctagttactc

SEQ ID NO: 225802 - DNA, 402 bp, Glycine max
cagaacttcatactttgttcgatcgaagagcacaggcagcatttcagcattactacaggaggctattgatatggaaaaccaagttttatcaactaaaccatcagagcagcaaagctcagcaccttaggcatactgcttacgggactgatcgacagcgatgaagttcgcatcaggatatttcgctgcagctttccctgggaaagcagactcatatccaaagttaggaggatccccctttacataagaagagtggctaattgacaggatcacattcacagatggtgcggcctattcaacttgctacacgagtagtacatctggaacatagactctgtcaagagtattaccaatgtttgactcgcacacagttaccagctcattcaccgactgggtgttaactgg

SEQ ID NO: 225803 - DNA, 351 bp, Glycine max
aaccatatatatcttcagagagagaatgcgaagggcactgatcacaggatgattctatctgtcagtagggaaggaaatccaatcattacacattagatggtcgaaagtctagctctagccatctttctggacaaggtagatctagcgcaccacacagtacatgatcatgtctagtatacacaatgtcattctcatggtgctccagatgtatggactaatgtaacaacaatgttggtttgattggcaggggtcacagattgaccgggtacccatagaatggccttgctccctatgaaatggctaacagggttggtctcaggatcaactcccattagcaggtgaagcatttga

SEQ ID NO: 225804 - DNA, 559 bp, Glycine max
aaccactcttaatttctctctgtctcgtttacacatctctccaacctttcactttcggttctcagtttgattcgaatccctctctcaatctcctttccaaatggccagcgttgaggttgcacagcaaacaccaacaacagttccagaaaatgaaacaaccgaggtaagcaagacccaggaaacaaccccagtcactgaggctcctgcaacagaacaaccagcagctgaggttcctgcaacagaacaaccagccgctgaggctcctgccccagaatcaaccaccgaagcaccaaaggaagaaaccaccgaggcaccaacagaaacagtagaaaaaacaactacagaagtagccccagaggagcctaaagaagttccagttgagaccgaggaggtggtggccaaggagacagaggaagagaagccagcagaagagaaatcagaggagaaaactgaagaagtgaaagaagaagcagaggagcctaaagaaactactgaaacagaattagcagcagcagcaccaccagcaaccacagaggaagagaacaaccagctgagtcag

SEQ ID NO: 225805 - DNA, 610 bp, Glycine max
  unsure (1)..(610): unsure at all n locations
aaattataaagtaaatatcatttattcagacctaaagaaacacagtaacacaccatcacaaactcatgtaaccctgccaataaaccatcacccctaaactccagcaccagcagcttgctcacttcaatacacaactcccagaatttctcatgtcaccacgtggcaagcacgctgatgtggagccaagtgttgtgcttacacgtaggtgtaccctccataatacaaccaaagacttaagcatcatataataatattaataaagtaaactaaagaaataaaaagaaaaaaaaaaaagaggcttttcaacatggcatgcaaaatggtagacctgatccccacaactaggaccatttttaaacttgtttttctcactcacactgtccataggtctaagcttcagtcttctcaacaggaacctctactggggtttcaactgactcagctggtttgatctcttcctctgtggatgctggaggtgctgctgctgctaattctgattcagtagtttctttaggctcctctgcttcntctttcacttctttcagtttcttctctgaatactcttctgctggcttctatatccttgcttctttgccaccaccttcttggt

SEQ ID NO: 225806 - DNA, 527 bp, Glycine max
  unsure (1)..(527): unsure at all n locations
ttgaaaagggttcagaagtactcaacgctgttagaccggctggagcggcacttgttgatgactggcactgcctgaaaaccatggtgaggacttttgagacacattgtggatccttgtctcaatacgggatgaaacacatgaggtcctttgcaaacatctgcaatgtagggataaagaatgaacaaatggctgaggcttcagcacaagcttgtgtcagtattccttccaatccctggagttctctgcaaaggggtttcagtgcataataactccctgtaatgtgcactagtaaagaccaaagtatgattattggtacattatgttacatggttgtacttgtatatacatatcttgtcccacctttgtaaatacaattgggacactactangattgggaaagagggtctttacatttatagtttggcatatagatattgcaactacctttgtataattctatttctgaagaagcaattacaatttacaagggattgtgccatttacggcatanggattaaggagggata

SEQ ID NO: 225807 - DNA, 527 bp, Glycine max
ggtttattcaagtttttagcacacacaagattgggccttggttgagtatttgcaccgcagagacagagaggaaaaagaaacgcaaacaacgatggctgtgaaaggatcaccacaacggtgggacatgagattagttttgacaattactcttcttttaatctcggtctctgtttctgctcttcaacacgtaagtcacaaaaacattaatcccaccaccgttgagacaacccaaactagttttcttggtaaagtcgtgaactttttgtggagctcatctggctctggataccaacatacttggccggatatagaatttggatggagaataataacgggtacgataattggattcctgggatctgcatttggaaccgtgggtggtgttggtggtggtggcatctttgtcactatgctctcccttattattggatttgatgcaaaatcagctactgcaatctccaagtgtatgattacgggtggagcagcagcgacagttttctacaatttgaagcataaacattcaacac

SEQ ID NO: 225808 - DNA, 524 bp, Glycine max
gacaaaaaaaaactaagcgctgaattaattttcatcacttaaaattattgacataacactgcttaaaattctgacttgataaaaaaacaattcgaactgaaaaaaatgccaattatatagtccttgaaattgaatctgtaatccgaattctaatatctaggctgagtaggtacaaaggttttcaaaccccatgtactctttatttgcaattttttggatcatgtttgatatgcccacaccacctagtgatattgcactaacaaaaatggtgccggagaggatgaaaatgatcagagatgctctccctagtatggcaaccagctttctcactaaaacttgtccaacaaaggccgcaaaagtggatacagccacaaagtaaagagtataaggaataggaaaccgttttagaaggtaatattccaccactgacatagatgctgaaaatgtcatggcaaaagtggctgtagcacttgacacctgaggagggattcctagctccaagaaaaggggtcccaaaataaaac

SEQ ID NO: 225809 - DNA, 526 bp, Glycine max
  unsure (1)..(526): unsure at all n locations
ggtttattcaagtttttagcactcacaagattgggccttggttgagtatttgcaccgcagagacagagaggaaaaagaaacgcaaacaacgatggctgtgaaaggatcaccacaacggtgggacatgagattagttttgacaattactcttcttttaatctcggtctctgtttctgctcttcaacacgtaagtcacaaaaacattaatcccaccaccgttgagacaacccaaactagttttcttggtaaagtcgtgaactttttgtggagctcatctggctctggataccaacatacttggccggatatagaatttggatggagaataataacgggtacgataattggattcctgggatctgcatttggaaccgtgggtggtgttgggggggtgggcatctttgtcactatgctctcccttattattggatgtgatgcaaaatcagctactgcaatcttcaagtgtatgattacgggtggagcagcagcgacggttttctacaattngaagcaaaaacattcaaca

SEQ ID NO: 225810 - DNA, 542 bp, Glycine max
ggttttctcttcctcggtcgtttcatttcgtttcgttgaagagcaacttttctctctctgtctctgtacaattctcccttttcttccctcgtagatcgaaagggaatattcttccatggcctccaagcggattctgaagggagctcaaggacctacagaaagaccctccaacctcttgcagtgccggtcccgtagcagaagatatgtttcattggcaagcaactataatgggtccccctgatagcccttatgctgggggtgtttttctagatactattcattttcctccggattatccattcaagccacccaaggttgcatttaggactaaagttttccacccaaatatcaacagcaatggtagtattcgtcttgatatcttaaaggagcagtggagtccagcattgacaatatctaaggtgttgctctccatttgctgcctattgaccgatccaaacccagatgaccccttgggcctgacatagctcatatgtacaagacagacagggtcaagtatgaaacaactgctaggagctggactc

SEQ ID NO: 225811 - DNA, 210 bp, Glycine max
ctgcactttgctgtggaagaattttcctacatgaaccttatggagaggcgagagatggctgatgcatacctaggcgccacagagtaaaatgacgtggtcaccgagcgtggttaccacagcgcttgtcagagacaagctcccaaaaacgctggagtgagaggtgctctatatgtgcacagactgaggattgagcctactgcagctgccatt

SEQ ID NO: 225812 - DNA, 273 bp, Glycine max
tgtagtttgagggatacaaattttaccctaatggagattatgtgcgacgctggcttccagaacttgcaagattaccaacagagtggatacatcatccttggaatgcaccagagtcagtgctacaagctgctggaattgagttaggatcgaactatcctcttccaattgtgggaatagatgcagcaaaaaccagattactagaagcgctatcagaaatgtggcaacaagaggcagcttcaagagctgcaatggagaatggaactgaggaaggac

SEQ ID NO: 225813 - DNA, 445 bp, Glycine max
agcaaattaaatgttgtgaagtgggtatcatccgttgttttcccagcaagcatgagtgctggagtggaagcagttgacccttgtctgtccttcaaagatgtttcaaatacacagaagcaaagcctgttcattagtaagttgaatctttgctgcaaagtttatgacatgagtgatcctgataagaacaccacagagcaagatctcaaacgaaaaacgttgctggagcttgttgattatgtttgttctggatctgttaagttcacagaaccagcaatcgccggattgtgttaaatgtgtgcaactaatttgttcagggctgtgccaccaaagtttggaacatgtactactggtggggaaacagaagaagaagaacctatattcgatcctggctggtctcacctacaagttgtttatgatctactcgttcagttcatcaattataact

SEQ ID NO: 225814 - DNA, 414 bp, Glycine max
aaaaattgtgaaatggaatttttacccattttgtcttccatttcccttttgttgtgtttggttttgtggcaaggaagtggtgaacctgttgaagataaggaggctttgcttgactttgtgaacaagttccctacttcaaggcctttgaattggaatgagagttcccccttgtgtgattcttggactggagtgacttgcaatgtagacaagtccaaagtaatagcaattaggttgccaggggttggatttcatggcagtattccacctgatactattagccgcctctcggcactgcaaactttgagccttagatccaatgtaataactggccattttccttctgattttttcaatctcaagaacttgtcttttctctatcttcagttcaacaatatttctggtcctttgcctgac

SEQ ID NO: 225815 - DNA, 526 bp, Glycine max
gagaaaaaataataatgataataataataaccacgctcttgttcagaacttggagttaaacattgacaagatgcactcaaatcacaaacaaaggttctttcattcacttcctctctggaagtaggagggagtggaaggagagttaccattgtcacgttgagaaaatttaagttgttctgcttggttcccagatgatgagtgagtctgtgcatcagtctgcctcacattttcaatcatcttcacaacttcagacatcttaggcctctgatcaggcatcctaaccacacatgacatggctatctgcaacatttccaccatctcttcttctatgttaggatatctcatcagctccaagtcaaacacttcagctgtccactcctcgcgcacaaccgaatgaacccacctcacaaggtggataatctcatcaccaccagttgtgtggataggggatttcccagtcagaagctctagcaacactacaccaaagctgtaaacatctgagggctgtgctgcctttctggtgtct

SEQ ID NO: 225816 - DNA, 569 bp, Glycine max
atagcaattaatccattatttcgtataacagataaacaacaaaagcttaacatctttgaacatcgtaatcataatttagattgttccccttaaagcagaggttcggactacaggcaacatctagtgctgatttttcaattacaatacccatacagaatataattggaaaggtaatatatttacattcagaatgaaacagcagcgtcagcatccatatcagtcacctctctgacgaggtttttggtggaaggcaaaccagctgttacatcctcttcaatcccacattcgtttgtccctcttcggatcttgaagtaaccatcatctccccattctctgttccactgatttgcgagaagccaatagtcctccccatcatcagttgttccccacccaattagctttactgcatgaccacctagttcataaccagtgatgtgtttgtaaactcctgatttgtagtaagcaaaatcctcataaacggtaaatgcaacttcaactggcccattcttgtaaacttacgccatgatttcatggggatcagagttgactctgtatgcactaacactata

SEQ ID NO: 225817 - DNA, 239 bp, Glycine max
agtgatttcagtgagtgatcggtgttcacttgatctcatcataatcgtcagcgtcaattgaagaagatgccgatcagaaacatcgccgtcggaaggcctgaagaggcgactcaccccgacacgttgaaggcggctttggctgagttcatctcaaccttcatcttcgtgttcgccggctcaggctccggcatcgcctacaacaagctcaccgacaacggcgctgccacccctgccggcct

SEQ ID NO: 225818 - DNA, 518 bp, Glycine max
ccctgatatcgcccagggtgtgcacggtcacttcaccatgcgcccagaggaggttggtgctggtgaccagggtcacatgtttggctatgccactgatgaaacccctgagtacatgcccctcagccatgtccttgcaaccaaactcggtgctcgcctcaccgaggttaggaaaaatggtacctgtgcttggctgaggccagatggcaagacacaagtaactgttgagtactacaatgacaatggtgccatggttccagttcgtgtccacactgtcctaatttccacccaacatgatgagactgtgagcaatgaccaaattgctgctgaccttaaagagcatgttatcaagcctgtcattcctgagaagtacctggatgagaagaccatcttccaccttaacccttctggccgttttgtcattggtggccctcatggtgatgctggtctcactggaagaaagatcatcattgatacctatggtgggtggggtgctcatggtggaggtgccttttcaggga

SEQ ID NO: 225819 - DNA, 575 bp, Glycine max
  unsure (1)..(575): unsure at all n locations
tctctctcggatttcttgcgcggtttatcatgggggatagtcagtattcgttttctctcaccacatttagcccttctggaaagcttgttcagattgagcatgctttgacggctgtcgggtctggacaaacgtctttgggaattaaagctgcaaatggagttgtcattgctaccgagaagaaattgccatctatattggttgatgaagcatcagtccagaaaattcagttattaacaccaaatataggtgtcgtatatagtggcatgggtcctgattttcgagttttggttcggaaaagcaggaaacaagccgagcagtatcaccgtttatataaagaaccaattcctgtcactcaacttgtcagggaagttgccgccgtaatgcaggaatttactcaatctggtggtgttaggccttttggagtgtccctgctagttgctgggtttgatgataacgggccacaattatatcaggtggatccatcaggttcatatttttcttggtaagcttctgctatggngaataatgtttctaatgcaaagacgtttcttgagaagaggtacacagatgatatg

SEQ ID NO: 225820 - DNA, 411 bp, Glycine max
ccattctctctgtgtatttccttacctctcccttcaagatgcagatcttcgtcaagaccctcaccggcaagaccatcacccttgaggtggaaagctctgacaccatcgacaacgtcaaggccaagatccaggacaaggaaggaatccccccggaccagcaacgtctcattttcgccggaaagcaacttgaggacggccgtacccttgctgactacaacattcagaaggagagtactctgcacctcgtcctccggctccgtggtggcatgcagatcttagcttagacactcaccggcaagaccataaccctagagggtgaaagctccgacaccatcgataacgtcaaggccaagatccaggacaaggagggtatccccccggaccagcaacgtatcatcttcgccggaaagc

SEQ ID NO: 225821 - DNA, 533 bp, Glycine max
atctacaattttaaagggcggttacaaaattacagaaaggaagcatcgaagtctgtatgaaacggatcgtctcatcgtgataaaagactaacagaactattacaatacacaattcgctaaagtgaaatgccacacattgcaactttgccacttaacacaatttgcagttcaggtgcgtcgctgtttccttgtttaaagagcttcaatttccctcatcacttgagctttgtcagcttcaaattgttcatcctctttgtcaattttgaagtcttccaacagtctcagcatcttacttttgttcgcaacaaatataccgacgatatcagctggcttatgttggttagcagcaaatagcttgaaaacatgaaatgcttcaatctgtatgctcttgcttgactctcttagaagattcattaaaatcctcaagttgtctcttgagctcacatatcttgtcattacggctgaatttgaacgatcaagtaacatatcttccaacaacttgacagcttgacgccttgtaatataattggaag

SEQ ID NO: 225822 - DNA, 503 bp, Glycine max
atctacaattttaaagggcggttacaaaattacagaaaggaagcattgaagtctgtatgaaacggatcgtctcatcgtgataaaagactaacagaactattacaatacacaattcgctaaagtgaaatgccacacattgcaactttgccacttaacacaatttgcagttcacgtgcgtcgctgattccttgtttaaagagcttcaatttccctcatcacttgagctttgtcagcttcaaattgttcattctctttgtcaattttgaagtcttccaacagtctcagcattttacttttgttcgcaacaaatataccgacgatatcagctggcttatgttggttagcagcaaatagcttgaaaacatgaaatgcttcaatctgtatgctcttgcttgactctcttagaagattcattaaaatcctccagttgtctcttgagctcacatatgttgacattacggctgaatttgaacgatcaagttacatatctcccaacaacttga

SEQ ID NO: 225823 - DNA, 619 bp, Glycine max
gcacgcaaacaaagtgatttattaatccattcgatgttcaaatggtaatagaaacaataaaggtctaaatgcccaaatggtctctaacagaagctaaaaaagacaacatagaaaaacaataacgtatctggaaaaccagacttattttcacaaggacagaataataaagacacttaaggaaactactcttcctcatcttcctcattccagcactttagagttgatctaggtgaaccacagtcactagtcttcccgaatttttggtagacaacagaaccacccattccaagcccttcgtggctcctctcttcacgacagtatcccttaacatccagaaagcaggtctgctcaaacgacttgcttgcaccatccacatgaactgcaacagaaaactcagttgggaggaaacatgccaataccctctgaaccatttcgttcagattcaccgctttgaagtcataaccaacagtttcgaagcttgcataactgaaaccatcttctggggtaccatgaattgtagaaacagcagcgcctttaacagagtccattgaataaccacatggttcaaagtcaaagtcacaaatctcggaatctggaagaattttctaatgccggaata

SEQ ID NO: 225824 - DNA, 548 bp, Glycine max
aataatctaaaaacgatttatttttcaagtatgaaaaacatatttaagcctaataataataataataagcagtcgattcattgtatgctgcttgagagaacataaatttaagggccggggaggcccatcaaaattttaagaagcttttacatttgatacgattttctgtatatttcttgtattgaagcaatgtaaactctatttccattaacacgatttgacaaccagaagggctatgctgcgcacaacagtaattatattcgggagtccacttttgaagattatttacgtcaagctagtgtccacaggatagctccctagcactcgcaagaatgtagcaaactcctttagatgcctcagggcattctgtgcactctgctcagccattgatgcttcaaaatcaacatagaaaagataatcaaagtacttggaattgttgctatcatctgctcgtagaggttggttgcgcaaaggacgacttttcaatctttgtaaggttaatctggcgcaaagcataaacagcaagggcttttgaaaagtattccagg

SEQ ID NO: 225825 - DNA, 581 bp, Glycine max
  unsure (1)..(581): unsure at all n locations
cggctcgagatttgaagaactgtttttcttagatgacatgttaaaggaatgtccggaaacacatctacaaaacctgcgtactggaatctataaagaaacaatccaattaatcaaaacgcacaacgaagatcgtatgaatacgattttgcacttctcgacaaatataatttgtttctttattctaagcggttattctattcttggtaatcaagaacttgttcttattaactctttggttcgagaatttatatataatttaagtgacacaataaaagctttttctattcttctattaactgatttatgtataggattccattcaacccatggttgggaactagtgattggtttcgtctataaagattttggatttgctcaaaatgatcaaattatatctggtcttgattccacttttccagtcattttagatacaattttaaaatattggattnttcgttatttaaatcgcgtatctccatcacttggagtgatttatcattcaatgaatgattgactgacacaatgattaacttataaaatctaaattaaagtttttagcttaaaagaaaaaactttgcttt

SEQ ID NO: 225826 - DNA, 604 bp, Glycine max
  unsure (1)..(604): unsure at all n locations
gtaggacgatagttttgaaaagacagattgcctatcttctctttaatctcaggcgaaatacgatcggggggtgccaattcaaaaccttccggtaaaataagaacagcccccacattcaaagctccctttttaccattagcaagaacttgtttcacttgcatatcataaggaattcgaacaactgcttcaaatacagtatcaggaagtaccgcttgtggaacctcaatatccacgggcttattagctaaatggcaattggcacagacaatacgaccggttgcttctcggggattttcataaccctgctgtgcaaaaattggatatgcgtttgaaatgggtgctcgaattattatatatatcatgatcgatatggaaatggatcgagtaatcccttcctttatacaagaaaaagcatttctagtttgcatggtctaatcattgatcctgaaaatttctacaatangattaggtaggtcactcgcatagttccctatccaagtcggggaaccccttttttcatttaaggcggttaaacagaagggaaaaagcaaagtattttctttttagctaaaaaactttaaattaaatttgatagtggatcatt

SEQ ID NO: 225827 - DNA, 551 bp, Glycine max
  unsure (1)..(551): unsure at all n locations
gcaacctcctcctccttccaattcaacgcggatttcataattctcgatccatgtcgtccgagatcgaggttgtcgaggaggtgcagtcccgcgacgagcaatcgggggcggaggagagcctccgtaatgacgtgtacacggcggcggcttacggggatttggagaggctgcagagattggtggagcaagagggttgccccgtctccgagcccgacggtttgggctactacgcgcttcagtgggccgcacttaacaaccgcactgccgctgctcagtacatcattgagcatgggggagatgtaaatgcaacagatcatactggtcagacggccttacattggagtgcggttcggggtgctattcangctgcagagcttttactccaggagggtgctcgagtgagtgctgccgatatgaatggatatcagacaacacatgttgctgcacaatatggtcagacagctttcctttaccacatntgttcaaaatggaatgctgaccctgatgttcctgtatatgatggaagaagccccttgcattgggctgcatac

SEQ ID NO: 225828 - DNA, 332 bp, Glycine max
tgacaagcacatgtatcatgacttgtacatgaaggtttagggtaatgttttcaagaacaagagagttttaatggagagcattcataagtccaaagctgagaaggcaagagagaagaccttgtccgaccagtttgaggccaaacgtgccaagaacagggccagcagagaaaggaaaattgctcggagggaggagcgattagcccaaggtcctggagaaaaagtatcagccgcatccagtgctccagctgctccagcatcacagccagcccaagcaccaaagaaatccaagaggtgatccacatattctgatatggggagaaaaaattttgggg

SEQ ID NO: 225829 - DNA, 532 bp, Glycine max
taaatcctcattccagccacactcttcagaagacatggcctcattgggtgggttacaaaatgtgagcggcatcaattttcttatcaaagagggtccaaaagtcaatgcaaagttcgagctgaagccgccaccatatccactgaatggtttggagccggtgatgagccagcagacacttgagtttcactgggggaagcaccacaagacttatgtggaaaatctgaaaaaacaagttgttgggacagagcttgatgggaagtcactagaagagattattgtcacatcatacaataagggtgacattcttccagctttcaacaatgcagcacaggtatggaaccatgacttcttctgggagtgcatgaaaccaggtggaggtggaaagccatccggggagcttctagaactgattgaaagagactttggttcatttgtaaaattccttgatgagttcaaggctgctgctgcaacacaatttggttcaaggtgggcttggctagcatatagagcaagaaaatttgatggggaaaat

SEQ ID NO: 225830 - DNA, 421 bp, Glycine max
gcacgaacaaacaatcacatttcacacttctctctcttcaatggccggaatccgcttgctgccggaagactccgacgtctcccaacaatcccgcgcggtgcctctctccgccgccgatctggtctccgacgacgaccgctccgtcgccgatgactcctggtccatcaagagcgagtatggcagcactctcgacgacgaccagcgccacgccgacgccgacgaagctctctccaacgcgaacctccgacctccctccgattacagatctgacaaggatgaacctgattctgaagcagtcacgtccatgctgggatttcagagctattgggatgctgcatatgctgacgagctcacatattctcgcgaacatggtcatgctggtgacgtctggtttggagttgatgtgatggaagcagatgca

SEQ ID NO: 225831 - DNA, 460 bp, Glycine max
ggtcaaacatggtaaacataaaattcccatatagtttcatcgaccattcacacaagccttttgctacgctgaactaaatgtgtttttaccttactatctataaattataagtttcgaatgagaacaactgttcacccgaaagaaaggaaaatgttaatggaacacttcacataaaccatcgcaaaaaaatatttacggttcgacacaacagttgggaacatgcatttacctatacgcacacacaacttcaaacccattggaccagagacctaaatcataacagcaaatgacagacattttcatttccgaatgaatgccacggtagcaacacgggagcctacggatccaccaaacatgaatgttggatatgtgcggacatgacttacatactgaaatgggggctctctgcatggctcctcaccctttagtgcctcaagttcctgtgcagtagcaatttttc

SEQ ID NO: 225832 - DNA, 308 bp, Glycine max
aatatatcttgcacttagatcttgaggcgccaccccgggaaaggttggaattggcaaatgcagtgaaagctgatccaatatttcgtggggtggagaatgtgcgtgttatgtctcaatccaatttggtaacttataagggtcctacgatgattgcttgtaccctccaagctattgcaatattgttgaaggaaagttcagagtgggactggtttattaacctcagtgcctcagattatccccttatgacacaggatgatttgcttcatgttttctcaaatctgacaagaaatctcaatttcattgaacat

SEQ ID NO: 225833 - DNA, 572 bp, Glycine max
  unsure (1)..(572): unsure at all n locations
aaccaaccaaaagtccactgaaatttaatggccattttgtaactcaacaaaaaatgttgtaattgcataaatggttgcccggcactgcaaccaaaagcatgtctagaccgaaacaagcaccaaaactgctgatgtgagtgcttgttgattgttaatatgaacctatattgaacacaaaattctgaccttttacatcagatatatatgatctataatcagacttatgtacacttgacatcattcatcctacttggagggtacgtctttgtcacaaacactgcttgcttagagattctttagataacagcacctgaagcagctcacgtagcctctcagcaccaggtcctggcctaaacattgtatcattgccacgaacagaacaagggtcagccccaccatctgtgttcccaacacaccatgcaccaggtgaaaatctatgtgtgcgccccagaagttctttgtcaatcttgtctaacactggatcctcctttgcaaaattgcgcgccaagagtgccttgcttttaaccatttngtcaaagtccttcacagttaaagagatgggatgctgcttt

SEQ ID NO: 225834 - DNA, 448 bp, Glycine max
ggtgatatttgcggaaatgtttgtgatcgtgagcttcctcttcaaaactccggcgaggaagctggtgatcgtcacattggatcggctcaagcgcggtcgcggccccgttgtcgtcaagaccgtcgccgccacgctgctggtggtgctcgcttcctccctctacagcatcgcaaaaatccggcatcggaacctcgatgctcccgtcgctaaccccaccgaccaagtcctcgtgtacaagcacatgctcgaagcttctcttatggatagattgcaccattacataagagagcttcggttactgaggaaggccatggaggctgctaagaaacagagtcgaagttttgagggtggcaaaagtgtcagtgcagcggagcacaaggcattggtggaagaaatcgccatgttgaagcccaaaattgagaaactagaatctgagtgtgagatggaa

SEQ ID NO: 225835 - DNA, 528 bp, Glycine max
gaatggaagaaggcatatctttaaattgaattgatggggtggaaaacccgaatttaaagatttccaatcatacacaatattgcaacaacaaaaagaattttaaaaaaaaaagactttctttttttactttttttacccaaaacctaagcaaaatataaaaacaaacgacacttttttttagactctttaaatccaaaagctgatcacaatcaaaatcaatggcgttatttatgaaagctccataagacttcaaacgaccaaaagccggtttctccattgatgttctcttcaaacatgaatttactcttcaatagcaaggggcacagactcagccaatttgcggtacttgagagcatagaacatctcgaggtaacgtttgctctcacggcgttcaagattggtcacgtgcttccagaagccatacacaccagtgagtgtcaagagcctgtccgagtaaatttgccatgtgtacttctcatgaatacgcttgagtccaccctgggagattttgtcccagtgagatggatc

SEQ ID NO: 225836 - DNA, 499 bp, Glycine max
gcatgttgagcgttggacaactgcagattgttgggcacggggatatgattgttggtctgcagttgatgatattggatctctatctgttatctaccagatgcttgaatctgatgcagcaaaaggtattctatacttcagacagtcattgcttctcctaaggttgaactgtcctgaggctgctatgcggagtttacagttagctcggcaacatgcatcaagtgagcatgaacgtcttgtatatgaggggtggatcttatatgatacaggtcattatgaggaagggctctggaaagctgaagagtctatcaatatcaaaagatcttttgaggcctttttcctgaaagcctatgcattggctgactctagtatagatccatcatgttcaccaactgttatttcacttctggaagatgccttgaagtgtccttcagataatctgcgcataggtcaggcacttaacaatcttggaagtgtatatgttgactgtggtaaattggac

SEQ ID NO: 225837 - DNA, 506 bp, Glycine max
gggagataaacaacacatttgacactcataatataccccaaaaaatcaagattaacaattacaaaattgggaccactcccccggggcaaaagaatggtaataattcacatgttcatcactatagacaggatgataatttaactatgctttctatgttacaaatttgattttcatgactcagcttatggcagctgaaatgccggtcactccaatatccattcttcatgttcatggcatgcatgactgtaactttttcagtgcagccaagttttcaaagtgcaattccatgatctagccaaagtgatcatgtttttgactcatggctcgtgtctattgactcggctatgaagttccaacatttcttggtggttcgggtccactgagagggcagcacgacagtctcttagagcacctaagacattctctttatgttcatggaatgctgcacgtagatgcaagagatgcaaatcagctttaaatgcaatagctctagagagttctgcaat

SEQ ID NO: 225838 - DNA, 567 bp, Glycine max
gtggagagcttgtgtttttctgatcccttatcttaattaatttaatcaccaatggctcgttctatcgctaacgccaagactttctccgctctcgtgctagacggattctccaacactctcaccagacgtggctactctcaaagcgcaacatggggaggagttgcctccatagcacccaaatcaggggaagacaaaggtgtctcatcatacaaggtttcctgggtgccagatcccgtcaccggttactacaaaccggaaaacatcaaggaggttgatgttgccgatttgcgtgctacccttctccgcaaaaaattcaacaactaatttcaacaattttaattttttaccaaaccttgggtgattgattcgttatggaattaattttgatactcatatgctctgcccaccttcattatacgattgctatagttttacaagtcagtagaataactattagcagctaataagaattggaatttcctttaatcttattcattacttcagtttttctttcttttcttctcaattgccttcaatgtgattggatgtgtttctagcttgcacaag

SEQ ID NO: 225839 - DNA, 520 bp, Glycine max
atacactctgctcgtagggtttttccacctagagggtaatggctcccaaaccgcctagtacgggtctgtttgttggactgaacaagggtcacgtcgtcaccaagaaggaattgcctccacgcccctcagatcgtaaggggaaaacaagcaagagggtgcactttgtgaggaacctcataagagaggtagccggttttgcaccctatgaaaagcgtataactgagttgctgaaggttgggaaggataagagggcactgaaggttgcaaagagaaagctcggaacacacaaacgcgcaaagaagaagcgtgaggaaatgtccagtgttctcaggaagatgagggctggtggtgctggagacaagaagaaataagtcttatttactgttttccagattcactagatggacctgtgtattgatggacgagctctcatatttttgctttggttcaattagtttacttcaagattttgcttgagaaactatgtttgcttaactgagacatgatttatggaagaagc

SEQ ID NO: 225840 - DNA, 441 bp, Glycine max
  unsure (1)..(441): unsure at all n locations
ggcaagcaatggcagagcttttttattcatgcaatgatcattattttgggtcctaaagaggataggctaggcagcttatcactggtcttcacacattggttgatgtgttttgctcagattgtggagaggaacttgtttggaaatatattaaagcttatgaggaaacacaaaagtacaaagaaggaaaatgcgtactagacaagttcaagataatcaagagcaatggatagtaaatgtattttaccatgttagatccaagccatatgatctcaattgctcataggttggttgtgagtttcttgcaaagatcaggggggaaaagaaattgaatttgttcaaatttcaaaacattattttaaaaaaaaaaaaaanaaaattatagaatttgattacagtgggcttcaactcttcagggggtcaaattggtgattggatcttagt

SEQ ID NO: 225841 - DNA, 525 bp, Glycine max
  unsure (1)..(525): unsure at all n locations
gttgcaggcagtgtcatctcttttttgacgacaagatgagcatcccaattccccatcggcagttattcatagacggagactggaaagtccccgtcctcaagaatcggattcccatcatcaacccttccacccaacacatgatcggggatatcccagcagctactaaggaagacgttgatctcgctgtcgctgccgccaaagctgccctctcccgcaacaagggcgccgattgggcctccgcttccggctccgttcgggctcgctacctccgcgccattgttgccaagatcaccgagaaaaagcctgaactagcaaaactcgaagctattgactgtggaaaaccgctcgatgaagccgcctgggacatcgacgatgttgctggttgctttgagttctatgctgaccttgctgaaaaattggacgcacagcacaaggctcatgtgtctcttcccatggacacattcaagagttatgttcttaaggagccgatnggagtcgttgctttaataactccttggaattatc

SEQ ID NO: 225842 - DNA, 401 bp, Glycine max
gcagagtttagcagcagagaatagagaaaacggcactgcagccgtagaaggaaaaccgaccatggtgcacgtctccttttacaggaactatggtaagacgtttaagaagccccgccgtccgtacgagaaggagcgtctagacgcggagctgaagctggtgggggagtacgggctgcggtgcaagagggagctgtggagggtgcagtacgcgctcagccgcatccgcaacaacgcgcggaatctccttaccctcgacgagaagaacccgcgccggatcttcgagggcgaggctcttctccgcagaatgttccgctacggactcctcgacgagactcaaaacaagctcgattacgtcctcgccctcaccgtcgagaatgtcctcgagcgccgccttcagacgc

SEQ ID NO: 225843 - DNA, 441 bp, Glycine max
ggagtgacttcactcccaccattgggttgcctacctgctgcaaggactatatttggtttccatgagaatggttgtgtctcaagaatcaacactgatgctcaaggatttaacaagaagctcaactcagctgcagcaagtcttcaaaagcaactttctggtcttaagattgcaattttcgacatttacaagcctctctatgaccttgttcaatccccttcaaaatctggctttgtggaggcaaacagaggttgctgtggtaccgggactgtagagacaacatccttgttgtgtaattcaaaatctccaggaacttgttctaatgccacacagtgtgtgttttgggacagtgttcatccttcacaggctgctaaccaagttctaggtgatgcattaattctacatggcatatgtctcgtcacataaagactcgtgattatttat

SEQ ID NO: 225844 - DNA, 467 bp, Glycine max
gctactatctacttggggaaaattaaagggttcgatgtggggcgcggggtgtgggaggagctgaaggggttggagaatgctttgccgaggtttttgtgtggggccaccatggctgatttgggtgggaaactgtgcgtggtttgggagtgccaatgcaatgggaaggagatggagatttggtgcgcggagattggggtgaagaagaattcggatggggaattgtggggtcaacttggttggtttgggaaggttctttctgttcccaaaggctcttctattgtcaactgttcttctgtttccttgtgattgtgaccatgcatgcaagcattctttgattttgcattgaattgccgccacttcctgctctgatgtttgtctgtgaaactatgaataattaaataaacaggagctgctcaagcagtactacgcctggaagtgaatcaagtgatgtgtttggggaatgaaag

SEQ ID NO: 225845 - DNA, 327 bp, Glycine max
gcatgtaataaaggtatcatagcatatagcatagcataggtatttcatacattgttcttttgaggagcacatgcagcaattcagtcttactacatgattctctttatttagaaaacaaagttttaccaattaaacaaacttatcagctaggctttgcaccttagacaaactgattaaggtactcatccacagtgatgtatttcacatcaggatatagagctgaagcttccactccaaaagaagactcaatttcaaagttagtatgatccccctttccttaggaggagtggttaattgacaggatcacattcacgggtggtgcggact

SEQ ID NO: 225846 - DNA, 481 bp, Glycine max
aaatacgagaactggggtcgtcgatgtatataatcatctacctactaaaacattcgatgacttaataatacgctttatcaacaaaacccaggttaaacaacgatcctcatcaattcatacaacaatcccaagaacaagtcaatgttttttgactgctccacattttaaacttgttgaaagccattcatccacattgcaatttgataccaccttgacaactcagacgccttaagcctcctcctcctcttcatcctcatactcttcctcgtcaacagtagcatcctggtattgctggtactctgccaccagatcattcatgttactctcggcctcggtgaactccatttcgtccattccctcaccggtgtaccaatgcaagaaagccttgcgcctgaacatcgccgtgaactggttgctaactctccggaacatctcctggattgatgttgaattcccaatgaaagtggatgacatcttaagg

SEQ ID NO: 225847 - DNA, 530 bp, Glycine max
taggcgtccacgtggaatgtattttagtgccaaagataaaggagagatgatgtcaatgatctataactggccagctcacgaggtagacatgattgtcttaacagatggaagtcgaattcttggcttaggtgaccttggagttcagggaattggaatccccataggaaaacttgatgtgtatgttgctgctgctggtatcaacccacaaagaatacttccagttatgctggatgttggtaccaacaatcaaaagttacttgaagatcgcctttatttaggacttcgacaaccaaggttggaaggtgaagagtatctatcaattatagatgaattcatggaagctgttcatgctcgatggcccaaggctattgtgcagtttgaggattttcaaatgaagtgggcttttgaaaccctgaaaagatatcagaaaaagttttgcatgtttaatgatgatatacagggcactgcaggtgttgcacttgctggactattgggaactgtaagagcccaaggccggccattgactgatt

SEQ ID NO: 225848 - DNA, 550 bp, Glycine max
caagaacattagtttcactgtttgggatgttggtggccaggacaagattcgtcccttgtggaggcactacttccaaaacacacagggtctcatttttgtggttgacagcaacgacagggacagagttgttgaggccagagatgagttgcacaggatgttgaatgaggatgaactgagagatgcagtattgctcgtatttgctaacaaacaagatcttcccaatgcaatgaatgctgctgaaattaccgacaagctgggtctccactctctcagacagcgccactggtacatccagagcacctgcgcaacctctggggagggtctttatgagggtttggactggctttccaacaacatagccaacaaggcttgatgctttttgggagtcttcttgtggattggtgattctggatgcaggggtgaatattatctagtttgtttttttggttctctcatgagacaaattggctctatgttaatgttttatggcttaggacatcttgatggctaacattatagtaggaatttgtttcatgggatgtctaaatac

SEQ ID NO: 225849 - DNA, 514 bp, Glycine max
  unsure (1)..(514): unsure at all n locations
aaacactcataacacaaagcacaaagcaaagctcatccttgagttaaaaaatggcagcagcttcttccatggctctctcatccccatccttggctggcaaggccgtgaagctgggcccatcagccccagaagtgggaagggtgagcatgaggaagaccgtcaccaagcaggtctcctcaggaagcccatggtacggcccagaccgagtcaagtacttgggcccattctctggcgagcccccgtcctacctaaccggtgagttcccaggcgactacggctgggacactgctgggctttccgcagacccagaaaccttcgccaagaaccgtgaactcgaagtgatccactccaggtgggccatgctcggagccttgggctgcgtcttcccggagttgctgtcccgcaacggngtgaagttcggagaagccgtgtggttcaaggccgggtcccagatcttcagcgagggtgggctcgactacttgggcaacccaagcctgatccacgcccagagcat

SEQ ID NO: 225850 - DNA, 502 bp, Glycine max
gatggctaatctctcactcttgttcttcggtctccttctattctccgctgccgtagccaccgtcgaacgaatcgacgatgaagacaaccttctgatccgtcaagtggtgccggacgcggaggaccaccacctgctcaacgcggagcaccacttctccgccttcaagacaaagttcgccaagacctacgccacgcaggaggagcacgaccaccgcttccgtatcttcaagaacaacttgctccgcgccaagtcgcaccagaaattggacccctccgccgtccacggcgtcaccaggttctccgatctcactccgtctgagtttcgcggccagttcctcggcctgaagccgctccgccttccctccgacgctcagaaggctccgatcctttcgaccagcgacctttctaccgatttcgattggcgcgaccatggagctgttaccggcgtcaagaatcagggctcgtgcggatcgtgttggtcatttagcgccgttggagctttg

SEQ ID NO: 225851 - DNA, 409 bp, Glycine max
gttctatatcgcgagcggccgcccttctttttgtatttttgttgttttttacctttgtcacatgtttggctttgccatttgattgaaactccctgattacagtgccccttagtcatgttcttgcaaccatgctcggagactcccccaccgagagaaaagaaaaatggtacctgtgctaggctgaggccaaaccgcaagacacaagtcaccgctgagtactacaatgacaatggtgccatggtccaggtcgagtcctcactgttctaaattccacccggcgtgatcatactgtgagcaaagaccaaatgctggtgaccttaaagagcatgttattaagcctggcattcctgagaagcacatggatgagatgaccatcttccaccttaatagggggggccgttttgtgggt

SEQ ID NO: 225852 - DNA, 620 bp, Glycine max
  unsure (1)..(620): unsure at all n locations
tcgcgatctagaaccgacaatgtcgactcctgctaggaagaggctgatgagagacttcaagaggctgcaacaagacccgcctgcagggatcagtggtgccccccaggataacaacataatgctgtggaatgctgtcatatttggtcctgatgatactccatgggatggaggcacgttcaagttgacactccaatttactgaggactatccaaataaaccaccgactgtacgatttgtgtctcgcatgtttcatccaaatatttatgctgatggaagtatttgtttggatatattacaaaatcagtggagtcctatttatgatgtggctgctatactcacatctatccagtcattgctttgtgatcccaacccaaattctcctgcaaactctgaagcagctcgaatgtttagtgagaacaagcgtgagtacaatcgaagagtgagggaaattgtggagcagagttggacagcagattaagttcatccttatatgcatgggaagctttgaaggcatgaatttggttgcagtgatggcaactattagaatgattgtgcaaactcatcacanttatattctctgctgatatgaatgatagcatcatcttaactttaattaatat

SEQ ID NO: 225853 - DNA, 426 bp, Glycine max
  unsure (1)..(426): unsure at all n locations
ctttgttaaagaagctgaacctctaatgcgatctactagtcttgatagatcatcctcagattcaggcattgaggaactaagcaaactagaattgtcaaagaaaactgggaagaccaagaaaaatcgtctcttcaggaaagaactctatctcgcattaattttgttgactgcctcagttagaagcttattatctgcccaaggaattcacttctacttcctattatttcaagggataagttttctggttgttggtcttgatctgattggagagcaagttagttgatgtgcagattttggatttttagtgcatacaaaacctataagatcctcattgataaaggtcagaatggccaaaccataaacccatccctgaacacattgatttgagcctaagctgntcagtgggggtttggctcccaattaagc

SEQ ID NO: 225854 - DNA, 322 bp, Glycine max
gaatcctgtaagcccttccagcacaaccaaaatcataaattaatgaaattctaacccatcgataattaaatttgatgggaattatgatgtagcacaaaatgtctcaccattaaaatcaaaataacaagtcgaagttttaagtaacttaggacagaacttaaaaaaaaaaactaggtaaaatgagagtagataacttggtacattatgtcacttagcacttaacctcctttaaggcatatgcaaagtataagaatgttggatcagcagcaccatccttgtagtatgcaaagaccaagcaagcatcatcattcatctcgagccg

SEQ ID NO: 225855 - DNA, 433 bp, Glycine max
gatgacaacgacatcaatcgaataataagggtctgaaggtaacaatgtaaataaatgtaatgtgtacccaaaacagggtcaaaagaaaaagaaacaaaaaaggaaaataaatgatacaatacaagaatataataacagcaacaaagcctgtctagaagaccaaaacaagggtagcccaacccaaacctaagcctcctagaaccttcttcaagcacatgatggtctctgctccactctcatcgttggcagcagtggcaggtccaggggaagaagcgtcctcgctaggaccaggagccccggtgggtggcgcaggaggtcccagcaacgacggtgaaggagccggagcaccgtgcttcttacccttcttcttgtgcttgctcggagccggagcgggagccacaggggtggtcggcgccgacaccggaacgggagc

SEQ ID NO: 225856 - DNA, 484 bp, Glycine max
tgtcactctctctctctctctttctcattcacacgaatcacactctccacagtgcgattcattcaccaatggatcgcaacggtgttctctctcttgcattcatctgcattgtagtcgccggcgtcggaggccagtctcccgccgcagcgccctcgaacactccggcaacccccgccgccgccactcccgcccaagcaccttccacaccgaattcaccagccccagttgcttctcccaaatcatctccaccagcttcgtctcctaagcccgcaaccgcaacccctgcttcgtcgccggcggcatctcctaccaccacccccgccgcgcctgctccagcgaccaagccacctgcagcctctcctcctccggcgccggttcccgtgagctctccccccgctcccgtgccggtgagttctccacccgctcccgttccggtggcggcgccgaccacccctgtggctcccgctccggctccgagcaagca

SEQ ID NO: 225857 - DNA, 524 bp, Glycine max
  unsure (1)..(524): unsure at all n locations
aggcattgggcttggatgtgctctaagccttacaactttcactcgggctttagaatattggtatggtggaaagcttgttttcgatggctatattacttcaaaacaattatttcaaacatgcttaatattggcaaatacaggtagggtcatagcagatgctagtagccttactagtgacgttgcaaaaggggcagatgccattggcctagttttctcaatcttaaacagaaacacaaaaatagattctgatgaaatgactgcatacatgccccaaaagttaataggccatatagaatttcaagatgtctattttgcatacccatcaagacccaatgtgatgattttccaagaattctcaatcaaaattgatgcaggtatatccacagcagtggtaggacaaagtgggtctggcaaatcaactataatgggcttaatagagaggttttatgacccacttaangggatagtaatgatagatggaagagacataaggtcatatcaccttaggtcactaaggaactaca

SEQ ID NO: 225858 - DNA, 555 bp, Glycine max
ctcgagccgctcgagccggtccataaacctcacacgactccctttgttgcgttgtgtttcctttcgccgaaaccctcgctcgcaacttctacagaatccctttcaccatggatattgaggaggacatccgttctttacagctcgattcagcagaagacaataatggggtggtaaatgcagaggatggaaggccagaagaagttgagaaatctgataagatggatgaagatccaaagcaggatgttgaggctgagccaaaggctgttgaggctgagccaaaagtgaaggataaggaggttccttctgttcaagatgaagaagatgaaccagagatgacaaaaagacacttgaatgttgtttttattggtcatgttgatgctggtaagtctacaactggaggccagatacttttccttagtggtcaagttgatgagcggactatccaaaaatacgagaaagaggctaaggacaaaagtcgagacagctggtatatggcttatattatggacacaatgaggaggagagggtcaaaggaaagacaagtgaagttggaag

SEQ ID NO: 225859 - DNA, 466 bp, Glycine max
ccctagattcagccacagttgttaaaaaaaaaaaagttgttcgagatggcacgtacgaagcaaactgctcgtaagtccacaggaggaaaggcacctaggaagcagctcgcaaccaaggctgcacgtaagtctgcaccaactactggtggtgtgaagaagccacatcgttatcgtcctggtaccgttgctcttcgtgagattaggaaataccagaagagtaccgagcttttgatcaggaagctccccttccagaggctggttcgtgaaattgctcaggacttcaagactgatctgcgtttccagagccatgctgtgcttgcattgcaagaagctgctgaggcataccttgttggactctttgaggatactaatctgtgtgccattcacgctaagcgtgtaactattatgcccaaagatatccagctggcaagaaggattcgtggtgagcgtgcttgatgtggtggtg

SEQ ID NO: 225860 - DNA, 389 bp, Glycine max
cccgatttaagaagaaccgcatgaagcgcggtcacgtgagcgccggacacgggcgtgttggaaagcaccgcaagcaccccggcggccggggaaatgccggcggcatgcaccaccacaggatcctcttcgacaagtaccacccggcgttcttcgggaaggtagggatgaggtacttacataagctccgcatcaaattctactcccccatcgtcaacatcgacaagctatggtctatgataccccaagactggaaggacatagccctaaaatcgaaagacactgaccctataatcgacgatactcaccacgggtacttcaaggttctgggtgaaggtgtgctggccaaaaccaatccattgttgtgatggcctagcttatttctaagatcg

SEQ ID NO: 225861 - DNA, 421 bp, Glycine max
agccatgtgaaagtgagaaaaaataaaaatcaaagagcataatgtcagggatcattcacaagattggggagacctttcatgtgggagggcacaagaaggaggaggagcataagggtgagcaccatgctggagaatacaaaggggagcaccatggtgaacacagtggtgagtacaaaggagagcatcatggtgaacacaaagctggagagttccatggtgagcacaagccacagcacaaagaggggttcctagactgagtcaaggacaagatccatggtgagggcggcgccgccgagggcgagacgaagaagacggagatgaagaagaaggagcatggccatgagcatggccatgacagcagcagctgcagtgacagtgattaaactgctgcatcacctatatatttaataggtttatggga

SEQ ID NO: 225862 - DNA, 344 bp, Glycine max
cctgtttctaagtacttggtctggaacgaagatggtgtctccattgctgctctcaacctcatgaaccaggacaaaatcctcatggaaagctggtactatttgaaagatgcagtccttgaagggggtattccatttaacacagcatatggaatgacagcctttgaataccatggaacggatccaaggtttaacaaggttttcaacaaggggatggctgatcactctaccattacaaggaagaaaattcttgagacctacacaggctttgagggacttaaatccctggttgatgttggtggaggaactggagctggagtcaacatgattgcctcaaagtatcccac

SEQ ID NO: 225863 - DNA, 566 bp, Glycine max
gaaccagaaccacaatatgaaacttgttattattatataaaggcggtatacattgaacttgttcgttattcttttcataaagcattagaagaaatttacgtttttccgggaaaacattcgtaagtagcaccccaagcagagtctcaaagtcaaaatccaaatgcaacttgatatgaatccacgccaaagaacttaaacctttttgagaaattccatgacgtaggtattgaaagcacagcacaggacttggaaaccttggaatccagagcctttggccagagcctcaaactctttctctgttctctctttcccacctggattgtgagccaacatgatcacatcgatgtgaaccacaccctttgtggccaagctagagtctggagccaccggaagaatgcattccgccacaatcactttcccattatctggtagtgcctcatagcagttcttcaaaaacttcaagcagtgctcatcactccaatcgtggcaaatccacttcataaaaatagcatcagcttttggaacactgacaaacatatctccactcacatgttccactcctggat

SEQ ID NO: 225864 - DNA, 545 bp, Glycine max
  unsure (1)..(545): unsure at all n locations
cgcaatgagaagagatctgccttctttttccttcccaaatcaaatctatctcttcttcaagttgaaaatggggctgtcgttcaccaagttgttcagccggctgtttgccaagaaagagatgcgtatactaatggtgggtctcgatgctgcgggtaagaccaccattctgtacaagctcaagcttggagagattgtcaccaccattcccaccattgggtttaatgtggaaactgtggaatacaagaacatcagcttcactgtctgggatgttggaggtcaggacaagatccgtcctttgtggagacattacttccaaaatacacaaggactcatttttgtggttgatagcaatgacagggaccgagttgttgaagctagagatgagttgcatagaatgttgaatgaggatgagttgagagatgccgtgcttctagtttttgccaacaagcaagatcttcctaatgctatgaatgctgcatagataactgatangcttggtcttcattccctccgtcagcgccactggtatatccagagcacatgtg

SEQ ID NO: 225865 - DNA, 543 bp, Glycine max
gacataatacgaggctttatataattcaattgacttaacaaatcaaatagtaaacaatgctatttggttatacatggaaaaaaaattcaaattgttcttcagtaacaaaccgctgttctttttcaagaaaaatacatgctcaagtaatgaaaatctaagtagggcaagaaaattagagactggagatcataatggccgaagtaaactcaacttccttgcgtttaactaacaaatctctacgccttgtttgcaatgttgtttgagagccagtcaagtccttcatagagcccttcaccagatgtggcacatgtgctctggatataccagtggcgctgacggagggaatgaagaccaagcttatcagttatctctgcagcattcatagcattaggaagatcttgcttgttggcaaaaactagaagcacggcatctctcaactcatcctcattcaacattctatgcaactcatctctagcttcaacaactcggtccctgtcattgctatcaaccacaaaaatgagtccttgtgtattttggaagtat

SEQ ID NO: 225866 - DNA, 561 bp, Glycine max
catccaatccaactttaagctactttcgtgaaaatatggaatatgaaacagtagtagctgttaagaattgtttgaaagatggagcaaaacaaatcatcagaaatagataatcttccaattccgagagctgaatgcattaactacttctgcaggcaaaaagccttaggctactactagaaattaaagaaaaataaatggaaattcccagagttaactttcaataagtgataactttaattagtctgtaaatgcattcagcctccttcccattaattatacagtttccttccagaaccgaactgacctatcagttccacaggaaataaaagcagactctattggtgagtgttcaagccagcggggtgcaccaacatgattagaaggccactttgctactttttctgttgtcatcgcatcccagataacgatctcattgctcagttcatctatggatagaataaattcttctgtctcattaaaaatagcctggcaccttagctgggtatgtatagcacccagatattgtttgactaatcttccagagccaacttcccatagctt

SEQ ID NO: 225867 - DNA, 555 bp, Glycine max
  unsure (1)..(555): unsure at all n locations
tattagtatatattggatattcataaaaaaaaataatatttaaaaaaattaagagccataattagaattctgtatgatatttacgtttacggcgtgtgataaaaagatactatatagaactaaaggagattcccgtttcagttacattcaattcaacgattgaccaaaagagaattcaaaaaataacatttagatcacccaaattccaatatttctatgaaacaataattaaatctaacgaatttatttcgattgattgtatccatatggggtaataataaaagggggaggagagcttaaaaaaacaagataacaaataaagtataagtgcggggggtcaaactgggtgtatataatcggatcactataagacaactctntcttttgaggtttcaaagaatgattttcgaattcgattgaatctaaaacacataagaattggtttacaggatagaagaaacccacgtatatgtgataggatattctatatgaactagttatatatgaactaaccatatccatatatattatataaaataactaataatttatatc

SEQ ID NO: 225868 - DNA, 576 bp, Glycine max
gtttttccaattcttgcttggggcagaaactacactgctactaagttcaggaaagatcttcttgcaggtctcactattgctagtctttgtattccccagagcattgggtatgccaccttggcacatcttgatcctcaatatggcctttatacaagtgtggtaccaccacttatctatgctgtaatgggaacctcgagggagatagcaattggtccagtggcagtggtttctcttctgttatcctcaatgatggagaaattagtagaccctgctactgatccagtgggttatacaaagctgattttgcttgctactctctttgctggtatctttcagacttccttcggactcctcaggcttggtttccttgtggatttcctatcccatgctgcaatagttggatttgtggcaggagcagccattgtgattgggcttcaacagttaaagggactcttaggaattacccattttacgaccaagaccgacatagtctctgtcatgaaagctgtttgggaagcagttcataatccatggcaccctcgatatttatcctgggatgctcgttcttggtcttca

SEQ ID NO: 225869 - DNA, 349 bp, Glycine max
caaccactcttaatttctctcttccttgctcatttactcacctctccaacctttcactttcagctttatttgaatccctctctctcctttccaaatggccagcgttgaggttgcacatcaaacaccaacaacagttccagaaaatgaaacaaccgaggtaatcaagacccaggaaacaaccccggaaccagtaccagccactgaggctcctgcaacagaacaagcagcagctgaggttcctgctcaagaagaacaacaagcaactgaggttcctgccccagaatcaaccaccgaagcaccaaaggaagaaaccaccgaagcaccaacaacagatacagtagaaacaaca

SEQ ID NO: 225870 - DNA, 456 bp, Glycine max
gttgcttgataagattcatagtattgatagagctgttgagtttgctttccgagttgaagaagatgctgtttggagtcaggtggccaaggctcaactcagggatgggttagtaagtgatgcaattgagtcatttatacgagctgatgatgctacacaatttttagatgttatccgtgctgctgaagatggcaatgtttaccatgacttggtgaaatacttgctaatggtaagagggaaagcaaaagaacccaaggtcgacagtgagctcatttatgcatatgcaaaaatagataggctgagtgacattgaggagttcattcttatgcctaatgttgctaatcttcaaaatgttggtgaccggttgtacgatgaagcattatatgaagctgcaaaaatcatatttgcttttatatctaactgggccaagttggctatcacactggtcaaattacaaca

SEQ ID NO: 225871 - DNA, 602 bp, Glycine max
atattaaaacattaaggatttttacaattatctaatcatagcaactacgtaagagtttaaacgctgttttcgtgataacacgtttatttttccattacagaagatgacttagccattcggcaataacattatttgttttcattgtatcaactaaaataacttaacgatgagggtaccatttaatcttactccatcagaaattgcatctaatttgtgtttagatctcgggaagaaagttgcagccataagaagggaagcgggttaaagaacactaaaacttgaagatagccgcaccacttgatggcttggaagcaaatacataaaggccaagatcgttcttcttaataacgcccttgtctattctagactggtagaaacattccttcaaattaaggataaattgtggaactatgctctctttcaccaaagcaacagcacaaccaccccatccagctccagtaagccttgccccaagagcaccattgttacgacaaatatttacaagttcttccaactccggacagctgcattcatataaaacgctgcagctatgatgactttcgttcataaggtcgccaagcttctttagcatgtcctcgtcg

SEQ ID NO: 225872 - DNA, 502 bp, Glycine max
atattaaaacattaaggatttttacaattatctaatcatagcaactacgtaagagtttaaacgctgttttcgtgataacacgtttatttttccattacagaagatgacttagccattcggcaataacattatttgttttcattgtatcaactaaaataacttaacgatgagggtaccatttaatcttactccatcagaaattgcatctaatttgtgtttagatctcgggaagaaagttgcagccataagaagggaagcgggttaaagaacactaaaacttgaagatagccgcaccacttgatggcttggaagcaaatacataaaggccaagatcgttcttcttaataacgcccttgtctattctagactggtagaaacattccttcaaattaaggataaattgtggaactatgctctctttcaccaaagcaacagcacaaccaccccatccagctccagtaagccttgccccaagagcaccattgttacgacaaatatttac

SEQ ID NO: 225873 - DNA, 546 bp, Glycine max
gcgaaattgcgatttcatgtcatagagaggaaaagaggagaggcggggcggagcagagacgaatggcagatcagagcgagcattcgaaaacggcgttgcctccggaggaccaggaccgtcccgttcgggtatacgcggatggcatctacgatctcttccactttggccacgcccgctcccttgagcaagccaagaaatcgtttccgaatacatacttgcttgttgggtgttgcaacgatcaagtcacccacaaatacaaaggcaaaactgttatgacagaggccgaacgatacgaatccctgcgccactgcaaatgggtggatgaagttattcctgatgccccctgggttatcaatcaagagtttcttgacaagcacaacattgactatgtggctcatgactctcttccttatgctgatgccagtggtgctgccaatgatgtttatgaatttgttaaatctggtgggaggtttaaggaaacataacggactgaaggaatatccacgtcagatggtataatgaggattgtcaagattataccaatat

SEQ ID NO: 225874 - DNA, 554 bp, Glycine max
  unsure (1)..(554): unsure at all n locations
aactttttctacttaccttttctcttaatccaaatacgatggcagccatggcaaccacaaccctctcttcaaaccccaaactctcattcttcaacggaaagcccgtcacatattcttcccgcgtcgcgcccaccaccaaaattatcctcatccaaacaaggcacaatttccatgtccctaaccccacccccctacgacctccagtccttcaaattccagcccatcaaagaatccatcgtgtcacgggaaatgacgcgccgctacatgaccgacatgataacctacgccgacaccgacgtcgtaatcgtcggagccggttcggccgggctctcctgcgcgtacgagctcagcaagaaccccgccgtgagcgtggccatagtcgagcagtcagtgagccccggcgggcgcgcgtggctcggcgggcagctcttctccgcgatggtggtccgcaagccggcgcacctcttcctcgacgagctcggcgtggcgtacgacgagcatgaggactacgttgtcataaagcacgcggcttntgtcacgtccaccatcatgag

SEQ ID NO: 225875 - DNA, 522 bp, Glycine max
cttgaatttgtctacatccattttgcttcagcagcagatgtctccgtgacaaactacgtgttggcctgagagtgacatgggaatggtttactgctttgttgtgtaagattgtgtagccatacaaatgtgcagtgaggagagggtctttacgtttttccttctatattttgatgtcaaatcttcttcttcccttgtgtattttgcatttcagtaggttagatcaaaataggtagattatataagatggaaggaccggagcagaaaggagtgaagagacaaaaggcagagcttatactctttcttctccgctttacaacttatatacagtgagtgatacaagacagacagtgaaacagtgttgttgcgaagtttaaaaaacaaagtgaacttctcaatatttcagagaagagtcatctcttgtattgttcaacagctttggatgtcttttctgcgtttgatgttgtaagctttgcagcattttgtattctctacagagaaacagtttgtgctatatagtattat

SEQ ID NO: 225876 - DNA, 481 bp, Glycine max
cacagccaaaacgaggccgttgtcgatcaaccctaggtgtgggttgtacctcttgctcacggccgatgacgtgtacgttcaggatttctgcacgtcggtgtgtgggttccactacttcacgtttccctcgttggttgggtatactcttccgtacgcttgggtgggtaactccgctaagttctgccccggtcagtgtgcttatccctttgcggtgcccgcgtatatccctaaccggaaaccgtttaagtccccgaacggcgacgttggggtcgacggcatgattagtgtgattggacacgagatggctgagctggccacaaaccctttggccaatgcttggtatgcgggtcaagacccttctttccccgtcgagattgccgatctgtgtgaggggatttacggcactggcggcggtggatcctacaccggtcaggttttggacgctcgagatggcgccccgtataacatgaatgggatcaga

SEQ ID NO: 225877 - DNA, 560 bp, Glycine max
ggcttaccagtggagggcaacttggtgacaaagagtttttggttgaggttgagatgcttagccggttgcatcatcgtaaccttgtaaaactagtgggatacttcattaatcgtgactcatcacaaaatttactttgctatgagcttgtccctaatggaagtttggaggcttggcttcatggtcccttgggaatcaactgtcctttggattgggacaccagaatgaagattgcgctggatgctgcgaggggactttcatacctgcatgaagactcacagccctgtgtaatacacagagacttcaaggcatccaacatactgcttgagaacaactttcaagctaaggttgcagattttggtcttgctaagcaagcacctgaaggaagatctaattatttgtctactcgtgtcatggggacatttgggtacgtagctcctgaatatgccatgactgggcacctacttgttaaaagtgatgtttatagctatggtgttgtcttgctggcactgcttactggtaggaagcctgtggatatgtcacagccaactggacaagagaac

SEQ ID NO: 225878 - DNA, 519 bp, Glycine max
gttctgtgacacacaaggcatgaggtggtgggatcaaccagagttccgtgaccttgatgctgctcagtggcaaaaactcacctgggttcgccagaaatacaccatctacaactactgctccgaccgcaaacgctaccctcaagtctctccagagtgcgccagagatcgagacatttaatttggctcatcaagatattggtggtgtcaattatccactgactttgctcatgagtaatctttctgtccccatacatataatttaatataagcttccatatcctatttttattaccactaccataaagttcccatctacttgatttcatgaaggccacacctaagtgctgatacaaaattcaatttgggtttattgcttgtattgctgataatttatatcatcatctattgctgctgctaatgctatggtatgtatacctgtttgagctatgtaacaaaagacatggcaatgtgccttaatttgtatctgtaattcaatcaaaatataccactgttactagc

SEQ ID NO: 225879 - DNA, 519 bp, Glycine max
gctagtaacagtggtatattttgattgaattacagatacaaattaaggcacattgccatttcttttgttacatagctcaaacaggtatacataccatagcattagcagcagcaataaatgatgatataaattatcagcaatacaagcaataaacccaaattgaattttgtatcagcacttaggtgtggccttcatgaaatcaagtagatgggaactttatggtagtggtaataaaaataggatatggaagcttatattaaattatatgtatggggacagaaagattactcatgagcaaagtcagtggataattgacaccaccaatatcttgatgagccaaattaaatgtctcgatctctggcgcactctggagagacttgagggtagcgtttgcggtcggagcagtagttgtagatggtgtatttctggcgaacccaggtgagtttttgccactgagcagcatcaaggtcacggaactctggttgatcccaccacctcttgccttgtgtgtcacagaac

SEQ ID NO: 225880 - DNA, 420 bp, Glycine max
acatgaaattcctcctttattcctttgggagatgatcacgattactatgtcatgattgtattacacttgacctataagttgaatttaatgtgaaataaaatcctaacagctatcctatagaaatttgatcttggttacaagacttgtttattaagaattagaagatatagctagacataaaactagaatatgcaacaacatcaacccaatctggaaaaagattcttcaatctctttattggatcaaccaacttttggtctaaaattgctaggtccactcgtaatgcttcagagttgttagcctctaaccagaaggtccaattcccatcgctaggtccactaagacgacatatatatgattgtggaccatcaccataggtttcagttcctggaagcaaattatctgcaaatgaccaacttg

SEQ ID NO: 225881 - DNA, 501 bp, Glycine max
ggtacaaaattctgataaaatttccattgcatcaaaacggtaacattgcataaccaaaaaataaattgtgagtaaaaggagaaaaggaaaaaaaaaaacagtttaagtattgatgagatgacattagacctatgaatgaagtagtagtagtcatggaacacgcaaattattcatccacacctagcaagacatccattgaagggagtgattaacttcacaacaatcttaagcttgaggcttctcagacttgagtggcttcacaacttcccaggtgaagtcagggtcatcccttccaaagtgtccataagcagctgtcttgaggaacctatggccacccctcttaaggtccaagttaatggtgatcattccaggtctgaagtcgaaattctccttcacaatttgaagaatctccttgtcaggaatcttcccagttccataagtgtccacaaacactgacaagggctcagggacaccaatggcataagaaacttggacaatgca

SEQ ID NO: 225882 - DNA, 538 bp, Glycine max
gatcacagaaacaatcatataatagcataaagacggttttaacagtataagtcacccatatgtaaaagcactaattgcaaccaattgttccagtttcatagtagtaacccaaaaaacatgaaaagtgaagtacaaatgcatggtgagacacagctaatccaagctactaaaacaagggacagagcaaacaagtagaaaatactaatgagcaataccaataaataaaagcaaacacaaatccgaccaacaaaaactaatgaccccaaatgaagattgtcctaatgaaaatagaattttcatcaaaacttatctgccctgtcccttttctgttcatgtgctttcaaatgtttttgttatggttgattggtcctcacttggccatcatgactttgacaaactcctcgtagttgatctgcccatcaccatcaacgtcagcctcacgaatcatctcatcgactttctcatcggtcagcttctcaccgagaatggtcattacgtggcggagctctgcggcagagatgaaaccattctgatcctt

SEQ ID NO: 225883 - DNA, 515 bp, Glycine max
cactctagaacatcattatttctcaatttatatagctctttaaccataattccctggatacaacatgtatactagtgtatacaccatattcaaagatagctaataaatacttgactgtataattaatatcacacaaacgtaaagtggcaatatatagtgtaaatatatataagcttaatttatacacagaaaccatgagtataaagcatctttatacaaaatattcaacaagaatttactttattaccacatcattatagtaaaatgtcatgataaagtggtgaaattctattgaatgcttgtgtcaagatgtttttataggatcaaagtgtgtatataaattaaactatattttttaatcaatatatatatattgttcacacattttatatatatatataagaggtgcttaacaagttggataggcaataccacaagaactaacggtttatttggcattaggagagttaacatactgcttcaagctagggtttttgaggtagccacagaagcat

SEQ ID NO: 225884 - DNA, 423 bp, Glycine max
aacagagaggaattaacgtaattataataccacaaataataatattctcggttgaaatagttcatttgtagaataagcttcgtttcctcaaggtgaaatcccattcatccacgcttgttaacaaccaggcaaataaatgataagcccaagaaatagtaactaaaaaaaattattacggatctctgctcgaacaaaaatcataaccttttaatggaatactactacacaccggcagcatccacactcgtattgtttcagtcagataaacccgccttcgactttagatgcgccttgaattccataatggcaccctcccatctggtcacagattgattagcacatacccatatcttatgcgccacctgatttatgagcctaaaatcatggctgacaagcaccaagccaccggcccattcattcaat

SEQ ID NO: 225885 - DNA, 503 bp, Glycine max
atcagcaaccggtatgagtctttaatctttattcctagaattacataaccgatcaacagtctccataataataacagtgtcacatacattacacacagaacagatcctcagcttcgaaacacagtcagggcgctctctacataaaccctttattaaggaaaaaaaaaacaaagtgaactcacgaaagcacgatcaattactattaagtttaccgaaccgaaaacggcgccgttttggattcaggtcttggaagcttcgagatctgcagctttctgaagaagactattgggatcatcctcgaggaccatgcggatggggaaggagccgaggccgtcggcgatggcgagcatgatcttcctcatctcatcccggaactcgcggcggtcgacggcgccgctccggtcgccgtcgaacttgtcgaagatggagtcgtagagcttcgcgagctgatccggcggcgtggcgacgtcgatgccgaagtgcgtctcgatgaggcgcatgga

SEQ ID NO: 225886 - DNA, 468 bp, Glycine max
aggaacgaaaaatccatttttctcctttttattgaataacgataatcacaaagtcatacacataatcatgggaatacgataaccaccgggcacttgtgattttctcacaacaggaactttaagtacacaagacagagtccaagtgatccaaccattaggcaataatgaaccccttaattagttcgaagctttgacgggtccttccttggggggatgcacgactatgtaattataggcatccaaagggagaaaattatcaagtgttagggacgtgcattggcgagtgaagatcttgcaagcctccttggacattcccttcttgaacttttctggtcccacttccttttcaatcctagccatattttcttcaaccactctatgaaaaaggtctttggtcactttttctccaagcccattcccatctagctacactccatacttgggccactggcagttttggaccctggt

SEQ ID NO: 225887 - DNA, 484 bp, Glycine max
tccttttttttttttttttcacagcacggtggtgtctttcaagaaaacaaagttacattcccttccctgttgcacaggtttgaccaaatacactgaattactaaaattgacataaaaggaacactaggaaaacaaaaagccaaaattccaaacgattattctgggaagagtcaaaccacaataatacttatcaacaagaaattcggttgttgtacccataataccgattcctactcgcactagtctcttcaaacaacaccaacttcgattgatcagtagctgaagttcgaaacatggaggctctctgaggcaccatcagcaagctgtgagttacccttgaaggttcccagagttgcctctgagttagccttggctcttaccaaaagggcttcctgagccttcttcacattctcttcttttacgacccatgccttaagggtgctctgttgaagtgcccttccaaaggagaaagagagtgaccatg

SEQ ID NO: 225888 - DNA, 503 bp, Glycine max
aaaagaagaaatccattataaaaaaaataaaataaaagaagaaatccattcagagtgccacaaatacaatcaaggaagtaatcatgtcataatttacatccatacaatggattaacacaaaaggcaaaaagattgacatgaattttcaaaatgaagaagacaccagacacataaataacaactaatacaagcaagcacatacaaaaacaagagcctaagcccttgtcttgaaaggaatggctcggatgactatctggtgatacacagcagcaagggcagctccaatgaaaggtccaacccagaaaatccattggtcatcccatgcatggtctctgttgtagatgatggcagctccgagactcctagctgggttaatgccagttcctgtgatgggaatggtagccaagtggaccaagaacacagcaaatccaatgggaagtggagccaaaataggaacgtgagagtctctagcgtttctcttggcatcagtggcagagaaaacg

SEQ ID NO: 225889 - DNA, 570 bp, Glycine max
gcccgtgaaacgtgttttatttccattgattatttggagctaacattgaacacaagcatgatacataaaaaaaaggttgcattttatgaacataactatagacacattacatatttatccgaagcagcttcgtatcgttttggataactctccctctctctagcttacagctccagctctttcaacattggcatatgagctacaaatgcagtcataacttatcatcaagaatggtggacatcagaagcccttgcacgaattcaaaccttcgagccttctctacttgatcctcttctgatagctgtaactgctgaggttttcttttcaagaaatcgtcttttgaactttcttttactagagcatcttcagtggaaggaggtgttgcactcacagactcatcagctacaactgggttaaacataaatgatgataacagaggatcgggctcggaatatgaggaagctaagtatgaagaaccttcaagaagggactgcaaggctccttcttgtacctctttctaatatagaaatcgttgaagcaagccttctttctgaccctcttttgcgctga

SEQ ID NO: 225890 - DNA, 542 bp, Glycine max
aaagaagtaacaacaggtattgtctccttcatcattcacatttttaaaaatttattctaaaattcaaatcataagcagagacaaaacagaaaagaaaaggtatataatttgaaacttaattttaggcatcaacaatttcctcagtgtccgcagaagccaaaataagctggggttcttcccttccaactccacacgttccatcaattgcattgttcctacccaaagccttcaacgccaaatgagccgccttctgccctgatatcatcatcgccccaaacgtcggacccattctcggggagccatcaatttctgcaacctccatgccagtgacaatcatgccaggcacaatctccctagtgagcctgacaatagcgtcctcagcagcattcatatccaaagccttcattccaggaacgctatcaatcatcccaatactcttcaacctcttaaccccagtggcgccaaagggtccatcgtgcccacaagagctcaccacaaccttcgccttcatcacgatggggtccatgcatgactgcgtgtca

SEQ ID NO: 225891 - DNA, 498 bp, Glycine max
gagaaaataaggtggaacattaactcatagagtttgagcaagcacagtgtcaaggactagaaaatcataatggttctttttgaagtctgctggttattcaatcatatatccttttgacaaccttttgattgtcacagaagccctatcttatctatgatgattagtcagcagtccaactctgctcaacaatctcacgtactcttctgttgtattcacgcttgttttcactgaacatccgagcagcttcagaatttgctggtgaatttgggtttggatcacacagcaatgactggattgaggtaagaattgcagctacgtcataaatagggctccactgattctgtaaaatgtccaagcatatactgccatccgcataaatgttaggatgaaacattcgagaaacaaaacgcacagtaggtggtttattaggataatcctttgtaaactgaagtgtcaacttaaacgtaccttcatcccaaggggtgtcatctggtccaa

SEQ ID NO: 225892 - DNA, 493 bp, Glycine max
ggcaattaattgtgggaacacaaattaattttattcaggttacttgcaataactatcgataaccgtgggtaatatttgtagctagactagctagcatagagaattacagcataaaagcataaacatgggcttagcagtttcctcctccataacattatacatcatgtaaattatttacatacacactatactggtgcccctaccatgtttaggcatccatccttatatttaatggttagaaacatgtatagcagctacagttgagaccatcgagtccaccccacatacattgcgacctctgcagatcttgtaatatccttcttctccccagctctccccccatgaattctttatgatccagtaaggcttttccttaaaacgaattggagcataagcaccagatccatagcccaccaaaagaaccccatgatccaaatgcttgccgcagatgtatgggcatgagacgccaccaatatatgtctgcataaaaact

SEQ ID NO: 225893 - DNA, 522 bp, Glycine max
cacgagataaccactttttaccatatatatatagagagagagaatacgaagcacactgatcacaggatgatgctctctttaagtagggaagcagatcttatcagtacacataggtaggttgaaattctagctctagcaatctagctagagaaggtagtacttgcacaacacacagcacatgataatttattttatacacaatctcattctcatggtgctcaagatgcatggactaattaagcaacaatgttggtctgataggcagtgtccacagataaattgggtacccataaaatggccttgcttccaaggaaatggcaaacagggttagttccaggatcaactcccataagttgatgaagcatttgatgattcattccagaagtatttgagtggcaaatagcaagtgcctgagttctggttccatcaccagccaccaatggaaccatgaaagctgttgtttcacggacttcatggcagttaaatactgcagttctgaaatttagcctatgacacatcact

SEQ ID NO: 225894 - DNA, 528 bp, Glycine max
  unsure (1)..(528): unsure at all n locations
atagaaatgactataattaatcataaattgaaagattgcaaatgcttttgttatttttatattagagggggtcctgagttagccccagttgttggtaattcatgtagtcaatgccgttttaatctaatacaacataacacatgctctggtagctcctcctgtttgttcccctgaattgtgaggccaacatctagagtgcaaacctttaatctgtccaagaaagcttcaaaccctttcctggagatataactgaatctatgcatatccaaatcaatctcaaagtaattttcccccatgtaaaactcatgttggggacgcgaaagaacaggtttctcattgtaagcctgcataagcttcctttctgcagcactcaaatgaagatcttccaggttgatgacacggcctaatattttcaacctttccctgaagggtgcaattgtatctacaggaaaaccctttaccttttcaacttcatcatccatcaatcttctgatgctntcttgaaaagtctgtggaagttccttggag

SEQ ID NO: 225895 - DNA, 514 bp, Glycine max
agagaatccaaaaccagattttattagattgaaaagcgtaactgtacattgatagaaacagtaaatcctttatctgatgaacagagttacccccctacaatccccattccagtgatgactccccgtgccaattcaattacattgcccctcatgcataccttttacagtctccactaatcatcatatagcatctcaccagcagaaaggaaagtctactgtctggctgcgacaactggcccttccaccttgaaagtggctccccagatttcctcctcattagcaggaactgcagtaatcttatttttaggattctcatagcacatcaatcctccaacagctgtagagtagaaacatccttgagggaaagaagcaagtgacttgccacaagcaccattaagcaattctgcatcatcagcaaatgctacgtagccatcagcagttattccccaatacagaggtaccttaccatattgatcagatgccacaaagagggtagaagtagatttgtcaaaac

SEQ ID NO: 225896 - DNA, 468 bp, Glycine max
acaaggaaggtgagacatgatttcattgtacagatatcttatgatgatgctgtggtcttgattaatcagactgaccaacatagagtactgcgaaaaacaaatggaaaggatctagaatcttaaacttctctaaaaatcaacatgatattcctaaatcaaacaagcagaaatcaagatcaacagtaggcatcaagatatttatattggtgcttcctattatactgaagtaagcttgcataagtccggtcccaaattccaatatacatacactcatcatcagggctcatagaaaccccagaaatttccccaaagaaatcaatctcttgacgttttctgtagtctgctttcgtgctataaacatgcacaaaatctgcaggctcagcaaccaccatatattgaccatccgaagaaaaccgaatagaccgggttgcccctaggttattcttgagaatggcagtaggagatgat

SEQ ID NO: 225897 - DNA, 523 bp, Glycine max
atacaaacagaatttcttcattaacacttaacagcaaacacgagaacattcaatcaccccaaatacataacttaaccatacataggtagatgaaggaatcatattccttctattcacttttattgaaaaccagggaaagtactgcaacaaccatagagcccctagatggagatactgttgggaattcctctgaaagtcaatccctcctcactagaaggatagagcaaagtgtaaggcattttagccggcccactgcggtttctcaacgtctcgtccttgttcttctgtataagcttttgttcaatctcttgaagcttctttccaaacctcttgaaggcctctagtggaccagcatcagaagtccaatagtcaccaccatctctctccccaaggtagaactcatcagatgtgtgccttgacaagatttctataattgtaaggtcaatgagggtctccttcttgccagtaatagtcttcaaaaactccttctcagggttcttagccaaagctgcatactcagcag

SEQ ID NO: 225898 - DNA, 507 bp, Glycine max
ggcgaaaattaagaatgcttgttttgaattaaaaaatgataaaattaactcaagcattcttgagtttaacatgccaaactaactctggcattattgacaacacataaattgtctttcaaaatataaactataaagtaatatggattaatgaagtataccatcaataaacactgtcaaagttgaaaacgctcaaactcagacatatcaaaaccaaacggtagagcaagtttcaacagtgtcacattattgggtggctaaacaagatcaaggcaacaaactagaaggttatccaatcagctcttgcaagagctcagtacctgtgagccagcttctccttttccaggtagttttgaacatacgcgtaggtgccgacgaggggaccgagcaaaagagtggcgctgatccaattctcggagaccttgtggtgaatcttcgtgggcaagtccttccagagacctcgcataatcttttgctggaaaggggaaagcgcgtagatcactgatttta

SEQ ID NO: 225899 - DNA, 502 bp, Glycine max
atagctcttaacacatataattccctggatacaacatgtatactggtcatattcaactctagagagctttatctgatatgatcatccttaacatattcaaagatagctaaatacttaactgtataatatatcacacaaacgtagagtgacatatatagagtaaataataaatataagtttaatttatacacacaaactatgagtatataacatcgttatccaaatattcaacaagaatttactttattaccgcatcatgttaaaatgttgcgataaagtggtgaaatcctattgaatgcttgtgtcaagatgctttgtaggatcaaagtgtgtataaattaaactgtttatctatatatatatatatatcccacactttaattataagaaggcttaattaattaacaagttggaaagggaatcccacaagatgcaatcggtttttcgggcattaggagagttaacatactgcttcaagctagcgttcttgaggtagccacat

SEQ ID NO: 225900 - DNA, 535 bp, Glycine max
gcgattcagcaagcctccctttcaacaaccatggggtgttggtacatggttaaaggaaattaaagacactactaaagaaggatatagttttgaagagctatgcatcaagaaagaagccattgagggagaagagaagttttgtgcaaaatccttgggaacagtaattggttttgccatttcaaagctgggaaagaacattcaagtactttcaagttcctttgtcaataagcaagaccaatacactgtggaaggagtgcagaatcttggagacaaagcagtgatgtgtcataggctaaatttcagaactgcagtattttactgccatgaagtccgtgaaacaacagctttcatggttccattggtggctggtgatggaaccaaaactcaggcacttgctatttgccactcaaatacttctggaatgaatcatcaaatgcttcatcaacttatgggagttgatcctggaactaaccctgtttgccatttccttgtaagctaggccattatatgggtacccaatatatctgtggacact

SEQ ID NO: 225901 - DNA, 473 bp, Glycine max
caacacaaaccaaacttattttcaaaggtcattacagacccattacacatcacatttcttcttaaaatgtttgggaaaatccaacatcgaacatcacacagaaatcagctccagcttaaaaccccccacgaagacgcaacaccaagtgcagagttgactccttctggatgttgtagtcagcgagggtccttccatcctctagctgtttgccagcaaaaataagcctttgctggtccggtgggattccttccttgtcctggatcttcgccttcacattgccaatggcgtcggagctctccacctcgagggtaatagtcttacccgtaagggtcttgacgaagatctgcataccaccacgaagacgcatcaccaagtggagagttgactccttctggatgttgtagtcagcatgggtacgtccgtcctcgagctgtttgccggcgaatataagccttgtcggtctggggggatac

SEQ ID NO: 225902 - DNA, 503 bp, Glycine max
gagctcaaaatgagaaattttattaattaaatcttatcttataatattacattggaaaaacatactcagactcatctatccaaagaacaagagggcgaagaacaacaatagtaactcctcaataccccaatgcccccattctcttacaacctcataaacactatgtatgtataatcaacctcaaaaaccatccaattcacgcacaacagaggtatcattctcattatcattataaattataaaatctcatctcattatcaaattcagacaacaaaaaagaaaattcaattaatctgatcacacctgcgcctgatctctcctttcctcccagtctgcacattcaagagactcaacttgtgcatcgccctagcaaaaacctgaaagaatctattttgatccttggcgaaggtctccacaaagggtctcgtagaagggtcaccatacaaaccatggtcagatttcaacacacccaaacccttgggaaggttctggaagtaagcatt

SEQ ID NO: 225903 - DNA, 528 bp, Glycine max
  unsure (1)..(528): unsure at all n locations
actgcaattcacatagtaaaattgtatactctctataatttgagattattacatatttctagcataaatcttgagagaacatttttttttgtttcatcatataaaatatatatgttctgaaagaacacatacaagtacacaaaaaaaagggggaaattcataaaaaaatacagaaaaaaaaaaacagaattgagtaagagggaaggaaacatagagaaaattttagcaatcagataataagaagccagtagtagtgcaaaagtcccttgccaagagtgttggaaccccttttagttaagcaggtaccttctcccccttgagtggcttcaccacttcccatgtgaagtcagggtcatctctgccaaagtgtccatatgcagcagtcttcaagaacctgccatttccacccctcttgagatcaaggttgatggagatcatgccaggcctgaagtcaaaactctccttcacaatgctgaggatttccttgtcagggatcttcccgtgccatngtgtaacaaacacagacaa

SEQ ID NO: 225904 - DNA, 521 bp, Glycine max
tttattttttttttttcgcatattaaattcccaagtcgtattcaaatccttatcaataaaaccatgaagccaaattaaaatatttctagtacacacccaaaaattcttcaaaagaaacttccgggaatctagcacgaccccaaatcataaattaatgaaattctaacccatcgataattaaatttgatgggaattatgatgtagcagtagcacacgtttcaccattaaaatcaaaataccaggtcaaagtttcaagtaacttaggacagaacgtaaaaaaaaactagataaaatgagtagatagctcggtacattaagtcacttagcacttgacctcctttaaggcatatgcaaagtacaggaatgttggatcagcagcgccgtccttgtagtaggcaaagaccaagcaagcatcatcacccatgctctcaccaacaaaaaattggaaatctttaatcttagagagcaggtatttagttgctccctcgatgtgcttcttatacaactgctgttgctctgca

SEQ ID NO: 225905 - DNA, 558 bp, Glycine max
aattcctgggtcgccgatcgacgtccttttttttttttttttagacttaaaaaaagcacactgcatattcatcaaagcatcatcaaagcacactgcatcctaacagcacacgtacgtataaaggtgaagttccaggtcttgcacaacatacacaacacaccataatttattttatatacaatcttatggtgcccaagatgcagatgcatggactaattaaacaacaacgttagtctgataggcagtgtccatagataaattgggtacccataaaatggccttgcttccaaggaaatggcaaacagggttagttccaggatcaactcccatgagttcatgaagcatgtgatgattcattccagaagtatctgagtggcaaacagcaagtgcctgagttttggttccatcaccagccaccaatggaaccatgaaagctgttgtttcacggactttatggcagtaaaatactgcagttctgaaatttagcccatgacacatcactgctatgtctccaagattctgcactccttccacagtgtattgctcttgcttattgac

SEQ ID NO: 225906 - DNA, 502 bp, Glycine max
  unsure (1)..(502): unsure at all n locations
aaccgaattatgaggagatccctcatccatatgaaccaaatatagaggacttctggaattacatttcacaaatccatgcacgaactagaactgtatatacatcaggcactatttatcacatcacttgcaattctgcaattgaaaccagcttagaatcgtaaacaggaatatagttcttgaagactggcatacatgggttgagcagcctttggtctgtccaccattcccagtagaatatcagatgtggtgaggtaaggatcaccatagaagcgcaaattggcatccatcctggttgcaactatatttccttccaaagaaactcccacaaatgcacctttactgcaactgtaagtgtaacacatgccagagcctctgtcaccagcacgaatatctgcttcaagcactctcccaacaggccctgctgcagcactacaaccagcaccaagagaaaaatgcatatgactgcagaatgtctntacagctttcatatcacgaagaacac

SEQ ID NO: 225907 - DNA, 504 bp, Glycine max
ggagacattgatgaagaagcatgattactaacaaaaaagtttggttcacatccactcatttatagaacagaaggaacatatccacaaagtacttcacgaatagttcttcatttttagatagttacatggactatgttataacttaaacatcgatttgcaaagtctattgaaccaaagcacttgtgttgtagacaagaagtgcaccaccagctaaaagaccaagtagagtcacagcccagatagccaagccagtcgtaccgccagcgtagacatcaccggttggagaccagtccttggtgtcgtagataggactgtaaccatcgacattagcaccgtatttgtctacaaactggtaaacaccctttccctttcctttcctgccagatgcatcagttccatccctcaaagccatgccaccattaattccataaggtttgtcagtcttgatcttcttgccactggccacaactctgaatgaagaagagtttcttgagagagagggaa

SEQ ID NO: 225908 - DNA, 402 bp, Glycine max
aaaatcaaaactgaaaattcaatctataaataaaacgaaactcaacaacattggtcttatccgccaccatttaacccccccggaatgcccaaccatagtaacagaaaaccccagggaaaaggctacaacgtatgaagaacaacctaaatttacattttaaggcttaaaagtcaaaataataacccttctaattcaggaaatccaattaccaaagtttttttcctgctttaaagcccaaatccaagaacccaaaattgacaaaaaaaggacagggaaatgtcaaaagggttcaggaaaacctcatttgccacccaaggttgggaagtgcccaggatcctcaattgatggagctggagcattgctgtatgcatttccactggaacctcctctagaaccacggcc

SEQ ID NO: 225909 - DNA, 520 bp, Glycine max
  unsure (1)..(520): unsure at all n locations
gtattcaaaactacagtcaattaaattaaaacttgaaacaatcaaaatccatacagagacataccaccgtctatcaaaaccaaaagtaaagcacagaaccaacaaaggtaaataacaatgtctctaaaacatccataaaaccaaaactagcaaatcaagcatccaccctttcctcctccaagattagagtcttccctgttggttttgccaatagatctgtgtactcttggaatggagatttggagaagcgagtctccttccagaattctggtgtcaggaatccataggttttcatcaagcaatcaaaagtagccttaacgaagttgccaagggtcttggtggatcccctggaggaggtgaaaacatcatcaataccagcaaactgcagcaccttcttgggaaccctagccgccacaatcccggaacccctaggcgcgggaaccatcctaacggtaacggacccacacttcccggtaaccttgcacggaacggtgtggggcttccaatcntgttcccccag

SEQ ID NO: 225910 - DNA, 221 bp, Glycine max
agaataggatagaggaatgaacattataacatgttgagagtcatacaatacatcatttacatccatctctattgcacaaatagtccattcatggagaatgaataagaaaaagtaaagaaagctagtaagcacattcatcatttgatgtagtatggaaggtccaagacgtataggaggaagtaggcccaaataacacccgaaatgcctccgaagaagaagcc

SEQ ID NO: 225911 - DNA, 397 bp, Glycine max
gggcaaaaacttatatcattgttcaagtaaaaacggggaaaagtccattaaaaaaaaaaagagaaaaataaaatcgcaataaaaacataatgaccccctgttatctaaacttcaaaagggtctttgacaaaatcaagaacaacccatgagaattttttgcttaatcgacttcctcaattttgggtccagcaccgtttccactgccagctgcaggaccatcctcatccatgggtccacccgcattaccaccagcaccctggtacatttttgctatgatgggattacaaatgctttccaactccttcatcttatcctcaaattcgttagcctcaacaagttgggttccatttagccattggatagcctgctcaatcgcattttcaattttcttcttatt

SEQ ID NO: 225912 - DNA, 527 bp, Glycine max
gacgtcctttttttttttttttataaactggtgatcctttcaaaatatgaatcaataccgtgtgaaagatttacaagtgatccgaacaatcatttttaagtacagaaagctacataacttcaccccaacttctttttgtcctctttttcaggaaggggcaggcaacacatcacacaatctttataaatcttcaacaacatgaattcaggagtttaagttgttaggatatcgggaattgttgtcgagtgagctcccaatatcttacccccagcatccgggaaattttcacagtctggtagggatctaatcttcccatcggaatctacctgtacaggatacttgagaagatgtccctgcaaaagtgaaaaatcttcagaagcgaataatttccaattgttttcggcaatctcattcactttttccacacactccaatctccctggttcttcaaaagtttcatctaacatgccaagatgctctccccaaagtgacattctgtaaccataaatctggccatgtggatgtct

SEQ ID NO: 225913 - DNA, 524 bp, Glycine max
aggtcttgaaaagaaacctgcaatatagtaaaacatgtgattttggttgggggtaaaagggagagacaaagcaaatattacatacctacaattcccaattccatacagatcaaggaaacaagagatgggaaaacagagagcaggattctgaatacatacgccttgggatatttttcaatttctcttttacttttcctaactggaagcctacaactacaaatgaaaacaatcaatagttccaaatgtaacccatttccagagacaccaggaggaaagaaaagacagaccatacatgtaacatcccaacctcaacgtttggaatattgaggggctttacgagctttcttgagaccaactttcttcctctcaaccactctggaatctctggtaagaagtccttcctgtctaaaggtgctctatgatcatcgctcaccttcagcaaggcacgagcaatgccaagagagaatgcctgagcctgaccagacaggccaccaccctcagctttgacaaaaacatcataatta

SEQ ID NO: 225914 - DNA, 548 bp, Glycine max
  unsure (1)..(548): unsure at all n locations
ctcactaccaaaaagtaatatcttctgaaaaggaaaggaagaagaaaactcccaagtatcattgtctgattgacaaattgtatctggaactgtttttatcaaacatttacatgctctgagtagaatgaacatcctatattttctcttttcacacctacggctctcatttatgctaatccagctattatggatggattaggttcgccatcccagtggctgagggagctgagatgggactcccagggcttaaatccaataagccttcttattgactgtgccaaatgtgttgcatctggaagcatcaagaatgcagatattggccttgagtacatatctcagatttcatctcctgatggtaatgcagtgcaaaggatggtcacttatttcagtgaagcacttggttacaggataataaaaaatttgcctggtgtatataagtctctcaatccatcaaaaacatcattatcttctgaagatatcctngttcagaaatacttctatgaactgtgtccatttttgaagttctcatacctgatcacaaaccatgc

SEQ ID NO: 225915 - DNA, 536 bp, Glycine max
gacatcaaagaatggtaaaacatcaattcaggctaacacgaaactgacaaaaaaaacggctactccaacttcaaaaatagtatccaaaatttcggacctagaaaataaacagtacatgtgaataaattttcaagaaaatgattccctagacgcagaataagatagtttctagttgtgcaacgatgatacggaatcttgaatgaactttcactcatcatcttcatcgttatcagcagcagagttgagagacgccacacgtgcaatcaacttagccttcctctgctcataagtcagcttcttcaagttgtacctcttgtgctccttcgggggctgcttatcagatttcttaagagtaggatcagcacgaatggcggcatgaaccttcttatacagtgcctcaataccatcagcttctatcccacgcttgatgtattcactgaagtgtgactggtatttctctggatcatcttcagccaagatcttcatataggcagcaacatgtccaccaaaaacatatttgcgatgaacctcagcat

SEQ ID NO: 225916 - DNA, 391 bp, Glycine max
aacagaactcaattttattatttaaaaaaaccggaaaaatacctgacaagcgacaagaaaaaaaggggaaaaacccggaatttttgaaaaagggaaagtgggcccttctcatttttcaaactataaggccgggggtaaaaaccgcaggcaattgaaaagccaaactgggttttaaggcaggggaaacagcttgttcaccaatcatgggctccaaaacccccgttgatacaaccttggtctttataactggggcctccttttttgggattggtgcatttttagagaaactaagccccaagattccatcaggggattgtctgtaaaaaacagaggcccccggggcaaaattcacatttttgaaggctttaacaaacttttcaaaggctggggt

SEQ ID NO: 225917 - DNA, 464 bp, Glycine max
gtcctttttttttttttttttttttttttttttttttttttttttttttttttttttttttttttttttttttaaccaaactcaattttattatttaaaaaaacaggaaaaatacctgacaagcgacaagaaaaaaaggggaaaaacccggaatttttgaaaaagggaaaggtggtccttttcatttttcaaactataaggccgggggtaaataccggaggcaattgaaaagccaaactgggttttaagtcaggggaaacagcttgttccccaaacatgggtttcaaaaccgccgctgatacagccttggtctttatcactggagcctccttttttgggattggggcctttttagagaaactaagccccaagattccctcaggggattgtctgtaaaaaacagaggccccaggggcaaaattcacatttttgaaggctttaacaaacttttaaagggctggggg

SEQ ID NO: 225918 - DNA, 474 bp, Glycine max
gaaaaaaattttgatcaaattaataacttgtgcaaaagaaaccatcaaattcctttgagaaaaaggaacaatagcaaacctagctcattaatatacatacacgattaaataaacgacacagatcgatgtttatggccaaagccaaaattaaccacggtaagtagacagtcaacgatttgattccacagctacaacaaaatagcaagtgttaacaaaattacggaattaaaaaccgaaaccaaagcgatcggatgcggatcagaactacaaatccaaaagaggatcgtaagatcaaacggtgccgccagatttggagcggtagagtttgccgaacacgtggagcgcggtgacgaagccgatgaagcagaggctcatcaccagcaccaccgtcggcgaaatcttcagccccggagcatcgtacgtgtagaacctcagcatgttgctgctgccgactacgacgctcgtgctggcgga

SEQ ID NO: 225919 - DNA, 511 bp, Glycine max
  unsure (1)..(511): unsure at all n locations
gaatgagataacttttaatattgatcaagttcacggaatttatatacaactgtacaaaacatcgagagtaaggttcttgacatgagtactataacaaatttatcagacagaccaatgagaccacaaggtcaaacggtgtgaatttataatggctactgaatggaaatcagatccccaaaggtgttctcgccactgtatgtaacatagagaaacccatcctcgtccttcttctcatcatatatggcagacataattgctcctgtaggaggaaggacgttgtccacaaatataaagattgccttttctgcacttaatttaatccttttgcggatcacatagacaaactgtcctacagtcaagtcagcagggacaaggtacttcttcttgtcaatacttgngatgtcacttctttcagccttctccacaattaccggaatcctgtcagggtatttctccctaatcctagcagcctcagctcttcttttctcaagatcatgttcttgcttgaagt

SEQ ID NO: 225920 - DNA, 552 bp, Glycine max
aaaaattgaaatcccagcaaaatgcaaattgatgaaaaatcatttacagaatagctaattttttcaaaggaaagcatcatatgaaacccatcttccatgcagggggtatagagaagcacaacatcaggtgaatacaaactaagtatacacatcaacaatgacaatacactatctatacccaaaacccaagtctagctcttgaccatacatcccctggctgtgacctgaagcatggattggctttgggttttttgacctcagctccatctcaaaaagcctctgaagtgcttctggatgatttcttccaccgccaacatcaggagcttgtaattgcattccagggccaccaaaagtaggatgctggtgaccattaaatgggaagccttgaccttgcatagggtttggttcctgcatgaagccagtcattggattgctgggatgaagtggcataagtgcacctctcgggaatccacgttataaatgaggtgaaggaaggtttcctagcatatgcatctgttggtgtaacatagaatgatgaacggaggacaaacc

SEQ ID NO: 225921 - DNA, 378 bp, Glycine max
aaccgactataggtgcattcactggcaattcatttttaaccaagtccaaaggttctttctttacttgcaattcgattttaaccgaatccaaaggggcttttactggcaattcatttttaacccagtccaaataacctcctcccatgttgctcacatccttaaatccttccgatagaagatcagcagttgcatacagagatctcacttccactttgacaacccccgatgatctgatcctctttcttgcaagcctatgaaacctccttaagaaattctggatacttcactctgccttctggcgaattaaacatgtttgccacgttaatgatcttctttgcatccacatgccctttttgaaactcttccaccgttctgaca

SEQ ID NO: 225922 - DNA, 470 bp, Glycine max
cggctcgagcggctcgagcggctcgagttcaggagcaaccccactatttgagtcaatttcctcttcatggggggttagtggaaatggaaaaaaaaagataattggaggcaaaaaaagttgatattgccaccaataataataataatatggaactgtttgtgctttgatcctctgcagattgaaggttctttcaagaaaaggaagcctttggtaaatagtaaagaccctttagtacttcgaagcactttcctttgtatttccttgatagaattgatgagcttttttttgatatattggaagtaaaatctattagatatcttgttttaatattttgtgatatgtaataagtcgacttgttggtgaactagtgtggtaacccatgttatgagggatgctaggccaatgtcacactttttgcttgtgatattgaattttcacaaaaaaaaaaaaaaaatcaagtcactgtatgt

SEQ ID NO: 225923 - DNA, 140 bp, Glycine max
tttttttttttctttttttctttttttctttttctctccttttctcttttctttactttttttttttttttactcgccttttctctctttttccattctctctctttctttctttttccttttttctcttttttgggggg

SEQ ID NO: 225924 - DNA, 489 bp, Glycine max
gcacttaaaaacgacaagaaatttattcaatcacgagcggtaaaaatacaacatacaaataaaaataagggagagtgacatctacacaaaatccacacaaacttaaatcaaacgaggacaataataataataataataatgatgatgataaaaatgagaaaagcttgaacctttagacttgagctttaaccttctggtttggctcgaagacatacttaataagagaatccttaatagacaacagttctggaaattccttcttcaatttggcagcgtcaagctcattgttgctcctcggagcaacaatcaccttggcctgttcctcgagagtgaagttgttccaggtgaagttcgggtcaacataatctctgtacatctccaagatttcattgtgactaaccactcctgggttagtaaagttccagatcccagtcagattcctcttccccatctcaattgaaattggaagcagttcatccaatatagtca

SEQ ID NO: 225925 - DNA, 452 bp, Glycine max
gatgtaataatataattaagcagggtcggtccatcaacatatataacatgataatatgaaaatgtcgagataagactccacatcaagattgaattaaatagacattagaaaacccaaatcgaaagtagattaataataacagtattactgaaattaattacgtaattaattctcattgtcgaactcctcgtattgcctgaggacctcagcacagccagaagcaacctcctgagacatgaagcccatggcattggcgaacctatcatcggatgcaatgccgttgtagcgggtgagaataacgacggcttcgtcgcggcccggggtgacttccttgcattgagggtgagggctgcttacaagcttggcactgcatatttgatctgcgtgatcctcgtccacgtacattgtgtatgctccagttgagtcagtgtaccccttcttgggtacacaac

SEQ ID NO: 225926 - DNA, 512 bp, Glycine max
  unsure (1)..(512): unsure at all n locations
acttgttcaagaattgaaatttgctttgattgaaatcaggttacaagtgtaaagttgtgcgtgatttggtgacaatgatagatgattagttccaaatccctcaatggtcagggantaagagaaactagagaaagaaaaaaaaaagaaaaaagaaaaagaattacattccaccctcccagtatacacaaggaaatgacatcaatatctatgcagcaatagagggatggttttggtttttgtgctgtgagtgcatcatttaggagagacattatctccactctttgtcattgtcagtttcccttgcatccagcttcttagcatctcaagtgcagcttttggttgatccatagggaccatgtgaccagcctcgtataccttgaggaaagatagaggtccatggcttttcagcgttcctgcttctgcaccatcaactaaaaatgggactgtaccagacgccccaaatgtttttgaccagaccactccattgcattaacccaccttgaattcccgag

SEQ ID NO: 225927 - DNA, 509 bp, Glycine max
  unsure (1)..(509): unsure at all n locations
ggaccaacagaaataatgtcattttttcattccacccaaaccttgctgtgttcattatgttatgggcaaacgtggctgaggccatcagcattcaattaaaagcttgatgtctattggcaacttaaacaaactattgctatgttttcttttaacaaataaaagagagaaaaaaatacaactcaactaactaagacaaccacgttacacaggaagagcttcttctaatgaatctggggcaccactactaccgttgagcacaatcacattaccatcggagtcagcatcaactataactgagtcaccctctttaatctctctagcaagcatcttctcagccatgctgtcctccaaaagtcgcattatagctcttcttagaggcctagccccataactcggattatatccttcgtcaaccaccctctccctaaatctttctgttactgagagatcaatttccttggctttcagtctatcaaacacctnctttcacattatgtctgctatctcct

SEQ ID NO: 225928 - DNA, 318 bp, Glycine max
gactaaagacaagatatgtcatttaacaagacagaataattcctacaggtaaagtgcataacaattgagtataccatctaataatgaaaataacgcaaataacataatgcttaaagcaacgttcatatcataagggaaaaatagtttgaatcccatccaacaaaaatcatgcgattaaaatccaattaaaaaagcataaagtaaaataagtttttaaaacaggtttctggaggaaagcaactacatttagtccacttcctcaatcttggggccagcaccacttccaccagaaggaggagcagcatactcatccttctt

SEQ ID NO: 225929 - DNA, 405 bp, Glycine max
ctagttctgagtattctgatcgctccctgagagagctcgtcgcggcggttgcagaagaagattgcaagatgaagttcaacatcgcgaatcccaccactggatgccagaagaagctcgagatcgacgacgatctgaaactgcgagcattttgggacaagaggatctcacaggaggtcatcggagatgcactcggtgaggaatttaagggctatgtcttcaaaattaccggtggttgtgacaaacaaggatttccaatgaagcatggagtgctgactcctggtcgtgttagacttttgcttcacaggggaacttcttgcttccgtggatatggaaggcgtaatggtgaagcgatgataaagtctgttcgagggtgcattgtctgcccagacctctctgttttgaact

SEQ ID NO: 225930 - DNA, 508 bp, Glycine max
gaataaatctcttcatacataaaataacttcaaatggataacatattccaactagttaaatatgattcaatgcgtaacactgcgtaagaaatacttgaataactcaatgtaatcaaaaatagcaaaaccatagtttatcataacaacagccgtcataatatagcaaacaaaaactacatatgatgattaaacttcaccatatctctctatcgaaagcagcttatacagctgctgccttagcagcactggaaagcttggatctcctcttggccaaactctcactgcggcggtctctctgctccttcaacctggaggcaaggagtttctggtactctgctgcctcagattttgccttggcaatcctcttcttcttatcagcaattcttgcccgctttctttggagcgtaagaggagtgaccagtctttgtatcttgggagctttgctcacctttttcccagcttttgtcgtaaatgtacgaccgtaggtgttgacatacttcctaacatc

SEQ ID NO: 225931 - DNA, 517 bp, Glycine max
ctcttctgccttctcttttctcttctcttcttcctccaaaacaagtaaacaaacaacactctcacattcaccacaacacaaacacaaacacaaacaaagacaacaaccttgtttgtctgcaatcaaaacctttcaagctggcgttcgagaaccaagacacccctgtccgagaaatcaagcccaagaaccggagaatcatgggtgctggaggccctgatgacgaggacaataggtggccaccatggctgaaacctcttctcaaagagagcttctatgttcaatgcaagcttcacgctgattcgcacaagagcgagtgcaacatgtattgcttagattgtatgaacggtgctctctgctctctctgcctcgcttaccacaaagatcaccgtgctattcagataagaaggtcttcataccatgatgtgattagggttaatgagattcagaatgtgttggacatcacaggggttcaaacctacattatcaacagcgcacgggttgctttcttgaaagagag

SEQ ID NO: 225932 - DNA, 461 bp, Glycine max
gttttacatgaatggcataatgcatcctcacataatggcgttggatttgagagtgtaaatggcttacggtctggtgagcaaggttttgctattggaggtcaagaacggctaattcgaatgaatggttacctgtcagaattggctgccgcaggttttgattgcagaggtggtgttcaaagagttcacttgctggatggaactattagtggagttttgttgctggaattgtttaaaagagatgggatgggaacgatggtggctagagacctttatgaaggcactcgaacagtaggggtcaaagatatctctggaataaaacaacttattcagcctttggaggcatctggcatatcggttaagcggactgatgaagagctgttaaaaacattggatctgtacattgctgtggaaagagaaagtcacatagttgcttgtgctgccctttctccttactttgagga

SEQ ID NO: 225933 - DNA, 518 bp, Glycine max
ggaacatttttatggcccattagtgcatggacggagtatcaattggattaagcgccttgagactgcagaagatgctgccaaagggattgaatatattcacacgggttgtgttcctgtcgttatccacagagacttaaaaagcagcaatattcttctcgacaaggacatgagagccaaggtctcagattttggtcttcccaaacttgctggtgatggagtttcccatgtttcaagtatagttcgaggaacagtaggatatctggatcctgagtactatatttcccagcagctgaccgacaagagtgaagtttatagttgtggtggaattcttcttgaactcatatctggtccagaagcaatatcaaatgaaagcttcggtgtaaattgccgtaacatagttcaatgggcaaaattacacattgagagtggagatatacacggttatatcgatcccttgttgcggaatgactatgacctttaatgatgtggaaaacatcagataaagcactgatgtgtgt

SEQ ID NO: 225934 - DNA, 478 bp, Glycine max
cacaaaagcacttgcaaactagttttgatttgggaacatcatcacattacattagattggtggtaatggcagcgtcactacaagcagcagctactttcatgcaacccaccaagttgagcatgagcaacactttgctgcataagtctactcagtccatttccaaggcttctggtttggaacctgcggagctaaaaggtcacatgctgcttccgctgaacatacagacttggctcacaagtgtgctgatgctaccagaactgcaagattcggccttgccacctctgccctcgttggctctggggcaagtgctgaaagtgtctcaaagaggctaaccttcgacgaaattcagagcatgacctacttggaagtgaaggggacaggaacagcaaaccagtgcccaacaattgatggtggataggactcatttgcctttaagcctgtgaaatacaatgccaagaagttgcgccatgagccaact

SEQ ID NO: 225935 - DNA, 376 bp, Glycine max
gagctcgaaaactgacacacaccatcaaggtaaaccttgaattttaaacattgttataggaggtccatataatatacaaccatgacagtactctcagtagtgctaggaaagatgggtcaagggataatgcagtaacaccatgcatgaagggactaacaaaatctgagccaacaaacaaaacagaaaacaaaacactctatgactcaagctgagcataccagatgccctggatcttgacatcctttggagcctttgctcccaaatcagtgtcagatggttgaacacttttgaacacaccgataaccttacccgatttaagcttggtcttggtgacactcaaagtgattttgtccttggatgatgaggtacttttatt

SEQ ID NO: 225936 - DNA, 435 bp, Glycine max
gtcaacagcaacgccatcctctatgagcctggtgaacatccggaccatgtggttgtcattaagtatgtaccttacgttggggacagcaagagggccatggatgagtactcttctgagatattcatgggcggaaagaacacaattgtgttgcacaacacttgtgaggattcactgttagctgctcctattatcttggacttggtccttcttgctgagcttagcactcgaatcgagtttaaagctgaaaatgagggaaagttccactcattccacccagttgcgaccatcctcagttacctgaccaaggcccctctggttccaccgagtacgccagtggttaatgcactgtcaaagcagcgagctatgctggaaaacatcctaagggcttgtgttggattagctcctgagaacaccatgaaccctggagtacaagtg

SEQ ID NO: 225937 - DNA, 368 bp, Glycine max
tagagtataggcattatttttttcttctaaaaaaataaaattaagaaattttcatggtaaccattcgtgcagatgaaattagtaaaattatccgtgaacgcattgagcaatataatacggaagtaaaaattgtaaatacgggtaccgtacttcaagtaggcgacggtattgctcgtatttatggtcttgatgaagtaatggcgggtgaattagtggaatctgaagagggtactataggcattgctttgaatttggaatccaaaaatgttggtgttgtattaatgggtgatggtttgatgatacaagagggaagttcagtaaaagcaacaggaagaattgctcagatacctgtaagtgaggcttatttg

SEQ ID NO: 225938 - DNA, 461 bp, Glycine max
cttcagaccaggatattctcttatgctgattcacaaaggcacagacttggaccaaactatctgcaacttcctgctaatgctcccaagtgtgctcaccacaataatcatcatgaaggtttcatgaatttcattcacagggatgaggaggtcaattacttcccttcaaggtatgatcctgttcgtcatgcagaaaggttccccatacctcctgctatctgcagtggaaggcgtgaaaagtgtggaattgagaaggagaacaacttcaagcagcccggagagagataccggtcttgggcacctgacaggcaagatagatttgctcgccgatgggttgatgctttatctgacccacgggtcacccatgagatccgcagtgtctggatatcatactggtcttaggctgaccgttctctaggccaaaagatagcttctcatctcagcacgaggtccaatatttaatg

SEQ ID NO: 225939 - DNA, 489 bp, Glycine max
aaatactaacaaatacaaacggcatttattgagataggtcaacgagttgcattcatggagttatgggtacacacaacataatattgcaagaaaaggattagttctttcaggtaatccaaaatcacatccttatcgcactctttgcacgtctgcaactctaacaatcattctggagttggcaacaacattaaatatttggcctcgtgctgagatgataagctatcttttggcctatagaacggtcagcctgagaccagtatgatatccagacactgcggatctcatgggtgacccgtgggtcagataaagcatcaacccatcggtgagcaaatctatcttgcctgtcaggtgcccaagaccggtgtctctctccgggctgctagaactcgtactccttctcaattccacacttttcacgccttccactgcatatagcacgacgaatggggaaccttttctgatgacgaacatgatcataccttgaaggga

SEQ ID NO: 225940 - DNA, 351 bp, Glycine max
tgctctgatctcggctattgtgtgctccggcactacaccggcccccactaggaccatactgtttgcgactagcggctcatgcttcccagtgcgcttgccgcaatcctcgtaatcatggttctatgacatgcattcgcagccatgctgagggctcgtactaccgttgatggtgatgaacctgtcctgcacgcggaatgggtcagatggcctgatgctatctgcatgggaaggcttcaatggcgtcggatccataaggacagcatctgcacgcactgtgctaagagacacccgtcatgatcacactgctagcaatgaccatatagctgccgaccgtgaagagcttgatctgac

SEQ ID NO: 225941 - DNA, 501 bp, Glycine max
aaaatgcccactttttttcttccaacgctcctcctccttctcatagccttcgccacctctgtctccggccgccgtgacctcgtcggagactttctccggctgccctccgaaactgataacgacgacaacttcaagggcacccggtgggccgtcctcctcgccggttccaatggttactggaattacagacatcaggctgatgtttgtcacgcctatcaaatattgaggaaaggtggtctgaaagaagaaaatattattgcttttatgtatgatgacattgcattcaatggggaaaacccaaggcctggagtcatcattaacaaaccagatggaggtgatgtttataaaggagttccaaaggattacaccggcgaagatgttactggtgataactattttgctgctttacttggaaataagtcagcactgactggtggcagtgtgaaggttgtggacagtggtcccgatgatcatatatttgtatactatactgaccatgga

SEQ ID NO: 225942 - DNA, 502 bp, Glycine max
tttttaatttttttttgatgttttaggatcatcatattgaatctgtaatgtacaacttgatattgatacataaccagtgaaataaaaaggagaggaaaaaaagagtctaaaattataacaatgctgcatgatacaattgtgagaagtattgtatttcagtattgtactgaaggtgcaattatacggaatatggattctatcccaaccaaaattatgttgttgggcagtgtgagttgattctcttgatatgaacactagaaatctctttatgcaggtggaagagggccccggcatgtagggcactccatttttatatccatccatctttgcaaacagccagagtggaaaaaatgatcacaaggggtcaccatgcaatcattagatcgcggagaaagatcataggctgttatgcatataacgcattctgaggcatgaattgtatcttgagcataccttccataatagcagtatttttcaggtagaaactgacgaggaatgaacc

SEQ ID NO: 225943 - DNA, 426 bp, Glycine max
tcctttttttttttttttatcttttcttactgtttcattttccattttttagttattccgatattcggacgcatcaacttgttatgaaatcacattgatagcctctactcgtgtcctagctcgtctaagagctagatttgcctaaattgtttgtctcttgccttccgccttattcaaattagcttctgctatttcaagagtttgctgtgcttcttgtggatcaatgtcactacccttttccgcatcatttactaaaacagtgatctcattattgtttattctaccaaaaccgtccatcagagccatcgttaaccattggtctttaagaagacgtattctcaaaatacctatatcttacggctgtggcaataggcgcatgatttggtaatactccaatttgtccgcttttagtagataaaatgattt

SEQ ID NO: 225944 - DNA, 581 bp, Glycine max
cccaaacccaaaccccattctctcgccctatccacttccaatccccacccattccatctctccaaacccctaaccatttcccctaatccaaacccccccattcccaaatccaccccctcctcctccttcggcgctacctctccatcctgccccctaaacctcaagtcccgcctccgcaacggcgagaccctctatggtctcttcctcctctccttctcccccaccctcgccgagatcgcgggccacgccggctatgacttcgtcgtcgtcgacatggagcacggccccggtggcatccgcgacgcccttccctgccttcacgccctcgccgtcgcgaacaccgccgccatcctccgcgtccctgaatccaccgccgtctgggccaagaaagccctcgacctcggcccgcagggcctcatgttccccatgatcgaatcctcattatccgcccaggacgcagtctcctactgccgctttccccccaccgggctccgcggcgcggcccattccatcgtccgggcctccaagtaccgcctggacgacgagtatctcggtaattacctcgacgagcttcttatcat

SEQ ID NO: 225945 - DNA, 596 bp, Glycine max
cccaaacccaaaccccattctctcgccctatccacttccaatccccacccattccatctctccaaacccctaaccatttcccctaatccaaacccccccattcccaaatccaccccctcctgcttctccgtcgctacctctccatcctcccccctaaacctcaagtcccgcctccgcaacggcgagaccctctatggtctcttcctcctctccttctcccgcaccctcgccgagatcgcgggccacgccggctatgacttcgccgccgtcgacatggagcacggccccggtggcatccgcgacgcccttccctgccttcacgccctcgccgccgcgaacaccgtcgtcatcctccgcgtgcctgaatccaccgccgtctgggccaagaaagccctcgacctcggcccgcagggcctgatgttccccatgatcgaatccgcattatgcgcccaggacgcagtctactactgccggtttccccccaccgggctccgcggcgcgggccatcccatcgtccgggcctccaagtacggcctggacgaccagtatctcggtaattacctggacgagccttctatcatgtgccaggtggagtc

SEQ ID NO: 225946 - DNA, 432 bp, Glycine max
ccaccttccctctcttctgttaccaatggctccctcatcaaactacatttctttccttttcctcaccacccttttgtttgctcttcaaatcagtgcaagagacagccagttcttcagcaaagtcacccattatgacacaaacagtgtctaagagacagaacttgccaacaaagaagcaccagaagtgaacaagccagagcaacaaccacctttcattccggagactgaaaacagctatggcctatatggtcatcatgatgagtataaccaagtccctttcaccaccaccaaccccacttcttaccacccctacaagaccgagtttgagaactccaacaacaagtattacaacaatgatgcctataacacaaggttcttcgaaaccggttacaacaacaacaaggattcttatgagggtcaccaatatgagtt

SEQ ID NO: 225947 - DNA, 445 bp, Glycine max
aagcacaaaatacttcgataactttatattattgtacatgcatgcatagcatagatagcctgctctcaaattagtcagcaggaacaaagatagagagatccaacgatctttaaatttcacatttgccataaatatataacagaaaagagggtatgggatatgagttaagttttgatctcattcaactacagtatcccaaaccattactcttaagactttgaacttcacttgtactccaggatcatgttgttctcaggagctaatccaacacaagcccttaggatgttttccagcatagcttgctgctttgacagtgcattaaccactggcgtactcggtggaaccagaggggccttggtcaggtaactgaggatggtcgcaactgggtggaatgagtggaactttccctcatattcagctttaaactcgattcgagtgctaagct

SEQ ID NO: 225948 - DNA, 550 bp, Glycine max
gttattttgagtatcagcatcaatggctccaattgcagtgggaaacgtgattccagacggcattttggcttacttggatgaagaaaacaaaccccaaactgtctccattcactctctcgccaccggcaagaaagtcatcatctttggggttcccggtgccttcactcctacttgcagcttgaagcacgttcctggcttcattgagagagcagaagagctgaaagggaagggtgtggacgaaataatctgtatcagtgtgaatgatccatttgtgatgaactcatgggccaaaacattcccagagaacaagcatgttaagttccttgctgatggtgcagccaaatacaccaatgcccttggtcttgagcttgacctcactgacaagggtctcggcgtccgctcaaagaggtttgctctgctggtggaagacctcaaggtgaaagttgcgaatgttgaaagtggaagagagttcaccatctccagtgctgaagagatcatcaaggccctttaaaaaccttgaatcctcttgctggctgttaactgtcttaat

SEQ ID NO: 225949 - DNA, 333 bp, Glycine max
tccttttttttttttttttttgaaacaagaaatcttatttatttccataatatgcaccatatcatggcccttcccagagcacacaacacaattacatctatgaaaaggaaaatgcttctagtatattcttgcatcaaaagagtctaacaccacacattatagacagttaaacagccaacaagaggattcaagggttctaaagggccttgatgatctcttcagcactggagatggcgaactctcctacactttcaacattcgcaacctttaccttgaggtcttccaccagcagagcaataccttttgagcggacgccgagacccttgtcagtga

SEQ ID NO: 225950 - DNA, 457 bp, Glycine max
gggttttagcgcagcttcttctagatttaaggaagatgggtaaggaaaaggttcacatcagtattgtggttattggccatgttgactctgggaagtccactaccactggccacctgatctacaagcttggaggcattgacaagcgtgttattgagagatttgagaaggaagctgctgagatgaacaagaggtctttcaagtatgcctgggtgcttgataagctcaaggctgagcgtgaaagaggaatcacaattgatattgccttgtggaagtttgaaaccaccaagtactattgcacagtcattgatgcccctggacacagggatttcatcaagaacatgatcactgggacatcccaagctgactgtgctgttcttatcattgattccactactggtggttttgaacctggaatttcaaggatggacagactcgtgacatgctctgtttcattcac

SEQ ID NO: 225951 - DNA, 561 bp, Glycine max
gacacataaatttgattttttaaaagcaaaccaagcaaaaattgaacacaaatataaagttgacatttaaaaagcaaaccaacaacgcaacggcaaagccctaaaactcgctgcgcttaacaaaaatgtaatcaggggttctcacaaacacaacacattaaaacagaatgataaaaggagtcttgccaccgtcgatcaagaacccaattctgggaacaaaagttgcgagatgatggtggagacttcaaactatgtccgaaaaacaagctacctagaaacgaagacacaagggcaagaaaccaacatttattgtaaccataagaaacgacatcccctgatgaaccaaaccgcacgattcacttcttcttctgggcagccttggtgaccttggctccagtaggatccttcttctccacgttcttgatgactcccacagcaacagtttgacgcatatccctgacagctaagcgaccaagtggagggtactcagagaaagttcaaccaccatgggtttggtcgaatcatcttaacaaaccagataccattcttaaaaacttggtt

SEQ ID NO: 225952 - DNA, 482 bp, Glycine max
caaagaaaataaaaaacccttagccaacacaaccatcatggccacctctgctattcagcaatcagcattcactggtcaaactgctctgaagcagctcaatgagttcgtccgcaagaccggtggcgccggcaaaggtcgcactaacatgcgccgcaccgtcaagagtgctcctcagagcatttggtatggccctgaccgtcccaagtacttgggtccattctcggagcagattccatcatacctgaccggagaattccctggtgactacggatgggacactgctggattatcagctgacccggaaaccttcgccaggaaccgggagctggaggtgattcacagcagatgggcaatgcttggtgcccttggctgcacctttccagagatccttgagaagaatggtgtcaaattcggcgaggccgtgtggttcaaggccggtgcacagatcttctcagagggaggccttgactacttgggcaacc

SEQ ID NO: 225953 - DNA, 476 bp, Glycine max
gttctcctcgtaggcggcgcggaggcggccgatgagggcgtcgaggctgccccaggcttggcggagcgggcagggacatggggcaggtgggttggggagaccgaagaacgggcaagggtggttatgaaccttagtcttcccgaactggtcgaggtagtggaggaattccagcacgtgcgcaccgctgcacaaggtcaaggagagtggtggacggtggttcctcaggtactggcagaacgtgttccagtcccttcgcttttggttctcgtagcggctcggagtagtagtgctcctcgctgtgttgcttcccgaagacggcgacgacactgtcgccgccgtcgttggatgatttctggtggtcggggtgggaactgtttccattttgaacctgctgatggggtttgtaaccgttgaaacgacgttatttgatctagaacctaaatccttggatctgatatgcttttctttaatccctt

SEQ ID NO: 225954 - DNA, 487 bp, Glycine max
cttaaaaccatttatgctctcttaaaacaaaggtccctcaaaccactttccccacactctttagtgtgtcatttttttttttgctctttccccacaaagaggtcttggacccttcttctgtgtagtgcaatggccatggctaatgttttctgtgttctgcttctggcactccttggcatttccatgatcacaactcatgttatggcaacagattctgcttatcacttggatggaaggaattatggaccctgggagtctcaagagcttacagtgcccttttgaatgcacaagacgatgtacccagacacaggaccactagccctgcatggtcttttgcaaacaatgctgcaaaaggtgcctttgtgttcctcctggctactatgggaacaagtctgtgtgcccctgtacattaactggaagaccaagcgtggaggacccatatggcccatgaaaattgataatatttgccatatttcccctaccattt

SEQ ID NO: 225955 - DNA, 469 bp, Glycine max
aacaaaacttccttataaattaaatgcaaatttaagacatccctcctcagcagcaaaggaaatggactaaaaccctatggctgcttgtgaatttgaaaatctcagacttttaccatcaaaacaaaaaacagtactcatcaaaaacaaacagcaacgaaaatgttaccgccgatcaagaacccagttttgaaggctactgctacatgaaatcggcggacacttcaaaatataactggtaaaacaaacacctaagactctgcaaagataaactactgtaaaggaacaagtttttttgaaaccacgttgatgatcacatgtgctagcaaaattgccaaaatgcaatcactttttcttggcggcagctcttgtgaccttggctccggcggggtctttcttcttaacactcttgatgacttcaacagctacggtctgacgcatgtcccttacagcaaaacgaccaatgggagga

SEQ ID NO: 225956 - DNA, 486 bp, Glycine max
  unsure (1)..(486): unsure at all n locations
gatctggttgtgttgggtgggttggacccgaattcgtgggaagcatcaaattctgtttttgtttataatttcttgtcggccaagtggcgccgcgggacggacatgccgggtgggcgccgcatgttcttctcgtgcgcgtcagattccgaggggacagtttttgtcgccggcggacacgacaatgagaagaacgcgctgcggtctgcgctggcctacgatgtttcctcggaccggtgggttgtgcttcccgacatggcggcggagcgcgacgagtgcaagggcgttttcagccgcgggaggtttgtcgccgtcggcggttacccgacggagacgcagggaaggttcgtgaagagtgcggaggcgttcgatccggtcacgatgagctggagtgaagtgaatgacttcttggattgcgccacgtgtccgagaaccttcgtggacggtggcgatgacganggggtgttcttgtgcacggcgaggacttga

SEQ ID NO: 225957 - DNA, 535 bp, Glycine max
acacttaaccacaaatgtcattttaattgataagtttatatacaagtctatatgtatttctgtgttacaacttacaaggaagctgtaatgaactgtttaaccacccaacattcttaatcaacaattttgatggctggggggagttgatgagagggggaagagtgaaagaagaggcaaatagctgacatatcatccatcgcaatgccactttttttccgtttccattcatgtatggcacatttcacaagcctttgagcagctttttctttatgtgacgttgctgaaacaatcttcactgcttcctggttggatataacatcccataccccatctgttgccaagatgacaaattgatccctggtggtaatttttctgtgtgtgacattaggcacggagattagtccaaagtccttcatgcagtggtctccaaagctctagatattgctagtcctggtgtttaccatttggatccaaccctgacacttctggttatcttcatacaaaataccttcttggatgtgtatgctttgcctct

SEQ ID NO: 225958 - DNA, 579 bp, Glycine max
ttgtgaatggattggtaagaactgtgtcaatcatgaaagagaagaattgtcaaaaggaggatggaagaaaagctgtggaagaattggcaaaggaagcaaggaagaatgaattgctattgagttcatctggagttgtgaagtcaaccaaggccaacaattttgtttctgtgttcactaataggggccagagaggagtcaatcaggatcgtcttcttgtttgggaggaatttggttgccaacattacatgatgttctgtggagttttcgatgggcatggtccatggggacactttgtagccaaaagggttaggaagttagtaccagccgttttgctatgccattggcaggaaaatctggctgcaacatcacttgacctggattttaaaatggaagctgacaaaaatatccatggattggacatatggtaacaatcttacatatagacttgtgctgcctgtgatcatgatctgaagcagcacactgggattgattcctttctaaagtggctctacagcatttgacattatcatacatggtgaatatcttactatagccaacataggtgattgtatggctgtc

SEQ ID NO: 225959 - DNA, 450 bp, Glycine max
gaacaatccaactgtgttattctcatgaagaacaacatttattaacatacatatatatggaaatccagatctatacttccaactgtattcagaaacataaattgaagcaataacaaagctcaatctccaactcacatatacaagtaaaagaaggcacaaagtgacagtgctcacttctcaacaacacaacaacaaaagaaaaaaagagactagttatgttttcatcatcatgttattatatctaaaacaccaagctcgaaaaccacgtactatatattcaaatccatatatgtaaattttaatcacgtaataaaatcaacccaaaactgaataaaagtgataagattatgtaagtatgagaataaaccccatatatttatatagagagagagagattgagagagagagagaaaggagcaaggtgaaatttttaaaccagtttccaggtaa

SEQ ID NO: 225960 - DNA, 478 bp, Glycine max
accgcggctgccattgcttatgggctcgacaaaaaggccactagctctggggagaagaatgttctcatttttgatctcggcggtgggacttttgatgtctctcttctcaccatcgaggagggtattttcgaggtgaaggccactgctggtgatactcacttgggaggtgaagattttgataacagaatggtgaaccattttgttcaggaattcaagaggaagaacaagaaggatattagtggaaatgccagagctctgaggaggttgagaacagcatgtgagcgggcaaagaggactctctctttcactgctcaaaccaccatagagattgattccttgtacgaaggtattgacttctacacaaccattacccgtgcccgttttgaagagctatacatggatttattcacgaagtgcatggagcccgtggagaagtgtttgcgggatgccaagatggattagagtaccgtccatgatg

SEQ ID NO: 225961 - DNA, 353 bp, Glycine max
aatcacaacctttttaatataaaatttgaatttccaacaacaggctaacaaattattcagctggaacaagatatgatattgaaacattccacaacaaaactaaccaactataattttaacagaaggcaaccatgccacattttagggtattataaaacaatcccacatatgtgaactcaggtttatggatccaaaaatgttttaagttactgggacctcattttgctactttcagctgcccttacttgagagaaatatggatgtgccattgcttctcttgctgttaacctgtcctggtgatcgtatcgaaggagtttatcaagaaaatcaattgccttaggagacacaagatg

SEQ ID NO: 225962 - DNA, 552 bp, Glycine max
cttagttttttcttcgtgtccgcgcccctgacacaagaacaataacaacaaggggcattgtaatggcaacttgtgttcctgctgtaagtggtgcactgcattatggagtgacaaactgcaagggacacagctacagaaggagtgcttccttttctgatgtgcctaacacgggattcttacaaaaagatctttcatggtctaaagtggtatccaaggtcctgcagatacacagatgtgggttttctgcaccttcacttcataaggatcagaaactcttcaaagtcatttcctcatggaagaaagatagtcccacaaaatactttgactttatcgtcattgggagtggaattgctggcctccgatatgtgcttgaagttgcaaaatatggatctgttgcagtgataaccaaggctgagtctcatgaatgcaatactaattatgctcaaggtggtgttagtgctgtgctatgcccttcagattctgtggagagttacattaaagacaccattgtggctggggcatcatcttgtgatgaggaaagcgtccggttgt

SEQ ID NO: 225963 - DNA, 577 bp, Glycine max
ccgttacatattcttcccgcgtcgcacccaccaccaagttattctcatccaaacaaggcacaatctccatgtccctaacccaacccccatacgacctccaatccttcaaattccaacccatcaaagaatccatcgtctcacgcgaaatgacgcgccgctacatgaccgacatgataacctacgccgacaccgacgtcgtaatcgtcggagccggctcggcggggctctcctgtgcgtacgagatcagcaagaaccccgccgtgagcgtcgccataatcgagcagtccgtgagccccggcggcggcgcgtggctcggcggacaactcttctccgccatggtggttcgcaagccggcgcacctcttcctggacgagctcggcgtggcgtacgacgagcaagaggactacgttgtgataaagcacgcggctttgttcacgtccaccatcatgagcaggcttttagcgaggcccaacgtgaaagctcttaacgcggtggcggctgatgacttgatcgtgaaggaagggagggctgcaggggttgtgaccaactggctctggtttcgatgaaccctgacacg

SEQ ID NO: 225964 - DNA, 416 bp, Glycine max
cgctccttctctgtcccaagaatgaattctcaatggcgattgaccacgaaaacgatctcaaagacgacaagaaccctggacctctcgacgaggatgacatcgcccttctcaagacctacggactgggaccgttactccacaagcattagacaggcgcatgagagccatcgagatatggcctggacagtgaatgactgatgtggaatgaaggagctctgatactggtttagctgcaccaagcctgcgggatcttgattctgagagcaaatgatgcaggaggagcaccctcttcaggaggcaaggagcaccgagattataaaccctgatcctgtagatgcccagtatgttatcaatgtggagcacattgcagagattggtgcagggctaggagacaaggcttaccacactgtcataga

SEQ ID NO: 225965 - DNA, 467 bp, Glycine max
atggaatcaaagattcattttcatttaaaatatcaaaagcacataaaccaacaaccacatcacctaatttacaaaaaatctaattatttttttaaaaaaacacctctcattcattcactcactccagtacttctcatcaccctctttctccttcccctcatcactctccgacccatccccgcccatcttgaaccgcgtcacattctccaccgctgcgctccggaacagccccacgtctacggcgccactcaccatgtgatacccacgcgacctcaaatcccttgccccatcatacaccgtggcgaaacctgcgagataagccccaatctcaacgttgtcgtttcggctcttcaacaccttgttctcagcattcttcaaaaccttcctcactttcttgttccctgagtccacaaggaccctaaactcgcgctcagattcaacggtccatctgcacgcagtctacgcca

SEQ ID NO: 225966 - DNA, 481 bp, Glycine max
caaaaaaatgcggtttgtgaaccgcgtggtgtcgtcaatgttcaacacagtctcagggaagaagattgctattttgggatttgctttcaagaaggacactggtgacactagggagaccccagccattgatgtgcgccagggcctttcgggagacaaggccaagatgagcctatgtgaacctcacgtcaccgctgatcaattcatgagggatttggccatgactagatgtgaacgggaccaccctgctcatcttcaaccagtgagtccaacttccaacaaacaagtatctgtagtctgggatgcctatgaggcaatcaaggatgcacatggcatctgcattatgactgagtgggatgagtttaagaaccttgattaccaaaaggtttatgacagcatgcagaagcctgcattcattttcgatggtcgcaacgtcgtgaatgttaacaagctgagggaaattggcctcattgtttacttcatt

SEQ ID NO: 225967 - DNA, 417 bp, Glycine max
attaatattctccatacacatcaaactagacatacactacctagcttgttcttaaattccacacaaacacaacaaaaactattagcatcatctactttctagcttattgttcaagagttgtgatcaagaatgagttcaacaagccgtgcttggacttggaccgtggcggcaagtgttggagtggtggaggccttgaaggaccaaggtatatgcaggtggaacagtgtgatgagatcagcacaacaacatgctaaacataatatgaagtctttgtctcagaccaagaagctttcttctcaatcatctgttatggcttcagccaaattgaaagatgagaaagctaagaagtcagaggagtccttgagaaccgttatgtacttgagttgctggggtcccaactaaatacagatgcatgga

SEQ ID NO: 225968 - DNA, 462 bp, Glycine max
tgaaggtgctgcaagtttgatactcgatacaaagccatcaaaagttgtatctgacgaatggactgtgcaagtcaggtgctcattggtttacatggattttgaaggacgttcagatggaagatccattaaaaatattctatctcatgtggctcccttgaagctggttttggtgcatggatcagctgaagctacagagcatctgaagcagcactgcctgaagcatgtttgtccacatgtttatgctccccaattggaagagacaattgatgtcacctctgatttatgtgcttacaaggttctactgtccgagaagctcatgagtaatgtactcttcaaaaagctaggagattatgaattagcttgggttgatgctgtagtagggacgacagaaaatgaccccgtttcgctgctccctgtttctggagccgctcttccgcataaatctgttcttgttggtgattt

SEQ ID NO: 225969 - DNA, 451 bp, Glycine max
cctcggtggtcgtcctttgttcgtctttttgaatctgatacattctgtaaggaccaaaaaatggaaatatggctcacactcccaagtcactaagaaaatagaaaaagacagcacgcatttctcgcagagtcaaaacccataaattctgcacaatattactattaacacgtttgccatcaagatatggaatcagggaacaaatttaatgtctttgaagtattcatgctccacagcgcttctggcggtgattcttttgctgggatccaagcaaagcatactagaaagaagattaagaccagctgcatcaagatttggaaccacatttgccaagtccttggatggccatttgggaaatgttgatttaaaatcgggcaatgaagttacaccaggccatgtgtattcatttggggtacccaagattctgaatattttaaataattcatcagtctca

SEQ ID NO: 225970 - DNA, 512 bp, Glycine max
gtgacgccgtggcggtgcttcataactgcaacatctatgtgaggaaaccgatgagcaaccagcagaacacggtaacggcacaaggaagaaccgatcctaatgagaacacagggatcatcatccataactgtcgtataactgcagctggggacttgaaagcagtgcagggctctttcagaacctttctaggtcgcccatggcaaaaatactcacggactgtcgtcatgaagagtgcccttgatggcttgattagccccgcaggttggtttccgtggagtggaaactttgctctaagcaccctctattacgcagaacatgcgaatacaggagcaggtgctagcacaggagggagggttgattgggcagggtttcgagtgatctccagtactgaggctgtgaaattcaccggtggaaatttcttggctgggggatcgtggatttcggggagtggcgtgccctttgatgaagcttatgaatactctatagaaagaacgtgtctgaaacggatgtgt

SEQ ID NO: 225971 - DNA, 356 bp, Glycine max
agctccaaatgatagtagcattttattcatatagagcaagctcgaatcacaaaggtaaagcctttgagaacaattctcatatgtatgcaactggttcaataatatgcccaaacttcatggtcatatttatatataataccataaaaggggaggtttttgaagagcaaaaagacaattccaaaacgtgtattggaggaggcaagaaggaagagagttttagcccatggcatacttctgggtccagcttctagcagtagactcatacttgaatttgtcggtcttgcacaaatgagcaatttcaggcactaaagggtcatcaagatttggatccgttagcagagaacatattgagaagc

SEQ ID NO: 225972 - DNA, 561 bp, Glycine max
atttcctcttctacgattctaaaatatcgcgaatggcatccaagagaatactgaaggagctcaaggacttacagagagatccaccaacttcatgcagtgcaggccctgtgggcgaggacatgttccattggcaagcaaccatcattggtccaaatgacagtccctatgctggtggtgttttccttgtgaccatccatttccctcccgattatcccttcaaacctaccaaggtagcattcaggaccaaggtgttccatcccaacattaacagcaatggcaatatttgcctggacatactcaaagaacaatggagtcctgctctcaccatatccaaggtgctgctctctatatgttctctgctaacggatccaaatcctgatgaccctttagtgcctgaaattgctcatttgtgcaagaccgacaaattcaagtatgagtctactgctagaagctggacccagaagtatgccatgggctaaaactctttatcctctagcctacttcaatacaccgtttggaattgtctttgtgctctttaaaaccctccctttatggtatata

SEQ ID NO: 225973 - DNA, 579 bp, Glycine max
  unsure (1)..(579): unsure at all n locations
cagatctcatttttgcaagttcttctattaattcggcaaatggagcatagcaacacccaatctggggctgctaaggtttcaatattaatgattggtcagcaagccatagtagatgcttatctttgccttacacatttgactgcaggaatactagttgaatccctgttcaatgcttttgcaactgctgcatttttcaagtttgtggttttctcaatatttgagatgagatatctccttgccatctggaaggcaagtaggcctttgagcaatggtgaaggttgggagacaatgagacgtgaattgtcagttctatacagccgtttctatgggatcctattgggaggcatactgctcatgtatgaattccacaatcatttgagacctattcttcttcttgtatactcattttggatacctnaaataatcaccaatgttattcgagactcgcgcaagcctttgcatactcattatatcttaggcataactggtactcgggtagcaatcccatttataatttttgttgtcctacaactttttgacatagtaccagatcagagctggagtgtctgcttgctatat

SEQ ID NO: 225974 - DNA, 535 bp, Glycine max
gaattaacagcagacacacagaaagagaaagaatgaaaaagagaaaaagaaaaaggagaaagacctaattttgtcactgtaattcttcttcttcaaagaaaaccccaatttcgaacgcttcaaattcaattcaggaaaccctagtgattaatttcgttgcgaaacggcgattcaagattatcgtgagccagaagatggtagcggaagcggaaattatctgtcagcagaacattccgatgttggacgtgaagtatcatatatgcgtggctcaagaacacaacgtgaaggttgaggtttcacccaaatcaccttcaccttctgttccgatctttggccaagcagtgagttgctctgagatcattaaagattccattttggaggcccctgcgatgaattttttcccaaatgtgcgttctggtagctatgccgagattggaccgcgcgtttctatggatgatgaacacatttgtattgatgatctgggagctcatcttggattcgtgttcaagtgtccgataccgagtgcattttatgc

SEQ ID NO: 225975 - DNA, 393 bp, Glycine max
caaggagaaactgacatgataggatataattatataaaattgtacataggaagtggaaatgtgaatgtgtggcagggtgataaaaatgaaaagagaagcaacaataataaagtgaatgagaaatttaaatatcacggactaaaatatctattcactcgaaatttaaatgtcacggtctcttttgcactcaggaggagagatatgaggatagcgtttagtgtcagtgcagtagttgtagatggtgtatttctggcgcacccatctgagcctacgccactgggcggtgtcaaggtcacggaactcaggctggtcccaccacctcttgccctgcgtgtcgcagaacttggcgttcaccgaagcctcgtacccgtcgatgtgaaaccccttgtacgc

SEQ ID NO: 225976 - DNA, 394 bp, Glycine max
cagaaaaaatgggctcttcttcttctatgtggacggtgagtgtgaatgtggcatcactgtcctgtgcagcgctctgcgccaacccacgcaggccagtggatgcacaatttggccgaaactacgtgcccagattggcctttgatcagtttgatatgttaagggtggatattgcattcaatttcatcttgacaaggacactggtactggcttccattgccaaagggcttacttgtttggtcacttgaggctggtcactaagatggatgctggagattctgctgggacaaacacctgtctggtaattatcttcccaaacacggagcatgagtagatagactttgagtacttggagaacagaacaagacaaccttacattgtgcaaacacattggttc

SEQ ID NO: 225977 - DNA, 440 bp, Glycine max
gtctccttcataattcacatgttgttcatttattccaaaattaaaatcataattaagtagggaccaaacagatagaaaagaaaagaaaagctatatatctagctaattcgaaaggaagtttatggattcacaattgcctaaatgtttgcttaggcgaatatgagccggggttcatcccttccaaatggacgcgttcaataaatggctgtgatactgccaaacgtcttcacccccaaatgaaccgacttgagccctgatatcatcatcgccccaaacgttggacccatccttggggagccatcaatttttgccacctacatgccggtgacaatcatgccgggcacaatcttcctcgtgagccttacaatagcatcctctggagcattcatatccaaggcctttattccaggaacgctatcaatcatgccaatactcttaaa

SEQ ID NO: 225978 - DNA, 497 bp, Glycine max
tgtgaacgggagtgaccattttcttgttgccggtaggatcacttgggattttcggagactcactgaagaagaatcggattgggggaacaagcttttgtttttacctgctgcgaagaacatgtcgatgcttgtggtggagtcgagtccgtggaacgcgaacgatttcgggattccgtatccgacttattttcatctctgccgaggatgatgatgtgtttatctggtaggagaggatgatgaggttggagaggaagtggctgtttttgtttgctggagctccgagaccggataacctgaaatcgataaggggccagattattgagcagtgtatgagatccaaggttgggaagttgatgtagtgtgattatggggagagtaagtgtcattcccctaggtgtattatgcacatgtttctagggtcgctgttctgccttcagcctcaaggggattcgtttctatacgagctgttttgattcaatgctggctgggtgtaacct

SEQ ID NO: 225979 - DNA, 533 bp, Glycine max
aaacactcataacacaaagcacatagcaaagctcatcctagagttaaaaaatggcagcaggtccttccatggctctctcatccccatccttggctggcaaggccgagaagctgggcccatcagccccagaagtgggaagggtgagcatgaggaagaccgtcaccaagcaggtctcctcatgaagcccatggtacagcccataccgagtcaagtacttgggcccattctctggcgagcccccgctctacctaaccggtgagctaccaggcgactacagctgggacactgctgggcttgtcgtagacccagaaaccttcgccaagaaccgcgaactcgaagcgatccactccaggtgggccatgctcggagccttgggctgcgtctttccggagttgctgtcccgcaacggggtgaaattccgagaagccgcgtggctcatggccgggtcccagatctttaccgagggtgggctcgactacatgggcaacccaagcctgatccacgtcccaagcattcttgccatccggcccaca

SEQ ID NO: 225980 - DNA, 371 bp, Glycine max
tttgtttttcttttttgtaaaatgcaagtaacatcaagttggattcggatactcaagaggattcacattatctgaagtactttaccaaacacatatctaaaaactctcaaaagacatttcgttctttgacgcttactatccggcgactaagttgggggcataggcccaggcggtgttgttgacagggtcagtcaggtgatcggcgaggttctcccatggacccttaccggtgacaatggcctgaacacagaagccaaacttggagaacatggtcaatcgttcgaccttgagtaccttgaccttacgctcagcaacagcctgtgggtcatcaattaggcccaatgggtcgaagctgtcaactgggtagattg

SEQ ID NO: 225981 - DNA, 457 bp, Glycine max
gaaatttaagtgaggagctagagaatgatgatgaagtctgctatgtgtgcagtggtggttgcagcacttcttcttctggcggatgtggggcccatggctgaagctgtgacatgcaccccaacagagttgagtccgtgtcttccagcaatcacttccggtgctaaaccttccaatgcttgttgcacgaagctgaagcagcaaaaaccatgcttatgtggctacctcaaaaacgctagcttgaagcagtatgttaactctcctaatgcccgaaaaaccgttgcttcttgtgggattcccttttcaacttgttaattaattaagccttcttataattaaagggtgggatatatatatatatatagattaacagtctaatttatacacactttgatcctaccaagcatcttgacacaagcttttcatatgattttaccactttatcgcaacattttacatg

SEQ ID NO: 225982 - DNA, 521 bp, Glycine max
gaacatcattatttatttatttatttatttatttatagctcttaacacatataattccctggatacaacatgtatactggtcatattcaactctagagagctttatctgatatgatcatccttaacatattcaaagatagctaaatacttaactgtataatatatcacacaaacgtagagtgacatatatagagtaaataataaatataagtttaatttatacacacaaactatgagtatataacatcgttatccaaatattcaacaagaatttactttattaccgcatcatgttaaaatgttgcgataaagtggtgaaatcctattgaatgcttgagtcaagatgctttgtacgatcaaagtgtgtatatatcaaactgtctatctatatatatatatatattccacactttaattatcagaaggctcaattaattaaccagttggaaagggaattccacaagaagcaacggttcttcgggcattatgagagtaacatactgtttaagctagcgttttga

SEQ ID NO: 225983 - DNA, 508 bp, Glycine max
ctctatttctcagtctctgtgtttgcggctgaggattccgaacgagtgaccttcttcgtttctcgcaaagtttaagtaatcatgggtaaggaaaaggttcacatcaacattgtcgtcattggacatgtcgactctgggaagtcaactaccactgtgcacttgatctacaagcttggaggtattgacaagcgtgtgattgagaggttcgagaaggaggctgtcgagatgaacaagaggtcattcaagtatgcctgggtgctcgacaagctcaaagctgagcgtgaaagatgaattaccattgatattgctttgtggaagtttgaaaccaccaagtactactgcacggtcattgatgctcctggacatcgcgactttatcaagaacatgattactggtacctcccatgccgactgcgctgtccttattaatgactgcaccactggcggctttgaagctggtatttctaaggatggacagacccgtgagcatgctcttcttgctttcaccc

SEQ ID NO: 225984 - DNA, 395 bp, Glycine max
catataccgaggacctgacttcatatcctgaaaatatcgagattcatgagacgaacgagtttccatgatatctagactggaacagtccaaaccagctcaagcagctcggtgtaatagaaaattgccctgaccagcatttatgtgctgagggaaaagggttgccaacatgtgaggttaaaagaagttgggtgacaaaggttcacctggagaggagcatcctcgagaaaaatcttgcagagactattaatgtacgtgtgtttgacgaacgaatggatctcatgcgagcagctattgctgaagcatacggaactcctgatcatgaggggctgtctgtctttgacatatgcatccctccggagtatcccaatgaaccacctatggtgcactacacttct

SEQ ID NO: 225985 - DNA, 458 bp, Glycine max
tttgttgttttttttaatattaaacaataattttggcatcataaattcttccggaataattatacaaaagtgaccagggaaaacccgatctgccagttgcccactgaataaaaacacacatcatattactatgtgtaggcatacatgcattgtaatgagtggatattccaaagcaattggtgcctttatccctccttaatccttatgccgtaaatggcaccattccttgtgaattgtgattgcttcttcagaaatagaattctacaaaggtagttgcaatatctatttgccaaactataaatgttaagacccttctttccaaatctagtagtgtcccaattgtctttacaaaggtgggacatgatatgtatgtacaagtacaaccatgtaacataatggtataatgatcatactttggtctgtactagtgcacattacagggaggtattatgcactga

SEQ ID NO: 225986 - DNA, 441 bp, Glycine max
atcactctaatattttattttattcctctcttctcatcacattatattatatatttcttaattaacacctaggacatatatatgtctacaccaaacatatagctacaataatttctcacagaaaagacattaatccttgatgagctcccattattggttggctggcgtgtcttagcatcccctccaactctgtagcaaacctctccatggctttggctggcaagctaattggtaccactatcacatgctcttctttgtggatcttacatgacacgtacacgcttgtcattagaggaaaacttgtcattccacccgtggcaggcccaccataaatgggcttgccccacccaaaatcaaccttatatagcccaatacgtgtaagattcgaaacaaggtaggacctcgtagttgcttgaaggggtctttctttcaccacaatta

SEQ ID NO: 225987 - DNA, 243 bp, Glycine max
aattaagctagtctatatatttttaatgtgtgatcatcttcattaatatttcattccatggcttcttgtcactcgtctcccactctaatgtttacagtacaaaagaggcaagcggagctaatagcgcccgcttagccgacgacccgagaagttaagaaactatcggacattgatgaccaagaagggctatcgttccaaatcccctttatactatcctaatggaattattcagagttctccatg

SEQ ID NO: 225988 - DNA, 368 bp, Glycine max
gagacagaatgtcgatagagaactgctcacgtctttgagaaatgggcgctgctgccattgacacagcataatccatccatgaattcatggtcaaggatgctaagggcatagacgtgaacctcagcacctactaagggaagggctttctcgaagataacgacgatgcaaaatgtggatctacaaattccaatgacactcaggtaacagagctttacagcatatataaagacaaaggtcatgagatactggcatttacatgcaacccatctctgaaacacgagcccaggagtagccaatatgcagatgaatttgcctgtacaaggcacaatgctgtgtatcccatttatggaacggtacgagtgaatgga

SEQ ID NO: 225989 - DNA, 505 bp, Glycine max
caacaatgtttttatgtttttgtggttctttgtgtatcaattttccccatatatgctatggtgaaggtgagattcatcaattttgaaagaacaaaacttcctgaagaaattctaaagcataatctagaagaaaaaagaaaatatttttcagatataattcttgaagttgaaaggagtgatgccgaggttcaggctgagggagtatacaaccaaaggcttcagaatcttgctgtcactcttgataaggtaaggtatgttatgagatgtatttttggcgatccacggaaagcaccaccttctcttgagaagctcagtcctgaagcaactgtttcctttctctggaaaggagagggttcatttgttgaggagcttgttcagtgcataactcctcatgttgaagaaggcatcttgaatgatctcaagtttaaaattcatgctcacgatccttcaaattctggagatattcaaaaagagcttcgtaaatctctggtatggttgagggatg

SEQ ID NO: 225990 - DNA, 491 bp, Glycine max
gggaaaatcctctgatactgttgttttcctgaaaccatcacaatttgtttctcaatcatgtcaacctcatcctcttcccaaagcctcaaaattggcatagttggattcggcaactttggccagtttctggccaagacaatgataaaacatggccacactctcacagcaacttctcgatctgattactctgaactttgtctccaaatgggcatccattttttcagggatgtcagcgcattccttaccgcagacatagatgtcatagtgttgtgcacatcgatattatcgctatccgaggttgtcgggtcaatgccactcaccttcctgaagcgaccaacgctctttgttgatgttctttctgtcaaagagcacccaagagagcttctactgcgagagttgccagaggattcggacatactctgcacgcacccaatgtttggtcctcagactgccatgaatggatggacagatcacaactttcatgtatgaca

SEQ ID NO: 225991 - DNA, 496 bp, Glycine max
  unsure (1)..(496): unsure at all n locations
agggaattgggttctcttcctaaccctggccatcagcctctgtgtctccggcgcattccaaatccaaaccgaaaccttgcccctccacaccctccctgagccacacatcctctcagaaaccctctcagaaccccaagaaactctctcgctctcacttcacctccacctccaccacatagacgccctctcctccaacaaaaccccagagcagctcttccacctcaggctccaacgcgacgccaagagagtcgaagccctcctcaaccaaatccatgcgcgcagatccgccggctccagtttcagcagctccatcatttcgggcctagcacaaggcagcggcgagtacttcacgcgcataggagttggcacacccgccagatacgtctacatggttttagacaccggaagcgacgtcgtttggctccaatgcgccccctgccgcanatgttacacccaaaccgaccacgtctntgaccccaccaagtcccgaacctac

SEQ ID NO: 225992 - DNA, 464 bp, Glycine max
agcctgtacctttcttccctctccctttcataggtcccttgccagtgtacctcccctgtcattggccacaaccacatttcccttggatggtcaccatcatctgcagcctcggccagatcttcgtccatacttttcaacaatgaaaaattgaagtattttgaccacataaaacctttccgttgttcaatagggtgctgctcttccatagaaccagtgttaggatttatatataccatctttcgtgcactatgataagcccatacattgatgagaagttccaacacgcgacagtagcagtgcttcttctcaatctctgaagagcctaacaagcacaggctgtatttagtggagtctctgtgcttaacatcaatggaatcaacaaacattcgaaagaacattatgaactccaagaaagaagaggttggcatcacccagctgtgcagtgctgaccaataaccaccatc

SEQ ID NO: 225993 - DNA, 497 bp, Glycine max
ctgaagagagaatggagaaaggtgttagtgtatgggatgatatatatcgtaatgctggaaaatctgagaaactgaagtttgaagtcaatgagagggatgaaggggagcttgagagaacaggacaatctctgagcatttatgagatatacaatggtgcatgagtgtggccatttttacaccatggttctctctatcgtgggttaagcctttctagaagagcgcagagacaaacttctgatgatgtggatgcagatggtcgcttgcctcttttgaatgacacatattatcgggacattctctgtgaaatgggaggaatgtttgcaattgcaaatagggaggatagcattcacaggaggccttggattgggtttcaatcatggcgtgctgctggttggaaggttgcattgtcagcgatagcctaaaatgtcctggacgaggacatgcaagagaattttagagggagatgaatatactattggggactttggacatggatc

SEQ ID NO: 225994 - DNA, 514 bp, Glycine max
ccaaaatccaaacacactctctctccccatggcgttgaacaatggcgtccccgccaccggcaccggcctcatcgtcagcttcggtgagatgctcatcgacttcgtccccaccgtctctggcgtgtccctggccgaggcccctggctttctcaaggcccccggcggcgcccccgctaacgtcgccatcgccgtgtcgcgcctcggcggcaaagccgtcttcgtcggcaagctcggcgacgacgagttcggccacatgctcgccggaatcctcaaggaaaacggcgttcgcgccgacggcatcaactttgaccagggcgcacgcaccgtcctggccttcgtgaccctacgcgccgacggtgagcgtgagttcatgttctacagaaaccccagcgccgacatgctcctcatgcccgaagaactcaatctcgaactcatcagatctgcataagctttccattacggatcaatcagtttgatcgtggagccctgcagatcagcacacctgaaggcaatg

SEQ ID NO: 225995 - DNA, 321 bp, Glycine max
gttggcactaatgacatgcgtgagcaaaatgtcttcgaaactttgatcggaaagcagcaacagctcttacttgctactcaagttgtcaagatgatactgaaaatcgatgatgtcatttccccatatgagtactgatattttataaactcattcatgttatacgtcaagatgctgaattggagatagtattttgtttcaattggtttgtttgtagacagtccgtacgctcacttgaaatgtaagattttggcccggtttgtatcggaattgggtgtccttggtttgctgcaattgctatgcttttgatcttgatcaagattg

SEQ ID NO: 225996 - DNA, 533 bp, Glycine max
tggtgtttcaggactcagagagagatagagagagcattgcattggcgagaccaccgcggtggagcgagcgagcgagcaagcgacgacgaaaattgaattgctcgtgcgcgtgcgtgcgtgatcgtttgattgtttggatcttgtggtcgatcgaggacgatgtctgagatggcgagcccagatcccgtgggactcgacggagtccggatgacgtggaacgtgtggccgtggacgaaggtggaatcaagcaagtgcgtgatccctctggcggcgacggtggctctgatccgtccccaccctgacatcctctcgctaccgtacgcccctcttcgttgtaagacctgctccttcgaccttaatcccttctcccgtgttgacttcaccgtcaagatctggatctggcccttctgttccagcgcaaccacttacccccttaataccacgccatttcagtaaccaacttactccgtgaactctatcctcaatacaccaccgtcagtacattcctccttatttctacttcttaatccttc

SEQ ID NO: 225997 - DNA, 374 bp, Glycine max
caaaaggattcattgaaccgtgatgagtcctatatgctaaggggataatccaacatccacatcagcttatttacaaagaatctaattatttttttaaaaaaacacctctcattcatttactcactgcagtacttcttatcaccctctttctactccccctaatcactcttcggcccatccacgtccatcttgaaccgcgtcacattctccaccgctgcgctccggaacagccccacgtctacggcgccactcaccatgtgatacccacgcgacctcaaatccctcgccccatcatacaccgtggcgaaacctgcgagataagccccaatcttaacgttgtcgattcggctcttcaacaccttgttctcagcatt

SEQ ID NO: 225998 - DNA, 479 bp, Glycine max
cctatctggagagaaacaaaggactcaaagaagctatgatttcactggtgttgtatcttggtttgctgcaaaatgtgatctcattcttctcctatttgatcctcataaactagacatcagtgatgagtttaaacgtgtaatcgcatgtctacgtggtaacgatgacaagatacgagtggttttgaacaaggcagaccaagttaatactcaacaacttatgagagtttatggagcattgatgtggtcactgggtaaagttctaaatactcctgaagttacacgtgtatacataggctcatttaatgataagcctatggatgaatgcttcgtcagtccattaggacaggatctctttgagaaggaacagaataatctgcttgctgatttgatggatattcccaagaaggcatgcgatcgtcggatcaatgaatttgtcaaacgtgcaagatctgcttaaattcatgcatatataattagtc

SEQ ID NO: 225999 - DNA, 464 bp, Glycine max
caaaaataaaaagtggggggaagcgcaaaagcattttctatacgaaagcaagttgcttttctcacatggccctaacagcttggaatcttggttccttgggaaggaacttctgctcagcatagacagacatgtagtcaccaaaaacaaacttaggataagtttcatctacttgttggtcttctttctccacaagttgtggtgcaggacatatggtggccttgaatgaaggattatagaaggaggcaattgatcttctgttcccatctggtgtggccagaaccctgtgccagcaactcttgtatctaccattgctcaagacctcaatctgatcaccagtgttgatgacaatggcatttggcaaaggctgcacatcaatccattgcccttctttcagcatctgaaggccaccaaccttgtcatcttggaagagtaggattacgcctcctgcatcggtgtgagctcgt

SEQ ID NO: 226000 - DNA, 525 bp, Glycine max
atcgagccgagttaaagaaattggcagagaaactgatggaggtgatggatgagaatcttggcttaacaaaaggatacatcaagaaggcactgaatggcggagatggagaaaatgccttctttggcaccaaagtgagccactaccctccatgttcccatccagagctcgtgaatggtctgcgagctcacaccgatgcatgaggcgtaatcctactccttcaagatgacacggttgctggccttcagatgctgaaagaagggcaatggattgatgtgcagcctttgccaaatgccattgtcatcaacactggtgatcagattgacgtctcgagcaatggtagatacaagagttgctggcacaaggttcttgccacaccagatgggaacagaagatcaattgcctccttctataatccttcattcaaggccaccatatgtcctgcaccacaacttgtggagaaagaagaccaactagtacatgaaacttaatctaagtttgttttagtgactacactgtctgctatgc

SEQ ID NO: 226001 - DNA, 455 bp, Glycine max
cgtcgaataaccccttgtattgtattggattggattgggaaataaaatacacaacatgcgacaaacagaaacattctccttttgttgaatcctaattttctccttcagatctagattgagatctccccctccttctctaatctaaccttgttatttaatattaaaaaacaaaagaagaaagagatggcaacaataattgatattcataattagagaacagcagggaaagagttgctcccatttcctaagaaaacttaaacgcaacctttcggtgcaaacccgacccgtgaacccgtcagatcatacgagatccggaaactctgttgctggatgttaccaattatggacaaaccactcatagttccggcaaacgcgaagcagaagcttccactgttgaccaccggaatcaagtaattcgttgccggtatggacacgtcagcacctctgaaatgcat

SEQ ID NO: 226002 - DNA, 492 bp, Glycine max
agagaaagaagcctcagtctgctggctttgctgacagcatgttgaagcttgcgaggacattgccaaaggttttaaagtatttgccaagtgataaggctcaagatgcaaggctctacatactgagtttgcagacttgggcttggagggtctcctgataacttggagaatttcctgacaatggtttctggatcttatattccggcgctgaaagagacgaagatcgagtattcggagccggttttgtacttggatgtggggatttggcaccctttggctccttgtatgtatgatgatgtcaaggagtatttgaattggtatggaaccagaagggatgcaaatgagaagctgaagagtccgaatgcaccggtcattggtttggttttgcagaagagtcatattgtgactggcgatgatggacactatgtggctgtgatcatggagctggaggctagaggggctaaggtcattcccatttttgccggcggacttgac

SEQ ID NO: 226003 - DNA, 451 bp, Glycine max
agaaaattcacacgcgatggatccgaagctgaaagaggtttctcagctcttcgatcgcttcaaggcttcgtttctccggaacgacttcgataactgttccaatctcctttctcagctaaaggtgttacttacaggtttcagaagcctgccaccgttgtttgcagatacacctaatgcagttcatgaattaacaatagcaagggatatatatgagcatgctgctgcccttagtgtgaaaattgaggatcaagatgctttcgaaagggatttcttccagttgaagccttattatacagatgcctgcaatcgtcttccaccatctcctcaggagtaccctatactgggtctcaacctgttgagactacttgtgcagaataggattgctgagttccatactgagttggaactgctttcatctgctggtcttgagaatcctcgcattaagcatgcc

SEQ ID NO: 226004 - DNA, 474 bp, Glycine max
gaaacataaggcttttacagatggtggaatttttactagaagggatgtttggctgttgagtttatggagggtcaagctctttgttgaatagtgtttgtgttgcctttatctgcaacttttaattgaaccaatcctaccctttttatgaacatatgaaaagatcggttttttgtggttccttcactcattgttgttgaagggtctcgcgaaatcaatcaagttttgagacctgttttctggtagaggtgtaagtacaagatcttaataataaggattttgtacaaaggaaaagttgagaataagatgggggaagatggttattcttggattaggaggacaaaattttcacacactgtctgccatcgtttggatcctgctaggttaggctctattcctatcagtgttcagtcagagcataaatcaatgcctgctgcctcaaggctcagagacaccccataacaaacatgcagagat

SEQ ID NO: 226005 - DNA, 473 bp, Glycine max
tcgtccttcctttttttatttcttttttgtaagaatgcgatcaaatttccttcatgctatggcaccatgttacaacagaggacaccaatttaataaatataaataaaggatatcaaaattaatacccaacaggaaaaaagaagaatacgttgatatttctaactaacatggtgcatatgactcatagtggaagcacagttacacaggaatttcgagtagccaaaaaacccaagaatttgggaatctcatcccaggcttaaacaatagcatactcgagcttttcctgctccttaggtcgccacttggacttcttcacacataacaagccctccttatccttggagtaagtcatgcgaacctttcattgcatagacctagccatgctctcaagctcttcaacgatctccacagtgtcacgaacaataagttttccttcaggcctaagaattcgatcagtcttggacactacagct

SEQ ID NO: 226006 - DNA, 294 bp, Glycine max
cgcactctcgttatactagatgttggatgtggtgttgcccgctttggacgctctctcttacgatagagatgcacttgcaacgtgcttagcaccacaggatgaacatgaagctcaggtacgaattgcacttgacaaggggcatcttgctatatctgctgtgatgggcacaaagaggcttacctttcctgggaaagtattagaaggagtccactgtgcacgatgaaaagtcccgtggaatatacaaggtggtaaactagctttggagctaaatagagtcttgagacccgcaggttt

SEQ ID NO: 226007 - DNA, 441 bp, Glycine max
tggaaatttggtgacaaaaaatgatactttcggcatgcatcacgagagatgtatggcagatcacgagctttggctaaagatagatcaataaacagatctatactccgaacctatgcccacgaagatgggagtgctggatcctggtatatcgggcttgatgggaagcatgtcgatgaggccaagcattgttgctcatcttggacgacaggagcaatcagagctggtgtccgagttgagtgcagggcattcttgtgagaagatcacacacgttatgcacaggaatcatcaattgacagaagggtagcgtcctacgatattcaattgctagtggaagcacagtgattgctagagatgcctggtgcaaaggagcttttggtgctagagttgacgacatgggacaatctagtaatattagcttatgagtacaggtggcaagttgcg

SEQ ID NO: 226008 - DNA, 507 bp, Glycine max
atccttccccttctttgtttccgcgggatcctccttcacaaactcagattgcggctgcggcttctgctgatcacccgaaaacttcttcgtggttttcaaatccttaggctcgtcaccacccttcatgtttctcttgttccaaccaaaccataccttcttctctttaaccccaccaccattggaaccattctcatgcccatcaaaccctcctccaggctcctcatcttgacaaatagcatcagaattccccattcgaagcgcggaatccagttgcatcctctcctcagcagtcaacacatcatcatactgatcatcattgttgtctccattcaccatactctccccatcatccacagcaaaaagctcctcatcggtcattgccccgggcaccctactggactttacactcaccatcacatgaagcatgtcatataccctagccttccaattcccacaatctcggtcttctcctgccgccgccattcaaatgcggaacaagctctgcct

SEQ ID NO: 226009 - DNA, 465 bp, Glycine max
gttgaaaacgttagagaggaactttgcaacaagcatggagacagcctcagactatggagcattcacagagaaattcactttaccaccaaattctgcaccagctcttcctctcaaatcactcacctttgcagtgaaagagattttcgacacggaaggatacgtgaccggcttcgggaatcctgactgggcaaggactcatccggtggctacctctactgctccaacagctctggctctcctcagagcaggtgccacttgtgttggtaaaactgtcatggatgaaatggcttacagtataaatggagagaatatacattatggcacacctagaaatccttgtgcaccagaccgggttcctggaggatcttctagtggctctgctgttgcagttggtgcacagcttgtggatttctcattaagaactgatactggaggaagtgtaagagtacctgcatcatactgtgg

SEQ ID NO: 226010 - DNA, 558 bp, Glycine max
cccagatctcgggttccactcgcccagccatgtccaaggcgcgtgtctacaccgatgtcaacgttctccgccccaaagagtactgggattacgagtctctcaccgttcaatggggtgatcaagatgattatgaggttgtgcgcaaagtgggaaggggaaagtacagtgaggtttttgaaggcataaatgttaatagcaatgagcgttgtataatcaagattcttaagcctgtcaagaaaaagaagattaaaagagagataaaaatacttcagaacccttgtggtggcccaaatattgtcaagcttcttgatattgtcagagatcagcactctaaaactcctagcttaatatttgagtatgtcaacagttcagattttaaagttttgtatccaaccttgactgattatgacatacgctattacatatatgagcttcttaatgccatagattactgccattctcaaagcataatgcatagtgatgtcaagcctcattatggtatgatagaacatgaattactgaaactccgcttgatagattgaggtcttgctgaattta

SEQ ID NO: 226011 - DNA, 514 bp, Glycine max
cccagatctcgggttccactcgcccagccatgtccaaggcgcgtgtctacaccgatgtcaacgttctccgccccaaagagtactgggattacgagtctctcaccgttcaatggggtgatcaagatgattatgaggttgtgcgcaaagtgggaaggggaaagtacagtgaggtttttgaaggcataaatgttaatagcaatgagcgttgtataatcaagattcttaagcctgtcaagaaaaagaagatttatagagagataaaaatacttcagaacccttgtggtggcccaaatattgtcaagcttcttgatattgtcagagatcagcactctaaaactcctagcttaatatttgagtatgtcaacagtacagatttttaaggtttgtattcaaccttgactgattatgacatacgctattacatatatgagcttcttaaggccatagattactgccattctcaaggcataatgcatagagatgtcaagcctcataatggtatgatagatcatga

SEQ ID NO: 226012 - DNA, 497 bp, Glycine max
actgtctctgatcctgcattattgttgacaacatggccacggagcttctccaaattgatccccctcagctcacttttacctttgaattgaagaaacagagttcctgcttggttcatctcatcaacaacaactcttctcaccatgtcgccttcaaggtcaaaaccacgtcgcccaagaaatactgcgtcagaccaactgtcggcatcgtcaagccacacggaacatgtgatttcaccgttactatgcaggctcagcgcacagccccacctgatctgcactgcaaagacaagttcctcgttcaaagcgcggttgttccaaaaggaacaaccgaggatgaaatctcctctgacctgcttgtcaaagatagtggaaggcttgttgatgagaagaagctaaaggtggtcctcattaactcaccttcttcccctgtaaatggagatcttaagcatgatccacccagtcaaatgcttccctccctacagctgaaaaggtatgga

SEQ ID NO: 226013 - DNA, 483 bp, Glycine max
acaaaaataaatacaagttgtcattaatattaaacaataattgtggcatcataaattcttccggaataattatacaaaagtgaccagggaaaacccgatctgccagttgcccactgaataaaaacacacatcatattactatgtgttgtcatacatgcattgtaatgagtggatattccaaagcaattggtccctttatccctccttaatccttatgccgtaaatggcaccatcccttgtaaattgtaattgcttcttcagaaatagaattatacaaaggtagttgcaatatctatttgccaaactataaatgtaaagacccttcttcccaatcctagtagtgtcccaattgtatttacaaaggtgggacaagatatgtatatacaagtacaaccatgtaacataatgtaacaataatcatactctggtctttactaatgcacattacagggagttattatgcactgaaacccctttgcagag

SEQ ID NO: 226014 - DNA, 389 bp, Glycine max
gtcaccttcaaaaccagtcaacctacgtgatgctgatctcatccattttagggataagtaccacaaagctcctgacggttctatcacgaaaactacagcccaggaacacgttttggtagccaagacctaacagattgcatgcttacaacagtagcatactgattgggaagcttgaatttggcattgtagccggtccagtagtctcaacgctggtataccggatggatctgcacttgatgatgactggcactgcctgaacacgtggctgagaccttagagacacattgggggccctcgtctcaagtcgggatgaaccccatgatgatctttgcaaacatttgcaatgccaggattaatattgaacagatggctgacgcttaagctcaagc

SEQ ID NO: 226015 - DNA, 515 bp, Glycine max
gaaaccatccacaatccattaataatgaacttaaacattaagatctcaaacttggtgaaacatacataaaaaaatgacaacattttttattttaatcgtaaggatttctgaatttcttcaatagctctggtatttcatacccaagcatgtcatctactgcttgaatcattttgggctttagtttctcaaatttgtcaatgctataaccacttagaacttctctgaagtgttcaacgttgggaaaatcaccggctggtagatgaaactccctttggacctttgcaaattcttcctcaagattatcaagaagtctttgttgagccttggctttacccattatagcaggcatctacttcttaaggtgactaattatatatgcatgaattttagcagatcttgcacgtttgacaaattcattgatccgacgatcgcatgccttcttgggaatattcatcaaatcagcatgcagattattctggttcttctcatagagatcctgacctaatggactgacg

SEQ ID NO: 226016 - DNA, 407 bp, Glycine max
gtggagtcagtgcttatgatgttcaaggcacattgtctctccaaattcttgacaaagaggatggacatattcaagttcaggtccagacaggggagaatcaagccagtcttttcaggacacaccctaacatgaaatacagatttagttgccaatgaaaatatactacgcctacaggatcccaatatgcctttccccactggtcaagctggaggtcctgaaggtgttggtcttttaaagtggcgaatgcaaagcactgacgagtcaatggtgcctgtgaccatcaactgctggacctgtttttgtggaaatgaatcccacgtcagcattgactatgaggctttgtcatcgtttgatttgctgaatgttgtgagctccgtacactatggctgctcttagggatgctccat

SEQ ID NO: 226017 - DNA, 358 bp, Glycine max
caaagggtttttgtcggacaatgagtgtgactaccttgtttctttggcatatgctgtgaaagaaaaatcctcagggaacggcggcctttcagagggggtcgaaacttccttggatatggaagatgatattcttgcaaggattgaagaaagactttcagtttgggctttacttcctaaagagtacagcaagcctttgcaggtcatgcattatgggcctgatcagaatggccggaacttagattattttacaatcaaaacccaattagaattaagtggacctttaatggcaacacttattttatatctctcatatgatgttactcaaggtggtcaaattctttttcctgatcagtgcctg

SEQ ID NO: 226018 - DNA, 554 bp, Glycine max
ccaatctgcttgcttgaatttacttggtgtgaatggtgctagcaaggagtcaccaggatcaaactcaagactcttggccaccattgttgctggatctgttttagcaggagagctgtctctgatgtctgccattgcagcagggcagctagtgaacagccacatgaaatacaacagatcaagcaaagatgtaaccaatatattatcatcttgaggtcagggacgtggttgcagacattaattctggactctagaataaaaaaattgagggtaagcggatttagggaaggaaaatggagaaacattagattagattgttggcatccacgtttggctctgcattgctgtctgcttagatcttttattatttggagagaggaaagtagagttatactctagatctttcctgtccacttctggatcatttcttcttttcattgcttcttctgccgagccattcagtgggtgttaacactttcattctccttaaccaagacatttgacgtgtaatattctaactcttttccccctatataatatgcttagcatatctatca

SEQ ID NO: 226019 - DNA, 378 bp, Glycine max
cacaccggaattataaattttcatttgtaaggggaggaaagtggaataggagtgtttaacttttggggtgaagtgtaaactacaaccaactacacatgaagcaagattttcgtacaagttttgtatgcacacttcgcaaaaaaaaagatgctttcacctttatgtgcaagcctaaaaatcaatatactatcacatgaatgtcataaagtgactacacaaccagagaacctgaaaaacaaaccttttatttttaattacaatggacccggggtacaataaaagccaggccaggaggacacttggaagattcatgtgaatttgggtttaggcacagggccactattttggtgcaagggaccaagcttttgaatccaatga

SEQ ID NO: 226020 - DNA, 204 bp, Glycine max
tgcatttgcgttgaaccaaacgttgttctttgagaagtttgtggatgctactataaagtcgagtcaattggatgtgctcactggatatcaaggtgaaattcgtggcaagtgctatgtgttgaatgctatgaagtctttgttgacttctgtggcgcaagatgtggtgctattggctgatccttggtgaatggcactgtaagtttg

SEQ ID NO: 226021 - DNA, 545 bp, Glycine max
ggaagagcatgtaatactggggttgctgtcatgctttatgatccaaaaagatctaacatacctagaatagaaagagagtccggtgtaaaatttgaacacgtatccgcccctcagcccgatgatattgccaaagctgttagtggggaagctgctgaaatgattatccaagtgtctgatagtgtggttcctgcattcaagtctgctgctgaagagcttttgaacagttctggtttaccagtcattgaattactggcaaaggctcttgccaaggctgatggttataccgatgtaaagcagagatcacttctcactttcatggagaactatgttacattagtccttgagactgggaaaccaatctatacccaatcttatggctattcaatcttgaggagatttttgcctgaagagaatgttgatgctgtgaaaggtctttcactcactgctgatggaaatggcgttgttttgatgtaccagcttaagatttagacttattcttaatggtacagaaatgcctcgaatgtatgttagagtagtgaaacact

SEQ ID NO: 226022 - DNA, 365 bp, Glycine max
gtctaacataattctgaataaataattaaatactctttgctacaagaagtccatctatgaaatacaggattcaagataatccacttccaccaaaaattccacctatttgaatccggaatccgattgccgaaggcacttcatgttctaaaataactttattctcctaaatacatattgaaagagcaagtttcgtttcttattttcaataaacaaactgaggatgactgaaacacatgattatagctacacatgagactagatcaaaagccaaaccagcaccaacaaaggaatataatgtgatatgaatgaatcaaacagtcaaattttagaacactcgggacggtgtaaccctgcaatgctagact

SEQ ID NO: 226023 - DNA, 382 bp, Glycine max
gcatcgcattatagcacaccacacaaaaaagcaaaacagagagaacaactgttactcacacacgccatgggtatgtaaatgaatggtttttgagcaacagcagttaaaagagaaaagggattcatcgaagatgacatccgttggtgtggcaccaacttcgggtttgagagaagccagtgggcatggagcatcagctgcggatagattgtcagaggagatgaacgatatgaaaattagggatgatagagaaatggatgccacagttgttgatggcaacggaacggagacaggacatatcattgtgactaccattgggggtagaaatggtcagcccaagcagactataagctacatggcagagcgtgttgtatggcatggatca

SEQ ID NO: 226024 - DNA, 434 bp, Glycine max
  unsure (1)..(434): unsure at all n locations
atttccaactccatcacaccttaacaggagctatacctatataatatactgccagaagaatttttattgatttggaaatttgaagaagaaaaaaaacagcaatgaggaaaccattatttgtattctaattattcaatttcttattacaacaggtgatttgattacttccgttttaataaataatgaattattctgatnaaaaaaaaaaaaaaaaaaaaaaaaaaaaaaaaaaaaaaaaaaaaaaaaaaaaaaaaaaaaaaaaaaaaaaaaaaaaaaaaaaaaaaaaaataaaaaaaaaaaaaagggggggcccccattttggggctcttcccccccggaatttatttcgggccgggtccctgggggggtcccattttttttttttggggggctttttaaagttgggggtaaaaagggcatagattttttcctgg

SEQ ID NO: 226025 - DNA, 566 bp, Glycine max
aataatcttaagtggaaccttctgcgaaattagccttccttcgtcccttgattgaagtataaattaggggtgttgaaattcaaagccatatccgtcattaaccaaatttgtgtttctccgattgcaagcaatggactccttcaattccttcttcgattcaacaaaccgatggaattacgatactctcaaaaacttccgtcaaatttctccggtcgttcagaatcacctcaagcaggtttattttactctgtgtttcgccgtggttgctgcggctgttggggcttaccttcatgtcctcttgaacattgggggttttcttactacagtggcatgcgtgggaagcagtgtttggttactctcgacacctccttttgaagagaggaaaagagtgactttgttgatggccgcatcactgtttcagggtgcctctattggacccttgatagatttggctattcaaatcgatccaagccttatctttagtgcatttgtgggaacatccttggcctttgcatgcttctcaggagcagcttttgttgctaggcgtagggagtacctgtaccttg

SEQ ID NO: 226026 - DNA, 535 bp, Glycine max
  unsure (1)..(535): unsure at all n locations
catttttagagagcataaaaaaatctgtgtgtcccaaagagcttgagcctgaagataggaggtcatctgttaatgttaacctcatacggaggaatgagaactatcgtgaacccgaaaagcagcatgttgcatttcagggagtgggaagaactcttggaagcagctctacatcaatggctcctgactctcctgctgcctcaacacctaccaatgcagcgccaactccttttgttggtctggtagttgatcaatcattgccatcaacctcaatacaactcaggttggctgatggaacccgcttgatatcacattttaattaccaccacacactcagcgacatccgtgccttcattgatgcatctagacctgggggtcgggagaattatcaacttcaggtgatgggttctcccccaaagattctaattgatgaaactcacactattgagcaggcaggactggcaaattcagttgtcatacagaaaatttagcaaactgctgcttcatgcagatngtcattgctggctaagtgctctgc

SEQ ID NO: 226027 - DNA, 436 bp, Glycine max
tcagctcagtatttggagatctgtacatatactgagctgatattagttgtcaggagaacaagggcttccttcattcacaaagattcttagcttcttcatgctatttcctgtctaaacttattggacgacctattctgtcctctctctggcctgaaaagttgaaattcttccaaacccaggtagctaaaagaagaaagggtttgttgaactacatgctttttctaagactgactccgaccctgcccaacacatttattaattttgcttctccaattgtggatgtgccttatcatattttcttcttggcaactgttattgggctgatacctgctgcctatgtcacagtcaaggctgggttggctcttggagagttacaatccgtgggtgatctctatgatatcaacttaattgctactttgtttctcattggtgtagt

SEQ ID NO: 226028 - DNA, 577 bp, Glycine max
attgaaaggaagacaaaacacaagacagagtcattcagcaaggcttgaaacgagaagcgaggatgcccatcagatgtattctgcattggcaaccgaaccaaggaagcgttgtgaacagccaagtcctgaatgagatctcgcagtgcgtcgaaagccttaacggcgtcaaagaaggaagatgcaaagcctccctcactttctacagacccaatttacgagaccaatcggtgaccatcgattttcctcgcgattttctggggatatcgatgctggagcagccgaacaaatactacttaatcattcgcggccagaagattgttctcgaggccgattcttctatcttgcttatcatggagaaactccagtcctacaagtccaaagtcgcccttcatttcgagggagtgctgtataagttgggtgactttcagatcagggtgattaaagttgttcccagtcaagcggagagtctcagaggaattatgattgagattgagtatctccctatctcgtcagttgaaaaatccaagcaaattttggaagagttcattgatatatggaaagaagtcgtgtctaaaaa

SEQ ID NO: 226029 - DNA, 543 bp, Glycine max
  unsure (1)..(543): unsure at all n locations
caaaaataagacattgtttggtttggttacttgctcgaatttcctcgaatcgcttaatttgtatttgattagttaaaccgcaacgcggaatctcttttctcgaactggctaactctcaggcaagtggttcggacgctgattccagcaacaagcggctggtgctcgcactgtatgacgccctaaactccggcgactccgacgccgtcgtcaagatcgtcgccgccgacctcgagtggtggttccatggtccgccctcacaccagtttttgatgcgcatgctcaccggcgactccgctgccgacaactccttccgcttccttccgcagtccatcgccgccttcggctccaccgtcatcgtcgagggctgcgacaccgcccgcaacattgcctgggtccacgcctgcaccgtcacggatgggataattactcagatcagagagtacnnttaacaccgcctcaccgtcacccgcattcacgattccggcgagattgttccggctagctccggcgcccgccgtttgccctgtgtctgggaaagcagcg

SEQ ID NO: 226030 - DNA, 516 bp, Glycine max
gaacaaaaaaaaagttggtatatgttggtgagtaagcattgaatcaaaattatctcagtacatctggaacgagtgcgaagaggcagagaaagaagaaacaacgtttctgttcatcttcttcttcttcttcttcctcactctcaatctccaatctctcctcaaaatcccttccaatctcgcgtgcgccacagatctgatagttagattacactgaatcgaatcgaatcgaatcgactcgctgaatcccaatgtcgcagcaattagggttcgcgatcgagctatacctagaccctgcgttggagaatcaggttctgaaagcatggaacgttcttgcgagaagacaaatcagcacgcacctgatagaaatggagtctcggccacacataaccctattctcggcgccatttctagaaccttcgaagctcgaatctctcctgaaaggcttcgcatcgaagcacgatcctctgcctctcaccttctgttgcctcgccactttgcccaacgaccccgacaacc

SEQ ID NO: 226031 - DNA, 564 bp, Glycine max
ctccaagacctaaacttcccatcatcatccccctccaatgtgctattgaacctctttgatgaaacaagtttggaccttaaattggtctcatccacactcccctcaagcaacaactaccagagtgtgtgcacccttgacaaggtcaagtcagcactagaaagggcagagaaagagcctattgtcaggaaaagaacctcattcttgaagtcacctctctcggtgtcgtcgccttcgtattcctcctcgtcgtcgtcgattagggaaaccacaattcaagaagatgaatgtgaagagaggctgaatgtttcatcatcacctatggctgcagggtgccctggttgcttatcatatgtaatgatcatgaagaacaaccctaagtgtcctaggtgtaactctcttgttcctattccttccatgaagaaacctaggattgacctcaacatatcaatttaagttgggtaattgatgaaaattgcctccattttcaatataatttggtattatttttttatatcaacgttttattgtaatggaatgatagagatgataaattaggtcgtttta

SEQ ID NO: 226032 - DNA, 557 bp, Glycine max
  unsure (1)..(557): unsure at all n locations
gccactctttcattctcattgccgtcacacagagagagaagagacaatgaagtttaacccaagggtttcctcaagccgtcgaaagagccgcaaggctcacttcaccgctccgtcgagcgtgcgtcgcgtcctgatgagcgcgcctctctcgaccgatctccggtcgaagtacaacgtgcggtccattccggttcgcaaggacgacgaggtgcaggtggtgaggggaacctacaagggccgcgagggcaaagtggtccaggtctatcgccgcaagtgggtcatccacatcgagcgcatcacccgcgagaaggttaacggctccaccgtcaacgttggcattcacccttccaaggttgtcgtcaccaagcttcgaatggacaaggaccgcaaatccttgctcgatcggaaggccaagggtcgcgccgccgccgacaaggaaaagggtaccaagttcgctcctgaggatgtcatgcagaccgncgattaatttctctctatacttttttgccctctctgtactntcttatttgctgcttttgttgtgggttggatctcaa

SEQ ID NO: 226033 - DNA, 539 bp, Glycine max
caacaccatcctcaaaatttgtcaaactcgcgatcctcctcgttttgttcgcttcagtctgcaacgtcgctatgtcggactccaccgccaaacccctcgaccagcacgccaccacgggctctgaccctactgcgccagcggttcacatcgtgtacaccgagagaccacagaacgaggagcctgaggcctaccacatcagaaccctcacttcagtccttggcagtgaggaggctgcaaaggaagctttgttgtatagttacaagtctgcagccagtgggttctcagctaagcttactccggagcaggttgaacagatttcaaagctaccaggtgttcttcaagttgttcctagcaggacatatcagctccatggaccaaataacctgcagtagagaatgttcacctaaagttgtatcggttaaaccgttatctatgccatgtataaactaaactagtgtggctctagacttgtgccaataagaacatggaattaatatataataatacattactaatattcgtgctatatgtttatcaat

SEQ ID NO: 226034 - DNA, 559 bp, Glycine max
  unsure (1)..(559): unsure at all n locations
ctattctactcgcaagcaaatcagaacaagagaagagaatggcaggagcagaggggctaaacagagaacagtacgtgtaccttgcgaagctgtcggagcaggcggagcggtacgaagagatggtggagttcatgcagaaggtggtggtggggtggacgccggcgtcggagctcacggtggaggagcgcaacctcctctcggtggcctacaagaacgtgatcgggtctctgcgtgccgcgtggcgcatcgtgtcctccatcgaacagaaggaggaagggcgcaagaacgacgaccacgtgtccctcgtgaagcactacagatccaaggtcgagaacgagctcacgcaggtctgcgccagcatcctcaacctcctcgactccaacctcgtaccctccgtcttcgccagcgagtccaaggtcttctacttgaagatgaagggcgattaccaccgctatctcgcagagtttaaggttggggatgagagaaaaaccgctgctgaggataccatgtngtcttacaaggctgcccaggacattgcttctggggatcttccccctac

SEQ ID NO: 226035 - DNA, 560 bp, Glycine max
  unsure (1)..(560): unsure at all n locations
ctcacgactgagtctgcaatgaagaagattgaagacaacaacactttggttttcattgttgacttgcgggccgacaagaagaagatcaaggatgcagtcaagaagatgtatgatattcaggccaagaaagtaaacaccttgatcaggtgagcctttataaagtgatgcttatagaatttgtttgttgattcattattgctattttctaatgacaatggtatgcttgcagtgaatttgatattgcagttttccttccaaacatttattatactgagacatacatgttttgtgctttttggtttgtggcatgctggtgtgacaaagggttcatgttgtgcacagggcaacattgaaatgggacatgcattgaattgaatgtattttattgaaagtgtataatataatcctaagtaggtataacaaggcaaatgaaacaacaaatttatgaaaaacttgcattcaaacttacaacagatgccatttcttctgaattntaatttttctgttgcaggcctgatggaaccaagaaagcctatgtcaggttgacacctgattatgac

SEQ ID NO: 226036 - DNA, 454 bp, Glycine max
tggaaagggtattcttgctgctgatgagtcaacagggacaattggcaagcgtttggccagcatcagtgtagagaatgttgaatccaacaggcgtgctcttagggagctgcttttcaccgctcccggtgctcttaaatatctcagtggtgtcatcctctttgaggaaactctctaccagagcacagctgcaggcaagccctttgtggaagtcttgaaggaggctggtgtgcttcctggcatcaaggttgacaagggcacagttgagcttgctggcactaatggagaaaccaccactcagggtctagatggccttggtcagcgttgcgccaagtactatgaagccggtgcacgttttgccaagtggcgtgctgtgctgaagattggtcccaacgagccatctgagctggctatccatgagaatgcctatggcttggccagatacgctgtcatatgc

SEQ ID NO: 226037 - DNA, 447 bp, Glycine max
aaaaaaaaaaaaaaaaaaaaaaaaaaataaaaaataaaaaaaaaaaaaaaaaaaaaaagggaaaagaaaaaaaaaaaaaaaaaaaaaaaaaaaaaggggggcggcccccttttttgctttttgccccccggttttttttttgccccccccccccggggggcccccctttttcttttttggggggttttataccttgggggattcatgggggtctttgtttcctcttggaaaatgtttttaccccctaacactcccccacttctttcccgcctggtttttccttattacccgcggggccccctgggggggggaccccccttttttttgggtggggcccccccccccttttttgcggggggaatctttgtcccccctctttttttgtttctttcccccccccccgggggggggttttttttttttttccccccgtgggttttttttttt

SEQ ID NO: 226038 - DNA, 526 bp, Glycine max
tgatgatctgaaagaggacaatcaattatcatttgaggaatacgagaggtcatgggaacaaaatgaagaattaggtctgaatgatatagacacctcttctgccgatgctgcttatgaatcaacaaatactactaaaacttagtgaaaattgtgtaattatttcttctcacacccccaaccaaaacaaatggagggaagaagcagtcaggaaaggaagaatttttgtgccaatttgatagcaatgagacaggaaggatggagaagtcaattgtcttaagcgtcatgtaatggctgattgatttattaatttgtaagcaagttcatcgactagtatcatccttctgaaatagttctgtcgtgaaagatgtaatctcctctgaactggcaagttaattgcttatttctgcttttgtagtcatctgagattgtttattttttaaaaaattcttcttcccccctgccccctttttttttattggaggggcgatgattaccgaaggttggcacagttgaaatatacatattt

SEQ ID NO: 226039 - DNA, 515 bp, Glycine max
ggagaagtgaagtgatgaatgccccatatcgttacgagcgtttcgttgtccctgaaggcaccaaaaaggtttcttatgagagggacacaaagatcatcaatgccgcgtccttcaccatcgagagagaggagcacactatcggcaacatcctccgcatgcagcttcacagagaccccaatgtgttgtttgccggatacaagcttcctcaccctcttcaatacaaaattatcgtcaggatacacaccactagtcagtcttcgccaatgcaggcatataaccagtctattaatgatctggacagggaacttgatcatttaaagagtgcctttgaggcagagatgttgaagttttctagggactattgatttaccgtcaagattgatggtgttgcattacaaaccctggcagatattgagatggcgaatcatttctgctaaatggaatttaaacaagatgcttttgagtgttttgggagatttgttaaatatggatgtgtcggaaggaattttaacaat

SEQ ID NO: 226040 - DNA, 523 bp, Glycine max
gttcctctcgcccagaatccgagatcaaccctgacccctaaggccaggggtttttctcggcttcttcagattcctgaaatggcgtctgtttcagctttagccaagtacaagctcgtcttcttgggtgaccaatccgtgggcaaaaccagcatcatcactcgcttcatgtacgataaattcgataacacctatcaggctacaattggtattgattttctatcaaaaactatgtatctcgaagatcgaactgttcgactgcagttgtgggatacagctggccaggaaagatttagaagtcttattccaagctacattagggactcatctgtagctgttattgtatatgatgttgcaagccggcagactttcctaaatactgcaaagtggattgaagaggtgcgaacagagagaggcagtgatgtcattattgttcttgttgggaacaaaactgatcttgtcgagaaaagacaagtctctatagaaggaaggggaagcaaaagcacgtgagctcaatgtcatgttc

SEQ ID NO: 226041 - DNA, 377 bp, Glycine max
ctccctcccgctcagattccgagaacaaccctgacccctaaggccaagggtttttctcggcttcttcaaattcctgaaatggcgtggggcgcacctttacccaagaacaagctcgccttgttgtgagaccaagcccggggcctaaccagcatcctcactcccttaatgtacgataaattcgatctcgcctatcacgctacaataggtgttgactgtgtataaaaaactatctatcacaaatacccacaccgtacgactccagatgcgtagatacagatagccaggggagactatataagtgttattcctagctacattagggactcaccactgcctgttattgatatgaaaaccaggccgccaactttttaaatact

SEQ ID NO: 226042 - DNA, 444 bp, Glycine max
  unsure (1)..(444): unsure at all n locations
caacatcgatttggaggaactttatattcacattggatggcctttgtatcgcaaatatggtcatgcttttgaggctttcaaaataattgtgactgatcctgatactgttttaagtactctcactcgtgaagttaaggaagttggccctgacgggcaagaggtgactaaggtggtgccagctgtatcagaagaagtgaaggattctcttgtgaagaatattagaagacgaatgaccccccaacccttgaaaattagggcagatattgaaatgaaatgttttcaatttgatggagttcttcacattaaggaggcaatgcataaggctgaagctgcaggaaatgatgactgccccgtcaaaattaaacttgttgctcccncactttatgttcttaccacccagacactggacaaggagcaaggaataattggttctcaacaatgcca

SEQ ID NO: 226043 - DNA, 479 bp, Glycine max
ctcttctctctctctcggatttcttgcgcggtttatcatgggggatagtcagtattcgttttctctcaccacatttagcccttctggaaagcttgttcagattgagcatgctttgacggctgtcgggtctggacaaacgtctttgggaattaaagctgcaaatggagttgtcattgctaccgagaagaaattgccatctatattggttgatgaagcatcagtccagaaaattcagttattaacaccaaatataggtgtcgtatatagtggcatgggtcctgattttcgagttttggttcggaaaagcaggaaacaagccgagcagtatcaccgtttatataaagaaccaattcctgtcactcaacttgtcagggaagttgccgccgtaatgcaggaatttactcaatctggtggtgttaggccttttggagtgtccctgctagttgctgggtttgatgataacgggccacaattatatc

SEQ ID NO: 226044 - DNA, 346 bp, Glycine max
ctatggtgttatagtagagactgagaagagctacatcgagactgttgacatggatgttccagcagctgagcatgatgggaagtgcaagtgtggcactaactgcacttgcacggactgcacttgtggccattaaggaatatgtatgaaaatgtaattgccatgtgtttggcaatacaaatctccaaataatgtaatcttcgtatgaataaatgtgtgctgttatcctacttcagggtctgtgtagtcatgcagtctgaatcatgtccagttcctgtcatagttattaacagccatggttgtggcattctatatatggttttatagtagataaataagtttaactctc

SEQ ID NO: 226045 - DNA, 646 bp, Glycine max
  unsure (1)..(646): unsure at all n locations
gcgtgagagacttctcgtttatgatgagagctaagatagtttagttgtcaagtcataaatcagtatcatcactttaaatttcattagaagctgtcaaaatgtcacggaagggtttgatggagcaagacctgagtaagttggatgtaacaaagttgcatccactttctccagaagtcatatctcggcaggctactattaatatcggcactataggtcacgtggcccatggcaagtcaacagttgtgaaagcaatatcaggtgtccagactgtgcgtttcaaaaatgagttggagcgtaacattacaatcaagcttggctatgcaaatgcaaaaatatacaagtgtgaagatgaacgatgtccaaggcctatgtgctacaaggcttatggaagtggaaaggaagatagtcctatgtgtgacgtgccagggtttgaaaacagcaagatgaaattgctaaagcatgtttcatttgtggattgtcccggacatgatattcttatggctacaatgcttaatggagcagcaatcatggatggagcgttgctactcatagctgctaatgaaagctgnccacaccacaaacatgtgagcatttaactgctgtagaaaatatgcgtctacagcacataataatccttcagaacaag

SEQ ID NO: 226046 - DNA, 608 bp, Glycine max
attagatattactatactattcctctctctgcatactacatactgtggcaacaatatggttcgtatcgaaagcatcaacaaagagaaggataaagacctcgatcaggttttgtttgatcggaaccaccatgatttggtcgatgaagaacaacaggagattgaaggtgtgaagtacgagagtgagagtagcagtgatggtgacgacccatatcggagagcacagcctgactctttctcttctcagcaatggcctctgaggtacacagagactgcagattcttacacgatagctgctgctccaaattttgagtcagttctactggggcccagtttcatatattcaagtattgacaatcgttccaagagttacttagacatcgagggagagacaccttttctatctgctgccgaaggcattagacaatcaacttggtgggagaaagcctatgtacaacggcttgtttctggagaattgcccattggatatggatgcaccttcactcacacaattgtcaatggcattaatgtgatggctggagttggtcttctatctacgccatacacagtaaatccaactgggtggatgagcatggcagtgatgcttcttt

SEQ ID NO: 226047 - DNA, 582 bp, Glycine max
  unsure (1)..(582): unsure at all n locations
gagcctctctggatcatcttcgcaagagacatggtgatcaagctgaaggaagagctgatcatgaactcattcaaaaccattgatggaagaggtgctagcgtgcacattgcgggtggtccatgcataacgatacagtatgtaacaaacgttataatccatgggattaacattcatgattgtaagcaaggtgggaatgctatggtgcgggactcaccacggcactacgggtggaggaccatatcggacggtgatggcgtgtcgatctttggagggagtcacgtatgggttgaccattgctctttgtctaactgcaatgatgggttgatcgatgccattcatgggtctactgggattaccatctgcaacaattacatgactcaccatgacaaggtcatgcttttgggccacagtgattcctacactcaggacaagagcatgcaggtcactattgctttcaaccactttggtgaaggcctagttcaaagaatgccaaggtgtaggcatggatattttcatgtggtgaacaatgactatacccactgggaaatgtatngccatcggggaagtgctaatcctaccatc

SEQ ID NO: 226048 - DNA, 533 bp, Glycine max
ggccagcatattcaaaacacttggtgtaacatcactttctggcaaattctgcccagtccctacgtttgaagagggaaatgaatctggttgtcttgataagaaagatttggacacttgtggccctgaatctgaatcacatccagtgagcaagatgcagtcttctggagacatttgtgaagttattaggactcataagaggaatgattttccagtttctttagacaacaaaaacagtttagatcagttgaagcagtttgatgtaattgataattgctcagatcaccactttattcaagaggggaaaggattgacatcatctcagtttaaaaagggttgggtgaagaaggtacaacaagaatggagcatcctggagaaaaatcttcctgaaactatttatgtccgtgtttttgaagaaagaatggatctcatgcgagcagccattgttggtgcatcagggacaccttatcacgatggcttgtttttctttgatatatgtttcccttcagagtatgccagcgaaccccctatggtgc

SEQ ID NO: 226049 - DNA, 408 bp, Glycine max
caattccattcattctgtcattcccagttcgtgatttttgcaccaccaactgctacctccgctattggggccactgcttcccttggtcactgaggaagctcgcttcctcaatcaaagtcctatgggacgaaattcaactttctgaatcattataagagcttctgtggcctcaaggccatgtcatccgcgagatgtgagtcggaatccttcttcttcgataacacaaccagtgctgatctacgggcgtgtttagcatccatagctcaaaaggaacacaaccacatctctgagcctggggcttagcacaaagatgcggctcttgcagcttctggagggataagtcagccgctctcgcttcttatcaagatgtatactttactttccaacctgcatctctttgatattgcg

SEQ ID NO: 226050 - DNA, 554 bp, Glycine max
gctaccagacgctgcttcagcgtctggtagcaaagatggcgacattgactgcttcaagtgacttagtctctagaaattctcatgtccaccatggaccaacaactgcttcatatgagtctaaagcagtagcaatgggacttagatctctgaagcagacaaatactcataatggactaagaattttgaacccggtggatgagctacttaacagaaccccaattaaaaccaatgcagtgcaagctatgaggaagggacctcaaggcaagaatgccaggcctaaaggcatgatcacatgtggcatgactttcataattataggaaccgaggtggctccatggtgcaaaactggtgggttgggagatgttcttggaggtctaccaccggcattggcaggttttgggcatcgagtaatgactattgtgccgcgctatgaccagtacaaagatgcatgggatacaagtgttgtaattgaggtgaaagtaggagatagaacagaaaaggttcgcttcttccattgttataagaggggagttgatcgtgtctttgtggatcac

SEQ ID NO: 226051 - DNA, 582 bp, Glycine max
  unsure (1)..(582): unsure at all n locations
cgaagatttaacacctatggctcctaaagctgatagtttaaagaaggctgatccaaaggcacaagccttgaaaactgctaaggctgttaagtcaggtgctactttaaagaaaaagaccaagaagatccgaacatctgttaccttccatcgaccaaagaccttgaaaaaggataggaaccctaaatacccacgcattagtgctccacccaggaacaagcttgatcactatcagatattgaagtatcctctcacaactgagtctgcaatgaagaagattgaagacaacaacactttggttttcatagtcgacttgcgggctgacaagaagaagatcaaggatgcagtcaagaagatgtatgatattcagaccaagaaagtaaacaccttaatcaggcccgacggcaccaagaaggcttatgtcaggttgacacctgattatgacgccctggatgtggccaacaagattggaattatctaaactaattcctggcctcaccaaagtncgattctgtttagatggtagtttggtttgtgaacattgaggggagacatttgaagggttttttttttttttgaaaggga

SEQ ID NO: 226052 - DNA, 505 bp, Glycine max
ggaggagtgcaacaggttcactcagtctgggattattgttgcccttgcagacatcaaaacgaagttgaaatctcttgcccttgtgaagtgcatgggagtcaaagatatcgatatggaagtgtctatgctttctccttgcgagtctcttcaatctttagccattcaaaagtgccctggttttggtagtgctagcctggccacgattggaaaattgtgtccccaacttcagcatcttaatctgactggactctatggcataactgatgctggccttctcccccttttggagaattgtgaggctggacttgtcaatgtaaacctcactggttgctggaacttgacagataatatagtttcagccttggccaggctacatggtggaaccctcgaagtactaaatcttgatggatgctggaaaattactgatgcaagcttggttgcaattgcaaacaacttcctagtgcttaatgatctagatgtgtcaaagtgtgcaatcaccgatgcc

SEQ ID NO: 226053 - DNA, 498 bp, Glycine max
atttcatctttgactgcttccttgaggtttgatggtgccctgaatgtggatgtgactgaattccagaccaacttggtcccataccctagaatccatttgatgctttcctcctatgcaccagttatctctgctgagaaggcctaccatgaacagctctcagtggcagaaattaccaacagtgcttttgagccatcgtccatgatggccaagtgtgatcctcgtcacggaaagtacatggcgtgttgcctgatgtaccgtggtgatgttgtgcccaaagatgtaaacgctgctgttgccaccatcaagaccaagaggaccattcagtttgtggattggtgccctactgggttcaagtgtggtattaactaccagccacctaccgttgtgtctggaggcgaccttgccaaggtgcagagggcagtttgcatgatttcaaactccaccagtgtggctgaagtgtttggccgcattgatcacaagtttgatctcatgtatgcc

SEQ ID NO: 226054 - DNA, 604 bp, Glycine max
  unsure (1)..(604): unsure at all n locations
cctttctctctcttctttttactctctctctgtctctctctacgctttctcgttcgagatccctcaagggatccactaactgaaggagaaatggggttgacattcaccaagcttttcagccggcttttcgccaagaaggaaatgcgaattctgatggtgggtctcgatgcagctggtaagaccaccatcctgtacaagctcaaacttggagagatcgttaccacaattcccaccattgggttcaatgtggagactgtggaatacaagaacattagtttcactgtctgggatgttggtggccaggacaagattcgtcccttgtggaggcactacttgcaaaacacacagggtctcatttttgtggttgacagcaacgacagggacagagttgttgaggccagagatgagttgcacaggatgttgaatgaggatgaactgagagatgcagtattgctcgtatttgctaacaaacaagatcttcccaatgcaatgaatgctgctgaaattaccnacaagctgggtctgcactctcttagacagcgccactggtacatgcagagcaccctgcgcacctctggggagggtctttatgagggtttggact

SEQ ID NO: 226055 - DNA, 579 bp, Glycine max
tatttttttttttttttttttttttcttttttacttttttcttctttttctttttttttttgggttttttgggttcttttttttttctttttttgcttttcttttgacacaaaaaaaattcttttttaataacagggggggcctcaatacccccggggtggaagaaaatggtcaatctcaaaccccaaaagggggccccccctgggggggttttttttttataaaattcccacaaaaaaaaaattctctggggggcgttttaaaagaggataacccccgttgagggggggagggggtgggaaaactgggcccggatttagggttttctcccccgggggcgggacagtatatttttttttatggggcccataaaaaaaatcactggcgcggtgttttaaaacggggggggggggaaaacccgggggcccacccaaaaatagggggcggggaaaaccccccttttcccagggggggtatataagaaaggggctcccaccaatcgctcttcccaaaatggccgcccctgtgggggaaagggggcccccccctttgggggccttaacagcggggggggggggg

SEQ ID NO: 226056 - DNA, 453 bp, Glycine max
aacgtaaaaatttatcttattagagaactcaaaacatgtcaacatgtactagtgtactactgatataaagcaaacaaacgactaaactgcacagttggagcaagcttaacaagtgaacaacactgtatagacagctgttttaagtattacagtccaagggagttgaagtgttaactgagcagattggtaagaaaatcaatctctcctcttctttttcttctcattcctctcagccgaattcttcaacataataacaagaatccggacaaaaactgcaaccaaatcggtaaacaaggtcaaggcatgctttacatagtccagatcgcccaagtgtgccctctcaactatttcttgggtgtctactacaatgtaacctacaaacaccaaaagcccaaagtacaactcaaacttaaagagagctgttgaacctccaaagatggaagaagcaaagtg

SEQ ID NO: 226057 - DNA, 472 bp, Glycine max
gggtgacttagggttatcctgcatttcagtggtgtggtcaatatattatcaagttcagtcactaggcccagtcagaaagaggacacacaacacaatcatcataacatgaaataggtccaaagctaagccattcaactggtcccaaagcaaatacttggtaaactttgagcaacaaaagaaaatgtcgccccaacattagggggggtcctatctgtttttgtaaataacagtacctcacatctagaagcccccattaaaaatggatccctttaatgcagagcacttagccagcaatgacaaactgcatgaagcagcagtttgctaaattttctgtatgacaactgaatttgccagtcctgcctgctctatagtctgagtttcatcaattagaatctttggggggaaacccatcaactgaagttgataattctgccgacccccaggtctagatgcatcaatgaaagcacggatg

SEQ ID NO: 226058 - DNA, 392 bp, Glycine max
aatactaatgataaataaaccaagttccataaactatcaaattcggggtaacgcgacaccatcaatcattacatcaagacaatttcagggaggaaccaaaatcctccctcctaaaacaatcaaacgcaattaattatctaatctcatcatcttactaatttaacacaacaaaaaagaaattagcaactatagagtaataaaaaaaaaccgtaggtcaggagtctacgttgttgccgagcacaaacgagaagatttcccgaaccggagagaactgaacgagagcgatatccatggcgtaaccggaaaccggaagcttgagttccctcaagagggagaaagcctcaggcattctgtttttggggacatgtgggggcaacggagcaataagggat

SEQ ID NO: 226059 - DNA, 498 bp, Glycine max
gcagaaattggagaattttctattaactttcctagtaaaacggcagtgacttttcaatatacattcataaaccctggccccaatatcactaaacaaatgatcctattcttaaaacgacctaaatttatcatctctatcattccatttacataaaacgttgatataaaaaaataataacaaattatattgaaaatggaggcaattttcatcaattacccaacttaaattgatatgttgaggtcaatcctaggtttcttcatggaaggaataggaacaagagagttacacctaggacacttagggttgttcttcatgatcattacatatgataagcaaccagggcaccctgcagccataggtgatgatgaaacattcagcctctctttacattcatcttcttgaattgtggtttccctaatcgacgacgacgaggaggaatacgaaagcgacgacaccgagagaggtgacttcaaaatgaggttcttttcctgacaatag

SEQ ID NO: 226060 - DNA, 506 bp, Glycine max
gcagtaataatgtcaagcatttgattaaattaaacaaaacagaaaggcctcacaatagcggaacccttgagatccaaaccacaaacaaaagcagcaaataagaaagtacagagagggcaaaaaagtaaagagagaaattaatcgacggtctgcatgacatcctcaggagcgaacttggtacccttttccttgtcggcggcggcgcgacccttggccttccgatcgagcaaggatttgcggtccttgtccattcgaagcttggtgacgacaaccttggaagggtgaatgccaacgttgacggtggagccgttaaccttctcgcgggtgatgcgctcgatgtggatgacccacttgcggcgatagacctggaccactttgccctcgcggcccttgtaggttcccctcaccacctgcaccttgttcgtccttgcgaaccggaatggaccgcacgttgtacttcgaccggagatcggtcgagagaggcgcgctcataagacgcgacgcac

SEQ ID NO: 226061 - DNA, 532 bp, Glycine max
aaagattgcaacagttataataattaattaattggatatcccattatacagtatcctttccaaaatatcatgagacataaaaataaaaaacaaagaagcctggtctctgttcatacaacattatatcacagattgccaatcattttataaactagggcgattcttaatttagcacaaagaaatgacattcaaagcccacctccatgagaggaagaataccacccatcaaacctataatggatatcagggctcatctagctggtcctggacatcagaagtccaaagggtgaggttgtctcttaaaagctgcattatgagcgtgctgtctttgtaggattcttctcccaaggtgtccagctcagcaattgcttcctcaaaagcctgtttagccatggcacacgctttgtcagactggttgaggatttcatagtagaagacggagaagttgagagcgagacccaatctgatggggtgagtagggggaagatccccagaagcaatgttctgggcagccttgtaagacaacatggta

SEQ ID NO: 226062 - DNA, 472 bp, Glycine max
aattgcaaaataaacacaaagcctcgttaacagcaaggtggtggtgtctatcaagaaaacaaagttacatcccctcccctgtttgcacaggtttgaccaatacaccgaattactaaaattgatatgaaggaacactaggaaaaacaaaaagcaaaattccaaacgattattattctgggaagagtcgaagcacaatactcattaacaagaaaattcggttgtacccataaaataccgattcctacccgcacttagattgatcagtacttgtagtcctcaacatggaggctctctgaggcaccatcagcaagctttgagttacccttgtaggttcccagagttgcctctgagttggccttggctcttaccaaaagggcttcctgagccttcttcacattctcctcttttccactccatgccttaagggtgctctgttgaagtgcccttccaaaagagaaagagagtgaccatg

SEQ ID NO: 226063 - DNA, 511 bp, Glycine max
caccagacaatgccctcaacggcgtatacttggcacagtaaataattctacaataagaccattatatataagatccatgtgacagatatttactaatagttgctaacataactagcattatatgatgcaattgctcctgttaaagcatttttgttaacttcgtaattgttcacaaatcacaattgttaaaattcctccgacacatccatatttaacaaatctcccaaaacactcaaaagcatcctgtttaaattccatttagcagaaatgattcgccatctcaatatctgccagggtttgtaatgcaacaccatcaatcttgaccgtaaatcaatagtccctagaaaacttcaacatctctgcctcaaaggcactctttaaatgatcaagttccctgttcagatcattaatagactggttatatgcctgcattggcgaagactgactagtggggtggattctgacgatattttgatttgagagggtgaggaagcttgtatcggcaaacaaa

SEQ ID NO: 226064 - DNA, 495 bp, Glycine max
aaacatatcacacgttttacagggtacaatgaacacaattcaattttgggttgggtacctttactacattatgccgttcaaaaaaaaaaaaaattcattagtacacattataggcaaaaaaccaactaacaacagaaattgtctagacagaacttttatcaacccctaccctgatccgcttatatattctttcatcttttcatataatgctgtagaagactatagaaaaacccgcataaaacaaaaagcatgacacaaaaaggtggaccgcacatgataaagtatacttaacaagcacatccacttgactgaggttgagactgagcactgccatttgtagactttaagtttacatcaaccatgtcttcttgttttgcagaagatagtgtttccattccaggtagtgctgcagcaatttttcgaaatagggcctttatattaaacccagccttagcactagtttcaatgaacatgacattgagctcacgtgctttt

SEQ ID NO: 226065 - DNA, 481 bp, Glycine max
gaaggaactgtaaatctcattagtttgggttgaacaccctggtcaagaaactccaaaatcgcttcgcaagttacaagacatcacttgacatcaaaaaataaaatacaagacatcccaacataaagtaattcaagcttgttttatacaaccgcatttaaagacatgtttgttaagaataatactaaaaaagacaaaattagtaaagccgtactctgctatctatgccttactatacctacaagttttttgtcagtccgttatcccggcaccattatccacatcaacctcgcccattcctgtatcttcttcctcctcactggcttcatcaccactgacctctttattatcttggcgtagcttaaccatgtgctcagcaagcaatttatcatcacgttcactcactgctctagctgcctccttaaccacaagtttacccttgtgttgctctattgcttcagtgcaagaagctatggcattgttg

SEQ ID NO: 226066 - DNA, 579 bp, Glycine max
ttgcttttttttttttttttttttgcaattaataatgcattgaacttaactggaaatataaaaataacagagataaggaacaatcagattctaaaagggtgaaaataataaattagcaatagtcattaagtcattccgcaccgtctaaacaaactaggtttgtttgaaaatgttgatgactttggaaaagggtttatctgaaggcttgctggtcatcacaacgagtagctcgcaaattcactattgccatcacaatgtcaataattaagctaccaattaaacccaactgtgaaacaaacaacttcaggaacacaagagttcttcattgcagattattctacttcagccaaatagtcgtcaatttcagctggtgtcaataccctgaactttttatcagctccaattatgccaatttcaatgttttttcctgagatctgtccctcaaacccttccttcagagtcaatattgctgtgtggactgcatcatcaagctccatatcatctgtgtacctcttctcaagatacgtttttgcattaaaaacatttttcccatagcagaagctttccaagagaaatatg

SEQ ID NO: 226067 - DNA, 346 bp, Glycine max
gagagttaaacttatttatctactataaaaccatatatagaatgccacaaccatggctgttaataactatgacaggaactggacatgattcagactgcatgactacacagaccctgaagtaggataacagcacacatttattcatacgaagattacattatttggagatttgtattgccaaacacatggcaattacattttcatacatattccttaatggccacaagtgcagtccgtgcaagtgcagttagtgccacacttgcacttcccatcatgctcagctgctggaacatccatgttaacagtctcgatgtagctcttctcagtctctactataacaccatag

SEQ ID NO: 226068 - DNA, 548 bp, Glycine max
gtaaaatcatcatatatatatatatatatcaactcttctgcacttgctttctcacagaccagattcacaaatttggttctatgaggtttacagcggaggttgtaatcagacaaaagtagaccatagaagaaacccaaaagtaaaaaagctaaagaaaaaaaaaagaagacaaatagtggaaaacaatggtaaaaaaaaaaaaaaaactaaagaaaagaatgcaggaaggaaatgataggaaagtatacatcctaactataaagaaatgaccatagttaatttaatagggtcattctgtttccccttccctcccttttgataattttggtttggaattaatggaggggtcataatcagcagcgggaaccctttctacagctgagtgcacccgcaccagtggttatggaccccacccaagaagatggccttgcactcaagctagatgctcttgcatagctagaggaggctccagcccccgatgccgtgaaaacgcaccgtttaccaacaagtcccctctgacctccaatccatcctttccattacttttt

SEQ ID NO: 226069 - DNA, 472 bp, Glycine max
gggaataaggatataaaacataatattaataacaagcagggggctgggagaacttcacgagactcaaactaggagaggcttccctcacatctttggtcttattattatggggttgccacattttcctttgcctgtggagcaatttcttctccatcacttccaggttcactgccaggaactcccaagcttagcagcacttcctcccactccttagcaggccccttgcatgaaagatcttgagccatgccgttcttgataatttctgtaaaagctggagttccatagactgcaagggcccttttgacagtctttgatatagcatctcacatgagccggatccacagtatcacattcaacattgaaggcacccatttgaaatccagggaagccttctttgacagggtccactaatccacctgttgaggcaacaattggtacagatccatagcgcatagcttgtaactgaatgaga

SEQ ID NO: 226070 - DNA, 455 bp, Glycine max
caaggtattaattttattgcacaatgagaaggcatagaaaattgatggttctgtttctcagtacaagttttagaatgaaaaatgaagcaacaagtgtttgtcgtggtagtattgttgtagtaagcatacaaaactacaatggcatggttcatacatataataattgaattaccaattcagaatttgatggctctcacttccacttgttggcaacaatgtcagccaaatccacaaccctttgggagtagccccattcattgtcataccaagcaatcaccttaaccatgtcatctcccatgaccatggtcaacgatgagtcaacggttgaggacacattagtgcacctgaagttaacagacacaagtggctcatcacacacagagaggattccctggagctcattgtctgcactttctttgaatgctggatttactttttctgcaaaggtttttttt

SEQ ID NO: 226071 - DNA, 393 bp, Glycine max
aaaacaacatagttcaatattgccattcagtttaggtacgtaacaggagcagcgaagcataaaagcaatgcatccaaattaaaaccacattggtactggttcacttttgaacatcaaacacaacataaaacagaccactagaacaagaatctgaagtagattctagtagtcttcatcctcttcctggccctcaccagactcagcacccacttcttcataattcttctcaagggctgtaaggtcctcacgggctttagaaaattcaccgtttttcataccctcacccacgtaccagtggacaaaagcacgcttggcttccatggaaccaacctgtgatcaatgtggtcaaacacttcagccacactggtggagtttgaaatcatgcaactgccc

SEQ ID NO: 226072 - DNA, 477 bp, Glycine max
attagcaaaataaaatcataactcaatgggatggcgcattgattggtatcaattacagttataaacattgaatccaaactcaattaaaaaaaaaaaaaactcaaaagtattttagacatcccatgaaacaaattcctactataattttagccatcaagatgtcctaagccataaaacattaacataaagccaatttgtctcatgagagaaccaaaaaaacaaactagataatattcacccctgcatccagaatcaccaatccacaagaagactcccaaaaagcatcaagccttgttggctatgttgttggaaagccagtccaaaccctcataaagaccctccccagaggttgcgcaggtgctctggatgtaccagtggcgctgtctgagagagtggagacccagcttgtcggtaatttcagcagcattcattgcattgggaagatcttgtttgttagcaaatacgagcaatactgca

SEQ ID NO: 226073 - DNA, 512 bp, Glycine max
cacatccacacatttatagaacagaaggaacacgtatccacaaagtacttcatgaataattcttcatttttagatagttacatggactaagtttgagcttaaaacatcgatttgcaaagtttattgcgccaaagcacttgtgttgtagacaagaagtgcaccaccagcaagaagaccaagtagagtcacagcccatatagccaagccagtcgtaccgccagcgtagacatcaccggttggagaccagtccttggtgtcgtagataggactgtaaccatcgacattagcaccgtatttgtctacaaactggtaaacgccctttccctttcctttcctgccagatgcatcaactccttccctcaaagccatgccaccattaattccataaggcttgtcagtcttgatctttttgccaccactggccacaactctgaatgaagaggagttccttgagagggagggaaggcctttaactgaggacttttcaacagtgaaaggggcaggtttgaggg

SEQ ID NO: 226074 - DNA, 456 bp, Glycine max
tttgtttttatttttttgtgttaaattttttttttgttttttatctttttttttgtgttttgggttttaaacacaaaccaatcttattttttaagggaatttattccagacccattaaacctcaaagtttcttcaaatgttttgggaacatttttaactttactcaaggggcttaaatccccccccggaaaccggggacaaggggaagggttgatctcttttggttgctgatatcaggaggggtcctttcattcttaagctgcttgccaacaaaaattaaactctggtgggccggggggatgcctctcttgccctaaatattggccttaaaaatgacaagggggtaaaacttttctccctctggggtaatagttttacccataaaagttttaaccaaaattttgttttcccccccgaaatcctctctccatggggggagggtgctccctttggttg

SEQ ID NO: 226075 - DNA, 366 bp, Glycine max
gacgaaccacaatagcgttaatgacggaaatagaatggccaatagcaaaacatacataagggggtgcatgtgtgtcttaattaaacgggtggaaaaagcttatcaagtttgcctggtaaagaatagaattcatcattcttaacatatgagctgtacaagccgaacctctcccaccactccaaaccgatggctttaggtgccgcatcatcttcacgggacagtgtgcatccaaaatgaaagcaaccaaggcagcaaccatctaagaacttcataatgttgcttcagatgataatattctgtgaaatattgtggtatggagaggcctacgaagaatgagatgcacaacactgatttgtttctgaaatt

SEQ ID NO: 226076 - DNA, 441 bp, Glycine max
gagaagattaaaatgaatatcgtcattaatgataaaaaaaagcatcattaggggtatgatacatagatagggtaagtaagcaaaaaaagagtagctggcagagcttgtaatgtatgaaggaattcaatccaaagcattgggcccagcacaagccttcaaaacggggctccaaatccactgcactagaaacttccgtccattcctaccggttagattaaaggttctcccttcaccatctttcataacggaaccaatataacacggcgccaccacccgttccgtacaacccctcgcacaaatctccgatttctgttggcgcggaggggtcctcgccggcgtaccacgcgttcaccaatgggttctacgagagcttctccagctcgtgcccgatcacgctcaccatgccgttcactccgacgttcacattcggcggtttgaggt

SEQ ID NO: 226077 - DNA, 549 bp, Glycine max
gacttacggctatcctgcatttcagtgaagtgttcaatatattatcaagttcagtcactaggcccagccagaaagaggacacacaacacaatcatcataacatgaaataggtccaaagctaagccatccaactggtcctaaagcaaatacttggtaaactttgagcaacaaaagaaaatgtccccccaacattaggggggtttcctatctgtttttgtaaataacagtacctcacgtctagaagcccctaataaaactggatcccttccatgcagcatttagccagcaatgactaatcgcatgaagcagcaatttgctaaaatttctgtatgacaactgaatttgccagtcctgcctgctctatagtctgagtttcatcagctagaatctttggggggaaacccatcaactgaagttgattattctgccgacccccaggtctagatgcatcaatgaaggcacgaatgtcgctgattgtgtggtggtaattaaaatgtgatatcaagcgggttcccgcagccaacctgagttgtattgaggttgatggca

SEQ ID NO: 226078 - DNA, 514 bp, Glycine max
cagcagtcaagactgtatccaagaccatatataacataattgataatccttaaggacatcaaacagaaaatcccctgaaaacgaggtctttgagttcacaaaaggataccctataataaaaacctatatatagtcctatactactgcattagctacaagataaaataaactccacataagctttaagcaggtttcttgctgtggactccatcaccaacatcacgatcacaattcttgtagctttatttacataaaaggggagataaagggtgttcagaagactcctgccatggaaggcaggtcgtcgaagctccaaaggttcatagggtttccggcggcgtcatgagttgcgtctccgccgagcaaagacgccaatgtagcatcagcccaggcttcatcaagaaaagaaggggtctcaaagaacttgagctgggattcaatgtctgcaagctcttcggaaagggtttttgcagaatcatcttgtgcagccaccacatcctgcgagttgttggtc

SEQ ID NO: 226079 - DNA, 521 bp, Glycine max
acacaaaccccgtatagtgcattaagcgatatatttgttaatatatacattttttgtagtatgtacggttacttaaggatcacgagcctgaaaagtaatgacaaaacataatataaagcatgaaatatattccacgcttatgcctgttaagtattgcactaagcaatgcaacactagagatgatccaactcagcggtcttcctttcgtacagcatttggatcagacatcatgtccatcatcattttctcaggtgaatcctcccaactcgcaaatgtcttcaagtcaacttttcttctttgctcagtgaaaagcttttctctcttcttgtaagagttctgcacttcctttgctactttcccaccaagtccccaaactttaacttcagaaatcagaccctcgacaggaaggaaaccctgatctggaaagagagatccactccggtaagttttgtcaatagcatgatggcgaacagtaacttttgcaaaatcttcatcaataaatattctctcatttctggagt

SEQ ID NO: 226080 - DNA, 489 bp, Glycine max
atatgactctggtgttatttttgattttgcaaattaaattacacaatcacagccgtacatcacacatgagttgggcctcttccaacttaaaagcagaggataacattggcccatgacgcgacacatgcaccacctaataatcataattgtacatctttacatacaaaatacaaagactttaaattttaaaaagaagaaaagagataaacagatcatcttaatgaaatgaaaccaaaacccacaaacattggcttgatttttgttgttgttgttgttcccaacttgattaagcatgaaccgtttgattgaatcacttggacttgaagggaatggccctgattacgacctggtggtagagtgctgcaagagctgcaccgatgaatggtcccacccagaagatccagtgttcatcccaaccaaggtccttgttgaagatgatagcagcaccaagactacgagcagggttgataccagttccggtgatgggga

SEQ ID NO: 226081 - DNA, 500 bp, Glycine max
gatgctataataaaaacataaataagatgacttcaaaatcaattttaaccaaaatcaatattgtcaaccctcatccaaacatgcactaacccaaccaactaactagctatacacactattatgcataaccttgtttaaaacctacccaccaaaaaaggagaaaaaccctcgtttgggttgttcttccaccaccacggcctgcatgctatcctgctccacgagcctccaagcggcttgttcgaacgccaagccagccagagtgggaggcttgttgagcacaagagggtagcctctattggtgcttctaataacctcagtgtcctcaggaatagccccaagcaagggcaaccctaacatttcttgcacgttcaacaccgacagcatgtcttctgcttttatcatatcggttcgaacccggttgacgatcattttgatgtcccggattccgtcgcattcgaggaggccggtgacgcggtccgcgtctcggaggctggtgatgt

SEQ ID NO: 226082 - DNA, 527 bp, Glycine max
acaaaacaaacgccatgaaataatagcattaacaataacaaacaaaacccacaacgaagccaataagaaagaaaaatatcaaaacaaaatccgtaaaaaatactactcaccccacatctcatatgtacctagcattaactatacaaacacatcctttcctttcctttcccttaccatcaccatatggcatataccaagtgttttgatttgcatttctcatgacatcactagaaatcattaaatagtaataattttgatcaatcttcacattgcatctaatcaaaatttgttattgtatattaaaaattttgattaatgtaacagtgaaaattgagtcgaccatgatgacgtggtaatctagattatataataatttcttccggagaggctttaatgaggctctcatgcagccatggcttcctcgtcatcgatctcgttctcgccttcttcgctggcggcggcgtcttgatactgttgatactctgccaccaagtcattcatgttgctctcagcctcgggaaactcca

SEQ ID NO: 226083 - DNA, 578 bp, Glycine max
ggggggaaagctactttgctttatttggacttgagtaaaagattgtgttagggctaataatacatcaaaaattaaaaataaattatatgtaaataccttatttataaataataaattatgtgaaacagaaaaggaattaattctatgcaattgaaaaatgaaaggcttccaccattctcaaatcaaatacacccaccttaattaattttggaaaccacatttaccaaatacaatttgcagtggccaaaattaattttaaaacaggcacatgatgcaatatccgtccgctgatgcggcaaacaccaagcatcggacattgctaatgcccagcaaattttaagtccatacccgttaaacaaaattggccgacccgatttgttatgagaaaactcaaacaaaaagcaagcctagtagaagaaacccaacactttaccaccaacattctttcttctagcctcttcatgatccatgataccagcagaggttgtcaagacaatatacccaaactgtcttgagggtagtagtcttgcagtccaaccttcaacttctttgacaccaacatcaaagcgagggctaat

SEQ ID NO: 226084 - DNA, 333 bp, Glycine max
ggaaaaacataccataaatatagcacaaatggagtatctgtttcccctatcgggaagtattgggcaattcaacaggaaacaaagaggaaacattagaatccctatctctagctaatacacagataagagatcggccctcatgtttcattcccaaacgcatgcatcgaatcctatggaagattccatcatccatcggactcactctgcattctcaccttcaccaagcttggcagtgccattcactttttgggcatcttctccatcttttgggatgtcagaagttcacaaagttaggttggccctgagaagatgcatgataatgtgctttttttg

SEQ ID NO: 226085 - DNA, 415 bp, Glycine max
agataaccactttttaccatatatatatagagagagagaatacgaagcacactgatcacaggatgatgctctctttaagtagggaagcagatcttatcagtacacaataggtaggttgaaattctagctctagcaatctagctagagaaggtagtacttgcacaacacacagcacatgataatttattttatacacaatctcattctcatggtgctcaagatgcatggactaattaagcaacaatgttggtctgataggcagtgtccacagataaattgggtacccataaaatggccttgctttcaaggaaatggcaaacagggttagttccaggatcaactcccataagttgatgaagcatttgatgatttcattcaaaagtatttgagtggcaaatagcaagtgcctgagttt

SEQ ID NO: 226086 - DNA, 476 bp, Glycine max
gatcacaaaaggaaaagttggcatctatatctcaaatcaatttgttttacaaaatcaaaacatacatacaaaattcgcaggttaagaaaccaacccaacaggaaaattttaaaagttaaaacacttcagccaccttgctcgcaagaacccgctcccttcgttcaatgtaactaaacggaaaccaacctgccctgcctttgcattcaccctcggcccatccgctgtttgtcacctttcgaacaacaacgtaatcaccaactgatagatttagctccactttagatacagcagaatatggaaataaaacctctcctaagaagtaacccatgctatctgttgatccattgtgtgcctgagaagcaaagacaccattcacttcttcatatgacggaggtggtggcatgctgttatccaaactaggagttaggggggtttcaatttgttggcgctctgatgccacctttccctaagctgat

SEQ ID NO: 226087 - DNA, 439 bp, Glycine max
gaaaattaaggacaccgtttttacacaatgtcaactaattttcttaaataacggaaatttagttataatcgagacaacaatcaagcacggtggaagaactaaagtccttatgaaaagagaataaaagaaaataatagacttaaaaaagcacactgcatattcatcaaagcatcatcaaagcacactgcatcctaacagcacacgtacgtagaaaggtgaagttccaggtcttgcacaacatacacaacacaccataatttattttatatacaatcttatggtgcccaagatgcagaagcatggactaattaaacaacaacgttagtctgataggcagtgtccatagataaattgggtacccataaaatgggccttgcttccaaggaaatggcaaaccagggttagtttccggaattcaacctcccatgagttcatgaag

SEQ ID NO: 226088 - DNA, 433 bp, Glycine max
cctcgaacaacggcgacaaatcgaacccctccgagagcgaaatgatgtgaaaagcattcatcgtagtagaaacctcctgctcatgctgtttaatcttctcctccagatccaattcctttcttttctttcccatcaagttcttcggctcgggttttttgaaccacgacgagtccatgatttttgaaattgtgattcgcgtgttcggtttggggtcgaggagcttggtgatgagccttcgcgccttggaggagaaccacggcggacacttgtagtcaccgcggtaaattttcttgtacaaggccaccaggttgtcatcctggaagggtaaaaaaccagcaagaagtacgttgaggattacgccacaagaccatatatcggccttggcgccgtcgtagccttttttcccatcacctcgggcgcgacatatgccggc

SEQ ID NO: 226089 - DNA, 569 bp, Glycine max
gagaagcattagcaaaagcaagaagaactagtctaagcagaaatggcctcttcagtgatggcatctgtggccctcaaacctgcccctttcactgttgagaagtcctcagttagaggccttccctccctctcaaggaactcctcttcattcagagttgtggccagtggtggcaagaagatcaagactgacaagccttatggaattaatggtggcatggctttgagggaaggagttgatgcatctggcaggaaaggaaagggaaagggcgtttaccagtttgtagacaaatacggtgctaatgtcgatggttacagtcctatctacgacaccaaggactggtctccaaccggtgatgtctacgctggcggtacgactggcttggctatctgggctgtgactctacttggtcttcttgctggtggtgcacttcttgtctacaacacaagtgctttggcgcaataaactttgcaaatcgatgttttaagctcaaacttagtccatgtaactatctaaaaatgaagaattattcatgaagtactttgtggatacgtgttccttctgttctataa

SEQ ID NO: 226090 - DNA, 560 bp, Glycine max
gagctttgagccagagactatggcttttacttcttcatgttctcttgcttctcagtttctccctcccatatatcattctgcaatcccttttcactcaacgaactgcacaaatttgtcattccccgctgttccgactccaagacaacaaccactgttgttttcttcaacctcaacttgcttagcagcagcggcggcgtcaaactcaaacagcacttcgaattccaataacaacaaccctgcttcagcttcagcttcgtcgaaagagaagaaagtagaagtggaagtggaagtggaggaggagctgccgtggattcaggaaaaggctttggacctggtcgagttcacgggctccgttacccaagccattcccgggcccagagtgggtcccacctccttgccttggattctcgctattcctctcacatatgctggccttactttcgtcattgcctttgtcaagaccgtcaggaaattctcttctcccaaagcaaaacgccgcagacaggtcagtaaaaatgcgacgctatgcaagtcgctggatgatttatttcaaaagggag

SEQ ID NO: 226091 - DNA, 494 bp, Glycine max
aacccattccctccctcattgcccccactcttctccacttctcaatcctctgtaacttcaaaacatacacctcttctctctgtttctcttcactctctctctccctccctcttcaactaacatggcaattgaaaaccaagacaccgctgtcagagaaatcaagcccaagaacaggagaatcatgggtgctggagggcctgatgatgaggacaataggtggccaccgtggttgaagccactgctgaaagagagcttctttgttcaatgcaagttgcatgctgattctcacaagagcgaatgcaacatgtattgcttggactgtatgaatggccctctctgctctctctgcctcgcccaccacaaagatcaccgtgcaatccagattaggaggtcctcataccatgatgtgatcagggtctctgagattcagaaggtgttggacatcactggtgtccaaacctacattatcaacagcgcaagggtggtgtttttga

SEQ ID NO: 226092 - DNA, 492 bp, Glycine max
gggaatccccccagaccagcagaggctgatcttcgccgggaagcctattaccctagaagtcgaaagctccgacaccatcgacaacgtcaaggctaagattcaggacaaggagggaatccccccagaccagcagaggctgatcttcgccgggaagcagctcgaggacggacgcacccttgctgactacaacatccagaaggagtcaactctccacttggtgttgcgtcttcgtggtggtatgcagattttcgtgaagactcttacgggtaagactattaccctcgaggtggagagctctgacaccattgacaatgtgaaggccaagattcaggacaaggaaggcatcccaccggaccagcagaggctgatttttgctggcaagcagctcgaggatggaaggaccctcgctgactacaacatgcagaaggaatcaacccttcaccttgtgctccgtctccgtggggggttttaagctcgttgtgtaatggtgga

SEQ ID NO: 226093 - DNA, 593 bp, Glycine max
  unsure (1)..(593): unsure at all n locations
cacttggatctgatctgctgaaacacgccacactcttcttaccatgggcctcctcgatcacttgtgggatgacaccgtcgccggtcctcgcccggagaacggccttggcaagctccgaaagcaccacaccttcgctttccgatctgcctccggcaaggaatcagacagcggaagcgtgaaatcgtacggtgaagatttgccggaggatgcggtgagagtgacgcgaagtatcatgatcgtgaaaccacctggtggtaaccagagtccgagcggatccgctccggcttcccccgccggttctactcctccggtgtctcctttttcgggagctagagagtccttccgttttcggagaaggtcgacatcagatgcgtacgagaagacaggccagaacagaccaagctcttcttctcctttcgatgtgtgacaaatgagcccgaccactatctcctccatatatggatgactgaaaatacaaatatatagtttgttttcctctggcctttgctgatgatgctgtgtccattttgtttatcttttgtgcatatagnatatagtatatagtatatatatgaatatgtttaccagttcat

SEQ ID NO: 226094 - DNA, 552 bp, Glycine max
ccgccggagacgaaggcgcaccgtctgcaggcgacggcgaccgcgacgccgatttcatccgcactagctgcaacaccacgctctacccggaagtgtgtttcacctccctctctcgctacgccaatgcggtgcagcagaaccccggccatctggcgcgtgtggccattgccgtaagtctctcgaaggttcaccgtgcggcgtcctacgtgtccaacctcacgcgcgacgccgactacggcggaagcacgcgcgccgctcttgctctgcacgactgcttctcgaatctgggcgacgccgtggacgaaatccgcggctcgctgaagcagatgcggcagattggatccgccggcgccggcgcgagttcgttcctgttccagatgagcaacgtgcagacgtggttgagtgccgcactcaccgacgaagagacctgtacggatggattccaggacgtagcggactgtcccatgataacgggtgtatgcgatcgcgtcagcaacgtcaagaagttcaccagcaatgccctggcgctcgtgaactcctacgccaacaagg

SEQ ID NO: 226095 - DNA, 489 bp, Glycine max
ggaaactggccgtgaatctcatccctttccctcgtctgcacttcttcatggttggatttgcgcctctcacctctcgtggctctcagcagtaccgtgcattgacagttccagagctgacacagcaaatgtgggatgccaagaatatgatgtgtgccgctgatcccaggcacgggcgttacctcacggcatcagccatgttccgtggcaagatgagcacgaaggaggtggatgagcagatgataaacgtgcagaacaaaaactcttcgtactttgtcgagtggattcccaacaatgtcaagtcgagtgtgtgtgacattgctcctagagggctctccatggcgtccacattcattggaaactcgacctcgattcaggagatgttcaggagggtgagcgagcagttcacggccatgtttaggaggaaggctttcttgcattggtacactggtgaaggcatggacgagatggagttcacggaggcagagagca

SEQ ID NO: 226096 - DNA, 350 bp, Glycine max
  unsure (1)..(350): unsure at all n locations
cctagctgaaattgtcacgaccatgttgtcattattcaccaacttgctcctcttcctatccctgctaatcggtctatgcaattgcagggtaacaacaacaaatgaagaggtgcaaaccctaaacacaaacactcacttcaacccacaggtgccacccctccgaaccctctcttcctcgaagcggttcgagggttcctcggagttcgtgaagctcaaataccacatgggacctgtgctatcgtctccgatcaacatctacctcatctggtacggcaagtggccccaatcccagaagctcctcatcaaggacttcctcaactcaatgtccgacgaccaccaccgngcctccc

SEQ ID NO: 226097 - DNA, 527 bp, Glycine max
gtttcgtggttcggattctcaattcctcgtccattcgcaatcgattttcaaattccgaagaaaaccgctccgaacactgaatttcagactctgaacagcgaacagtacttcaagttcacgtggaacgagtcaaagcgattccaatcaatttcgcgaactcctccacggtgaactccgatattttcctgcactgacttagtgattcgtttcatatttctcagcttcgattatccgtttgtcgatggcggactcggacaacgactccggcggcgcgcacaacgccgggaaggggagcgagatgtcgccgcgggagcaggaccggttcctgccgatcgcgaacgtgagccgcatcatgaagaaggcgctgccggcgaacgcgaagatctcgaaggacgcgaaggagacggtgcaggagtgcgtgtcggagttcatcagcttcatcaccggcgaggcctccgacaagtgccagcgggagaagcgcaagacgatcaacggcgacgacctgctctgggcgatgaccactctcg

SEQ ID NO: 226098 - DNA, 613 bp, Glycine max
tgcgttttgtgaaatcttattcgacatggcgtcacgggacaacaagaaggcgtcgagcagccgagccggcagaattcgcaccctctccgatctgaaccgtccctccgccgattccgacagcgactccgatggccctcaggagtactacaccggcggcgaaaagagtggaatgcttgtccaggatccttcaaagggaaatgatgtggatgaaattttcaatcaagctaggcaacttggggctgttgaaaggcctcttgatcagcttcaggagcctccaaggtcaactagctttactggaactggcaggttactctcgggggaaactacacgatctactaataatcagcaacctgaggctgttgttcataacattgttttctggagtaatggtttcactgtaaatgatggaccattgaggagtttggacgatcctgaaaatgcctcatttttagagagcataaaaaaatctgagtgtcccaaagagcttgagcctgaagataggaggtcatctgttaatgttaatctcatacggaggaatgagaactatcgtgaacccgaaaagcagcatggtgcatttcagggagtgggaagaactcttggaagcagctctaca

SEQ ID NO: 226099 - DNA, 571 bp, Glycine max
ctttatgctgcgaaggaaaaacagagatcatttaaggtctttgttgctgaaggggcccctagatatcagggacatctccttgcaaaagaattggctgctagaggcttacagaccacagtaattactgattcagctgtttttgcaatgatttctcgagtgaacatggttatagttggagctcatgctgtcatggctaatggtggagttattgcaccagtggggttaaatatggctgcacttgcagctcaaaggcatgctgttccatttgttgtacttgctgggagtcacaagttgtgccctttgtatccacacaatcctgaagtcctactgaatgagctgagatccccatctgagctacttgactttggggaattctcagattgcatggattctgcaagtggtgccggttctcttcatgttgttaatccaacatttgattacgtgccaccaaaacttgttagtctctttattactgacacaggagggcataatccttcctatatgtaccggctcatagctgattactactcagctgatgatttggtggtgaaacgaagacccactacaggga

SEQ ID NO: 226100 - DNA, 535 bp, Glycine max
  unsure (1)..(535): unsure at all n locations
caaaaccctgaagaaagacacagccattgtttacttttcattgattgagccaaagctttgtattttctgcgataattttccattgggtggaagaaagtctcaacctttattcgaaagagcaaggatctgagttgagttgagtgatcatgtgtggtggtgcgattatctccgacttcataccggcaggtcccgccagcggggcgcggcgcgtgaccgccgacatcctgtggccgagtttgaggaagcgcttctcgaagccgctgctggacgatgatttcgaggctgggttcagagaattcaaggatgattcggaaatcgaggatgttgatgacgaggacgatgaagacgaggaggagttgaagaagaagccctttgggttctctcgctccagcaacaaggctgcttctaagcctctctctcgtggatcagcaactgtggaatcaaaggggcaagctgagaagtgtgccaagagaaagaggaagaaccagtatcgtggaatccgtcagcgtccatggngaaagtgggctgctgagat

SEQ ID NO: 226101 - DNA, 573 bp, Glycine max
tgaaatttggcagtacctagctgcaaggaaagagcagtctgcactcagggctgtgattaaatgcattgaagaatacaaacttgaggatgagttccctccagaaaatctgaagaagcgacttgaccagttagagaaggtgaagaccgagaaaaggaaaccagtggcagttcctgccaataagagaactagagcaagcaacggcaatggaggtccaatgccaccagccaaagctgggcgtttgactaatgcgtatgtatcatctttccctgctgctcctacatttgtcaggtctccatcacacgggcaatacccagctgctcttccaccatacccttccccaccccacatgtacggcagcagaagtcccccagcaaatccttatgctgcttattcacccgagccggcaccagctattgcagggtcttacccggcagctcccatgaactatcctcatgcatatggcggctatggaaatgttttggctcccacttatcagcaggcttactaccgatagaaatgacaacctttgaagatgggtaccactgatatgacgaccttgatccatttactttt

SEQ ID NO: 226102 - DNA, 529 bp, Glycine max
cgataacccgtgtctttttctgtgtatccaaggcatcttcaagctctgaatctgcaatggcttctctactcaacatggtttcgggtccaccaagaatatcaccaacctcacacaccagaatcgcttcgcttcaagctcgacccgttttgccacccttttctgtctcattttccaggaggagactatcaattagagcaacagaaactgataccaatgaagttcaatctcaggcaccgggtgcagcgccatctaaagatggttcaagcttcaatcagcttcttggtatcaaaggagctgcccaagaaacaaataaatggaagattcgtcttcaactcacaaagcctgtcacttggcctccgttagtttggggtgtagtttgtggtgctgctgcctcgggaaattttcattggaatattgaggatgttgctaaatcaattgtgtgcatgatgatgtccggcccattcctgacaggatatacacagactctgaatgattggtatgaccgagaaattgacgcaataaatgaacc

SEQ ID NO: 226103 - DNA, 575 bp, Glycine max
atcaactcttcaaaagggagaagaatatgaaagaaaactctcaaaaaactattatagcggtggcagaacaaaaccaaaacccaacaactgaagctggaaggcaccaagaggttggtcacaagagccttctccagagtgatgctctttaccagtatattctggagacaagtgtctacccaagagaacctgaatccatgaaagaactgagagagttgacagcaaaacacccatggaacatcatgacaacctctgcagacgaagggcagttcttgaacatgctccttaagctcatcaatgccaagaacaccatggaaattggtgtctacactgggtattcacttgttgccaccgctctcgctcttgctgaagatggaaagatcttggccatggacattaacagggagaattatgaattgggtttgcctgtaattaaaaaagctggtgttgaccacaaaattgaattcagagaaggtcctgctctaccagttcttgatgaaatgattaaagatgagaagaaccatggaagctatgacttcatctttgttgatgcggacaaggacaactacctgaactac

SEQ ID NO: 226104 - DNA, 498 bp, Glycine max
ctcgagccgctcatactttatttcaacacaaaggaacactgcttgatgggcataaaaggaacagttcgtcgaagtactgatggccatataattcatgccaatattgacacagatgtcattatcgctgaagaacctccttatggttccacacaaaagcctgaagatatgtacaggattattgagcactttgcccttggaaggaggagactagaactatttggtgaagaccacaatatccgagccggttggctgactgttggtaaagaattatcatcttcaaattttaataaagaggcatatgtgaaaagttttgccgacaaagatgggaaagtttggcaaggaggtgggggaagaaatccaccgccagaggcacctcatctggtggtgactactcctgatatagaggctcttaggccaaagtcaccaatgaagaaccaacaacaattgcagcagcagaattctgtatccatttcattgacgtcagctagtgcatcaaac

SEQ ID NO: 226105 - DNA, 423 bp, Glycine max
gtacttagagtacaagaaactctcatctcctcccaaagttcattcagatgctagtcttgaagaggtggggaaggatgcaattaaggaagatgatcgggccattttgctggaatcagggcttacaagatcagcatcagcaaaattgcatccaccatctgtcaaattgaatttgattcggtttttgaccatggatgattctttcttgttagaaaatcgagcaactttgagagcaatggccgaatttggcctgattctgttttatttctacatatgtgatcgaaccaacatacttggagattccaccaagagttatagtcgggatcttttcatcttcctctaccttcttctgattatagtttcagctttgagttctttgaagaaacataatgactcatcaacattttcttgaaaaaacatacttta

SEQ ID NO: 226106 - DNA, 547 bp, Glycine max
gtgtttcatgtgtttccaccaactggtaaggaaaagaattttgtttatagccacttgcatgctactgtaaagtataccaaccgcatccaaagccggttggagttgcatttggaggaactccaggaaatgagagaatatttattgatgaagattttgcaaaagtgactgttcgccatcatgctattgacaaaacttaccggagtggatctctctttccagatcagggtttccttcctgtcgagggtctgatttctgaagttgaagtttggggacttggtgggaaagtagcaaaggaagtgcagaactcttacaagaagagagaagagcttttcactgagcaaagaagaaaagttgacttgaagacatttgcgagttgggaggattcacctgagaaaatgatgatggacatgatgtctgatccaaatgctgtacgaaaggaagaccgctgagttggatcatctctagtgttgcattgcttagtgcaatacttaacaggcataagcgtggaaatatattcatgctttatattatggtttgtcattacttt

SEQ ID NO: 226107 - DNA, 548 bp, Glycine max
  unsure (1)..(548): unsure at all n locations
ctgagcccgtctcaccctctcacgcagcatttccctgcttaaaccctccagcagcctgcaaacaaaaaccctaattcactaaccccatttcaaatcccaatcacgtttccgatcaatcatcaccttctccataatctctccgttcgcgtcgcaaatcgagcgagatagtgtcgagtcgaaccaacgatcgagaagatatagaagatggagttttgccccagttgtggtaacatgctacagtatgaattgccttatatgggtcgcccttcaagatttttttgttctgcttgcccatatgtttgccacattgagaatagggttgagatcaaaagaaagcaaaggttggtgagaaaagagatagagcctatattctccgaggatgacatgacaaatgcaccatcaactgaagcgacgtgcccattttgcggtcatggtaaagctgctttcaaagaatttcagactcgatcggctgatgagccagcaactctattntataagtgctggaacaatgactgtaaaaaacaatggcgtgaaggtgacttcaacat

SEQ ID NO: 226108 - DNA, 522 bp, Glycine max
cgcaagcaaaaagaaagaatcccaggcgaggagaaagatggaggggaaggagcaggatgtgtcgttgggagcgaacaagttccccgagagacagccgattgggacggcggcgcagagccaagacgacggcaaggactaccaggagccggcgccggcgccgctggttgacccgacggagtttacgtcatggtcgttttacagagcagggatagcagagtttgtggccacttttctgtttctctacatcaccgtcttaaccgttatgggagtcgccggggctaagtctaagtgtagtaccgttgggattcaaggaatcgcttgggccttcggtggcatgatcttcgccctcgtttactgcaccgctggcatctcagggggacacataaacccggcggtgacatttgggctgtttttggcgaggaagttgtcgttgcccagggcgattttctacatcgtgatgcaatgcttgggtgctatttgtggcgctggcgtggtgaaagggttcgaggggataacaaaata

SEQ ID NO: 226109 - DNA, 588 bp, Glycine max
ggaaccgcaagcccgagctctccggctccatcccgcgcgtcaccgtcattacctccggaaagggcggcgtgggcaagaccaccaccaccgccaacatcggcctctccctcgcccgcctgggcttctccgtggtcgccatcgacgccgacgtcggcctccgcaacctcgacctcctcctcggcctcgagaaccgcgtcaactacaccgtcatcgaggtcctcaacggcgactgccgcctcgaccaagccctcgtccgcgacaagcgctggtccaacttcgaactcctctgcatctccaaaccccgctccaagctccccctcggcttctgcggtaaagccctcacctggctcgtggacgcgctgaaagcgcgtccacagggctcccctgacttcatcctcatcgattgccccgccggcatcgacgccggcttcatcaccgccatcactcccgccaacgaggccgtcctcatcaccacccccgacatcaccagcctccgcgacgccgaccgcgtcaccggcctccttgaatgcgacgggatccgggacatcaagaagatcgtcaacccgggttcgaccgatttgataaaag

SEQ ID NO: 226110 - DNA, 565 bp, Glycine max
  unsure (1)..(565): unsure at all n locations
ttatcacccttttgcattgcacctacaaaagggccaccccttcttcccttctcaacttggacttcatctaattcaatactacaacttctgaatcacttagttgaattgaattatcttcaaaatgagagaaatccttcatgttcaagctggtcaatgtggcaaccaaattggaggcaagttttgggaggtgatgtgtgatgaacatgggattgatgccactggaaattacgtaggcaattcccatcttcaacttgagagggttaacgtgtactacaatgaagcaagtggaggacgctatgttcctcgagctgtgcttatggaccttgaaccagggaccatggatagcttgcgttctggtccttttggaaaaatattcagacctgataatttcgtgttcggccaaaatggagctggtaacaactgggctaaagggcattatactgagggagctgagcttattgattctgttcttgatgttgttcgaaaagaagctgagaactgtgactgcttngcaggggtcccaatttgtcactcactgggaggaggaactgggtctggatgggta

SEQ ID NO: 226111 - DNA, 566 bp, Glycine max
acacattaaggtttggctgtaacccagagctccttcgcctcatcgatagtttcaagtctcgttttgacaatggtgagggttagtgtgttgaatgatgctctgaagagcatgtacaacgccgagaagcgcgggaagcgccaggtcatgattaggccatcctccaaggtcatcataaaattcctattggtcatgcagaagcacgggtacattggtgagttcgagtatgttgatgaccacagggctgggaaaatcgtggttgaattgaatgggcggctgaataagtgtggggttattagccctcgctttgatgttggtgtcaaagagattgaaggttggactgcaagactactaccctcaagacagtttgggtatattgtcttgacaacctctgctggtatcatggatcatgaagaggctaggagaaagaatgttggtggtaaagtgttgggtttcttctactaggcttgctttttgtttgagttttctcataacaaatcgggtcggccaattttggttaacgggtatggacttaaaatttgctgggcattagcgatgtcccatgcttg

SEQ ID NO: 226112 - DNA, 458 bp, Glycine max
gatgatgatcgatatctagctgaatttaaggcatgcaatgacactaatgaagctgctgatcactctatcagagcatatgaatctgctgcccttgcagtacatgctgatacacctcccacacatcccatgcgactgggagtagctggaaacaactctgaacgctattatgagatcctgaactcccctcggagagcctgtcatcttgctaagcaggcttttcatgaatctatttctgagcttgacaccttgcatgaggagtcatgctaagattgcaccttaagcatgcaccttctgagggacaacctaactgtgtggacttctggcatcccagaagatggagaagatgcccctaaagtgaatggcactggcaagcttggtagaggtgaggatgcaccgtgagccctatggatgatggaatgtatcctatgagtcgagcatgcgatggagaatgaaacatg

SEQ ID NO: 226113 - DNA, 557 bp, Glycine max
  unsure (1)..(557): unsure at all n locations
cataccccttcctctctttgcctccccttcttcctcaacactttcctagtgccagttaagacaaacaataccaaagcatatttcaattgaagttacacaaattactagcatatcatatcatatatttggtgtgttgtcttaggacatatatatgggtaacgcagactatgcatacccttcgggtatgaacgtggagtgcgtgcaccgagtggccattcctccccctcaacccttcttcaagtccctaaagtactctatgaaagagacttttttcccagatgacccgtttaggaagttcaagaaccagccagcctctaagaggttcctgcttgggcttcagtacttcttccccatctttgagtgggcacccaaatacaccctgcacttgcttaaatcagacctcatctctggcatcaccattgctagcttggccattcctcaaggcatcagttatgccaagctagccaacctccctcctgttcttggactgtattcgagctgtataccgccattgatctantgcatgatgggaagctcaagggatttggcagtgggaa

SEQ ID NO: 226114 - DNA, 535 bp, Glycine max
  unsure (1)..(535): unsure at all n locations
tgcaagaatggcacttcgttgcttggtgatgtccctttctgttctcttcactcttggtcttgcgagagaaagccatgccagagacgaagatttttggcatgctgtttggccaaacactcccattccaagttcattgcgagatcttctaaagcctggccctgcaagtgttgaaatcgatgatcaccctatgcaaattgaagaaacacagtacccgaaaaccttcttctataaagaagaccttcatccaggcaaaacaatgaaagtacaattcagcaagcctccctttcaacaaccatggggtgttggtacatggttaaaggaaattaaagacactactaaagaaggatatagttttgaagagctatgcatcaagaaagaagccattgagggagaagagaagttttgtgcaaaatccttgggaacagtaattgggtttgccatttcaaagctgggaaagaacattcaagtactttcaagttccttggtcaataagcangacccatacactgtggaaggagtgcagaatcttggagac

SEQ ID NO: 226115 - DNA, 497 bp, Glycine max
ggaaatatggtgcagaaaatacatgtaccagtggtaatacactgtcgagagctgcactaagttttgcgcaagcccatgctcaaattgagaaggagcgtggaaacttactaaaagctcttgggacacaggtagtatatacatgttgatatgtaagtatgcttatgtgtggagtgtttatgtatgagttcattgagcagtacttgcaattgcaagattataaggttcaaatctgacttcacagaagtaatgatggggatttccccctaactgaactggtttactggatatgaatgagatttacagatatttaagtacatttaatctaatgaaaaaggaatatggaggccatattcaagttcaatcgtgaatagaatttaatagccatgctcgtatactgagttcatcaatctcacgctatctatactggtggctcatattattgatttacctagtgtgtgttgccatcttagcctaataactatgtgattgaagtcatg

SEQ ID NO: 226116 - DNA, 611 bp, Glycine max
ctcgagccgattcggctcgagagatgtcacagaagttgcagctctttatcattctgaaaaaagtcacaagacagtagagtacagtgactacagtttttctgatgccaatggtgacaaaggtcattcttctaatgaaaaaatccacgaaaagaatgatactcattccacatcaagatcatcagtttcagaaaaggatcagctatcaactggaggctcatatcattgggaagattggcatactgatttacttgcctgttgttctgaaccttgtctttgtataaagacatgcttctatccttgtgggacattgtcaaagattgctactgttgcaaataacaggccaatatcttctgcagaaacatgtaatgaattgatggcatattcattaattttatcttgctgttgctatacttgctgcataaggaggaagcttcggaagatgttgaacatcagggggggctttattgatgattttctttctcatttgatgtgttgttgctgtgcccttgtgcaagaaaggagagaagtggagatccgtggtgttgaaggtcctgagaagaccaacacaagacctgcaccctcacagtgcatggaatcattaaataaaaatg

SEQ ID NO: 226117 - DNA, 585 bp, Glycine max
  unsure (1)..(585): unsure at all n locations
gagaagttttgtgcaaaatccttgggaacagtaattggttttgccatttcaaagctgggaaagaacattcaagtactttcaagttcctttgtcaataagcaagagcaatacactgtggaaggagtgcagaatcttggagacaaagcagtgatgtgtcatgggctaaatttcagaactgcagtattttactgccataaagtccgtgaaacaacagctttcatggttccattggtggctggtgatggaaccaaaactcaggcacttgctgtttgccactcagatacttctggaatgaatcatcacatgcttcatgaactcatgggagttgatcctggaactaaccctgtttgccatttccttggaagcaaggccattttatgggtacccaatttatctatggacactgcctatcagactaacgttgttgtttaattagtccatgcatctgcatcttgngcaccataagattgtatataaaataaattatggtgtgttgtgtatggtgtgcaagacctgnaacttcacctttctacgtacgtgtgctgttaggatgcagtgtgctttgatgatgctttgatgaatatg

SEQ ID NO: 226118 - DNA, 484 bp, Glycine max
atcagcatcaccaccgctccaacacaggggaaaatgagggagatccttcacgttcagggagggcaatgcgggaaccagatcggttcgaagttctgggaagtggtgtgcgacgagcacggcatacatccgacggggaagtacgttggaaactcagatctacaactcgagcgcgtgaacgtgtactacaacgaagctttctgcgggcggtttgtcccacgcgcagtgctgatggacctggagcccggaaccatggacagcgtgcggactgggccgtacgggcagatattccggcccgacaacttcgtgttcgggcagtccggcgcgggcaacaactgggccaaggggcactacacggagggcgccgagctcaattactccgttcttgacgccgtgcgcaaggaggccgagaactgcgactgccttcaggggttccaggtctgccactcgctcggtggaggaaccggctccggaatggggacccttt

SEQ ID NO: 226119 - DNA, 514 bp, Glycine max
gaacaaagcacttagtgctattcaataattacgaaaaaccaacagcgagtgttgtttttgtttggtccaggctggaccagggaatgaatagagatgagaggctttcggttgaagagaactgagttaagcggcgaagccaaacgcagaatcggcggcagaaattgccaccggaagcacgtcgaagacgggtgaaccaaacacaaaattccatccaccacttctcttttcaatccccaactcaaatctgtgaagaaaatctcaatttctaaattgtaattcttagcactactgctagtagtagtaaaaaaaaacaattagaaagtagtagagtgtttttttttctttttttcgtttgttttacttttaagatgggtgagaagagcaacgttggcggcgacgcgattaacacgacactgcttcacgggaagtacgagctgggccggctgttaggccacggaaccttcgcgaaggtgtaccacgcgcgccacctgaagacgggaaagagcgtggcgat

SEQ ID NO: 226120 - DNA, 408 bp, Glycine max
ctacatctagatcgcgagcggccgcccttcttctttgccttatttatagtggcaagtttggttttgacaatggtgagggttcactgaggagaaagatgctctgaagagcatgtacaacgctcgagaagcgcgggaagcgccaggtaatgattaggccatcctccaaggacatcataaaattcctattggtcatgcagaagcacgggtacattggtgaggtcgagtatgttgacgaccacagggatgggaaaatcatggttgaattgaatgggcggcagaataactgtggggttattagccctcgctttgatgttggcgacaacaagaatggaggttggaccgcaagactactaccctcaagacagattgggtatattgtctggacaacctctgctggtatcatggatc

SEQ ID NO: 226121 - DNA, 564 bp, Glycine max
caatggacattgatcccatttctgatacagttaccaatgggtttgaagatgataccaagaagaagggggaatttccatgtagttctgctgatggtacaagaaaagataatagaaggcttaatgtgccagtgaatgagaatgtctatggtggaatgacaaaggcagagatctcagaagctcttgaaaaagaacttcagttagcccaacaggacagaattgtagagcaaaccaaagaaaagaagaatagcttggagtcttttgtttatgatatgaggagtaagctcttccacacatatcggagctttgcaagtgaacaagagaaggattgcatatctagaagcctttattagactgaggaatggctttatgaggatggagttgatgaaactgaacatgcttatttttcaaaactggaagatctgaaaagcctggagatccaattgagaattggtgcaaagatgattaagaaagagtgcatgctacacgagatttattcaaggtgcattttaaagcattgtgccttctgcagaatacccttccaccccaggatatagaaactgatca

SEQ ID NO: 226122 - DNA, 440 bp, Glycine max
ctaaaggctgcactctcttttatccctcaaaaaccaaaaccctaatggcagagcgcggaggtggcgaccgtggcagcgaccgtggcggtttcggacgcggctttggtgggcgagggcgcggaggtgacaggggccgaggccggcgccgaggtccccgccgcgaggaagaggagaaatgggtcccagtgaccaaactgggccgcctggtgaaggagggaagaatccgaagccttgaacagatctacctccactcgctcccgatcaaggagcaccagatcatcgacacgctcgtgggtcccaccctcaaggacgaggtgatgaagatcacgccggtccagaagcagacccgggccgggcagaggacccggttcaaggccttcgtcgtcgtcggagacaacaacggccacgtcgggctgggcgtgaagtgcagcaaggaaagt

SEQ ID NO: 226123 - DNA, 491 bp, Glycine max
cagaccagttataatcaggtccgcaaaacacctgctgataggcctatcattgggatggtggcagctgactggaacaaggatggggattctcaagctcctcctccgaagtggtgggatggtaacggcttaccaaattcaacctataagtataaagaagatcagaaagtaaattggcatgcaacatcattagaagagaggttcgagaaggcattatctgaggagactgacatctgtcaaaggaaggatacatgtggcaaatcaattccttttgatgagaacgaacaaagtgatactgctctatctcaaatgctatcttgaactcatccacaggacgagctgtcattttgatgtctatggaccctctctgctcttttgactggttaaagaaatattgaggcatttctctaaactaagtctgaatcctgctcgttcaacatgctgtatggttggaacaaacattggcttattcgaattttgtggccatataagac

SEQ ID NO: 226124 - DNA, 435 bp, Glycine max
ggctcgagggcacggcgctatataagaaatgtacagttgatattctgagcagattctggcactggagggcgtggagggtacttggaccatgatggtatcatgagagacattatgcagaaccctttgctgcgcatactagcgctctctgctgtggacaccctggagagctcatatgcctacgctatggaaaacgagacggtcaagggacttcggagaatgtgacccatgcgactcgctgctatagcatgggacaggttatgagccgccatgacgaggcgtacatggccagcatacgtgggtgacaggactgtaccaagcgggagcttatctccgacatgtgctgcatctgacctcttcatagatactgctatacgggacgatgtacctgtcctaatggacgctgtgtaagcgttacacgacataagagctgagata

SEQ ID NO: 226125 - DNA, 342 bp, Glycine max
ggcattgaaagcaacttaatggatcttaaactcgagatgcataattctgaatgcattattctttgcaagagtgtcccaacagacattattcaaaacactcatttcattcaagtaaataaattatgtacgggcaaaacgaacaaaaatacgcctctggatggggctcctgcaagaaggacagtcttgcattccttggttctcatggagctcattgcatgttgtgcaaactacctgatgagcacatgggaggaatacaacagacatcttcgcagaaaggcacatgacacattctctttcccgttttacaccccctatcaaagagcagtcatttaaatttgaaac

SEQ ID NO: 226126 - DNA, 472 bp, Glycine max
caactgtggaatcaaaggggcatgctgagaagtgtgccaagagaaagaggaagaaccagtatcgtggaatccgtcagcgtccatggggaaagtgggctgctgagatccgtgacccaagaaagggggttcgtgtttggcttggaactttcagcactgctgaagaagctgcatgagcttatgatgctgaagcaaggaggatccggtgcaagaaagccaaggtgaatttcccggatgagccttcaggcgctgctgcttcctcaaaacgcctcaaggtgaatccagaggctcagccaatgaacgaaaatctgaacaccgcgaagccgactatgaaccagatgttcaattttggtcacaatccggagggctactacagcccaatagatcaggtggaacagaaaccactggcttaccagtgtgtgaacccgtgcctgttttcttgatacggagatcaagtgtcaactgtgacttgcat

SEQ ID NO: 226127 - DNA, 476 bp, Glycine max
gttttattttcgattccatggccaaagctgttggagttcggttccaccctactggtgttgaattagttgtgtactttctgaagaggaaagtgatggcaaaaaaaatctgtgatggtttcattgctgaacttgacatatacaagtatgctccttggggtctcccagataagtcttgtctgagaactggagaattggaatggtacattttctgcccgctagagaagaaatatggcagtgggagcaagatgaagcttgctaccaaaattaggtattggaaagctactgagaaggatagagttgttcagcacaataatcgaactgtggggatgataaagacactgatatttcacacgggtaaatcgccttgtggggaaagaactgattgggttatgcatgatcattcataggctcgaagatcaggacctcgctgacaaagggattgctcaggattcctatgtaatctgcaaggtctttca

SEQ ID NO: 226128 - DNA, 550 bp, Glycine max
  unsure (1)..(550): unsure at all n locations
ctagtcccaaagagctaacaagagattcaagaccggcatggctaatgaagaggaacagaaaaaccacctcttcggcatcaaagatctcggtcacaagactctccttcagagtgatgcactctatcagtatatacttgaaaccagtgtctatccaagagagcacgagtgcttgaaagagatacgcaagatgactgcaaaacacccactgaacatcatggcaacaccagcagacgaaggacaacttctgagcatgcttgttaagctcacgaattcaaagaacgccttggaaattggtgtattcactggttactctctgctctccactgccctggctcttccccctgatggaaagatcttggctttggatgtgaatcgcgaatactatgagttaggattgccaataattcaaaaagctggagtggctcacaagattgatttcagagaaggacctgctcttccgtttctcgacgagatgcttaangatgaaaataaaaaggcgtcgttggatttcgtttccgtgatgctgatacgacaattacttgaactacca

SEQ ID NO: 226129 - DNA, 500 bp, Glycine max
ctcgagccggtttcaccgcacgaatatcttgttgtttggagcgatccgagaaaaactctgtaaacatgttggtttaccaggacctccttacaggtgatgagcttctctctgactccttccgttacaaggaaattgagaatggaatgctgtgggaagttgaggggaagtgggttgttaaaggagcagttgatgtagacattggtgcaaacccttctgctgagggtggaggagaagatgagggagttgatgatgcagctgttaaggttgttgacattgttgacacattcagacttcaggagcaacccgcattcgataagaagcagtttgttaccttcatgaagagggttatcaagaatttgactcccaagctcgatgcagagcaacaggagttgtttaagatgcacatcgagggagcaactaaatacctgctctctaagataaagatttccattttttgttgtgagagcatggtgatgatgcttgcttggtctttgctacta

SEQ ID NO: 226130 - DNA, 469 bp, Glycine max
gataaacacaaaatcaagcacacaagcaaattcacttctctgttctgacacacatattaagttcccgagaaagatctagagagtaattaagatgggtacgtggttcacaaatgcaaggccgtatctgctgttagtggcagttcaatttgggtctgctggcatgttcatatttgcgatggatgctataaagaagggtatgagccattacgtgttcatcgtctatcgtaatgccatcgcctctgtatctcttgctcccttcgcatttgttcttgaaaggaaagttaggcccaagatgactttccgggtattttcagagattatggcactggctttcttcgaaataatactggaccagtgcttcgccctcttgggcatgaaattcacgtcggcatctttcctatctgctgttatgaactccgctccctctgttacttttgtgatggctgtcattctaagaatggagcacatg

SEQ ID NO: 226131 - DNA, 518 bp, Glycine max
tcggctcgagggaagtttggtgcttgaacttgaacgccgaacattgcgattcagagagagagagagaagagaatggccatggcccgaagagtccctcgtaatgttttgggattggtcaaaaggaacatgtccttcaaatctttggatcccccttcctgcctcacccacggaatccacgtctttcattgccccgatgccgttggaattgtagccaagctatccgactgtattgcctctagaggtggaaacattctcgccgctgatgtttttgttcctgaaaataaacatgtcttctactccagaagtgattctgttttcgatcctgttaaatggccacgggtgcaaatggaggaggacttcctaaagctttcacaaacattcaaagcaataagatctgttgtaagggtgccagctctggatcctaaatataagatagcggttcttgcatcaaagcaggaccactgcctggatgatttattacatggatggcaagatggaagacttccagtagatatcac

SEQ ID NO: 226132 - DNA, 591 bp, Glycine max
  unsure (1)..(591): unsure at all n locations
gttattttctacgcagtagctccggaattaattcccgnnnncggcggccgccctttttttttttttttacaactgaagtgggatattatttgaatatgaatgtagatgcacaccattttggtgcactgtattttggttattttctgtttccgtcaaaatacaacagtcctcttttcttcataaggtaacacccgaagttcacagtaagatctgatagccttggaaaggcattgtttctctaggttttctgatttctgcacaaagctctgcaagttatctctgtgagaaactctctcaaccatttgttcaattataggtccagcatcaagttcttcagtcacaaagtgacttgttgcaccaattaatttaacacctgcctcaaaggcctgtttagatggattaccacccttgaatgatggcaaaagaccatggtgaatgttaattatatcgttcccatagctccttaaaaagtttccagataatatctgcatatatcttgcaagtactaaaatatcagtattctgaaccagctgcaatatctccccttctcttttattttctttagtcgtacataagtaatgataaggaata

SEQ ID NO: 226133 - DNA, 498 bp, Glycine max
gggcttccataaccatgggtatctccaccatcgcttctccttttgactccatcatcttcgcaccggaattgacaagtgcgtcaagaaaaacatccaactctttctcatccagaaatgcggattctcagaatccaaagccttgacccaacgagttgagctcttcaaaacctacggaagcacccttgccggcttaagagcacaaggcctcgatatcactgcagaggactaccacggtttcgtgcacggaaggctaccttacgactccatcgacactgatcatcagttacggaacctcctcttgagcatcaaacaaagaaaaattgtttttactaattctgacaggattcacgcgatgagggcgctggataggcttggggtcaaggactgtttcgagcaaatcatatgcttcgagactataaacccgaaccttccctattcaacccgacccgacgaattccccatcctccttaaaccttcgctcgacgccttcaagatcgc

SEQ ID NO: 226134 - DNA, 435 bp, Glycine max
attctccatacctcaacgaagaggttaaagagacggcaacactttgctgtccgccttgaccgagcagagcttcgtcttggccctcgattttgccctaaagtactctcagtcacaacagacaccgtcgtcgtcgtcgtcgtcatcaatggcaccgaagcagaccaaggctgagaagaagatcgcttacgatgcgaagctgtgcgacctaatggaggagtacggccagatcctcgttgtgaactccgataacgtgggatcgaaccagcttcagaacattcgcaagggtctccgtggcgactccgtcgtgctcatggggaagaacaccatgatgaagcgctcagtcaggatgcacgctgagaaaaccggaaacaacgcctatctcaaccttattccgctccttgttggcaatgtgggattgattttcaccaaaggtga

SEQ ID NO: 226135 - DNA, 355 bp, Glycine max
gacagaaacgttgaagctttaattaactatggaaattaaaagtagttgcaatgtaacatgaatacactaaaataacacctgaaatgaaaggcaaacacaacttcaattctaaccaaataaactcaacaaaagcattacataaattagtcaaacagactgaaacccatgtcatcatcagattcttcagctggttcttccttcttttcctcttccttggctgcagcaggagcaccagactcagcagcaggagcagcaacagcagcgacagcaaatttacttggatccttcagatactccttgacctatgctgcctcagggaaagaataatctgtctcaacccgaacagcaagaacat

SEQ ID NO: 226136 - DNA, 377 bp, Glycine max
attctccatacctgaacgaagaggttaaagagacggcaacactttgctgtccgccttgaccgagcagagcttcgtcttggccctcgattttgccctaaagtactctcagtcacaacagacaccgtcgtcgtcgttgtcgtcatcaatggcaccgaagcagaccaaggctgagaagaagatcgcttacgatgcgaagctgtgcgacctaatggaggagtacggccagatcctcgctgtgaactccgataacgtgggatcgaaccagctccagaacattcgcaagggtctccgtggcgactccgtcgtcctcatggggaagaacaccatgatgaagcgctcagtcaggatgcacgctgagaaaaccggaacaacgccta

SEQ ID NO: 226137 - DNA, 406 bp, Glycine max
gacagaaacgttgaagctttaattaactatggaaattaaaagtagttgcaatgtaacatgaatacactaaaataacacctgaaatgaaaggcaaacacaacttcaattctaaccaaataaactcaacaaaagcattacataaattagtcaaacagactgaaacccatgtcatcatcagattcttcagctggttcttccttcttttcctcttccttggctgcagcaggagcaccagactcagcagcaggagcagcaacagcagcgacagcaaatttacttggatccttcagatactccttgaccttgtctgcctcagggaaagaataatctgtctcaaccgcaacagcaagaacattcttgtaggcattgacaaacatgtgtggtgcagcagcaagtgttgggtatg

SEQ ID NO: 226138 - DNA, 491 bp, Glycine max
gttcggttcagcaacaatgttatcggactccttaacttcctcaccttcctcttgtccatcccgatcctggtggccggagtgtggctgagcaagcaaggcgccaccgagtgcgagcggtggctggagaagcccgtcatcgcgctcggcgtcttcctcatgctcgtctcactcgccggcctcgtcggcgcgtgctgccgcgtgtcgtggctcctctggctctacctcctcggcatgtctgtcctcatcgatcttctcttcgccttcaccattttcgctttcgtcgataccaacaagggcgctggtgaagttgtttctaatagagggtatcaagagtataggcttggggattactcgaattggctgcagaagaaggttaataacactaagacgtggaacaggatcagtagttgcttgcattctgggaaagtctgcactgagtttcaatccaagtttctaaacgacaccgttactcagttgtacaccgagcacct

SEQ ID NO: 226139 - DNA, 466 bp, Glycine max
atataaaattgagcaatttccataacagactgtactgaaaacagtataatccagcatacacataaagcccaaaaaaataaatccaacatataaaccagattgtctagcaaactgatctactcactagtaatactgagtaatctagctaacgagaatatcccttccaattttccctcctattgttcctgaatgcacagcaccctatggagtatacaataatgagaagaacaaggaatacgatgttaacaacagccaccctcttccattcagtcttgaagttttgcagaaagccagccttgcatgattggcaattgaagcacagaactgtttgattgttattccaagcatcacagtcaggattgttgtaactggtcacatttccaggcttcgtccagctcgttgaattctcataggtaaataggcattcttctgcaggtttacagcatccagactgaagcgcggacag

SEQ ID NO: 226140 - DNA, 373 bp, Glycine max
gtcttcataaacgcctttcttctccgtttccgtttcctcgttcgaattcgctttttgatctgcgaaaatgagagagtgcatctcgatccacattggtcaggctggtatccaggtcggaaatgcttgctgggagctctactgcctcgagcacggtatcgggcccgatgggcaaatgccaagtgacaagacagttggcggtggtgatgatgctttcaatactttcttcagcgagactggtgctggaaagcacgtgccacgtgcagtgtctgtagatcttgagcccactgatcttgatgaggtgagaaccggaacttaccgacagctattccacccagagcagttcatcagcggcacagacgatgccgacaacaac

SEQ ID NO: 226141 - DNA, 488 bp, Glycine max
  unsure (1)..(488): unsure at all n locations
aaaacaacatagttcaatattgccattcagtttaggtacgtaacaggagcagcgaagcataaaagcaatgcatccaaattaaaaccacatcggtactggtacacatctgaacatcaaacacaacagaaaacagaccacaagaacaagaatctgaagtagattctagtagtcttcatcctcttcctggccctcaccagactcagcacccacttcttcataatccttctcaagggctgcaaggtcctcacgggcttcagaaaattcaccttcttccataccctcacccacgtaccagtggacaaaagcacgcttggcatacatgagatcaaacttgtgatcaatacggccaaacacttcagccacactggtggagttngaaatcatgcaaactgccctctgcaccttggcaaggtcgcctccaggaacaacggtaggtggctggtagttaataccacacttgaaaccagtagggcaccaatccacaaact

SEQ ID NO: 226142 - DNA, 505 bp, Glycine max
ccggaggatcactattttctcttgactgagagtccgttgacttcgcctgagagtcgcgagtatactggggaaatcatgtttgagacttttaacgtacctgggctttacattggtgtgaattctgtgcttgctcttgcagctggttacacaacatctaagtgcgagatgacaggagttgtagtcgatgttggagatggggctgctcatgttgtacccgttgcggacggctatgttattggtagctgcatcaaatgaattcctatttctggaaaggatattactctttgtgtacagcagcttatgcgggaaagaggagagaatgtaccacttgaggactctttcgaagtggcacggaaagtgaaggaaatgttttgcttacacctgctctgacattgagaaggaatttaataagcatgacttagaaccagcccagtatatgaagcattggcgaggcattaaaccaaggacaggagcaccatatgactgtgatattggctatgaacga

SEQ ID NO: 226143 - DNA, 550 bp, Glycine max
ctttgcagtaacaacttcaaattcatttgcaatttagcagcaaagcaatctatagccttcgattaccaacatgaaaatcaagcaaattctcttgttctcactcctactacttgccccctttttctcaatcaccactttagctcaatcaccagctgcagcccccaaagccccagcaaaacctgcaccttcaaaacctgctcctgccacaccggctccagcgcccgcaaaaccattagtcccttcattaccccagtcaccctcttcaggtgttgattcttctggcagccaagacattgtgaagatcctaaggaaggccaagtcattcaacactctaatccggttgctgaaaaccacccaaatcatcaaccaagtgaatgcacagcttgtgacctcaaaaaacggaagcttaaccatccttgcaccagatgatggtgcattttcagaactcaaagcaggttactttaactccctaggagataggcaacatacagcactgatacaggatcatgttcttcccgttatgtgttcagctccactctgatgctctgag

SEQ ID NO: 226144 - DNA, 254 bp, Glycine max
ggctcgaggaagaactgatcagcttggatgaatatgttgagaacatgaaacctgatcaaaaggatatttattacatggctgctgacagtgtgactagtgcaaagaacacaccgttcttggagaaaattgcagagaaggatcttgaagttctgtttttggtggatccaatagatgaagttgctattcaaaatcttaaatcatacaaggaaaagaattttgttgacattagcaaggaagacttggatctaggtgat

SEQ ID NO: 226145 - DNA, 277 bp, Glycine max
tcgtcctttttttttttttttttttttttttatcacctagatccaagtcttccttgctaatgtcaacaaaattcttttccttgtatgatttaagattttgaatagcaacttcatctattggatccaccaaaaacagaacttcaagatccttctctgcaattttctccaagaacggtgtgttctttgcactagtcacactgtcagcagcaatgtaataaatatccttttgatcaggtttcatgttctcaacatattcatccaagctgatcagttcttc

SEQ ID NO: 226146 - DNA, 377 bp, Glycine max
cacagcaaaggttggttacggctggctgtgttgtagctgtgaagtgtgccatgagggagaggattaaccattctcgtggaatccgtcagtgttcatggggaaagtgggctgctgagatccgtgacccatgaaagggggttcgcgttaggcttggaactttcaactctgctgaagaagctgcaagagcttatgatgctgctgctgggaggttcctgggcaagagagccaatgtgaatctcactgatgagcctgttggcgctgctgtttatgtgtaacgcctcaaggagaatgcagaagctgagtcaatgaaagaaaatctgaataccgtgaagccgaatatgaaccagatgctcaattctggtcacaatctgcagggc

SEQ ID NO: 226147 - DNA, 385 bp, Glycine max
gatgcaaaactgagatgtctatctataaagaaaaagggaactcaacaacatcatttatgtcttacccacaccatactcccccaaaatatcaaacgcagtaaaagtaaagcacaagggggaacaggcttcaagggtacaggaccgtttgaagaacaacaacataaatttacactttcaaggcataaaattaaatgaaccttccaatccaggaaatccaattaccatagttcttttcctgattaagttcaaataagagaacccaaaattgaaaataggacagggatatgacaaaagggttctagcaaggcctcacttggcacccaagtttgggaaatgcccaggatcttcaatggatggagcaggtgcattgttggtggaacttcca

SEQ ID NO: 226148 - DNA, 296 bp, Glycine max
cccggagttgtttgacctgattgacaatgggagcttggttttggttcataagaagaggttcggtcctgtccctttttggaggaccgaattcgtcgaacctgaattcattaggtagaacggaaccacccatgttcctgaggtttccgatgcggcagcggaacgcgcggtgcagtgctctgacgccagatgaagtcgttgctgagctctgcgaaagcagaactgggatcatgtctgctactggcactgatgaggttggcagacaactgcgttctgctctgaccggcttgaatggtact

SEQ ID NO: 226149 - DNA, 493 bp, Glycine max
gaatcttggaaattctaataaaaactgaaaaactaaatgggcttgcttcatgttcctccatttatgaattcatataaggcccataaaaggatgccaatgattgtgtcccttactaaactcttgattagatcatcaatccaaccatttgaacctcctccatcatatgaatttttccctacaaggtctcgaaacctcaaatttcccgtgtcggataacaatgcatatattacaccgttcatatggccttttccaatgacacccacaacatttttactgttattcacagctttgctccgcttcaatgaccatgcaagataagtatctcgttcatgtatgagaagtggcaataaagaaggatatgaaaaactcaattgctcataaagttgaaatgtaccatcatctgaacttgcttcctgcaacttgagcttatttatagaactgttagatgaagatgctatcccccgaataaattgatacactaaacttagtttct

SEQ ID NO: 226150 - DNA, 300 bp, Glycine max
  unsure (1)..(300): unsure at all n locations
tcgctgcantgcagcctgcctantgcagacgntgcgcctgcgcctgtgcctgctttgtgtgtgtgcgtgtgtgtgtgcgcgcgtgcgcgcgcgcgcgcgcgcgcgtgcgcgtgcgcgcgcgcgcgcgcgtgtgcgcgcgcgcgcgcgcgcgcgcgcgcgcgcgcgcgcgcgcgcgcgcgcgcgagcgcgcgcgcgcgcgcgcgtgtgcgcgcgcgcgcgcgcgcgctctctcacactcacacacgcgcacacacgcgcgcacacgcgcgcgcgcgcgcacgcacactcacacacacacac

SEQ ID NO: 226151 - DNA, 612 bp, Glycine max
gacaaaagctaaaggaaagaatatcaacaaggtaaagtagattccttactagacatggcgttgaaggacacattctacatatctcatggatcaccaactttgtccatagatgaatccattcaggccaggaagttccttcagtcatggaagaaggacgtgtttcctcaaagaccctcttcaattcttgtcatctctggtcattgggaaaccgcagttcccacggtcaacgtcgttgactccatcaacgacaccatctacgatttctatggcttccccaaacaaatgtaccagcttaaatatcctgcacctggagctccacaattggcacggagggtgaaggaactactcaagaaatctggtttcagccatgttgatgaagatacaaagcgaggacttgaccatggtgcttgggttcctctctttttgatgtatccagaagctgacatccctggttgtcagatatctattcaatctcagcaagatggaacttatcattataacttaggaaaggccttggcccctctaaagatgatggtgtattgatcatgggttctgggaagtgctgttacaacttgagagcacttgagccctactccactggtgctccctggc

SEQ ID NO: 226152 - DNA, 494 bp, Glycine max
aaagcattgaattcaaaaacttaagttcattccttgtgttttgctttcttcctcaaaaccaaacatgtcgaacacatgcggcaactgcgactgcgctgacaagactagctgcaccaagggaaacagctatggtgttattgtagagactgagaagagttacatcgagactgttgtcatggatgttccagcagctgagcatgatgggaagtgcaagtgtggcactaactgcacttgcacggactgcacctgtggccattaaggaatatgtatgaaaatgtaattgccatgtgtttggcaatacaaatatccaaataatgtaatcttcgtatgaataaatgtgtgtgctgttatcctacttcaggtctgtgtagtcatgcagtctgaatcatttcaagttcctgtcttagttaatataacagccatgggtgtggcattctatggtttattagactaaaataagtggtaatctacgttcataatcccttttcacagct

SEQ ID NO: 226153 - DNA, 511 bp, Glycine max
  unsure (1)..(511): unsure at all n locations
gcagactcaacactctcgctagacacttccttccgcaaatggcttctcacgacagcatctccgcttctccaacctccgcttctgattccgtcttcaatcacctcgttcgtgctcccgaagatcctatcctcggggtaactgtcgcttataacaaagatccaagtccagttaagctcaacttgggagttggtgcttaccgaactgaggaaggaaaacctcttgttttgaatgtagtgaggcgagttgaacagcaactcataaatgacgtgtcacgcaacaaggaatatattccgatcgttgggcttgctgattttaataaattgagtgctaagcttatttttggggctgacagccctgctattcaagacaacagggttaccactgttcaatgcttgtctggaactggttctttaagagttgggggtgaatttttggctaaacactatcaccaacggactatatactngccaacaccaacttggggcaatcacccgatggttttcacttagca

SEQ ID NO: 226154 - DNA, 557 bp, Glycine max
tcggctcgagagatgatttgctgctgtaacaaaatggatgctactacacccaagtattccaaggccaggtatgatgaaattgtgaaggaagtctcttcctacttgaagaaagtaggatacaaccctgacaagattccttttgttcctatctctggttttgagggagacaacatgattgagaggtccacaaaccttgactggtacaagggtccaactctgcttgatgcacttgaccagattagtgagcccaagaggccctctgacaagcccctcaggcttccccttcaggatgtgtacaagattggaggtattggaactgtgccagtgggacgtgttgagaccggtgtcttgaagcctggaatggtggtgacttttgcaccaactggactgacaactgaagtcaagtctgtggagatgcaccatgaatctcttacagaggcacatcctggtgacaatgtgggattcaatgttaagaatgctgctgttaatgatctgaagcgtggttactgtgcctcaaactcataggatgaccctgcaaggaggctgctaacttacag

SEQ ID NO: 226155 - DNA, 567 bp, Glycine max
  unsure (1)..(567): unsure at all n locations
gtattcctcagggctgctccgannnccttttcgcgggtcgacgcagctactcttttttttttttttttttttttttttttttttttgaacactacaaatagaaagttgacatttaataaaccaaagcaacacaacgcagcaaagtcctgaaactcgctgcgcttaacaaaaatgtaatcaggggttccgacaaacacaacacattaaaacacagataaataaaagcaattttgccaccgtcgatcaagaacccagttctgggaacaacagttgcgagatgatggtggagacttcaaactttgtccgaaaaacaagctacctagaaaagaagacacaagagtacagaaaagaaaccaacatttattggaaccaacatcccctgatgaaccagcccgcacgattcacttcttcttctgggcagccttggtgaccttggctccggtaggatccttcttctcaacgttcttgatgactcccacagcaacagtttgacgcatgtccctaacagcaaacctaccaagtggaggatactcggagaaagtttcaacaaccatggggttggttgga

SEQ ID NO: 226156 - DNA, 565 bp, Glycine max
  unsure (1)..(565): unsure at all n locations
ctttccttccatagaaaggaatcaagatttttcccaataaactatgggtgacatctcacaaatcacctgctgattttgctgccatttcgagaggggacgaacgagacagcaacatatcatctccgaccaaatcccgttcattcaggcagtgttcatttctctgcccctcacttacttattcactcccaactccaaaaccatcatcgtcaatatggcacaagcacacgctctattttctcctttcaatcctcgccttcttccttcttcctcccccattctccgacgccgtttcttttcccttccaatttctccgttaactcaccggaccgtgattgcctccgaaaacgtcgccgtttcgcctgatgccgcctcgtctactcactctctcccccaggtgattgaaaccctgatttccggagtggatttatcggaagaagaagccgaagcgtgtctcaacttgctgctgcacgaaccatacgaggccttaatcagcgctcttctcgtgcttctcagagcccaaggagagacctatgaagagttgtggngttgccagggcaatgtttaa

SEQ ID NO: 226157 - DNA, 466 bp, Glycine max
gaactgataaaggaaacacttttattaagacttcaaatcacagcattcaagataatacaatacgcaacactttttagaaagccttataactataaactataaaagctttgcccagatgaaattacactgcaggcaaatttttcattcacctttagcttagttatcttcattgtcgcccaaattattctttgtcacatctttgtattagccctggatggcaacaccaaggggagcagcatccataggtattatcttctcaatttctacacccttgttgttctggttttcataggctgaaatgtgcactccaagtgctgctctaccagagggatcaaggttgttagaccaagcagcatcccactcaacagctttggctgtgctacatgcaacacttgctcctccaggaacagtgagcctagctgagttctgagggaagacctctcaaagatcattctgtagaatatgc

SEQ ID NO: 226158 - DNA, 461 bp, Glycine max
aattcggctcgtggttggagcatcgctggctccacttgttcgtgttcttcttatagtgggtcttccctttgtcttatccaatcagcaaggttcttgattggatgttgggcaaaggacatgctgcccttttgaagagggcagagctcaagacttttgtgaattttcatggaaatgaggctggtaaaggaggagatttaacccacgacgagacaaccattataaccggtgcacttgaattgacagaaaagactgcaaaagatgccatgactcccatatcaaaggcattttcccttgatctggatgcaactctaaatttggagacactgaattcaataatgacaattggtcatagtagagttccggtttatgcaggagaaaaaaccaatattattggacttgttctggttaaaatctatttatggctgattcaaaggctgcagttcctctaagaaaaatgctca

SEQ ID NO: 226159 - DNA, 377 bp, Glycine max
gaagctttgatagagagagagggaggagggagagtgttgacgctccatcaagatgggtatttctagggattccatgcacaagaggcgtgccactggtggcaagaagaaggcatggagaaagaagagaaagtatgagcttgggcgtcaggccgcaaacaccaagttatcaagcaacaaaactatccggaggattcgtgttcgaggtggcaatgttaaatggagggcattgaggatggataccggcaattactcatggggtagtgaagcagttactcgcaagactcgtattctagatgttgattacaatgcctcaaacaatgagcttgtgcgaactcagaccctggtcaagaaagctattgtgcaggtagatgctgctc

SEQ ID NO: 226160 - DNA, 518 bp, Glycine max
tgttgatggaactctctgtgattctgatccactccactattatgctttgcgtgaaatgctccaagagcttggttttaatggaggtgctcctataacagaggaattctttgttgagacattttctggcaagcacagtgatgatactgccttggttgtctttcctggtgatctggaacgaggtttaaagtttgtagaagataaggaagccatgttccggagattggcttcagagcaactgaatcccttgaaaggccttgataaagtgaggaaatgggttgaaaaccatggtctgaagagagctgcagtcaccaatgctccaaggaaaaatgcagaactcattatctcaaaacttggtctaacagatttctttgatgctgttattattggtgatgaatgtgaacatgccaaaccttatccagaaccctacttgacagcacttgaagttctgaaggcatcaaaggatcatgcatttgtatttgaggattctgcttcatggataaaagctggagtggcagctg

SEQ ID NO: 226161 - DNA, 501 bp, Glycine max
  unsure (1)..(501): unsure at all n locations
gttcggcccctctcaacccttcaagggcgctaggatcaccggctccctccacatgaccatccaaaccgccgtcctcatcgagaccctcaccgccctcggcgccgaggtccgctggtgctcctgcaacatcttctccacccaggaccatgccgccgtcgccatcgcccgcgacagcgcctccgtcttcgcctggaagggtgagaccctccaggaatactggtggtgcaccgagcgcgccctcgactggggccccggcggcggccccgatctcatcgtcgacgacggcggcgacaccactcttctcattcacgagggcgtcaaggccgaggagatctttgagaagaccggccagttccccgacccggcttcctccgacaatgcggagttccagatcgtgctgagcatcatcagggatggcttgaagaccgatccccagaggtaccacangatgaaggacagaatcgtctgtgtctccgaagaaaccaccaccggtgtcaagag

SEQ ID NO: 226162 - DNA, 499 bp, Glycine max
gtctattttcatcatagttggtttgtgtggtttcttctatatattgggtttgtggcaacgaagcggttttggaaagggagacagcatagctgttgagattactaaacatacagattgcagtgttctctctgatctaaactatgagacccaccatgatgatgattctggaacacctaacagttctgacacacaagtcagggagttcaagccgtgtgatgatcgctacattgattacacgccttgtcatgatcaagcgcgagcaatgacatttccccgagaaaatatggcttatagagaaaggcattgtcctcctgatgatgaaaaattgtattgtctcatacctgccctcagaggatattcaacaccattttcatggcccaagagtcgtgattatgtaccttatgcaaatgcgccttacaagagcttgacagttgagaaggctgtgcagaattggatacaatatgaaggaaatggtttcaggttcccaggtggtggaacg

SEQ ID NO: 226163 - DNA, 344 bp, Glycine max
tcggctcgaggacggcggcaacgagtggtacgagaacaccgagcgccgcatgaacctcgtcgccgacaaaggcctcctctacctcggcatgggcgtctccggcggcgaagacggcgcacgccacggcccctccctcatgcccggtgggtcccaccatgcctactccaacgtccaggacatcctccacaaaatcgccgcccaggtcgaggacggcccctgcgttacctacatcggcgagggaggctctggaaacttcgtcaaactggtccacaacggaatcgaatacggagacatgcaactcatctctgaagcctacgatgttctgaagcacgtcggtggcttga

SEQ ID NO: 226164 - DNA, 457 bp, Glycine max
gggagccaaatgacatgcctttggtttattaagattaaaaacagtttttgcaagaaaacaatagctggttttttcctaccaaagatccttaaagaaacaaacaatttcaactcaaatgctgcactggaatgcacgaccttttaacaaacaaccaaaacccaaaatcaatcaattgggggcaccaacttcagccccacttttgggagcgagtttcgtccactcgggatgaaaagccccagggggatcaaccctttcgtaagtatgcgccccaaacaagtccctttgagcctggacaaggtttgccggaagtcttgccctccgattgggttcaaagtaagcaagactggcacacattccgggagtgctaatcccagccgaaaccggcaaccccacaaaccttcttcacgcagcgtgtgtttgcaccatttcccttggaaactccgggtccacaataaac

SEQ ID NO: 226165 - DNA, 499 bp, Glycine max
tcgggtcgagtggatgtcctggcaagattttcagattcattttcgatcaatatatatttgccgtatctacccatcagagatgcgtcattctgttcatggtcaatggcgtggttacagtgccggggggtgtcaggattatgatacatggaatcaaaatccacagttcagactgactgcaactgggcaagatgcatcatttcctattcatgtattcattaccttgactcagggtgtgggattttcaagaacaacagctggttttagaaattatcaatccagccatgattcacagatgttctacattggaatgaggatactcaaaactcgtggcagacgtgctgctttcaatatctacctacatgaatcagttggtgggacagactatgttaattctcgagaaatatcctgtgaaatggttttggaacctgagccaagggatatactatagttcctactactatacacccccgtgaagaagcaccatttgtactttctggtt

SEQ ID NO: 226166 - DNA, 558 bp, Glycine max
ctctggcgagcccccgtcctacctaaccggtgagttcccaggcgactacggctgggacactgctgggctttccgcagacccagaaaccttcgccaagaaccgtgaactcgaagtgatccactccaggtgggccatgctcggagccttgggctgcgtcttcccggagttgctgtcccgcaacggggtgaagttcggagaagccgtgtggttcaaggccgggtcccagatcttcagcgagggtgggctcgactacttgggcaacccaagcctgatccacgcccagagcatcctcgccatctgggccacacaagttatcctaatgggtgccgttgaaggttaccgtattgctggtggccccctcggtgaggtcactgacccaatctacccaggtggcagcttcgacccattgggccttgctgatgacccagaggcttttgctgagcttaaggtgaaggaactcaagaacggacgattggccatgttctctatgtttggcttcttggtcaggccattgtcaccggaaagggtccatcggagaccctcgccgatcaccttgct

SEQ ID NO: 226167 - DNA, 330 bp, Glycine max
gtaaaaagcaagtaacattaagttggattcggatacacaagataattcacattatctgaagtacttcaccaaacacaaatctaaaaactctcaaaagtcatttcgttctttgacgctcactttccggggacgaagttggtggcataggcccaggcgttgttgttgacagggtcagcaaggtgatcggcgaggttctccaatggaccctttccggtgacaatggcctgaacaaagaagccaaacatagagaacatggccaatcgtccgttcttggggtccttcaccttaagctcagcaaaagcctttgggtcatcagcaggcccaatgggt

SEQ ID NO: 226168 - DNA, 555 bp, Glycine max
  unsure (1)..(555): unsure at all n locations
caagaagcaccctgcagcactgataagaaacgacaaaacacatctaatatcagtggtaatggtaaagttattttgaaagaggaacatgtaaatgagccagtaccaaaaaaaagaatgaagaaaggtgacttaacagacatggattctccagtaaaacctggaaaaaaatccaagtttgttgtacatgcagccggagatgtggggatatctgctgatggttaccgatggcgcaagtatgggcagaaaatggtgaaaggaaatccacatcccaggaactactacagatgcacttctgctggatgtccggtcagaaagcacattgagaccgctgtagataattcagatgccgtcatcataacatacaagggtgtacatgaccatgacatgccagtgcccaagaaacgacatgggccaccaagtgctcctcttgtggctgctgcagcacctgcctccttgaacagtttgcaggtgaagaaatccgattccccacaaaacaagaaaatttctactcaatggtcagtggacaccgaaggagaactaactggngaagcactg

SEQ ID NO: 226169 - DNA, 526 bp, Glycine max
cattcggctcgaggttgtgttgtgtgtcttcccttggtgttccagtttttatttgcagccgccatgtgcggaatcctcgcagtgttgggttgcgtcgacaactctcagaccaagcgcgctcgcatcatcgaattgtctcgcaggttgcggcatagaggtcctgattggagtggcatacattgctatgaggattgttaccttgctcatcaacgccttgctattgctgaccctacttcgggggatcaacctttgtacaacgaagacacaactgatattgtcactgtaaatggggagatatacaatcacaagcaattgaggcagaaactgagttcccatcagtttcgaactggtagtgattgtgaagtgattgcccatctttatgaaaaacatggatgaagaatttgctaatatgctggatgggatgttggccttattcttcatgatactacggaataaagttgaatagctgctcgtgatgctattggcattacccccctatacttgggctggggtcatgatggatcaa

SEQ ID NO: 226170 - DNA, 421 bp, Glycine max
aaatataatttatttaaaataacccacaaacagttcaaaacctacatattaatttgacctgaaaataaaaacaatcccacttctcattagttttgtctacttgaagtttaaatccccactagacagttgttgcatacatttttttctcttgacaatcgattatgggccttaaagggttccatttttgggctcgtcaattttggtatccactgcatcatatgcagcatcatgaataccaagtgcggcacgaccagaaggatcaagattttttgaccatgctgcatcccattccacagcttttgcagtactgcatgccacactaggacctcctggcactgttgcctttgctgcattctttggaaagaacttctcaaaaattgtcctgtagaggtatccttcttttgtggtaagagtgttttca

SEQ ID NO: 226171 - DNA, 532 bp, Glycine max
caactgtggaatcaaaggggcttgctgagaagtgtgccaagagaaagaggaagaaccagtatcgtggaatccgtcagcgtccatggggaaagtgggctgctgagatccgtgacccaagaaagggggttcgtgtttggcttggaactttcagcactgctgaagaagctgcaagagcttatgatgctgaagcaaggaggatccggggcaagaaagccaaggtgaatttcccggatgagccttcaggcgctgctgcttcctcaaaacgcctcaaggtgaatccagaggctcagccaatgaaggaaaatctgaacaccgtgaagccgaaaatgaaccagatgttcaattttggtcacaatctggagggctactacagcccaatagatcaggtggaacagaaaccactggttaaccagtatgttaaccctgccccgttccctggaaacggagttcaagtctcacctgttactccatctgctgatgttactggttacttcagctctgagcattcgagcaactcgttggattattctga

SEQ ID NO: 226172 - DNA, 316 bp, Glycine max
gaacgatttggaattgagaatttccatggcggcggcgacgaacttgctcgcaacactgggggatctggacagggactccttcgtggctcttctttcgaagctgatcgctgaatcgaagtgcgtacagaacaacccgccggagctgattccccaagaggacagagaggtgaagcacgtctcggacgttctgttaccgctgagcaccaccaccggcgggggacccttgctcgtaaaccacggtacctaccacgccggcagatggaacctcatacgggagtaccccggtaccgttgccgggaaaatcctctcgctcggg

SEQ ID NO: 226173 - DNA, 513 bp, Glycine max
attccattctctctgtgtatttccctacctctcccttcaagatgcagatcttcgtcaagaccctcaccggcaagaccatcacccttgaggtggaaagctctgacaccatcgacaacgtcaaggccaagatccaggacaaggaaggaatccccccggaccagcaacgtctcattttcgccggaaagcaacttgaggacggccgtacccttgctgactacaacattcagaaggagagtactcttcacctcgtcctccgtctccgtggtggcatgcagatcttcgttaagacactcaccggcaagaccataaccctagaggttgaaagctccgacaccatcgataacgtcaaggccaagatccaggacaaggagggtatccccccggaccagcaacgtctcatcttcgccggaaagcagctcgaggacggacgcaccctcgccgactacaacatccagaaggaatcaacccttcacctcgtcctacgtcttcgtggtggcatgcagatcttcgtta

SEQ ID NO: 226174 - DNA, 553 bp, Glycine max
gggaaagactatgttagaaaagggtcagggtccatgtttgatcttgaagagattgaagaagggcttgaagggtatgaggatctagagaaatcatccctcatgtcccagaaaagttttgagaagcgattcgggcagtcaccagtgttcattgcttccaccttgatggaaaatggaggacttcctgaaggcacaaatagccaatcattggttaaggaggccatccatgttataagctgtggctatgaagagaagactgaatggggcaaagagattgggtggatttacggctcggtcacagaagatattttgactggattcaagatgcactgcagagggtggaaatcagtatattgcatgccaaagcgaccagcattcaagggatctgccccaataaatctatcagatagattgcaccaagttctgaagtgggctcttggctctgttgaaatttttcttagtcgtcattgcccgttgtggtatggctatggaggaaaacttaagtacctacagaggatggcttacaccaacaccattgtttatccatggactttca

SEQ ID NO: 226175 - DNA, 414 bp, Glycine max
ggcaaaaatatatattcttattctcaatagatgaaaaatcatctagtagcaccaaaacacagaacatgttttcccaaacaatgacaatggctatactacaatatatggttttgttgtatcatcaaatgaatacattccaatcagacccaactttcctcttttaagactatgtacacagataactcttctaattaaggcaaaccactcaatagcagtaagaaaataaaagcatgcacacaagtgcaattaactcttatcattgggacatcaacatggcctttccacagagtcttattagcattccaccccacattgtttgagcactggaccaatttgcttgggcaagaagggatcaatcctgacccaaatcaatgagaaaattgatgctagaaggattgaccacaacactacaat

SEQ ID NO: 226176 - DNA, 408 bp, Glycine max
atgggattgggcaaatccgaaccacaagatgatcccccagagtttggtgctgcttctgatggtgatgcagatcgcaacatgatacttggtaaaaggttttttgtcactccttcagattccgtggccattatcgctgcaaatgccgttgaagctataccatacttttctgctggtttaaagggtgttgccaggagcatgccaacctctgctgccctggatgttgtagccaaacatctgaatttgaaattttttgaggtccccacgggttggaagttctttggtaatttaatggatgctggattatgttcagtctgtggtgccgaaagttttgggactggttctgaccatattcgtgagaaagatggaatctgggcagttttggccctgctatctatacttgcatataaa

SEQ ID NO: 226177 - DNA, 371 bp, Glycine max
ttttgtggccgccctttttttttttttttttttttttttttttttttttttttttttttttttttttaaacctaaaaataaaaatatttttgcaacgaaacggctagcctttgttcaactggggggggccatctattttcttccaaagttagtttaggagagaagtcaaattttaccgcagggaccaaaaaaaaaaggaaggaaagaatgctcctaataaaacgccaattcaagaggagccatcattttaagactatttaatagaattagcactcggcagttgcaacttattcagcacatcaaaattttgataaagtaactgatcaaattccactcaagggcccatagcaaaggctgcaaacaaccaacac

SEQ ID NO: 226178 - DNA, 453 bp, Glycine max
aaaagattccacaccttctagagcttggtatcaatgcagtagagttgctgcctgtctttgagtttgatgagttagaattccagaggcgtccaaatcccagagatcacatgattaatacatggggttattcgacaataaatttctttgctcctatgagtcgctatgctagtgctggtggaggatcagttaatgcttcccgagagttcaagcaaatggttaaatccttacattctgctggtatagaggttattttggatgttgtctacaatcatactaatgaggctgatgatgcctttccttacactacttcatttcgtggcatagataataaggcttattacatgctggacaataatgggcaattgctgaacttctctggctgtggaaatacattgaattgtaatcatcctgtggtcatggagctaattcttgacagcctacgacactgggtca

SEQ ID NO: 226179 - DNA, 329 bp, Glycine max
gcagcttctgtagttaatctgcttcccttttttcacactcactctcactaaatggcttcctctgttgctttagttttgggtctatgtctagcactcaacatggttctgccgacacgtgcagctacccacacagtgggagacacctcaggttgggcactcggtgctgattacagtacatgggccactggcttgaaattgaaagtcggacatagtcttgttttcaattatggggctggtcacacagtggacgaagtgaaagaaagtgattacgagagctgcaccacaggcaattcactaagtacagacagccgtggcactcacccaatcac

SEQ ID NO: 226180 - DNA, 517 bp, Glycine max
tgttggtttctgaaggtataattacaagaaaagacataaaagaagccaattctggtaacgggagtagagttattagtattggtttgccagcatattgcttagtccagggactcttgcgctctgcaaaattaaattccgttggtataatgattagtgatgaaactgaactaactacctcaaacagaccaagggagacattttttgactggttcgttaatccccttttgatcattaaggagcaaatcaaagctgaaaatctttctgtctcagaagaggactacctctgcaaattagttctcttgagtggtgatgcagacagactgaaaaattctagcgttggccctgcaccagaatccgaggtcaaacgtgcggaacttgaggcattggctagaaggctgcaaggaatcaccaaatccatgtcatggttcccaaccttcaagcgacgcttcgacgatcttgtaagatcgttatccgacgatctgacggagatacatggaggtccaataatgaccagatc

SEQ ID NO: 226181 - DNA, 543 bp, Glycine max
ttgggaggaggcactgtggcagaagtcctaggagtgtaaaacagagacgcaaaatgaagacgatcttgtcgtctgagaccatgaatattcccgacggcgtgagcatcaaggttcacgctaaggttatcgaggttgagggccctcgtggaaaactcgtgcgagacttccaccatctgaacttggacttccaacttattaccgacgatggcggtaaaaggaagctcaagattgattcttggtttggttctcgtaaaacctccgccgccatccgcaccgacctcagccacgttgagaatttgatcaccggcgtcaccaagggataccgatacaaaatgagattcgtgtacgcacattttccgatcaacgctagcattggcaacaacagcaagtccatcgagatcagaaatttcctcggcgagaagaaggtgaggaaagtggacatgcttgagggcgtgtcggttgttagatctgaaaaggtcaaagatgaattggtcttggatggaaacgacattgaacttggttctaggtcatgtgctctcatta

SEQ ID NO: 226182 - DNA, 496 bp, Glycine max
ctagttctagatcgcgagcggccgccctttttttttttttttagaaatgcatgaaagattactaattccagagaatattcaataccaaagcatatatagaaataaaaaattaacaaaaaataatcccaaaaggaaaagtttgacaagttaccaaaaaagggtctccaaaccaaaaaccaatacaaatgttttcatcctctactcttccaatattgttcccttctcgctgacataaataccatcaagaaacttccggatatccttgttcttaacatgacatttctggttaatgagagcacatgacctagaaacaagttcaatgtcgtttccatccaagaccaattcatctttgaccttttcagatctaacaaccgacacgccctcaagcatgtccactttcctcaccttcttctcgccgaggaaatttctgatctcgatggacttgctgttgttgccaatgctagcgttgatcggaaaatgtgcgtacacgaatctc

SEQ ID NO: 226183 - DNA, 540 bp, Glycine max
gaagattctggtgaatgcgtagaaaaggaaaataaagaaattagcgtgaaaaatgttgggtgtgttcagcagctccatagtgtcgccgccggaggagctcgttgccgccggcagccgtacaccgtcgccgaagatgacggcggcggcgctgcggaagtggttcgaggagaagaacccctccgcagtgtcggtggaggtcggagagcatgtccagctcgcttatacccaccagaacgagtcgccgtttcagcccagatcctttgctgtgaaggatgaggtattctgcttgtttgagggagcccttgacaatttgggcaacttgagacaacaatatggattggccaagtcaaccaatgaagtattgttggtcattgaggcttacaaagcattgcgtgacagagcaccctaccctgctaatcacgttgttggccatctcagtgggagctatgctttcatagtttttgacaaatctacttctaccctctttgtggcctctgatcaatatggctaggtacctctatattggggaattactgctga

SEQ ID NO: 226184 - DNA, 306 bp, Glycine max
ccaaaaccagactttattagattgaaaagcgtaactgtccattgatagaaacagcaaattttttatctaatgaacaaagttacccccctaatatttcccaattccagggatcactccccatgccatttaattacattggccctaatggttgccttttacagtctcctccactaatcatcatatggcatcttaccagcagaaaggaaaatttatggtctggctacaacaactgcgggcccttccaccttgaaagtcgctccccaaatttcctcctcattagcaggaactgcagtaatcttattttta

SEQ ID NO: 226185 - DNA, 589 bp, Glycine max
gataatgcaagatgggatggggtacctttcctaatgaaggctgggaaagcattacacaacaaaagagctgagatacgggtacagttcaggcatgtaccaggtaatctgtacaatcggaattttggtactgatcttgatcgggctacaaatgaacttgttataagagttcagcctgacgaggctatatatttgaagataaacaacaaagttccaggtctgggaatgaagttggaccgcagtaatctgaatcttcactacgcagcaagatattcaaaggagattccagatgcttatgagaggctacttctggatgccattgaaggagaaagaagactctttatacgtagcgatgaactggatgctgcttggtcactctttacacctgtactgaaggagcttgaagagaagaagataattccagagtactatccttatggtagtaggggtcctgttggtgctcactatcttgcagccagacacaatgtgcggtggggtgaccttgggacagacgtagaccaataatcctcactgatgttagctatgatgcatgctattttgtgggttctttttggcttgcagtttcttttct

SEQ ID NO: 226186 - DNA, 475 bp, Glycine max
agattgactgccaactaaatgaaatatttgctcctgtccaaactgtcccaaatcccacatcccaagtagcaacaaaaactcaaaaaaatatcaatgatgtaagagctttattactctactttgaaacttgatgctttaattgctttacatgattttcatgtgtgcctggtagtcttccaccagagaagtaaccatctgctgataatatgatgagaaaagaaactgcaagccaagaagaaaccacaaaatagcatgcatcatagctaacatcagtgaggattattggtctacgtctgtcccaaggtcaccccaccgcacattgtgtctggctgcaagatagtgagcaccaacaggacccctactaccataaggatagtactctggaattatcttcttctcttcaagctccttcagtacaggtgttaagagtgaccaagcagcatccagttcatcgctacgtattaagagtcttctt

SEQ ID NO: 226187 - DNA, 471 bp, Glycine max
agcaagtgctccactgttggtgtccaaggcattgcttggtcatttggtggaatgatctttgcccttgtctattgtactgctggtatctcagggggtcacattaacccagctgtgacatttgggctgtttttggcacgcaagttatctctcactaggacagtgttctacatgatcatgcagtgcttgggagctatatgtggtgctgctgtggtcaagggattccaatcaaaccaatatgagaggcttggtggtggtgccaacactctcaataaaggatactccaaaggtgatggccttggagcagagattgttggcacatttattcttgtttacactgttttctctgccacagatgccaaacgaaatgctagagactcgcatgttcctattttggcaccattgcctatcggttttgcggtctttctggtgcatttagctacaattcctatcactgggactggcatcaaccct

SEQ ID NO: 226188 - DNA, 487 bp, Glycine max
tgagttcggaattcggctcgagtgccatcttgcaaagcaagcctttgatgatgctgtctcggagctggataccctgaatgaggattcttacaaggacagtaccttgattatgcagctgttgagggataaccttactttatggacttctgatatccccgaagagggtgaggacctaaaaatggaaagcgcagccagggttgatcaaggagaagatgagttaggccgctaacccatcattctgtcatatgtctaagatttgatgcattaatttttctcaatcatattttctccattgtcgtgaagcctctatctgaatggtgcactgcacctcatcaactttgagtcattcttatttctgagtgatggcctatttgagtcatctacttcatttttatgctattgatgagtagttttattcatgtgcttgtgacacagaaacaccattggtttgcaatgccatattcccctatttgaatgctggtatggt

SEQ ID NO: 226189 - DNA, 449 bp, Glycine max
ccgggcccagatccgataagcttgatatggacgccctttttttttttttttttttttttttttttttttttttttttttttttttttttttttttttgttttttttttttttttttttttttttttttttttaaaaattaacccaattgggggggtttaaaaaaaggggccttaacaaagggttaaaattgggaaatttaccggggctcaaaggggaacagtttttgaaggggccccccaaaaacagattttacccctaacggggtcccaatggggaaattttgccttggaaaccaagggggtttttggggcaaaaaccccgggaaaaaaccccccaacaatggcctaaaaaggggggaggggccccaaaggggcccttcctcaaaaataaaaaggccccaaagttgggggggggccgggccccttttaaaaggggggttcccccccgg

SEQ ID NO: 226190 - DNA, 477 bp, Glycine max
agttcggaattcggctcgagcttctctgttctttttttttgccctatctaattagggttcccgcgatttcaaaccttaatttcttcgattactctctctttccatctcatgcgttcttgctctcaacaacaatcacccaccgccatcgaagtcttcgttcttttcttcttcttcactctcctttcttctctcgttcgagggttctttcgtggggaaccctgcagatttcaccactcgtgcacatgtccaaagttctcggcttttccggagttgacgatttttgcccgatgggatcaatatatgccaaccccaaggaagcaagtttcttcttgcctcttggccctcaagttgatgtatactttcctcctcggaagagatcgcgtgtcaacactccattcggtttcgatggagaatggtttgagcaaaagccgaaaacctctgatgaagccttgccagatgagtgtctctttgagatct

SEQ ID NO: 226191 - DNA, 495 bp, Glycine max
actattcggcggccgccctttttttttttttttgagactgaaaattttatttatttcattacatttcataacatacagaacaaagggcaggtatgaacatcattagacaatataggaggagcagttgccaagttcaaaaaaatgaagccttaaaaaactaggacttggtaaaaataacaacccttcccaaagggacaaaaaggttgtggttatggcagacctatatagcttgctgccacagccaagcccctaaaaacaagacttcataaacaccgaccttgacaactgcaaccaccctaataacagcacatgacactgaaacttctaacctgcccttcgagtaaaactgatacccaaacatcatgtgaagaacatagttcaaccacatgacacatttggtaaacaaagactgatacagtggtacaggtagctggaaaaacttagaaaactaagacacacatggtggcaaaaccgatgcaagccgagctaaaaaca

SEQ ID NO: 226192 - DNA, 546 bp, Glycine max
ctcgagccgctcgagccgtgagaagaacagaacaaaatcgcgaagaaccctaattgatttattgattcattttcattcccatggcgtcccgaagaggtggagtctcactcccagacagacctagcaacaactcaagctccgtcctcgcgaagatctcgcgctcctccatcgtcacccgcggcaaggaagccgccggcgacgccgcattcgtcgccaagaagctcctccgcagcaccggcaaggccgcgtggatcgccggcaccaccttcctcgtgctcgttgttcctctcatcgtcgagatggaccgcgagcagcagctcaacgacctcgagctccagcaggccagcctcctcggcacccccgcccccaaataaaatttgaggttttctctctgatctgattatccctgtttggacactctgctatatgaacttctgcttctaaggtttccggttgcaataattctttttaccgtttctagatcttgattataaaaaccttactgtgaggaggagttttgtgtattcttacgattaatatatgtca

SEQ ID NO: 226193 - DNA, 416 bp, Glycine max
gcctcatcactgtatgacgtcctccttctttgggggggggggggggggggggggggggggggggggggggggggggggggggggggtgggggggggggggggggcggggggggggcggggggaatctttccatgaatagaatttacccccaaaaaaacagtggcgtgttttacccccctcccgaaagggtgtttgttataaaattttcccggcgggaaatatttgcccctttggggggaaacccacccaagttttaaaatgtttttgtataccccccgggggggaaagataaagttaaaaactcccaaaaaaaagggccctttttccaaatttggaaacttcacgggagagcctcccccgcttaaatccccagaagtttactccccccaaaattgtaaaggggaggcccccccccc

SEQ ID NO: 226194 - DNA, 513 bp, Glycine max
  unsure (1)..(513): unsure at all n locations
aaagtcctaccactactccacactttcttataagttataacaatcaacccactctcagattacgctctgttgaatgaaaagctaaggaatatgagaaggccatggaagcattctaagaacaaacatgatctctttgaatgtcttccggacgatctcgttgttcttattctttccaagctcagcgccaccgcttcatctccttccgatttcatcaacatcatcttaacatgcaagaggctaaaccgctcaggcctgcaccgtcttgtgttgtctaaagctgggcccaaagtattcgccataaagccgaaaaattggtcagaatatgctcactcttttctcaaacactgcgtcaatgccggtaacgtggatgcctgttacactctcggaatgatccgattttactgtttgaaaaaccganggagcnggctctcgttaatggcgaaggccggtatgaagctgcacgcgccggcgctgtactcgctggcagtgattcagttcaacggtagcggcggt

SEQ ID NO: 226195 - DNA, 497 bp, Glycine max
gtttgctacctaaaccctagtctccatacatcaacttgggaggttaaagagacggcaacgttgtgctgtccgccttgaccgagccagagcttcgtcttggccctcgattttgccctgtaaaactaatcccagtcacaacagaaataatcaatggcaccgaaacagaccaaggctgagaagaagatcgcttacgatgcgaagctgtgcgacctaatggaggagtacggccaaatcctcgttgtaaactccgacaacgtgggatcgaaccagctccagaacattcgcaagggtctccgcggcgactctgttgtcctcatggggaagaacaccatgatgaagcgctctgtcaggatgcacgctgagaaaaccggaaacaatgcctatctcaaccttatccccctccttgtcggcaatgtgggattgattttcaccaagggtgacctgaaggaagtcagtgaggaggttgctaagtacaagggtggagctcctgctcgtgt

SEQ ID NO: 226196 - DNA, 522 bp, Glycine max
ctcaaaggcccacggttcctcactcctcttccatagcctgcggccttcactctcatgtcctggtctccagtgagatgaaccctagctccaattggtccctttaatcaattacctcttaattagtaattacttaatctcaattagcctttcactctcccacacaacaacatcatgggcgtcaaaggttttgtcgaaggaggcatcgcttccatcattgcaggatgttccacacacccacttgatctcatcaaggtccgcatgcagcttcagggcgaaaacaatttgcccaaaccggttcaaaatctccgacccgcactcgccttccaaaccggttcgaccgtccacgtggcagcggctattccgcagacccgcgtgggtcccatcgcggttggggttcgcctcgtccagcaagaaggccttgcggccttgttctccggcgtctacgtcactgtcctgcgtcagacgctctactccaccacccgtatgggcctctacgacgtcctcaagaccaagtggaccgac

SEQ ID NO: 226197 - DNA, 512 bp, Glycine max
cggaaaataaacagcacttctcattgattaatagaataacaaaattgccatcctagaactacatcactagtactattaaaacataacacaaacagaaaaagcatcttattgaaaaggaaagtagcatacatcttctcgtcatcatcctcatcagaaatccttaagcaacttgcgaacctgttccagtgtcacgaacagcaccacagtgaacggtccctgcctcgagatcgtaggaataaaccccttataaagcgccatgggaccctccgcgcgcacagtcttcagagcacaatctaacgcgccggcgtagggcggcgtcgccccgggctccaccctcatgttcatcaccctcgtcttgatcacgtcgacggggttcgacgccaccgtcgccacgaaccccgccgcgaagctcgccgtgacatgggtcccgagcccgtcgcgcatcatgccgttctccaagatcgtttctttgaactggtcgtacgacgcgagctgcgacgccgtcacgagca

SEQ ID NO: 226198 - DNA, 591 bp, Glycine max
caagaaccgctctgctatggctgctctgcaatacttggaatcgctgcgtaattcgcaccctgagctctccgattggtacaattcgctggcggatctgtaccagaagaagctctggcaccagctcactctcaagctcgagcagtttgtggctctcgccgtcttccaggctggtgatgctttaatacaattatatcacaatttcatcacagactttgagacgaaaatcaaccttctcaagcttgcacattatgctgctatagttactcggcagtattctgaaaaagaagctgctgttggttatcttggaggggtcattcagaaacttcaagacactagggagcagcgcatagaagaacctattctttacattaagatgcatatagcaatattcaagcttgagcaaggtgatcaaaaggaatgcaagaaacttctagatgatgggaagagtacactcgacagcatgacagatattgatccatctgtatatgctagctattactgagtatcatctcagtttcataagacatgccaagaatttgctgagttctacaaaagtgctcttttctatttggcatacacatcagtggaatc

SEQ ID NO: 226199 - DNA, 472 bp, Glycine max
attgtttgttgttgtaactcgttcttcttcttttgttgttctgtgtttgtgtttggtttttctctcacctgaaaatgtcttgctgcggtggtaactgtggttgcggaagctcctgcaagtgcggcaacggctgcggaggctgcaagatgtacccagacttgagctacactgagtcaaccaccaccgagaccttggtcatgggagtggcacctgttaaggctcaatttgagggtgctgaaatgggtgtgcccgctgagaacgatggctgcaaatgtggaccaaactgctcctgcaacccctgcacttgcaagtgaggtgttgggagagcaagcttcaagcagagatagcccttaattaggaataatgataaactattaatgtgtagctaaaaacttatgtattatgtctgtgatggttgtcgtgcactctggtgtttgtgttaaacaaacatgcttagaataaagtggtcatg

SEQ ID NO: 226200 - DNA, 348 bp, Glycine max
aatattataagcagagattcataattcagattagccgaactttatacagaagcgaccaattaccaaacattaaaaaaaaaaaaaagaagcaaccatgagcttaacacacccatcacaagtccaaaacacttgaacttgctgaaaggcaagacatgaccactttattctaaggatgtttggttaacacaaaacaccagagtgcacgaaaaccatcacagacataatacataagtttttagctacacattaatagtttatcattattcctaattaagggctatctctgcttgaagcttgctctcccaacaccttacttgcaagtgcaggggttgcaggagcagtttgggc

SEQ ID NO: 226201 - DNA, 407 bp, Glycine max
ctggtatgtaataagaacaactacttgctgctcatcttaattccctcctctagcctttctacagaataaacagagtcaaagttcatgttgttgaagggaccattgactattcacttatggagcaacctggtcttggagctcccaagagtgagctcaagatcatctgttccaaaagaagcttcatggatcctctctcctttccaggcattcactaaacctgatgagctgcttccaaaggcaaattcatctgaaactgcttcagccattggaatgtcagaagtgttttcggagcctgcagctacggctggagaacatgttccacttgcccctggtgtcgtccacatccgggaaccgctgccaaccatagcatcttccttgaggccaaatgggttggaagagaccaggct

SEQ ID NO: 226202 - DNA, 474 bp, Glycine max
aaagactgagagagacgaagccagagaaaaccaaaaaccttactctttttcacgcgacgccctagttcatttttcttctccgttctcttctctctctgttcttcactcactctcattcattcaccatgacgaaacaacatgccaattggtctccttacgataacaacggaggatcatgtgttgcgattgctggagcagattactgcgttatcgccgcagatacgagaatgtccaccggttacaacatcctcactcgcgattactccaaaatctcccaactggctgagaagtgtgtgatggcttcatctggctttcaagctgatgtcaaagctttgcagaaggttttgtctgctaggcatttgatttatcagcatcaacacaacaagcaaatgagttgccctgcgatggctcaattgctctcaaacactctttattacaaacgggtctttccttattatgctttcaatgtttggg

SEQ ID NO: 226203 - DNA, 426 bp, Glycine max
  unsure (1)..(426): unsure at all n locations
aaataaattgactcagacaaaaatccaatgcaaatttaagtgaaagcagtctagttataatgtgagcagactagtacttgttcaaagcaatttcactggaaatgctattcttaatttcgcctcatgggaaaaacccactacgtcattttaaattttagaagcatttcaaacattctcaatccaagacaggtatctccaacaacaatttcctgtaaagcattagtctttccttaggtccatgtattcacgatgaataccactggcatttaggatgacgatttcaaccttatctccggtgtatatatctctctcagttgcagatgcaaaaacagttttgaccagatcaactgcttctgcttcagacaatggagtaacagcatcctgngcaggtaacaggagtgggctaggagacttcagctggttatc

SEQ ID NO: 226204 - DNA, 500 bp, Glycine max
cattggaggaaggtcttgctgaggccattgatgatggcaagattggaccaagggatgaccccaaggttcgttccaagatcttgtctgaagagttcggttgggacaaggatcttgccaagaaaatctggtgctttggccctgagacccttggacccaacatggtggttgatatgtgcaagggagtccagtatttgaatgaaatcaaggattctgtggttgctggattccagtgggcatcaaaagaaggtgctttggctgaagaaaacatgagagccatctgctttgaagtatgtgatgttgtgctgcacgctgatgctatccacagaggaagtggtcaaatcattcctactgccaggagagtcttctatgcttcccagattactggcaaacccaggcttcttgagcctgtctacctggttgaaatacaggcttcctgacaagctcttggtggaatctacagtgttcttaaccagaagcgtggacacgtgttcgaggaaatg

SEQ ID NO: 226205 - DNA, 472 bp, Glycine max
aaaaattgaacagggcagagagcaagggcaagcgagtgaacatgggaacctctgcgaacgctgtcgcaggtggtcgtggcggcgcccctgtccccaaagacgtcgactacgctaattacttctgcacctatgctttcctctaccaccagaaggagatgctctccgaccgcgttcgcatggacgcttacttcgacgccattttgtaaaacaaacgccacttcgctggcaagactgttttggatgtggggactggaagtggcattcttgctatatggtcggcacaagcgggtgcgaggaaggtgtatgcagtggaagcaaccaagatgtcagaacatgcgcgtgcacttgtcaaagcgaataatctccaggatgtagttgaggtcattgaaggatcgatggacgaaattaccttgccagagaaagctgatgtgatcatctctgaatggatgggttattttcttgtgcgtgaatc

SEQ ID NO: 226206 - DNA, 446 bp, Glycine max
gataaattctactgcgatgactactataaattaacctacccttgcactcctggcgcagcatactatggccgtggtgccatcccactttactggaactacaactatggaaaagccggggaagccttgaaggtggatctgttgaaccatccagaatacatagaacaaaacgccactctagccttccaggctgcactctggcagtggatgaccccaccagagaagcacctaccatcaccccatgatgtctctgttggcaactggaaacccacaaaaaatgacacattgtccaaaagggtacccggatttggtgccacaataaacttgctctatggggatcaaacttgtggtcagggatcagataatgaggccatgaacaacatcatttcacactatctttattatcttgatctcttgggtgttggcagagaagaggcagggcctaatga

SEQ ID NO: 226207 - DNA, 483 bp, Glycine max
  unsure (1)..(483): unsure at all n locations
gagctttcgatccctgtaaccgcgttcgacgatttagggtttttttcggagacaatggcggatgaatcggagcacacggcggcgccggcgagcggtgaatcgctgcttgacaagattgccgagaagattcacggccaccacgactcttcctcttcctccgattccgattcggagaaaaaggaaacttcgtcaattaaggaaaaggttttccgcctctttggaagggagaagccagttcactccgtcctcggcggtggaaaacctgctgatgtgctcttgtggaggaacaagaagatatctgctagtgtacttggtgtagccactgctgtttggatcttttttgagttgctagaatatcacctgcttactctagtttgtcacatttcgattctggtgcttgcagttttgattttgtggtccaatgcccatacctttattcacatggcaccgtcttgcattccaaccgtcatctncctgaagaac

SEQ ID NO: 226208 - DNA, 513 bp, Glycine max
  unsure (1)..(513): unsure at all n locations
ccacctactgcatcaaaaaattcttaaggatggccacagcagaagaaatttcaactttgaaactgttgcgccaatatctcttgggggatatttcagacccttttctcaccaatctcattccagtaaaactcgaagaccgctcatcagaacttgatatgggttcaaacttctcagaacatagcagcttctgcaagttgctagaatgcattgattttgaagcagacacagaagtggtaggtctcacgtctcatcataaggtcgaaaactccattgaaacatgtcttccacataattccaatttgccagaagaaccaatggtgtcaacgaaaaaggaagcaacatgttatgcaacaaggcgttacagaggtgtgaggagaaggccatgggggaagtttgcggcagagattcgcgaccccaaaaagaaagggagcagggtgtggcttggcacatttgacactgagattgatgctgctaaggcttatgatngtgctgccttcagaatgaggggtcaca

SEQ ID NO: 226209 - DNA, 446 bp, Glycine max
tttttattcttaaggatggccacagcagaagaaatttcaactttgaaactgttgcgccaatatctcttgggggatatttcagacccttttctcaccaatctcattccagtaaaactcgaagaccgctcatcagaacttgatatgggttcaaacttctcagaacatagcagcttctgcaagttgctagaatgcattgattttgaagcagacacagaagtggtaggtctcacgtctcatcataaggtcgaaaactccattgaaacaagtcttccacataattccaatttgccagaagaaccaatggtgtcaacgaaaaaggaagcaacatgttatgcaacaaggcgttacagaggtgtgaggagaaggccatgggggaagtttgcggcagagattcgcgaccccaaaaagaaagggagcagggtgtggcttggcacatttgacactga

SEQ ID NO: 226210 - DNA, 349 bp, Glycine max
acaatcgggtaggtaaattaaaaaaccatataggaaccgtgcatcactacaagctcagagtttaacaattcccattatcaggccaaatatatatgacatttatggaacaaccccattatcaagcattgatacaatacagagtatataaaagggaaatgaatacagaaaaaattaaggggattgatcatatgatcatgatcatgtggtggagtctaaaatgaccttggctatgccacaatggtggaatgcttgagcatgcgcaagctatattgcccttcttcctcactagtgacaatctgtgactgcccagtgggaggcatgagctcaaagttttggacgaaacgtatcc

SEQ ID NO: 226211 - DNA, 477 bp, Glycine max
tttgcgtcttactccttttgcattttcttgtttttgtaaaaatcaagaaacggtaaggttgattgtgatacacaggattattcacattatcagaagaacattgctagtaacatattctttaccaaacacaaatctaaaaactttcaaaagtccacaagtcatacttttttttcatgctcacttggcggggactaaataggtggcttaagcccaggcattgacgtgttacagggtccgcatggtgatcagttaggatttccagtggaccctaaccgttgacaatggcgttaacaaataacccgctcatagagaacatgtgcaatttaccgttcttgagtgccttaaccttaagctgatcaaaagcctctgggtcatcatcaaggcccaatgggtcaaagctgccaccagggtatattgggctagtgacctcaccgagggatccaccagtgatacgataaccctcaacagcacccatta

SEQ ID NO: 226212 - DNA, 547 bp, Glycine max
gagtcccaatattttacaaataataaatacaatgtcgccattaatattaaacaataactttgacatcataaattcttccaaaataattatacaaaagtgacaagggaaaacccgatctgccagttgcctactgaataaaaacacacatcattactatgtgttggcatacacgcatgaccttgtgccttgtcatgagtgaatattccaaagcaattggtcctttatgcctccttaatccttatgccacaaaatgctatcatcccttgaaagttgtaattgcttcttcagaaatagatttatacaaaggtagttgcaatatctatttgccaaactaaaaatgtaaagacccttcttcccaatcctagtagtgtcccaattgtatttacaaaggcgggacaaaatatgtatatacaagtacaatcatatagcataatgtaacaataatcatactttggtctttactggtgcacattacaggaattattatgcactgaaacccctttgcagagaacttcaaagattggagggatagagacacaagctgtgc

SEQ ID NO: 226213 - DNA, 538 bp, Glycine max
aatacttgatatactttcatttctttattaaaatagcaatgttgatgtgtgtgtacaagtacaacaatgaatattttgctccgaaaacagtcaattttgagacaaaaatcgattatatccactgttttggggcctccaaactagatattaaaacataagtcactgcaaatacaatcaaaaggaaaatagaaagccaacaatgggagctgtggaggttctataaaagaatctcatcctgaacacccacatttagggtcttatgtggcaaaataatgctattaaaaaccactacctcatcctcaacagtcacagattcaccaagtattgtgaccccgagctttgcattgtaatctccactagccttaacacaggcccatcgaccaatagatgatttccatccaacaattgcatgaccaacaagagcattttccttgatttcaacgtcatcaaggatgatacaatgtttgagccttgcaccagctcctatacgagcatttgcagatatggatacacttggaccaatcttagcagatggatg

SEQ ID NO: 226214 - DNA, 418 bp, Glycine max
tttttttttttttttttttttttttttttttttttttttttttttttttttttttttgttttttttttttttttttttgggggaaaaaaaacccccccaaatttttatgggaattataaatgaagggggcaccaagatttaacccctttaaataccgggggaaaacccttagggttaaacccccaatttttatacttaaaaacaaaagggggccccattaaaaaaggcgccaacactggattgacccttaaaattcccccctggggggaaggggaaaattgtcaaacagccttttaattttttggaccaaaaattcctttggcgggttaaaaaaccctttcgaaggggcctggagaataaaatttgggaaattttcccttggggaaaaaaaaattaaacccgggaagaatatacctcc

SEQ ID NO: 226215 - DNA, 599 bp, Glycine max
attgtagtagtagccatggggtctttcaatcactatgtgattgttaagttcaaagatggtgtggcagttgatgatctcattcaagggttggagaagatggtctttgggattgaccatgtcaagtcctttgaatggggaaaggacattgaaagtcatgatatgctaagacaaggttttactcatgctttcttgatgacattcaatgggaaagaggagttcaacgcatttcagactcacccaaatcatcttgagttctcgggagtgtattcacctgctattgagaagattgtggtgctggatttcccatctaaccttgtcaaagcaccagcatgatcctcaacttattcaagcaaataaacttttccatctttaaaagtgtatgcatgtgtgcgcatctgctatttgtagtctgttatggttgttcctagctagtttctacaatcttttatgcaatttcagacttgataataagttcttcttttttcctaattaatggaaatttctagcattattggtattcgttaatactaattctatgatttctcttcatgtttctactgccacaaagggtgtgatgaatgatgaatgtgaacagaatg

SEQ ID NO: 226216 - DNA, 456 bp, Glycine max
agcaacaaaaagctctcagacttaaattattaaatcatggcgtatacctactctaaataaaacaacaaagtcgccacaccactgccggcaacaatacaacaatggttctgagattgcaaaatttgatttggttcttgaaggaataacattaacattagcctaccagacacgtatgtgataacatgttcaattactggttggcaaatttgattcccttctcaattgatgatttgagttcaggcttaaggctttcgaggccttgttgctcaaaatctgagagaggtcctaagcccagaacttcctccactccattcttcccaagcctcaccttggaagcaaagtagggaagttcagtaacagtggattgcacgaatgagcactccacaacatctgggactccattgaggcccttaaggcaagcatcagcaaatagggcaccagcataggccattgaca

SEQ ID NO: 226217 - DNA, 539 bp, Glycine max
  unsure (1)..(539): unsure at all n locations
tgtgaataagcacaggaaacatgagaatcactaaacttattatggaacagaaaagatgttcttttgtgactatatacagagatttcaagccatacctgctcatggtcttagtccaggttggcttaagcatcttatatctgatcactaaagcctccttcaatcacgggatgagcccttgtgtatgtaacttatcggcagatagtagctgtggttgtgatgctcccttttgcatactttctagagagaaaagctagaccacacttgacattttctctttttgtacaaatttttgtgctttctttgctagggtaagtgcaaataaatatgcatgtttccacaccatacgagaactcaagtatgaaaacttgatttgtctaattttaaaaaattcatgagtagtttgactcttaatattcactttgcaagcctgaaatacacaaatcctacctttcttggtgcaatgctcaacaccatacctacccttaccttcattcttgcagtggctctcaggttcgcttaantctttatctacatgaatt

SEQ ID NO: 226218 - DNA, 564 bp, Glycine max
accctctctctatattccattgccacccagttttgaatatatttttattccttctttgtttcttcactttcttccatacacataaccatgtcttctcagactgttgtcctcaaagttggtatgtcatgtcaagggtgtgctggagcagtgaacagggttttgggaaaaatggaaggtgttgagtcatttgacattgatctgaaggagcagaaggtgacagtgaaaggaaatgtggagccagatgaagttctgcaagccgtttccaaatctgggaagaagactgcattctgggtggatgaagcaccacaatctaaaaacaagcctttagaaagtgcacctgttgcctcagaaaacaagccttcagaagctgcaactgttgcctcagctgagcctgaaaacaagccttcagaagctgcaattgttgattcagctgagcctgaaaacaagccttcagatactgttgttgaaactgttgcttaaggcatctgtggttctatttttctatgtggaagtaggtctcgttcatatagtatttcatgtgctttgtgcatgtcagctattata

SEQ ID NO: 226219 - DNA, 467 bp, Glycine max
atagacaaaagtgtaggtatattaaaaaaccatctcaaaaccgtgcatcacttcaagttcagagatttacaatacccattagcaggccaaatatatatgacatttttggaacaaccccattttcaagcattgatacaatacagagtaaagaaatgggaaaagaacaaagaaacaattaaggggattgatcatatgatcatgatcatgtggtggagtctaaaatgaccttggctttgccacaatggcggaatgcttgagtatgcgcaagctaaattgccctccttactcactagtgtcaatctgtgactggcctgggggaggcatgagctcaaagttttggaccaaacgttccaaagtgatgccaagaattggcaatgcaggaatgattccagggcaggttcttctggcaacaccaatgggaaggtacctaaagtcattgacattggctttaacaagcgactccttct

SEQ ID NO: 226220 - DNA, 440 bp, Glycine max
acctgacccatggtcattgaaggcaagtgacacaacaatgttggatgtgccagtgaaggtgcctcatagcatattactgagcttggcaaaggacattggagcagattgggacattgattaccaattggatattggacttgttattgaccttcctgtcattggcaacttcaccattcctctttctcagaagggagagatcaagctgcctaccctgactgacatgtttgcctaattccaactaaaggcttagaacaaagaaaataaatcaataaatacatcctccatcatattttcctgtagtatcaattttggattttagttctggttttctcacttcattttgcctctttaatcttctttcctgaatggatgcgataaactacacatcataatatttaaaacacatatggtttttggaattctcttctaaaaaatatgaa

SEQ ID NO: 226221 - DNA, 542 bp, Glycine max
atagacataagtgtaggtttattagaaaaccatctcaaaaccgtgcatcacttcaagttcagagatttacaatacccattagcaggccaaatatatatgacatttttggaacaaccccattttcaagcattgatacaatacagagtaaagaaaagggaaaagaaccaagaaaaaattaaggggattgatcatatgatcatgatcatgtggtggagtctaaaatgaccttggctttgccacaatggtggaatgcttgagtatgtgcaagctaaattgcccttctttctcactagtgtcaatctgtgactggccagggggaggcacgagctcaaagctttggaccaaacgtcccaaagtgatgccaagaattggcaatgcaagaatgattccagggcagcttattctgccaacaccaaagggaaggtacctaaagtcattgccattggcttcaacaagcgactccttctcgaagaacctattaggccggaactcctctggctattttcactgtgcatggttgtaggccaggcaccatgcattca

SEQ ID NO: 226222 - DNA, 582 bp, Glycine max
ctatgtatctatataatcgaattgaaattacgattctatcaaatctttttatttactttttttttttttaagaaaaaagaaagttctaattattaataaattatatctatatatatatatatacagatagatattctatatcttttatcttaattaatatttgacccctccttataatgtgttatagtttactttatttttaggaacttatccattccttttttaatgtgcccgacaatccgaaagaattctgggggaggggtcatttcgtttttgatctagaataaatagagcttcaagaaatgagagaattaagaatacccacgagaaacactaatccaatccataatgatgtaccggaaaatacaacatttttgttattcgaccaaccttcaggagaagcaaatacaacaggtacactaatcaataaaataaatgaaatagcaattaatgcacaaacagctaattggaaagcaatagtcatgtttctaatcctgcaatttaccaacaaaagaactttaccatttgatccctcaacccttgatccctttattgccaaaaaattattatatataacgcaaa

SEQ ID NO: 226223 - DNA, 453 bp, Glycine max
gtaaaaagcaagtaacattaagttggattgggatacacaagataattcacattatctgaagtacattgcaataacatatacttcaccaaacacaaatctaaaaactctcaaaagtccacaagtcatccttttctttcatgctcacttgccggggacgaagttggtggcgtaggcccaggcattgttgttgactgggtccgcaaggtgatcagcaaggttctccaatggacccttaccggtgacaatggcctgaacaaagaacccaaacatagagaacatggccaatctcccgttcttgagttccttcaccttaagctcagcaaaagcctctgggtcatcagcaaggcccaatgggtcaaagctgccaccagggtagattgggtcagtgacctcaccgagggacccaccagcaatacgataacccttaacagcacccattaggataacttgggt

SEQ ID NO: 226224 - DNA, 575 bp, Glycine max
ggtgaagcttcagtggtattaatcatgagaaagcgaacccaaaaaatatataaactaaaagacaatactagaaagaggtgtcttccgtgtaactattataccttgaaactctagagattttttttacaaagaagcgaaaaagtgcagaactgtacttcattctcctgtacatctctgaatatatatattcacacggcaaggctcctgctccacgccgaaacgaagcatcattttgaactgttggatttaccaaaaacttaacatccaggttcacatttctaatgcttctatttcttttctgtcataaaccaggttcatgagcccaaaaagcatctggatccggacaaaatagagaataatcttccatttctagattcgctatgtgccaattgacaaaacgggcctgtacagacttgaatagaaaaaggatgataggcaaaagccagcatttatcatcttccctcttaacattacgtgtgcttgcctcatcagggtggtaaaagtgggataatgaataatgaaggagacaacatataatagccactccaatattagataaagaagtagcattccac

SEQ ID NO: 226225 - DNA, 464 bp, Glycine max
ttcttgcaattccttcctcgttatggagtcgcgagtgctgtcacgcgccggaaccttgtcctccctccctcacctccgcaagccgccgcgggaggccgtctccagcgcctccctcgtcgccgtgaaggccgtgggctccgtcgcggacggcggaaacctgatttgggggaggcagctgcgcccggagctctgctcgccggtgctgaagaaggaggctgtcctcctccggccatgcctcgccgccgcctcctcgccggccgagggtagtgattccgccggagaagcaaaggttgctccggcggggttcttcgacaagtacccggctctggtcaccggatttttcttcttcacgtggtacttcttgaacgtgattttcaacatcctcaacatgaagatctacagttacttcccctatccatacttcgtatcggtaatccatttattcgtgggagtggcgtactgtt

SEQ ID NO: 226226 - DNA, 528 bp, Glycine max
cacggaattgcggaaattgtataaatcttaaaaatgaaagaattcgagataataactataagtatacgaaaaaaaaagaaccctttttttgtaattcctatgatgcaattggagcttatcaacaaaaaagaataaacttcgatagtcctttgtggctccggtggcgactagatcaacgcattatttcgtcaagagaagttcctatcgaagttcactatgaatctttaggtacctatcatgaaatttatgagcattatctagtagtaagaagtacaaaaaaagaaattcgttctatatacattcgaaccaatgttggtcatattgctttttatcgagaaatcgaagaagctatacaaggttattgccgggcctattcatatgatatctaatcatatgatatctaatcatatagatcatatagatggttggtatctaagataagacaatttatgataccgatgtaaaatcaggtcttcatggtttaacgaaaatcatagtttttcaatttctacgcaaatcacgataaag

SEQ ID NO: 226227 - DNA, 346 bp, Glycine max
atgttagtgtattaaaattccatataaaaaccgtgcgttatttcaagatcagagatttacactacccattaacaggtcaaatctatatgacatttttggcacaaccacatttacaagcattgacacaatacagagtactgaaaagggactggaaggcataaaaataccatgggattgatcatatgatcatgaccatgtggtggagtctaaaatgaccttgtgtatgtcacattggtggaatgctagagtttgagcaagcttagtggcctttattccttactaatgacaaacaggtaatggccacttccaggcaagagcgtaaactttgtgacctaccttgccaata

SEQ ID NO: 226228 - DNA, 512 bp, Glycine max
agctaacacaaaatattggctcttaattaaaaaaaaaaaaagtttgttatgcttggaaagctctcagagacagagtgataacacatccaagctaaaggtatccttgtacagtacgaatattagcatatataacttatagcttagccctggtgaaaaactgacgggctaaaaagtaccaatgactctaaaatacagtaaaatcaatagcttaaaatgaaaatatggcagatgtaaatcacttcactttatggctttctcttaatatgtctttgagcctttaagtctatcacaattacagagatgttatcttggcttcccctgtggatggcaagcttagttagatactctgcggcggactgagctgcaggatcagttccttcactgcgtgctgttgggccattgtcaccaaacttcttgtgccaaagaaggattcgcttatttgcaacctcacatgcttcttcatttgtcattacatcccataaaccatcacttgctagaatgagacactcatc

SEQ ID NO: 226229 - DNA, 395 bp, Glycine max
tcgagcttcacactgcataccttatgtcttccgaattcgaaattaatttgcaagatggctcatgaaaaggctcaaatcaacattcgtggtggtctggtcactgtggacccatgaggaggcaaccaccattaactagctgactaagcctgttgtggagaaagaagcttcagggcatgccatatgagggcatgcacgtacggactcggacgggaaccagatacttatgttaacaaaataatctggaaccctaatgtatcagtgtcatcataagtgtgccgataagctagctatgctatggttacgtactctgagatgagagtcttgatgaacagtaccattctgatgtatcgctgcccttgaacgttaatgcgtgcttattatcttctgcctaaaaa

SEQ ID NO: 226230 - DNA, 493 bp, Glycine max
aagcctcaaaactaatagtttgtgttgttataaaataaattaacaacatgcgaaactagtgttaaagttttttctagccaagcaaaattgtgcttatatcccatgattctataccaccaagcgcaaaacaagaaatttgcggtacatgattaaagttatagaatgtttatcatgttactgggtctggatgccaacaaagaaacataaagtttaagtactcaacatgagagtcagaatgctagagccattcatcaagagacttctgatcatgaatccgggacttcatgacgccttcatatcattcaaaccacaacgagccagaaacttgtgattctcttcaaagataggagaaaagtcagtacaaaatttctgtatatcagcactgatatcaccagggccttgtatcacctccatgaattctttcctatcaggagcaagcttcatcgctacactgaagctagaacttgcaagccagccatgccacttctttaga

SEQ ID NO: 226231 - DNA, 411 bp, Glycine max
ggaatgcaactgaaagccttatttttaaaacaatgacattagcaggggctgtaacacttgattatgggaaaatttgtcaacaagggaaaatgattaggaaatgcttaagatttaaatcccgaagtagatcaggatggcttatagtattttgtgggtacaaatggcatttttgtaaggactccttcattgggttttcctggaataataatctttactttggggcctgccttgtgcaatccaaatttcacatatcccatggctatgttcttttggaggcaaggactgaatccaccactggggatttccccaatggtgttgcctccttcattttgaatctcactggggcttttgggaggtggaccagaagaaaagaaaccaacacgcctgattttaggaccttcttcgagctgt

SEQ ID NO: 226232 - DNA, 387 bp, Glycine max
tgagtttccacactgcataccttaggtcttccgaattcgaagttaatttgcaagatggctaaggaaaaggctcagatcaacattgtggtggttggtcatgtggaccctgaggaggcaaccaccattaacgagctgaagaagcctgttgtggagaaagaagctccagggcatgccatatgagggcatgcacgtacggcctcggaggggaaccagaaaattatgttaacaaaataatctggaaccctaatgtatcagtgtcatcatcagtgtgtagtttaagctagctttgctatggatacgttctttgagatgagagtcttgatgaacagtaccattctgatgtattgctttccttgaaagttaatgcatgcttcttatcttctgtct

SEQ ID NO: 226233 - DNA, 449 bp, Glycine max
ggtcttgcttgatctgcttctacctacactccgaacggggaaatgctgcatccaccctatacatattgatgtatccaccaggtgccaaatgacaggtgcaaaggccacaagtccgaagaaagtgagaagtagcgtgcatgatgatagtgatagttgactggctgtggatgtaagagccacgaagataatatgaggctgtggtgtattataaaagcagaaccgttgaacttgaacaatctactttctcataccattcacttggcaagttcgtcactgaggagtcttgctgcggcaaccatgtctgtgagggctggcttcacttcactgcacttgcgggttttgagaccacagtcagggttgacccacaagatgttcttcttgagcactgcaagcatcccattgattctgtcagcgattttattagttggcggtattcttggcgagtggat

SEQ ID NO: 226234 - DNA, 568 bp, Glycine max
attaattgtaagtatagaataatcaactattgtctaaccggccaaattccaaacaattcaaaagcagaacatatagacgaaattggcaaaatgtaaaaaaacagagataaatgggaatgaaatagagttcatatggcagtagatacacgaattgcagcaaatgtaaatcagtgatggtatagatcggtgccagtagttatcatcacgccattggtaattaccatcagagcattgcccaagattgatccatctactattcaacatactgctcctcaccttcatcctcgtattcatcatcctcctctgcggttgcatcctggtactgctggtactctgctaccaaatcattcatattactctttgcctcagtgaactccatctcgtccataccctctccagtgtaccaatgcaagaaggctttgcgccggtacatagcagtgaactgcttactgaccctgctaaacatctcttgaattgatgtcgagttcccaataaatgtggatgacatcttaaactcctgggtggaatatacacacacttgactttacattgatgggaattcattaac

SEQ ID NO: 226235 - DNA, 452 bp, Glycine max
ggcataaatggatgtccgctttcattcgctgcaatgcaattacaagctttttggaacccaattatacaatttatacccggtttcctgagattgaaaacaacattttgatttactatataggggtaactgataaacaagttttgaaggaacaatccaaccgagcccatttaattaattaagcaaagaaaagaaagaaaaaggaaatagaagtgacaaagcaagttgcaaaggattgtaggtcatttggaacagcaagaaaaatagggttgattttgcttaaatgtataagcaccattgttgaccaggctgaccctgttgacagataactctgccttggatggttcggagttgagcacctttctggtcaccttggggtatatttttcgaattaccattttaaatgccgttttcacatttgtggagtccaacgcaaacggtttcatgaaaaacaa

SEQ ID NO: 226236 - DNA, 504 bp, Glycine max
gagacagcaacgacggatgagttgtcgcaaacgcttaaatggtgaaagttctgaagccaaacaaggccgtcattgaccttcagggacgctactcaggcgagaaagccgtgatcgttcgaaccttcgacgaaggaactcgtgtgcgcatctacggccactgattgaaggtagggataaagaagtgcccttccaaggtgatcaatatggtcttgggaaaggagacatcgaataagtcgtgcgtgaaggcgtacgtgaagcttgttaactactagtacctaatgcccacgcgctacacgcttgacgtggacttggaggacgcggctaaccacaacggtcttaactcgaaggataagaaggtcactgctctcaaggagaccaagaattgccttgaggagaggttcaaaaccggtaagaaccgttggaacgtcaccaagctcaggttctgagctgtaagcttatcgagtgctgctattacaatgctattggatcatgcttaaatgatac

SEQ ID NO: 226237 - DNA, 595 bp, Glycine max
  unsure (1)..(595): unsure at all n locations
gagacggcaaagacggaggagaggtcgcaaacgcaaaaatggtgaagtttctgaaaccaaacaaggccgtcattgtccttcagggacgctacgccggcaagaaagccgtgatcgttcgaaccttcgacgaaggaactcgcgagcgcccctacggccactgtttggtggcggggataaagaagtaccctgcgaaggtgatcaagaaggactcggcgaagaagacggcgaagaagtcgcgcgtgaaggcgttcgtgaagctcgtcaactaccagcacctcatgcccacgcgctacacgcttgacgtggacttgaaggacgcggttaaccccgacgttctcaacgcgaaggataagaaggtcactgctctcaaggagaccaagaagcgcctcgaggagaggttcaaaaccgggaagaaccggtggttcttcaccaagctcaggttctgagcggtaatcttatcgagttttgctattcgaatgcttttggatcttgctttaattgatactttataatgctgcgttgagattagattttggaatttttggttaaatcttggtcatattggatgattaaggtggttcatngagatgatatg

SEQ ID NO: 226238 - DNA, 602 bp, Glycine max
gcagagcataaacgttgttgtgtgtttccttagaaaagagagaaagaaataatgagctccatgggtgagagccagcagcggagcttgtttgggagtacaaaggcatcgtctctgccagtgtcaacgtcgcgttcagactctgaaggaggccttcgcagacgtctttcttctctgtctctgaagatccaattagagagcccgaattcctcctcatggtcatttcccagatccaagtccctctcatccatgggtgactatgcaaggacatggtgggactggagctgggcctggatcctctccaggaagctcatcttcgctacagatctcgaaatgaacgaccaggaaaccaagctccttgcttctcataacaggggcacttggagacatgttttctataagctgcgctctgagatcagaaggttcatcaatacttctgatcacaccactcttgccaaaacctaccaccacaagtgcactcctcaagtcttctcataattcacaatgcttatgcctgcttcaaattatttaagtcttatttcagaaccaccgtatgcctaagctttgcaattcgtttggtctctttgtttttttttcccactaat

SEQ ID NO: 226239 - DNA, 548 bp, Glycine max
gtgagctgcctgaaagtaaacagaaaaactctcagcgccgttctttcatgggattcaggaggaaaagtcagtccaatgatgaaagcatggataatgaactgattgaggatgtcagctctgagagtgaggatgataaagggcctgatagtttggaattagatgacaaagaaaagcagagggaaaagcgaaaaggtcttgatcttgctaccacgcttgaacgtatcgagaaaaactttgtcattactgatccaaggcttccagacaatcctataatctttgcatcggatagcttcttagagcttacagaatatagccgtgaagaaatcttgggaaggaactgcaggtttctgcaaggacctgaaactgatccggcaactgtgagaaaaattagagaggcaattgacaatcaaacggaagttaccgtgcaactgatcaattatacagagagtggaaagaagttctggaacctgtttcatttgcaacctatgcgtgaccagaagggagaagtgcagtattttattggtgttcaacttgatggtagtcaacat

SEQ ID NO: 226240 - DNA, 577 bp, Glycine max
  unsure (1)..(577): unsure at all n locations
cttttgacaataatccaatgtgctgttaatccaggaaagtattttgcaaaggtgttgcataaggcgatgaaaggcttggggactgatgattccacactcattagggtcgttgtgacaaggactgaggttgatatgcagtatatcaaagctgcatatttaaagaaacacaagaagactctgaacgatgaagtacactcagaaacatccagtcactacaggacttttcttctctcacttttgggccctaatcactagccaagatgttcaatgatgtaagtggaataaattcacccttgatgtgtaaatttgactgtttttagtgctttgtgatcaatgtagccgacaacttgtagaataaggcctttgttgttgttgttgttgttgtagtgctttgtgagtgttaatttatcagcctatagcacagatgaagatttgttgtgtattatttaagtatgcttaactattttcatttcttgtttcaacaaatcaaacattgacaatcaaatagaggttagagaagctactattttccattcaagcctacatagantgatgatatagttttacttaataaaaa

SEQ ID NO: 226241 - DNA, 587 bp, Glycine max
  unsure (1)..(587): unsure at all n locations
gtgcgttttgataatcaaccaagttgcagaagcgatggatctggaggtggcagggcggcacgcgatgctgttcgacgacgacggcatggcggcgttcgtgaactcagcggaagctctggtcgaatggaactctctttccatcgaccgctacgatgtccgccatcttctctccgctcccctgcccccgcgcctcaagcgccgccctcctccgcccgaacccgacctcgatcaccagcgctatctcgatctcccttcctcttctgccgacgatgaacaacaagattatggttcagatccagtgagttcaactggctttcatgctgtcgccttttcgtatggaaattctaatgtgtccacggagacaaaggacaacgataccaagtctagttttgatcctaaattcccagtaccagaaagcctactcaataacctgatgctcggagcataaatggagttcttatgactcaaggtagccattcacaggcaccttgattccttttgatgtcatgagaaagtgccgtgcangtgggattaagatgatagaaatttggtgattcccttttgagagcaaatgggatgatacatgc

SEQ ID NO: 226242 - DNA, 587 bp, Glycine max
cttcgaggtcctcaccgcatgcctctggcgctgccgcaccattgcgctgcagcccgacaaagacgaggaggttcgcatcctctgcatagtcaacgctcgctccaagtttgaccctcctctgcctagcggttactacggcaacgcttttgccttccccgttgctgtcaccactgcggggaagctgtgcgataaccctttgggatacgctctcgagttggtgaggaaagccaaagcggatgtgactgaggaatacatgcactcggtggctgatttaatggtcaccaagggccggcctcacttcactgttgtgagatcgtatctcgtgtcggatgtgactcgtgctgggtttggaaacattgagtttgggtgggggaaggctgtttatggaggacccgccaagggaggggttggagccatacctggtgttgctagctgttacataccctttaagaatgctaaaggagaggaagggttggttataccggtttgtttgccttctgaagccatggagaggtttcagaaggagttggactgtgtgcttaaccaccacatggtgcaacctagtgccattgctgcaaactctaggt

SEQ ID NO: 226243 - DNA, 512 bp, Glycine max
tgcctctggttttgatgaggaggagttttctagattgatcccaatggtgtctcggcgccggcaaactgctgatttatgtcgttttcttgggctgtcagaaaagatgcctggtgtaattgaggttttggtgaacagtgggcgacaaattgatgctgttaacttggcttttgcatttgatcttactgaacagttttgtcctgtatctttactgaagtcttacttgaaagatgctagaaaagcttcttctcctgttagaagtgctcactcttctcccactgcacagattgaggtgaatgaacgagagctggctgcacttaaggctgtaatcaagtgcattgaagatcataaacttgatgagcaggatcctctggatcctctgcagaaactgatcggtgcagcttgagaaggcccaagctgacaagacgagggaaactgaagcatcatagcctcagcccatgagacctcgtgcaaatggtgtgggatactgtccacgtgtcactaacattctttcg

SEQ ID NO: 226244 - DNA, 288 bp, Glycine max
attcattcctttctctctcaaaaccctaaccctaaccccaatccccagagtctggaagcctctccaatggcgtaccagacccccgatcaagattcaggttccgatccgaagaccccaacgcgcctctacaacccctacaaggatctcgaagtccccattcgcaacctctaccagctcccaacctccccggagtacctcttcgtcgaggaggcccgccgcaagcgccgatcctggggcgagaacctcaccttctacaccggctggggctacctctccggcgctgtcggg

SEQ ID NO: 226245 - DNA, 560 bp, Glycine max
tatctctgcaattaaacacagaaaccatggcttccactaatgctcttcctcccaccggcaacggcctcatcgtgagcttcggcgagatgctcatcgacttcgttcccaccgtctccggcgtgtccctcgcggaggctccgggattcctcaaggcccccggcggcgcccccgccaacgttgccatcgccgtcgcgagactcggcggcaaagcggcgttcgtcgggaagctcggcgacgacgagttcgggcacatgctggccggaatcctgaaggagaacgacgtgcgatccgacgggatcaacttcgaaaagggcgcgcgcaccgcgctggcgttcgtgaccctacgcgccgacggggagcgtgagttcatgtgctacagaaaccccagtgccgacatgctcctcacgcccgaagatctcaatctcgaactcatcagatcccgcaaagtattccattatggatcgataagcttgatcgtggagccatgcagatcagcacacttgaaggcaatggaagttgccaggggaacaaggtgcttgctctcttatgacccaaacttg

SEQ ID NO: 226246 - DNA, 598 bp, Glycine max
attgcatcatccctgaagctgaacctcaaaaccctagctgccggcttgtctgcaacggcatcgtttcagtatctcgttatgattagttgagaatccaaaggaatcgaatcgaatcatctcgacgagaagcaaaacaccggctatagttatgtacagagagcgaggaggcgtcggatccaaatcggaggtaacttccgttgatcggaagcgaatcaatgacgtcctcgataaacagctcgaacgatcctcgccgtccacatccagagccgccggcgccatcaacggcaaggaccgctcctgctcttccctcttagccgccgccaaggactcccgctccgcctgcgtcacctgccctatctgcaagaattccaacgcttccgacgaggaatctgaaacagacagcgaggagtctgatgttagtggctccgacggagatgacacgtcgtggatctcgtggttctgcaatttgagaggaaatgaattcttctgcgaggttgatgacgattacatgcaggacgacttcaacctctgtggattgagcagtccagtgccttactatgattatgctctggatttgatttggatggtgaatcctctc

SEQ ID NO: 226247 - DNA, 274 bp, Glycine max
gcttgtttgccttgggcaagaacaaagcaaggtagaaagacttagtgctagattgttggagttgggagaggatgttgacatactgcttgaaggcattggtgatgatgctggggctgctgaagatggtgaagatgaggaagatgatgaataatagattttttgtctctacctcactttttacattttatgttgaattgtacagtctaacacgaattatggtgaatggatcagtgcttgtattccttggttggattttaaattatgatccttgagg

SEQ ID NO: 226248 - DNA, 549 bp, Glycine max
  unsure (1)..(549): unsure at all n locations
tgaatctcagaattctctaaaagagatctttttctgctctttgaagaaagaagggtctttgcttgattttggagatgtctctgctctcagatctcatcaaccttaacctctccgataccaccgagaaggtgatcgcagagtacatatggatcggtggatcaggaatggacctgaggagcaaagcaaggactctcccaggaccaggtagcgacccttcagagcttcccaagtggaactatgatggttccagcacaggtcaagctcctggtgaagacagtgaagtgattttatacccacaagccattttcagggatccattcagaaggggtaacaatatcttggttatctgtgatgcctacactcctgctggagaacctattcccactaacaagaggcacgctgctgccaaggttttcagccatgctgatgttgttgctgaagtgccatggtacggtattgaacangaatacaccttgttgcagaaagatatccaatggcctcttgggtggcctgttggtggtttccctggacctcagggtccatactact

SEQ ID NO: 226249 - DNA, 550 bp, Glycine max
cttcgaggtcctcaccgcatgcctctggcgctgccgcaccattgcgctgcagcccgacaaagacgaggaggttcgcatcctctgcatagtcaacgctcgctccaagtttgaccctcctctgcctagcggttactacggcaacgcttttgccttccccgttgctgtcaccactgcggggaagctgtgcgataaccctttgggatacgctctcgagttggtgaggaaagccaaagcggatgtgactgaggaatacatgcactcggtggctgatttaatggtcaccaagggccggcctcacttcactgttgtgagatcgtatctcgtgtcggatgtgactcgtgctgggtttggaaacattgagtttgggtgggggaaggctgtttatggaggacccgccaagggaagggttggagccatacctggtgttgctagcttttacataccctgtaagaatgctaaaggagaggaagggttggttatacccgtttgtttgccttctgaagccatggagagggttcagaaagaattggactgtgtgcttaaccaccac

SEQ ID NO: 226250 - DNA, 585 bp, Glycine max
  unsure (1)..(585): unsure at all n locations
ctagggtttatcgagggtttcgttccttcctctctgcaacaacaatggcgaaacctgggcgaggtcgtcgctctccctccggttccgtttccggctcctcctctcgctcctcttccccctccgactctcgttcctcctctcgctcgcgctccctttctcggtcccgttctccctcgcgctccagatcctcttccccctcctcctcctcttcctcccgaagctcccgcagccgcagccctcccccgcagaggcgccgaagtcctgctgacgcaactaggcgaggtcggtctcctccacctcagtctaagagagcttcacctgccccaaggaaaccttctcctgtacgcgagtcacttgttcttcatgtagaaaagctcagcagaaatgtcaatgaagggcacttgaaagaaattttcagtaactttggtgaggttataagtgtcgagttggcaatggatcgaactgtcaatcttccaaaagggtatggatatgtgcagttgcaggacagaggggatgctgaaaaggcattatngtacatggatggtgcccaaatagatggcaatgtcatcaatgcaagatttactc

SEQ ID NO: 226251 - DNA, 396 bp, Glycine max
catggacgctgatgttatcaccattgagaactctcgctccgatgagaagctcctgtcagtcttccgtgaaggtgtgaagtatggtgctggaattggccctggtgtctatgacatccactccccaagaataccaccaactgaagaaatcgctgacagaatcaataagatgcttgcagtgctcgagaagaacatcttgtgggtcaaccctgactgtggtctcaagacccgcaagtacactgaagtgaagccagccctcacaaacatggttgccgcagcaaaactcatccgtaacgaacttgccaagtgaatggtataagaaagtagaatctacaagttcattggttctgcttttataatacacccaagaaaaattttctatattgggttgtttcaata

SEQ ID NO: 226252 - DNA, 493 bp, Glycine max
gcacaaaactggtaatatttcatatcaataaggattgcggcaaagccgcaaagatacaacattcattagggaaaacaggagttgggaaaaataaggggagaggggttgaggaagaattaattgcttacagagcatgcttaaacatctaaatattccacacacggatattgaaacaacccaatatagaaaatttttctttggtgtattataaaagcagaaccaatgaacttgtagattctactttcttataccattcacttggcaagttcgttacggatgagttttgctgcggcaaccatgtttgtgagggctggcttcacttcagtgtacttgcgggttttgagaccacagtcagggttgacccacaagatgttcttctcgagcactgcaagcatcttattgattctgtcagcgatttcttcagttggtggtattcttggggagtggatgtcatagactccagggccaatttcagcaccatactttacacctt

SEQ ID NO: 226253 - DNA, 491 bp, Glycine max
gaagaaactcaattctcactgaaagaaagttgctaacacttggcaccacttatcaacttatcatagttgataacatcaaaggcacaacattgagggaatgagggttgttatatcagcagtatgtgctattgtgctattctcttatgctgctgcgtacgatcctttggatccaaacggaaacataacgatcaaatgggatgttgtgtcatggacaccagatggctatgtagctgtggtaacaatgagcaatttccaaatgtttcggcacatcatgaatcctggatggaccttgggatggacatgggcaaagaaggaagttatatggtccatggtaggagctcaaaccacagaacaaggagactgttctaagttcaaaggcaatgtacctcactgctgcaagaaaactcccacagttgtagacttgctccctggtgtgccttacaaccagcaattctcaaactgttgtaagggtggagtggtggcagcatggg

SEQ ID NO: 226254 - DNA, 543 bp, Glycine max
gaataaaagggaaatggggtatccattacagtgttgcaatataagcatttacacatgattcagacaaaatcattgatgggaattatattcagttattccctattcagcatccgatgggcactcatgaatcacagcacacacattcatgagtctggcttggttttatcaaacaattccctaacaatcttcatacctgatgtacgttgtggtgtgtgtaggaaaacttggcttcaaaatttcacagaaaacaattgtatctcgcctacgtactatttcaccaaacagctatcatgacaagcattgtgaaaatgaatgctgggaagtttaataagttcacaggggcagaattagggaggatcgggtagctatcaggaggtggcagcatgcattcctgaccattaaagtagaccttgcgaggaaatgcccatccttgcttgaatgtgaatgctccctggttcttctgaagaagatttctgatagaacattcccagttggtcccagtttcattaagagatcattaaagtttttcatgccctagaacat

SEQ ID NO: 226255 - DNA, 436 bp, Glycine max
caagaagactacctagagaaagatgagttcagctttggtaatagagaaatggacagggagatgaatcagcttgaaggtgagaaggttggagatgggaaaccaaaaaccatgcctgcagcaagtgtgatgacaaggcttatattgattatggtgtggagaaaactcatcagaaaccccaacacctactctagcctaattggtctcacttggtctcttgtttcattcaagtggaatgttgagatgcctgccataatagcaaagtctatctccatattgtcagacgcagggcttggcatggccatgttcagtcttggtctcttcatggctttgcaaccgagggtcatagcatgtggaaattccacagcagcttttgccatggctgtgagattccttacaggtccagctgtcatggcagctgcttccattgctgttggac

SEQ ID NO: 226256 - DNA, 598 bp, Glycine max
tgtctgtgcaaatttgcgttgttcttctcggcacacctcactcactgaacggtaagtatggcggacaaggctgttacaatccgaacccgaaagttcatgaccaacaggcttctttccaggaagcagtttgtcgttgatgtccttcatccagggagggcaaatgtttccaaggctgaacttaaggagaagctggctaggatgtatgaagtgaaagaccctaatactgtatttgtcttcaaattccgaacacattttggaggtggcaaatccactggatttggtttgatttatgatacagtggagaatgccaagaagtatgagcccaaatacaggcttatcaggaacggccttgacaccaaggtagaaaagtcaaggaagcaaatgaaggagagaaagaatagagctaagaagattcgtggagtaaagaagaccaaggcttgcgatgctgccaaggctgggaaaaagaaataagttttgagacatcctgtttcaattccaaggttacattggttttggtgctttgtaatagttaatttatcttatgcatgatttattgaatgagatgttttggtgcaagtgttgatcctggtttaattat

SEQ ID NO: 226257 - DNA, 514 bp, Glycine max
cccactgtggccacttatacactcctatcaccaaatacgcataccactatcaactgctctttgcgaggggctttcctcagaactgatcaaggctcactgacactggaggaccatgagtcgcacgtagcacagcccgagcagtcgctagggatgctgctggggctaactgccttgctccatcaagtatagcagcacttcacgtgcatgctttagccaatgggaaccagaccatagctgctgacccagacacgatcattcccaagatggaagtgactccactgaccatgcccatatccagctcgcatgaccccttgcatggactggtcattgacctaaaaccagcgcatcatattatgctactaggcatgatgacctgaagatgctgctcgcttcggaatgatccagcgaatctgatactgattgcaatgctctgcatctaactgtcacaagtgatgcgccataccatctagtctataccccctatatgtgtacctgcacactcttatgaatctaa

SEQ ID NO: 226258 - DNA, 577 bp, Glycine max
gttctttgcttttctcgggctacgaaatacgacgtcgttttcccaattttccccggcgaccgggaaatggtggagccggtggagcttcgcggcgaggagcagctctcgttgctgtcagattccagcaatggtgaccggtcgtggcggttgaacttcgacgggtttcagctatcttcggagcacacggagaagcaagtgaaaccccctcgcggactccatgactgttatggggttcttggtcaagaagataatattgcggagtactatcagcagcaggtagaagtgcttgagggctttactgaaatggatgctttagcagagcgtggttttattcctggaatgtcaaaggaggagcaagacaagttagcaagaagtgagacttttgccattagagtgtcaaacgcagcaaacatggttctttttgttgccaaagtttatgcatcagtcagaagtggttgcctagccatcattgcatccacgttagactcacttcttgacctgctttctggattcatgctctggttcactgcattttccatgcaaacaccaaacccatatcagtaccctataggaaaga

SEQ ID NO: 226259 - DNA, 586 bp, Glycine max
gttgcgttttgtgaaatcttattcgacatggcgtcacgggacaacaagaaggcgtcgagcagccgagccggcagaattcgcaccctctccgatctgaaccgtccctccgccgattccgacagcgactccgatggccctcaggagtactacaccggcggcgaaaagagtggaatgcttgtccaggatccttcaaagggaaatgatgtggatgaaattttcaatcaagctaggcaacttggggctgttgaaaggcctcttgatcagcttcaggagcctccaaggtcaactagctttactggaactggcaggttactctcgggggaaactacacgatctactaataatcagcaacctgaggctgttgttcataacattgttttctggagtaatggtttcactgtaaatgatggaccattgaggagtttggacgatcctgaaaatgcctcatttttagagagcataaaaaaatctgagtgtcccaaagagcttgatgcctgagataggaggtcatctgttaatgttaatctcatactgaggaatgagaactatcgtgaacccgaaaagcagcatgttgcatttcaggagt

SEQ ID NO: 226260 - DNA, 528 bp, Glycine max
  unsure (1)..(528): unsure at all n locations
gtggggacaaacaatgagaaattactaaatgatgagttttacattgggcttagacaaaagagggcaactgggcaggaatattctgaacttttgcacgagttcatgactgctgtcaagcaaaactacggagaaaaagttcttgttcagtttgaagattttgcaaaccacaatgcttttgagttgcttgcaaaatatggcacaactcatcttgttttcaacgatgatattcaggggactgcatctgttgttcttgctggggttgtggcagccttgaagctcattggaggtactctggctgaccacacattcttgtttcttggtgctggagaggcaggaactggaatagcagaactaatagctcttgagatgtcaaagcagacaaagacacctatagagggagactcgcaagaagatatggcttgtagactcagaggggtttgatgttggttcaagaaaggcttcacttcaacactgcaagcagccttgggctcatgagcatgagcctgtangcagtctcttagaagctgt

SEQ ID NO: 226261 - DNA, 451 bp, Glycine max
ccttcaaccaccaatattctatgactctgtgaaaactctcgtctctctctctactgaaggtaaggcagagaagagaagaagagaaggaaagaggcttgtacctggagaaaagaggaggcatgtacatggagaacgagggtgtcaacacggcggtggtggagcaacaacctgtggcatgcacgtacaagctgacgttgagctttcgggagaccacggtggcttcaacggtggcgctggttataccggtgggccttctgggcgtctgcctgaccatgcccgattccgattacagctttctgaaactgcctcgtaccctccaagacctgtaactcctacgggataaccttgagagctatacaagcgactacactgcacaagtcttgatggcgtactgcgtggtatataattatgtgcagactgtcatgatatcagggactgtgctcatgacatt

SEQ ID NO: 226262 - DNA, 419 bp, Glycine max
ctcgagccgcaatagttgaaaactctggagcctggttaaatgatttgtgtgatcaagttgatgaaaaagttgtttttaagcctttcaactttgattctattgctgagcaagtaattaaaagcattgacacacaatttcaaaagatgttaggatcagagtttatacttgaaattgagtatgaggtcatgacacagatacttgcagctgcttggttatcagacaagaaaaaatctttggaagattgggttgaacatgttcttggaagaagctttggtgaagctcatcaaaagtaccactttgcacctgaatttgtgatgaaactggtttattgtgaaagattttttttggaagaacaatctcctggagtatgccttccagctagaattaacttgaactgaatttttgctcactatgtattt

SEQ ID NO: 226263 - DNA, 522 bp, Glycine max
aaatgcagaagcagaaagacattagaattaacatgaaaactggtgaagatacattcttttaccataggatcaccacaaaagaaaaaattgtgggattgattagccgaaaaaagctagtggctaccaaatgctatatcctacaagctacattttacaagtaattacaaaatacatagtgagcaaaaattcagttcaagttaattctagctggaaggcatactccaggagattgttcttccaaaaaaaatctttcacaattaaccagtttcatcacaaattcaggtgcaaagtggtacttttgatgagcttcaccaaagcttcttccaagaacatgttcaacccaatcttccaaagattttttcttgtctgataaccaagcagctgcaagtatctgtgtcatgacctcatactcaatttcaagtataaactctgatcctaacatcttttgaaattgtgtgtcaatgcttttaattacttgctcagcaatagaatcaaagttgaaaggcttaaaaacaacttttt

SEQ ID NO: 226264 - DNA, 553 bp, Glycine max
aacaagtaacaacagcagcagtagttgttcacactgaatcatattaagatataaggacatacatgaactgtataccaatatatatatggcaatcggcacattaaccagtgtcacaatgttgccataaatattacatataacgcacttaatctattgaaaaaagccgattgcttggtacaagcaaatgcactacacaccattccatactctaggcaacaccaaaccactcaaatacaagggccaactatcctcttaacttgatgcatcttcaaagccattgataatttcgtcaattgaaatcagtaaggtaagatcttccactgctggttatcacctttgttccagtcccagaggactattgtagtgccatcacgaacaccttcagaattcttgtcaccgtgaaaagcatccacattaagatgaacattgttgaccatccttatagctctgtggccatctcctaagtcacggctttcagtccatagaatagacttatcaagatagtccggcttgtaagtattagccgaacaggaagaatggcaccgatggagtg

SEQ ID NO: 226265 - DNA, 561 bp, Glycine max
tcacactggtcttcgcttctcattcatcatttctcacctaaccttctcttcctctcagtctcagatcagaaacctcagccagccatggcagcgttccagaagatcaaggtcgtcaaccccatcgtcgagatggacggagatgaaatgactagggttatctggaagtcaatcaaggacaagctcattttgcccttcttggagttggacatcaagtattatgacttaggccttccttaccgtgatgagaccgatgataaagttacaattgaaagtgcagaagcaactctcaagtacaatgtagcaatcaagtgtgcaactatcactccagatgaagctcgtgtgaaggagtttggcctgaagtcaatgtggaagagtccaaatgggactattaggaacattttgaatggaactgtcttcagagaaccaattctgtgcaaaaacattccccgccttggtcctggttggacaaaggcaatatgtattggaaggcatgcgtttggtgatcaatatccggctactgacactgtaattaaaggagctggaaagctgaagctggtgttt

SEQ ID NO: 226266 - DNA, 587 bp, Glycine max
  unsure (1)..(587): unsure at all n locations
ttcacacacacacacagcttgggaagaaaatcgagaattttccgagaaaatccgaagaaggcgggccatggtttccccggaaaacagcaattggctgttcgattacccgctgatcgacgacgttattcccgtcggcgacgcctgcttttccgtctccgcctgcgccttctcctggcccccacctgccgccaatgtcagtgttgaaattgatgcttcgcttggggattctgatggccccaaagatactgctttgaagaaaagggctagatgtgattcaagtactgcttctagctctaaagcgtgtcgggagaagttgcggagggataggcttaatgacaaatttgttgaattgggctccatcttggagcctggaaggcctgccaaaacagacaaggctgccattctgattgatgctgcccgaatggtaacacagctgcgggatgaagccctgaagttgaaagactcaaatacgagtcttcnagagaagattaaagagttaaaggctgagaggaatgaacttcgtgacgagaaacagaggcttaaggcagagaangagaagttggagatgcaggtaaaatcaatgaatg

SEQ ID NO: 226267 - DNA, 522 bp, Glycine max
caatcacacatgcatttccctctctaaccatatttacaacatacaaacagggactgaattaaattactagaactggagttatcaagctatcccatgatgttcgtcaagaaacgttcccggcgaggcgtacattcatcgctgccgagctcgaacgcgaagaagctatcgagactgccgcacgtgttcgcgaaaatactagagcttacttttccttcagaagacgacgtttccgtggaggaaacgccgcagttattatggttcgtggcgtcgtgcaatgcctatggtggcgtgagagctctggcgatcgacatttttccggcgataacgaagatcttgatacagagaatggacggtggtgacatggctgatccggttcagcagcagcttcatgttccttctggcctatgactgtggcagatacggcttacgccgtggacgcagccggagatggttaccgccgtgtgcagctgcgggaagctgattgtgactgtgccgtagatcctgagctgagcaaactgattc

SEQ ID NO: 226268 - DNA, 639 bp, Glycine max
gacctatgctccagcatatcttagcccacatgcatcagggaaacctccttattggagcaaactttgcttcagctgcatctggttatgatgaaaatgctgctactttgaatcacgcgattccgttgtcccaacagttgagttatttcaaggaataccaaggcaagctggccaaggtagctggcagtaaaaaagcagcctcaatcatcaaggatgcgttgtatgtgctcagtgctggaagcagtgactttgtgcaaaattattatgtcaatccttggatcaacaaagtctacactcctgatcagtattcgtcctacttaattggttcattctcaagttttgttaaggacttgtatggattgggaggcaggagacttggagtgacttcactcccaccattgggttgcctacctgctgcaaggactatatttggtttccatgagaatggttgtgtctcaagaatcaacactgatgctcaaggatttaacaagaagctcaactcagctgcaacgagtcttcaaaagcaacttcctggtcttaagattgcggttttcgacatttacaagcctctctatgaccttgttcaatcccttcaaaatctggttatgtggaggcaaacagaggatgctgtggtacccggac

SEQ ID NO: 226269 - DNA, 613 bp, Glycine max
ctctgtctcgtttacacatctctccaacctttcactttcgtttctcagttggattcgaatccctctctcaatctcctttccaaatggccagcgttgaggttgcacagcaaacaccaacaacagttccagaaaatgaaacaaccgaagtaagcaagacccaggaaacaaccccagtcactgaggctcctgcaacagaacaaccagcagctgaggttcctgcaacagaacaaccagccgctgaggctcctgccccagaatcaaccaccgaagcaccaaaggaagaaaccaccgaggcaccaacagaaacagtagaaaaaacaactacagaagtagccccagaggagcctaaagaagttccagttgagaccgaggaggtggtggcaaaggagacagaggaagagaagccagcagaagagaaatcagaggagaaaactgaagaagtgaaagaagaagcagaggagcctaaagaaactactgaaacagaatcagcagcagcagcaccaccagcaaccacagaggaagagaacaaaccagctgagtcagttgaaaccccagtagagggtcctgttgagaagactgaagcctagacctaatgacagtgtgagtgagaaaa

SEQ ID NO: 226270 - DNA, 550 bp, Glycine max
aacataatgcttaaagcaacgttcatatcagaagggaaaaatagtttgaatcccatccaacaaaaatcatgcgattaaaatccaattaaaaaagcataaagtaaaataagtttttaaaacaggtatctggaggaaagcaactacatttagtccacttcctcaatcttggggccagcaccacttgcaccagaaggaggagcagcatactcatcctctgctgcaccagcaccacccacgtctggaccagcaccaccttggtacatcttggcaatgattggattgcagatgctttccaattccttcattttgtcctcaaactcatctgcttctgcaagctggttgctgtctaaccactggattgcttgctcaattgcatcctcaatcttcttcttgtcagccgggtcaagtttctcaccaatcttgtcatccttcacggtgttcctcatgttgtatgcatagttttgcaaagcgtttttggcctgaaccttcttcttgtgctcttcatcctcagacttgtacttcttagcctctgaaccatcttttcatatct

SEQ ID NO: 226271 - DNA, 487 bp, Glycine max
gttcaacactggagacattcttaccaagatctactacatggtaccacatgtcccatccctgctgcgaagaacttcacctacacactccaagtcacagatcatattgtaagtctcttctatttttcatgtattgctttccacatggtagctgcagcatccaggtgccatcaaaatccttagtaggccaaggatccctgtggccattccctgacccagctggtgacctctaccttcttatacgtagaccggtaccagatgagtcacacgacgcttcagactgttctagatcttggacacaaacttccattcgcttaagccgttctcatcaatggccgatcaagggtggcaaccttcacagctatacaagggacatcattcacgcttacaatctcaaaggttgagctgtagaacacactcaactttatgattgaaggccacgacatgaagctggtggcagttgaaggaactcacaccatacataccacgt

SEQ ID NO: 226272 - DNA, 439 bp, Glycine max
cacagagcacaataggaccgaagcgttaccacgacgcacagactttgttgagtggcgcaatgaccaacttgtacacgtgtcttgatggctttgcgtacagtaaagggcacgtgagggacaggtttgaggaggggctgttggagatttcgcatcacgttagtaactcgctcgccatgctgaagaaattgccagcaggagtgaagaaattggcgtccaagaatgaggttttccctggatatggtaagatcaaagacggctttccaacgtggctatcaaccaaggatagaaaattgcttcaagctgctgtgaatgaaacaaacttcaatcttcttgtggccaaagatggcactggcaactttaccaccattggcgaagcagtggctgtggcttccaactccagcgcaactagaattgtgatacacataaaagccggggcata

SEQ ID NO: 226273 - DNA, 563 bp, Glycine max
ccacaacaaacatctaatactttattaaatggggataccaaaagagcatgaagccactaataaccataacgtattcaactgaaatcagagaagaatggaatgtcggtggaactcaaccattcattcccttgaatgaaattgcgaactgtgaactggtttgcctcagtggcgttcttgataaccctataaccaggccacgtaactcttgcacttgtgtttgaaccgggacccctattgttgtactctccataatacaacgtatccaatgcaaacgtgccattccactccaaccaccctttggggtctatcagatcctccatgtaagaattaagataaacagttctcgaatacttcttccaaggacgacccaagtagttcttgaactgagatttgaccgggattaaatcagcagctgctgcaaccttgcagttcaagatggaaatgccggtgttttggttagggtcttctcttccttgtgcagtgaacatgttcctttggttttcatcgtgcttgcgtgcgtacaagttgcagttctggagcactgttgctgcattgcccaagat

SEQ ID NO: 226274 - DNA, 553 bp, Glycine max
ggcaagccccactcaaccaccacacctctcctcgttcacgctacccctttctgctcttcttctacctttcaagttttaaaagtataaagatggcagagacattcctatttacctcagagtcggtgaacgagggacaccctgacaagctctgcgaccaaatctccgatgctgtcctcgacgcttgcctcgagcaggacccagacagcaaagttgcctgcgaaacatgcaccaaaaccaacttggtcatggtcttcggagaaatcacgaccaaggccaacgttgactacgagaagatagtgcgtgacacctgcaggaacatcggcttcgtctcaaatgatgtgggactggatgccgacaactgcaaggtcctcgtcaacattgagcagcagagccctgatattgctcagggtgtacacggccaccttaccaaaaaacctgaagaaattggtgctggtgaccagggtcacatgtttggctatgccactgatgaaacccctgaattgatgccattgagccatgttcttgcagcaaaactcggtgctcgtctcaccga

SEQ ID NO: 226275 - DNA, 582 bp, Glycine max
  unsure (1)..(582): unsure at all n locations
gaagagttgaggtttccagccaaaaagttgagggctttgtggttttctcctcctgctgattcactggctagcaatggcagtggcattaatgggcctttgccaagaatatttatatcagagctactggtagatcaaatgagtccacagactcaggaaataattaaaaaatacaccgaatcatctgtggatggaaacaagtatgcagcacttgcaagttcccttggacatttaacatgggaaaagcccttatattctgagtttcaacaattggcaagtgaaagtgagtatgctgcctggaccctagtcaacgggtatgcactaaaccatgttactatatccactcatcggctgaaaactcatttgaaggagataaaaaaaactaaatcagtttattaaggatagtggattcagattgaattctgaaggaggagtgctgaaagtgagccctgatggtcttctccagcaaagctcaactgtagcagattcaatttctttcaaatgttctgatggtataactgaatcagttccatgctcatacattgaatntgctgagcgactggtgctgccgcagtataaaaatta

SEQ ID NO: 226276 - DNA, 560 bp, Glycine max
caagcctataccaaagccagttccagttccagtgtataagcctattccaaagccagtgtacaagcctattccgaagccagtgtataagcctattccaaagccagttccagtgtataagcctattccaaagccagttccagtgtataagcctattccaaaaccagtgtacaagcctattccaaagccagttcccgtgtataagcctataccaaagccagttcccatttataagccaattcccatttttaagccaataccgaaaccagttcccatttataagccaattcccatttttaagccagtaccgaaaccagttcccatttataagccaattgcaatttttaagccagtaccaacaccaattgctttttttaagcctataccaaagcctgttcctattgttaaacctattcctattccagtttttaaacccatacctaaaccatgttcaattggtaaacctatcccttaagccaaagtcattttttaagccagagactgtcttcagaaaacctattcctaaacttcacccaaatctgataaagcactgtcttctacat

SEQ ID NO: 226277 - DNA, 558 bp, Glycine max
aaaaaccaaacacgatgaacaaataaaaatgtcgagaataaggtttggagaatcattgtgagcattttggtttacaaaaacaatcatcaatcatgggaagcgatagaaaatcgaaacgagcttcaccctcccaacgtgaagatgagaagagaagcaagaggcagagaacggtagaggatgaggaaaggaagaagcggaaaagggaaaagaaggagaaaaggaaggacaagaaatctcaccagcattccaaagaaaataattctgataaggggaagttgaaagataagcacagaagcaaacatagcaaaggtgatgaccatatggaattccaagaattgtcaaatgatgactattttgcgaagaacaatgagtttgctacctggctaaaagaagagaagaatgtgtttttctctgatcttttggctgagtcagcgcgcgtgttgttttctgatttcgtcaaagcctggaacaaaggaaagcttgattgcaattactatgaaggcattgcaactggacctggcacatgccataactgggatatcaagaagtagctttaga

SEQ ID NO: 226278 - DNA, 573 bp, Glycine max
gcagcaggaatggattcagatgtcttgagcagctatctttcaaagcttgaaacaggccttgataaagtgcgattggttttgcaatatgaaaagccagatatgcaaggcaatttctttaactccacaaagctatttctgaaatatgctgaagatgaaattgtaaggattaaagcagatgagagaaaagccttgtaccttgtaaaagaagttacagagtactttcatgggaatgcaacaaaggaagaagcccaccctctcagaattttcatgattgtaagagactttctgaatatcttggatctagtgtgcaaagaagtggaaaagatgcacgatagaatcggaggtggttctggcagatccttccgaatacctgcaaatgcatcattacctgttctcaacagatacaatcattcaaagcaggatagaagctcagatgaggagagctcatccccctagtgttgtgaatatgaaagaaaccataggctttcagaataacagtgaaagtaaatgaatgaatgttttgcaaatttaagtgatagcctgcattccaggattggattcattgggttttat

SEQ ID NO: 226279 - DNA, 468 bp, Glycine max
gggaaccttggaacaaatactcaaaatccatcacaagatatgttgtttcgagattccatgtttcagccaataggaggggttaacgggcaacgaaatgtttttaccaatacagctgcatcgaacacaagtgaaagtcaaaataacactgcacgatcttctgttcatcaatcatttcttccttatcctaccttcacacaacacaaccaagacgattaccaatcatttcttcacatgtcttcaacattttcaaatcttattgtctctaccttgatgcaaaacccagcagctcatgctgctgcaagtttcgctgctacattttggccgtatgcaaatccagaaacttcagcaaattctcctaggtgctcccaaggaggttttacaaatagacaaattggttgccctgcaagcgttgcagctattgcagctgctactgtagcagctgcaactgcatggtgggcagctcatgga

SEQ ID NO: 226280 - DNA, 364 bp, Glycine max
gagaaaatcttcctttcagaaaccaaggatggtggtgacattaacaaacagtacacaaacatcaccttcacaccaacacaggcagatcgctttgtcttggcattccgaaattggctgaggcgacatggcaatggccaaccagaatggtttggaaacagcagcgaccagccattgccatcaactgtgttatcaaaacgtcagatgttggatagatttgaacagcacactctcaagtgttcatcatgtaaagcagcatatgagggattccaaacatggcagaaagtcctaattggggcaacagttgtgttttgtgcaacatcaaggatcccatcagatttccagttgcgtgtacttttgggctgac

SEQ ID NO: 226281 - DNA, 542 bp, Glycine max
gaaagtgaacacttttctgtgcaaataacataatgcaaaatctgttttcatgtctaacacgttttgctggaatcgtgtatgggcatttcaaaaccatgggttatgtacttgtattcgttgaatttaatgataacactaaggttaggtagatttgagctcttttcatcaaaatactagtgtacatgtacttgtcttcaactctatttacaactaactagttgaagttcctttggagggacgtgcttaatcgatttccgcatgcacgtaatccacgaattcaaaattcttttggagttggtttagggcaaaagctatggctgcgctgacaactgcgagtccagccaaaagtacacgcaactggaaatctgatgggatccctgatgttgcacaaaacacaactgttgccccaattaggactttctgccatgtttggaatccctcatatgctgctttacatgatgaacacttgagagtgtgctgttcaaatctatccaacatttgacgttttgataacacagttgatggcaatggctggtcgctgc

SEQ ID NO: 226282 - DNA, 400 bp, Glycine max
  unsure (1)..(400): unsure at all n locations
cagcacaatgggtgcctacaagtatgtttcggagctatggcgcaagaagcagtctgatgttatgagattcttgcagcgggtgaggtgctgggagtatcgccagcaaccttctattgtccgtttgacaaggtctactcgcccagataaggctcgtcgcttgggtttcaaggctaagcagggttacgtgatttaccgtgttcgcgtacgaaggggtggccgtaagagaccagttccaaagggtattgtttatggtaagcccaccaaccaagggngttactcaactgaaatttcaacgcagcaagagggtctgttgccgaagagagagccggaaggaagttgggtggcctcaaggttctcaattcatactgggtgaatgaggactccacttacaaatattttg

SEQ ID NO: 226283 - DNA, 557 bp, Glycine max
aatgctcataattaccaacaccaaaaataacaaaccaaaaaataaacggactccaaaaataatcatagcacgagatttgccacaacgaaaaaagtcgaacaaaataagtaaaaacaatcccggcacatagtaaaaaacttacatcattaatctctgctgttttagtactaaagacattatcggggaaaaaaggcatgattcagggatccaaaactgacgattttcctccaaatactcagaaaatgaagcaacatacgattactgcaacaaaatcaacggtagcgaccaaaggagagggtattggttctcttccaggttgacctgcgtgatggacgatttttgtggtagagatgacctctgccacgtaaacccctattgcttttcccagcagaagtgaggccacgcagttccctgtgattatggactggattgcagagccagatgattcttggatcatttcttacagcagtgtgggcaacatccaccagaatgacctcaaaatatttgttagtggagtcctcattcacccagtatgaattgagaaccctgaggccacc

SEQ ID NO: 226284 - DNA, 535 bp, Glycine max
  unsure (1)..(535): unsure at all n locations
tccgtcttctagactcttctttttctctaagtctaaggggtgccctgagatcactttgagcaatggtgaaggctgtggcagttcttggcagcagcgagggtgtcactggaactattttcttcactcaggagggaaatggtccaaccaccgtaactgggatctcttgctggtcttaagcctggtctccatggcttccatgtccatgccttgggggacactaccaatggttgcctgtcaactggagcgcatttcaatcctaataacaacgagcacggtgcccctgaggacgagaatcgtcatgctggtgatcttgggaatgttaatgtcggtgatgatggtaccgttagcttcagtattaccgacagtcagattcctctcactggaccaaactccatcataggaagggctgttgttgtccatgctgattctgatgaccttggaaaagggtggtcatgagcttagcaaaactactggaaatgctggtggcagagtagcttgtggtatcatntggtctgcaggatatactaatcacatg

SEQ ID NO: 226285 - DNA, 484 bp, Glycine max
cagaaaaatctcacatttctcgagtatcatatcatatttcaagcacaaactaatacaagaaataaggataaccactaacacatacttcaggcaaagtaacaatttgattaagcatcaagtgtctacatataaccctcagatacgatacaagcaaaacacagaattcagccgtacacagaccggacctaaccaaacgggtttaaatgggtgctactttattccacaattctaaagcacggttccaacctcatgtgattagtttatccttgcagaccaatgataccacaagctactctgccaccagcatttccagtagttttgctaagctcatgaccaccttttccaaggtcatcagaatcagcatggacaacaacagccctttctatgatggagtttggtccagtgagaggaatctgactgtcggtaatactgaagctaacggtaccatcatcaccgacattacattcccaagatcccagcatga

SEQ ID NO: 226286 - DNA, 515 bp, Glycine max
gccgccttgaacccatcggagctccgggaagaagatgtctggggcgccggagatgacgccggcgatcgcgagtgggagccacacgccgccgccttaaacaacagtggcgtcagccggcgccggattccacgtgacacggaggagcaccggcgcgtgggtggactgtcactggcgtttgaagctccggctagtggctcgtcgccgaggatggtgcaccagtttcgggcgcgtgaggagatgacgtcgacgccgcgagggcgccacatggcgacgtcggcgccggtgaacgtgccggactggagcaagatactccgagtcgactcggtcgagtcgataaacgacgaggacggggacgaatcggaaatgatgccaccgcatgaatacttggcgcgtagccagaagatggtggctaactcggtgtttgaaggagtgggccgcacgttgaagggccgcgacttgagccgggttcgtgacgccgtgtggaaccagaccgggttcgacggttaacacccggc

SEQ ID NO: 226287 - DNA, 528 bp, Glycine max
ctgaagcgaagaaaggggcgtacggttctgttgtggttggagatccgaattttgattatcgaatcgcaaaattctgaatcaatcaatcaatcaatcagtaatcagagccatcaacgactgcaatggtctgcgagaagtgtgagaagaaattatcgaaggtgatagtaccagacaagtggaaagaaggggccagcaatactaccgagggtggtggccgcaagatcaacgagaacaagcttctctccaagaaaaacagatggaccccttacggaaacactaagtgcaccatttgcaagcagcaagtgcaccagaatgctaagtactgccacacctgtgcttactctaaaggagtttgtgcaatgtgtggcaagcaagttcttgataccaagttttacaagcaaagcaatgtgtaatggatactcgtgttgtattgggtgccgtgtcttcttttagatgcatggtagcattgcctttctttccatttggctagttgatcctattgctaactatgtgaagctgtaaagaaca

SEQ ID NO: 226288 - DNA, 609 bp, Glycine max
  unsure (1)..(609): unsure at all n locations
gtctttttctacaaaatgaagggggactattaccggtacctcgcggagttcaagtccggtgatgagagaaaagaggctgctgatcattccatgaaggcgtatcagtcggcttccactactgcagaggctgagttaccacccacacatcccatccgtttgggcctggctttgaacttctctgtcttttattatgaaattttgaactctcctgaaagggcctgtcaccttgctaagcaggcatttgatgaagccatctctgagttggatactctgagcgaggagtcttacaaagacagcaccctaattatgcagcttctgagggacaatctcaccctgtggacttctgacatccctgaagaaggagctgaggaacagaaggtggattctgccagagctgctggaggtgacaatgcatangtaggttatgtacccatttagctgatggtatttgggttttacttttcaccttagcaaagttacattttgcaatgaagtgaagcaggtattggctaggaatttgtggtgtcatacgagaaggctagtctgtctctggataatgtaccattaggatgtagtaattagagcatggagttggtctctagaaaatca

SEQ ID NO: 226289 - DNA, 601 bp, Glycine max
tgcctctggttttgatgaggaggagttatctagattgattccaatggtgtctcggcgccgccaaactgctgatttatgtcgttttcttgggctgtcagaaaagatgcctggtgtaattgaggttttggtgaacagtgggcgacaaattgatgctgttaacttggcttttgcatttgatcttactgaacagttttgtcctgtttctttactgaagtcttacttgaaagatgctagaaaagcttcttctcctgttagaagtgctcactcttctcccactgcacagattgaggtgaatgaacgagagctggttgcacttaaggctgtaatcaagtgcattgaagaacataaacttgatgagcagtatcctctggatcctgtgcagaaacgattggtgcagctagagaaggccaaagcagacaagaagagggaaactgaagcatcaaagcctgaacccaagagacctcgtgcagatggtgtgggatacggtccacgtgtcactaacattctttcggataaaacttgctatgctagagttgctgacaggtatgcacaatacgtgtatgagccggccacctacatgtaccctgcacccactgagaat

SEQ ID NO: 226290 - DNA, 576 bp, Glycine max
ggcagatttcacatgaagtttctcagtccaatgtcactgggtggggtagacgaccagcggcactacgagctcttagccaaagattgagccggggtttcaatgaggcactcaatggatttaccgatgagggatggacaacaattagcaatgatggtgtagatgatgttactattctagtgaattcatcccctgacaagttaatgggtctgaatctttcctttgccaatggatttccgtctgtcagtaatgcagtgctatgtgccaaagcatccatgctattacagaatgtgccccctgccattctcctaagattcctgcgggagcatagatcagaatgggcagacaacaatatggatgcttacacagctgctgctattaaagctggcccttgcagcctatcaggatcctgtgttggaaactttggcggtcaagttatactccccctagcacacacaattgagcatgatgagttcttggaagtcattaaattggaaggaatagctcattctcctgaagacacagtaatgcccagagaaatgtttcttttgcaactctgcagtggaatggatgagaatg

SEQ ID NO: 226291 - DNA, 443 bp, Glycine max
cggctcgagaagaagtacgacaaattattacagggcctaagagaaggtgttgtagagaggatacagcgagagcaaaatgtattctcattgggttcgattgatgcttctcattgcttgcattcttccagctttggttgaatgcagagagaggcactacaaatttcatgtggagtctaaacaaactaatagattgtgttcaagcaaatctattgtcaccattaatggcaagttcccgggacccactctttacgccagggaagacgatacagtgttggtcaaagtcatcaaccaagtcaatcacaacgttaccatccattggcatggtgtgaggcaattgagaactggttgggctgatggacctgcatatgtcacacagtgcccaattcaaccagggcaaacctatggatacaatttcacactcacagggcagagaggaacacttt

SEQ ID NO: 226292 - DNA, 534 bp, Glycine max
ggcttggtatcacttgtcatcaatttaattggcctagctgagggaacaaggaacaatgatgccccccctttaccttgttacatgctatctagccatatacaaaataacaagcaacaatcatctgaatcagcatcagcatccaattttaatgaagatagttggtgttgtgtgtgcttgtcaaggttaaaggccaaagatgaaatccgtgtccttccttgctcgcacaaattccataagatttgtgtaaataaatggcttaagggtcgccacaagacgtgtccactttgccgtttctcaatgggagccgaggagaagtctcatcgtgccgaaatgttcactgaagagatgttaatatggttttcttctttccatgtagctggtatgtaatgatctaagtttcaccagtgaatctatttgtagttttctacaagcagagccttgctttgctttcaagtttttgtttaaggcttgtgaatctgatttcgtgcaagctgaaacaaattgttatggcttatcatgcctgctatatatgaa

SEQ ID NO: 226293 - DNA, 497 bp, Glycine max
cccttatgaacatcgacattttcattcatatatagcaggcatgataagccataacaatttgtttcagcttgcacgaaatcagattcacaagccttaaacaaaacttgaaagcaaagcaaggctctgcttgtagaaaactacaaatagaatcactggtgaaacttagatcattacataccagctacatggaaagaagaaaaccatattaacatctcttcagtgaacatttcggcacgatgagacttctcctcggctcccattgagaaacggcaaagtggacacgtcttgtggcgacccttaagccatttatttacacaaatcttatggaatttgtgcgagcaaggaaggacacggatttcatctttggcctttaaccttgacaagcacacacaacaccaactatcctcattaaaattggatgctgatgctgattcagatgattgctgcttgttattttggatatggctagatagcatgtaacacggtaaagggggggc

SEQ ID NO: 226294 - DNA, 548 bp, Glycine max
tgttgttgtaactcgttcttcttcttttgctgttctgtgtttgtgtttgttctttctctcacctgaaaatgtcttgctgcggcggtaactgtggttgcggaagctcctgcaagtgcggcaacggctgcggaggctgcaagatgtacccagacttgagctacactgagtcaaccaccaccgagaccttggtcatgggagtggcacctgttaaggctcaatttgagggtgctgaaatgggtgtgcccgctgagaacgatggctgcaaatgtggaccaaactgctcctgcaacccctgcacttgcaagtgaggtgttgggagagcaagcttcaagcagagatagcccttaattaggaataatgataaactattaatgtgtagctaaaaacttatgtattatgtctgtgatggttctcgtgcactctggtgttatgtgttaaacaaacatgcttagaataaagtggtcatgtcttgcctttcagcaagttcaagtgtccttgacttgtgatggctgtgttaagctcatggatgcatctatactttattttta

SEQ ID NO: 226295 - DNA, 480 bp, Glycine max
acaagactctctgtagacgcgcacggagcacgcgtctatatacactctcttttctcggtgaccacaccgaccagggctaatggacactcctaatatgctgggtcctcccacgctctcaactactactaggcacatatatcctgccattcctcgatgcctcgcgctcaaccatccttatgtctgtcgacaacacatggcgaccagaagctgaatacgtcatgtcctaaaaaaaaactgcaatcctgactggaacgaagaattgaccctctctgagcaggacattcaaaccccaatacactctgacgggttatgacaaagacacttgctctgaagatgacacaatgggagaagcatagatagacttaaaaccatatctacagtgtaagcagatggtaataggtaaactcccaaaaggccgttcactcaagaggagccagccagatggaactaactaccttgctgacgaaagcatctgctttt

SEQ ID NO: 226296 - DNA, 601 bp, Glycine max
  unsure (1)..(601): unsure at all n locations
ggtttacaagtcagggtcctttggaagatccttggacatcactaaattcaccagctaccctgagctacgcagcgagcttgctcgtatgtttggccttgaaggtgagttggaggaccctgtgagatcaggctggcagcttgtattcgttgaccaagagaatgacgttctgctccttggtgatggcccgtggccggaatttgtaaatagtgtagggtatatcaagatactttcccctcaggaagtgcagcagatgggcaacaatgaacttgagcttcttaactcggtccccattcagaggctctctaacggtgtctgtgaggacccaagaaatttaagcactgggataacaactgtggggtctttaaactactgaatgatatgacaatcaaatactatgaatctcttctctcttgtattattgctcctacttctgcaccctgtgtcaaatggtgngaagtactgcctagttgtagtttataggctactgattaagccttttttttatgtcttgctgtacttgctgcctaggaccatgcttangataaacaatgtaaacatatggcatcttggcaatgtgctatctacaatatattaattaatg

SEQ ID NO: 226297 - DNA, 641 bp, Glycine max
  unsure (1)..(641): unsure at all n locations
ataatactcaccacccaaaccgcaataaccacacaactccaacgccactgagttagggtatttcatggagatccccaacaacaactatggaggctcctcttcttccgctatcaaggccaagatcatggcccatcctcactatcaccgtctcctggcagcctacgtcaattgccaaaaggttggggctccgcctgaagtgatgggaaggttagaagaagcatgtgcatctgctgcagtgacaatggcaggtggaacagctagcataggcgaggatccagagctggatcaggtcatggaggcttactgtgagatgctgatcaagtacgagcaagagctgtccaaacccttcaaggaagccatgctctttcttcaaaggatagagtgccagctcaaatctctcactatttcttcttcgttggacactactgcttgtaatgaagctattgataggaatggatcatctgatgatgttgatgttcagaccaacataatagatccacaggcagaggaccaagaattgaaaggtcaactcttacgcaagtaccgtggatacctaggcaggttgaagcaggaattcaccaagaagaggaaaaagggcaagcttgcccaaaaagcangacaacatttacttgaatggtgag

SEQ ID NO: 226298 - DNA, 562 bp, Glycine max
atcgatattcaatgacaaagagctggaattgttgatcagtggacttcctgatattgacttggatgacttgagagcaaatacagaatattctggatatagtgctgcatcgccagttatccaatggttttgggaggttgtccaaggcttgagcaaagaagacaaagctcgactgttgcaattcgtgacaggcacatccaaggtgcctttggaaggctttagcgctcttcaaggaatttcaggctcccagaagtttcagatacacaaagcatatggaagtcctgatcacttgccttctgctcatacttgcttcaatcaattagatttgccggagtatccatctaaacaccatttagaagagaggttactgctggcaattcacgaagcaagtgagggttttggatttggctgagaagcttcagtggtgacgggacataatacaatgtattacatttttaggttaagacctatgctaaaatagaattgagtggtgcagggggtccaaatgctcaagtgcatatcatgtgcatatgctgtacagtcctatatttgcaatgggaaatgc

SEQ ID NO: 226299 - DNA, 568 bp, Glycine max
gcacaccacacaaaaaagctaaacagatagaacaactgttactcacacacgccatgggtaaatgaatggtttttgagcaacagcagttaaaagagaaaagtgattcatcgaagatgacatcggttggtgtggcaccaacttcgggtttgagagaagccagtgggcatggagcagcagctgcggatagattgccagaggagatgaacgatatgaaaattagggatgatagagaaatggaagccacagttgttgatggcaacggaacggagacaggacatatcattgtgactaccattgggggtagaaatggtcagcccaagcagactataagctacatggcagagcgtgttgtagggcatggatcatttggagttgtcttccaggctaagtgcttgcaaaccggtgaaactgtggctatcacaaaggttcttcacgataagacgtacaagaaccgggagctgcaaacaatgcgccttcttgaccacccaaatgttgtcactttgaagcactgattcttttcaaccactgcaaaaggatgaactatacctgcatttggtaccttgaatat

SEQ ID NO: 226300 - DNA, 548 bp, Glycine max
gtcttcccaagggagtgatgctgagccacaaggggctggtgaccagcattgctcagcaggttgacggtgataatcccaacctctattaccactgccacgacaccatcctctgcgtgcttcccctctttcacatttactctctcaactccgttcttctctgtggcttgcgtgccaaggctaccattctcctcatgcccaagttcgatattaactccttgcttgctctcattcacaagcacaaagtcactattgcccctgtcgtccctgccattgttctcgccatttccaaatcacccgatctccacaagtacgacctgtcttccatcagagtcttgaagtccgggggagcccctctgggtaaggaactcgaagacactctcagagctaaattccccaacgccaaacttggccagggatacggaatgactgaggcagggcctgtgctaacaatgtctctagctcttgctgaagaaccgatagacgtgaaaccaggtgcatgtggaacccgtgtaagatatgcagagatgaagattggcgatcctgaaacc

SEQ ID NO: 226301 - DNA, 536 bp, Glycine max
caagcataaaacgtaattaaattaaaactgcaaacatgaaagggaaattttcacacagatgaatatcaaacttaaaatgactattatacaaaagtccctaaaaaatggcaaaattgcaattagcacataactctgggtggccatgtcatgatcaatgaagagaaatctcatgataatattcaattaaagccattgaaatttaaaccaaggacgaccatatcaacatgtgaattcaatgggtttcttctcctttttgtcgtcaagtagtgcctttctttgccctgcttctgccaactgattcccataacaggttgatcaggagaaactagtcccagtacttaatcatcccatcccagccacatgtcgctaccttgctctgttccaagggatgccactcgcaaccaatgcaaacaccttcgtgacacttgagagttctgtagaccttgcaagtcttccaggcccagaaccaacacttccccttaccattccccgacatgacatattgtccatccggagaaaaattgacctgacatgca

SEQ ID NO: 226302 - DNA, 511 bp, Glycine max
aggcaacaaacaattccctttatagttgaaaacaaatttgaacaattggataagacatttgattgtatatacactcacaagaacaatggatcaataccaatgattgacaaacctcacaaccacaacaatgaataacttacccttcatcctattgatgtaatttttggaatcctcttgaacctctagactggtaaagctccagcctacccttggattcctgcaacaatgcctcgagggtttcgtcctgcgtcacgtttggttgcttggaagcccattcaagcactccaagcaccttagccctagcaagttcctcactgtctggcacatgcaatgcaatgtaggagagcagaactagtgctgaaatctgaactgtctgttcttcaagatacacaagctggaccaagtgtttcgcaccaccggcacttatgattgccttggagtgatcaaggtggaggtagttttccgaggaagcaaatttcgtgagagagatagctgcttccctagacacttt

SEQ ID NO: 226303 - DNA, 571 bp, Glycine max
  unsure (1)..(571): unsure at all n locations
ctcgagccgaatcggctcgagcggctcgagcacttttcatccttcgatcatacacttagttgcttccaattaagatggttctgctagagaagctctgggatgatgttgtggctggccctcaacctgagcgtggccttggcaagctaaaaaactcaccaccctcaaaactattgatgaaggagaaagtagcaagctgcagaagacgttgtcgatgccgtcgacaccaacaaccccgatgactccgacgactccaacgacaccgggatcggcccgtaaagctgacaacgtttggaggagcgtcttccatcctgggagcaactccgccacaaagaccatcggtgctcagatgtttgacaaaccacttcccaacactcccactgtctatgactggctgtacagtggggagaccagaagcaggcaccgctgaagctgaagtctttagctaagatgaccgtgggttgcatgtaaatatnngtcgtnttcgttaagcatctgccacgtttgcagctactattactattatgtgtcgggaatttattgctccgtgctgactaaacataatattactagc

SEQ ID NO: 226304 - DNA, 504 bp, Glycine max
ttgttctttttttttttttttttttttttttttttatcgttaactttcaacatatcacaattttgaacatgtaattatattttagttataaatacagatggcactaacaactagttacaacataagattttaacaaaaatttatttattttaatcctaatcatttaacaaagggagaaatagattaaccaatggccaaagttcaaggcaaatctggcttaacaaaacttagcatactaacgaattatttagcatttttacattcacttgctcaaaaaaaccaaacacgctagtaatattatgtttgagtcaacaacggagcaataaattcccgacacataatagtaatagtagctgcaaacgtggcatatgcttaacgaaaaacgacaatttttacatgcaacccacggtcatcttagctaaagacttcagctttagcggtgcctgcttctggactccccactggacagtcagtcatagacagtgggagtgttgggaagtggtt

SEQ ID NO: 226305 - DNA, 589 bp, Glycine max
caatcttcaactttagggttcctttaatctcgttattcctcttcacttccaaactccgtggactccaacaacactgtgatttagaaatggatggaccggctggtcgaggtggtgctggactggacatgtttctgccaaattataaattgggaaaaacacttgggattggatcttttggcaaggtcaaaattgcacaacatgtattgactggccataaggttgcgatcaagattcttaaccgacgcaggataaagaacatggaaatggaagagaaagtgagaagagaaatcaaaattttaagattatggatgcatgctgacattatacgactttatgaagtcatataaactgcaactgacatatattatgtcatggagtatgtgaagtctggagagctgttcgattaccattgataaaagggcaagttgcaggaagatgaagctcctgatatttttcagcagataatctgtggtgtggagtactgtcacaggaatatgggggtacatagagattcgaagcctgataatttacttttggactgcaaatgtaatgtcaagattgctgattttggcttgaccaacatcatgcc

SEQ ID NO: 226306 - DNA, 590 bp, Glycine max
atatatcttggttgcaccttggtaaggtgagaaaatatggcatttgcaggaacaactcagaagtgcatggcttgtgacaaaacagtttatctggttgataagttgaccgcagataaccgagtgtaccataaggcttgcttcagatgccaccactgcaaaggaacactcaagctcagcaactataactcttttgaaggagttctttactgcaggccacactttgaccaactgttcaaaagaactggtagtcttgacaaaagcttcgaagggacaccaaaaattgctaaaccagaaaaaaccggggaagagaaacctgcagcaaccaaagtctcaagtatgtttggtggaactagagataaatgtgcgggttgtcagaaaacagtgtatcccactgaaaaggttaccgcgaatggaactccttatcacaagagttgtttcaaatgcactcatggagggtgtgttattagtccctccaactacattgcacacgaaagcaaactctactgcaagcaccagcacatgcaactgatcaaggagaaaggcaatttaagccaaacttgaggtgaccatgagaagagtacagaggaaga

SEQ ID NO: 226307 - DNA, 471 bp, Glycine max
gtaatactgatcacccaagccgtggtaaccacacaactccgacgccactggctgagggtatttcatggggatccccaacaacaactatggaggctcctcttcttgcgctatcaaggccaagatcatggcccatcctgactatcagcgtttcctggcagcctacgtcaatcgccaaaaggtaggggctccgcctgaagtgatgggatggttagatgaagcatgtgcatctgctgcagtgacaagcggcaggtggaacacctagcatacgcgaggatccagagctggatcatttcatggaggcttactgcgagatgctgatcaagaacgagcaagagctctgcaaacccttcacaggaagccatgctctgtcttcaaacgatagagtgccagctcaaatatgtcactattacctcttggcttgacactactgcttgtgatggcgctattgataggaacggatcatctgatgat

SEQ ID NO: 226308 - DNA, 406 bp, Glycine max
ggctactacaatcagtgttttcaacacaaccgtatgctatatggtatgtggctgctttggctatgcttctttcggagatgcgcgcccgggaaaccttatgactggcttcggcttctatcacccatattggctcatcgacatagccaatgttgacctagctatgcacctgagcggtgcctaccacgtttactgtcaacctctgactctcatcactggcatcacatgcaccagcaaggtttccaaatagtgatattatgagcacagagattgaagtaccaatccctggctgcaaaccctgcaggctcaggctgtacatgctggattccagacaatgtttgtgatgcagtcagctgtgatagccatgctgctaccattcttcaatgacacttgaggagcttattggagc

SEQ ID NO: 226309 - DNA, 354 bp, Glycine max
aaagcattgaattcaaaaacttaagttcattccttgtgttttgctttcttcctcaaaaccaaacatgtcgaacacatgcggcaactgcgactgcgctgacaagactagctgcaccaagggaaacagctatggtgttattgtagagactgagaagagttacatcgagactgttgtcatggatgttccagcagctgagcatgatgggaagtgcaagtgtggcactaactgcacttgcacggactgcacctgtggccattaaggaatatgtatgaaaatgtaattgccatgtgtttggcaatacaaatatccaaataatgtaatcttcgtatgaataaatgtgtgtgctgttatcct

SEQ ID NO: 226310 - DNA, 510 bp, Glycine max
gttccttcaacatcttccagtttccgaccgacgttgattcgatgcgccaactccaacgagcggcgggcgctgtttagccgcattgctcctgtctatgataacctgaatgatttgctgagccttggccaacaccggatttggaagcgaatggcagtgtcctggactggagcgaaaatgggagaccgtgtgttggatgtgtgctgtggaagtggggatttgtcctttctcttgtccgatcaagttggctctcatggcaaggtgattggtcttgatttctcgaaggatcagctattgtttgcctcatctcggcaggaatcactttcaaagaattgcttcacaaatatcgagtgggttgaaggtgatgctcttgacttgccattttctgatggttggtttgatgctatcactatgggctatggtcttcgaaatgtggttgattagcaaaaggccatgcaagaaatttgccgcgtactaaatactggctctacagtgtctatgctggactttaat

SEQ ID NO: 226311 - DNA, 545 bp, Glycine max
atccgaacgaaacaatcatggcagcgaacccacccgcgccttcagaatccgacccgaaccaaaacccgggttcggagtcctttccgtacttcgaagacatgaacgaactcgagacagtcttcaaccgcttcgacgccaacggcgacggcaagatctccgccgacgaactcgacagcgtgctccggtcgctcggatccggcgtctctcccgaggacctgcgccgcttcatggaagacctcgacaccgaccgtgacggcttcatcagcctcacagagttcgccgccttctgccgctccgacgcctgcgccgacggcggatccggcgagttccgcgacgccttcgatctctacgaccgcgacaaaaacggcctcatctgcagcgcggagctgcacctcgcgctgaacctgctggggctcaagtgctgcgtcgacgaatgccgcgacatgatgcagtgcgtcgacgccgacggcgatggctgcgtcaacttcgaggagttcaagacgatgatgacgacctgcaagaatcgtggcggcgccaccaatggc

SEQ ID NO: 226312 - DNA, 488 bp, Glycine max
  unsure (1)..(488): unsure at all n locations
tggaaactcatttatagcagcgcattttcgtctcgaacccttggtggaagccgtcctggtcctcccataggaagactccttcctattactcttggacaggtttttcaacgaattgacatcttgagcaaagattttgataacatagtggagcttcaactaggtgctccatggcccctaccaccccttgaagcgactgccacattagctcacaaatttgaactcataggatcttcaaagataaagatagtatttgagaaaaccactgtgaagacagctgggaatttgtcacagttgccaccattggaggtgcctcggattcccgatgcattgaggcctccatctaatacgggaagcggtgaatttgaagttacatatcttgactcggatactcgcatcacaagaggagacagaggcgagctagggtctttgtgattgcttgagttcctggtgaaatgcactatgcactatgcattntctctgttggactt

SEQ ID NO: 226313 - DNA, 490 bp, Glycine max
gtaaaggcgaaagactttaggtttggaattgggaattagggttgttcgcgtcacgaagatgatcgaggtggtgttgaacgatcgattggggaagaaggtgcgcgtgaagtgcaacgacgatgacaccatcggcgacctgaagaagctggtggcgggctcagacgggcacaagagccgacaagatccgcatccagaagtggtacaccatatacaaggatcacatcactctcaaggattacgagatccacgacggcatgggtctcgaactctactacaactaaacacaaggtgtgttttatgcatgatatattactatgatctgggaatgggatgaggcgccaaatgtaattttgacttgcgaaagtccctatgatttgaataatgtacatccccgaatgatattgggtattacataccgatgacaccctaagttgctttgttatatataacctatctgatgacttgttgctaagcttcattaatctgatcg

SEQ ID NO: 226314 - DNA, 365 bp, Glycine max
aaagattaacttgatgatcatcaaccatccaaggattgaggacgtaaggaacaagtgcacccctagaaagtgaatttaggatgaaaacacttggaaggaaaaccattcacaagataagatttcagatatattcaattatgcacaattttattttttttattgtgataatccaacatctagttttgtgtggagggcagcagctattggttgagggtgaaccaaacaaaggggttagcaaggccagaaattgcaacaccgatgagaggcccggcccactggattcagtggatgatgcatgtccagctctctacagtagggccaaatgtgacagcgggggttatggtcgattagatatcgtccccccc

SEQ ID NO: 226315 - DNA, 562 bp, Glycine max
  unsure (1)..(562): unsure at all n locations
caattatttacaacttttctgttttcaaatcccttgacaacaaataatagtgcaactgttctagtctcttaggatctgttcaatggccaaccaagggcatgacctccctctctatgaaaaagtttggctcaagcgcagattacaaagagtgatagacaccttgattctattcctcctactcttgcttctaaattaccgtgttttatcatccaatagcttcacttttccatggttccttgctttgttatgcgaatcttggttcaccttcacttggatagtgattctcaactccaagtggagtcctgcagtaaccataacccacccagatcgtctcttgcaatgggtatctgagcttccaccagtggacttgcttgtgacaacagcaaatcctatactagaaccaccaatcatcacagtcaacactgttttgtctcttctagcgcttgattatccagctaacaagttagcttgctatgtttctgatgatggctgttcccctcttactttntatgcccttgtggaagcctccaaattcgctaagttttgggtacctttctgtaga

SEQ ID NO: 226316 - DNA, 424 bp, Glycine max
ggtaacaaattttaaattcatccatgaccatgaatatttatacagactggagctgctgaaagtgatgttattctccaaattaatttgagcaccttccattcattaataagtaataactaacatataaaaagcacataatgcaaagatatatgagaacaacatctacagaaaactcaagtcatcaactgataactttacttgcacaaaagtgcacaaagactaatgcaaacactgctgacttgcaaatgggggataggggaatcccgtattttcctctagcaaacagtgctttaaaatatgggcagtagcacactaccaaatacgtactacagatgaatttcccaagtgcactgccattaccactatgagttggttgcaacccccaaaacttgatcaacattgctgtcaaatgcaccaacaaaat

SEQ ID NO: 226317 - DNA, 546 bp, Glycine max
cagtaaacaacgaccatgaaactaatgacagcaacaacaacgtttgatgtctctgccacttgcttccgtgcccctcctccttcgtgctcaatgaatccatgccacaccagtttttcagttataaactccctgaatcctcacaagggacgacggataagcgttgctgttccacccaagtttccaaacttccggagggaagcatctctgcaggggaatttggaggctattagagtcccaacttcggtgcctgtgcgtgtagcatacgagcttcttctagctggtcatcgatatttggatgtaaggaccccggaagagttcgatgctggacacgctcctggcgcaattaacataccttatatgttcagagttggatcagggatgacaaagaacagcaactttattagagagggtgtcttcacagtttaggaaagatgatgaaattattgtcgggtgtgagcttggtaaaagatctatgatggccgcacgtgactcgctagctgctgggttcactggactcacagacatggctggtggttatgctgcatg

SEQ ID NO: 226318 - DNA, 416 bp, Glycine max
gcaaagttggatatatattaacattttatttattgttgatatcgacaaatacatttaattttccatttatagatttttgttttcccagtgtcagattgtcactgtcttggtgaagtgtttctgcatttccatgcattggactcctcccaaaacttattctatttacagctacagttccaacagaaacacttcatagctctgttggaagtccattttgtgtccatgcagcataaccaccagccatgtctgtgagtccagcgaacccagcagctagcaagtcacttgcggccatcatagatcttttaccaagctcacacccgacaataatgtcatcagctttcctaaactgtgaagacacctctctaataaagttgctgttctttgtcatccctgatccaactctgaacatataaggt

SEQ ID NO: 226319 - DNA, 512 bp, Glycine max
  unsure (1)..(512): unsure at all n locations
gaaaacaatgctgcgctcggaggactaccacgcccacatatcaaaagttcataggacacagagtgttctcacagatgtccctcgctaccccaatgctcacctagccttcagcaaccaacacagccatcacaacaccctttctaatgaaagggttgagtatgatgaaaccactcctgagactgagggtggtgaagttgtggatgttgaaagggaacagtgcatcgccaagaagaacaagggtggctttgaattgcacaagtggaagacctataggccttaagaaagcttatagccacaagcctagtttgtcataaaaaaaaaaactaccaaatacatacatcaaaatcagcaatatgattgtgtgaaataaatgcctgcatagccagccattatgtttgcttaaccccggagtgttttatatatgtagtagtacattagtactaaactttcccatgaactattaatgaagcatatacatcggtnnaaaaaaaaaannaaaaaaaannnnnnaa

SEQ ID NO: 226320 - DNA, 588 bp, Glycine max
  unsure (1)..(588): unsure at all n locations
ctggcactccccttgatgatgaggctgcacaaaggggtacgtctgtctaccttgttgagcggcggatagacatgcttcccaaacctcttacggagggaaatgacacccgaagcagatattattgccacctcatacacaaaaagtgtcataaaatcttctgcggcattgtcttatgttgaagcacaggcaaggatggacgatagtcgattgatggatccgattactgcagatttgaggaatatgaatagtttagctaagaaaatgagattaaggcgtattgagagaggagctttgactcttgcatctgctgaggtcaaatttcaaattgacacggagactcatgatccacttgatattggaatgtaccagatccgggaggccaaccaaatggtggaggagtttatgcttgcagctaatgtttccgttgcacaacanattcttaaaagttttccattgtgctcattattaaggcgtcatccaacaccaacaagagagatgcttgaacccttactacggactgctgctgcagttggcttgcacttggatgtctcgtcatcaaaagcgttggctgattctcttgaccatgct

SEQ ID NO: 226321 - DNA, 484 bp, Glycine max
cttccttccaactcatacaaacaattctaacatacttttctttcttttttttcccctctttaaaagtctggcttttggtcctttgattcccaacttcacttgtcacatatcatattatgaagctcacaggtttcctgcaagcggtgactcttgctttggtgttagccaccgtctctgcatcagatcctgatcctcttcaagacctctgtgtcgcagaccttgcttcagcggttaaagtgaatggattcacatgcaaagatgctgccaaggtaaatgcgagtgatttcttctcagacatactagccaaaccaggtgccacaaacaacacctatggctccctagtgactggagccaacgttcagaaaatcccaggactcaacacccttggcgtgtctatatcacgcattgactatgccccaggtggcattaacccagctgacacgcacccacgtgccacccaggtagtgattgtgcttgaaggaac

SEQ ID NO: 226322 - DNA, 471 bp, Glycine max
  unsure (1)..(471): unsure at all n locations
gcattgagacctttgttgctgatattaatagtggaaggtgggatgcaatattgcctcaagtttctcaactcaagcttcccaggaataagttggaggatttgtacgagcagattgtattagaaatgattgaacttcgagaactggatactgcacgtgctattttaaggcanacacaggtgatgggtgtaatgaaacatgagcagcctgaaagatatttgcgtcttgaacatctcctagttagaacttattttgatccaaatgaggcttatcaagactcaacaaaagagaagcgacgtgcacaaatagcccaagctcttgcagcagaagttactgtagtgccaccatcccgattgatggctttaattggtcaggctttaaagtggcagcagcatcaagggttacttcctttcggaacgcagtttgatttgtttcgtggaacagctgctatgaaacaagatgtggatgacatgt

SEQ ID NO: 226323 - DNA, 417 bp, Glycine max
ccagataaaaaaagatagttaaaaataaaataaattctgaagtaaaaaatgtaaatagtaaaattattttacccacaatacatgaaaattaaactcctgaatatatacattgcacaaactacacagatgttcatttatgttaacaagatagaatagaaatagacttgaagcagacaagattcatggcttccacaacttcattgtgcagtcttcactaaaagttgcaacaagattcctatggggatgatgagtgacacctataacttccttatcgtggaccttcattagatgctccaatttgccagatagatagctgaagcagtatatattcctatattgaccaacacagtaaatccattctcctttaggtgaaacacaggctgcaacaaagtcttcgtcttctttttaccagatgag

SEQ ID NO: 226324 - DNA, 491 bp, Glycine max
  unsure (1)..(491): unsure at all n locations
ctcgagccgtcctgttcggacaactaaatatccaagggagattccacctctgccttggtatcgtggaacaattcctcagatggcgatggcaggatttttgcctttcagtgctatatacattgaactttactatatatttgccagtgtttggggccacagaatttacaccatctacagcatcctgttcattgtcttcatcattctcttgattgttactgctttcatcactgtggcattgacatacttccagcttgctgctgaggatcatgagtggtggtggagagtcatgcccgtgaaatgaatcattctatcaatccaccgggatggagatgaaaggctccgtacccgggacgccgggatgaatgcggtttataggcgtttcgaatccaaacgatgtcaaattcagaaaggttgaacccgcgagacataagtttgatcaatagacaatatgtttcattccaggganggagaagaaataaatttttttcatg

SEQ ID NO: 226325 - DNA, 462 bp, Glycine max
  unsure (1)..(462): unsure at all n locations
gcatttataagcaatggaggtggaatggataataaccttctttatcgttcatccactcatggaagaggccttggcagattttggtctcatgttgaaggttacaaaggtcctttgttaattttgatagctgcaagttcaggagatgctcacgagggaaaattccattgataggaaatgggttataggtgccttaacagatcaaggtcttgaaaataaagatatcttctatggaaactctggatgtttatattctattgacccagtgtttcatgtgtttccaccaactggtaaggaaaagaattttgtttatagccacttgcatcctactggtaaagtataccaaccgcatccaaagccggttggagttgcatttggaggaactccaggtnatgagagaatatttattgatgaagaatttgcaaaagtgactgttcgccatcatgctattgacaaaacttaccg

SEQ ID NO: 226326 - DNA, 457 bp, Glycine max
cgaagcctctgacagattcttgtttagacctgatactgttgggccagctgggttgactcctcttcatgttgcagcaagtatgagtggcttggaggatgtgttggatgcattaaccgatgatccacgaatgttaggaattgaggcatggaaaaggttccctggacagtacaggtttgacccctaacgactatgcatgccttaggggctattactcctacattcaactagtccagaagaagaccaacaaaaaaggtgaaagacagcatgtggttgatatcactggcattgttgtagatagttacacgacgcagaagcaatcaaatggacataggacatgtagagtttcaagcttgcagactgagaagattgaaacaacaacaatgccacgtcaatgtcgggcatgagaacagcaatggtttattggccagttatgctcaccatggtgaccatagcagct

SEQ ID NO: 226327 - DNA, 534 bp, Glycine max
ataaattatttactatttaagatttgaaagcccattcgtctcatattgtacaaatatttatacatcaatatcattatggtgacctcaccattatactctatacagcagaaattaaaacaccttatatacagcattacattgccccatactccaatgattcccagttgaagggctggaacacatagtaaactctaggtgagcttttgaagagcaaagccacacagacacacacagctgctatggtcaccatggtgagcataactggccaataaaccattgctgttctcatgcccgacattgacgtggcattgttgttgtttcaatcttctcagtctgcaagcttgaaactctacatgtcctatgtccatttgattgcttctgcgtcgtgtaactatctacaacaatgccagtgatatcaaccacatgctgtctttcaccttatttgatggtcttcttctggactagttgaatgtaagagtaataagccctaaagcatgcatagtcgttaggggacaaacctgtactgtccaggga

SEQ ID NO: 226328 - DNA, 532 bp, Glycine max
  unsure (1)..(532): unsure at all n locations
cttttaagcgcaggaatggaggtcgcaacaaacacggccgtggccacgtcaagttcattcgatgctccaactgcggcaaatgctgtcctaaggacaaggctatcaagaggtttctggtgaggaacattgttgaacaggctgcagtcagagatgttcaggaggctngtgtctatgaacaatacacgcttccgaagctttatgtgaagatgcagtattgtgtttcctgtgctatccactctcatgttgtgagggttcgatcccgcactgataggagaaagcgtgagcctccacagcgatttatcagacgcagggatgatgcaccaaggcctggtcagcctggtcaagccccacgtcctgctggagtaggagctcctgcccgaacttaaaaaacaaattccaaagttttttggggcttgttggttcagttntatgttacaaacttatactccatttgctgtttattttttaaatttcagttttgtgtagggatattatattttcttctagttggttgctttagtcctcggagaaa

SEQ ID NO: 226329 - DNA, 451 bp, Glycine max
acttcaaaacgctaaaatatatcaataatatatcaggtttcattctcctcaaaaccatcaaataataatagaaaattttctccgaggactaaagcaaacaactagaagaaaatataatatccctacacaaaactgaaatttaaaaaataaacagcaaatggagtataagtttgtaacataaaactgaaccaacaagccccaaaaaactttggaatttgctttttaagttcgggcaggagctcctactccagcaggacgtggggcttgaccaggctgaccaggccttggtgcatcatccctgcgtctgataaatcgctgtggaggctcacgcattctcctatcagtgcgggatcgaaccctaacacatgagagtggatagcacaggaaacacaatactgcatcttcacataaagctttggaagcgtgtattgttcatagacacaagccttct

SEQ ID NO: 226330 - DNA, 568 bp, Glycine max
  unsure (1)..(568): unsure at all n locations
cattcacattaactccaactctctagacgagtcccgcaacaagctatgggcagaatctggttctcctcttattcctttggtagagttcagagagcctgagattatgaaaaagtatgatgttcaaattgatattgaggttcttgatttgcttgacactgcttcaagacaaatagagatccacattgttacaaaaatatactggggggatgcaagagagaaacttttggatgctattgaagatttgaagctggattcgctggttatgggaagcaggggcctcagcacaatccaaaggattatattgggaagtgtaagcaactttgtgatgacccatgcctcttgccctgtgactatcgtcaaggaaactagcaaggaaactagcagcagcaagtaaagatgatcaatttgggagagaacatttaaatttcacatattattttttttcttgcattgtacctgatctagttgggccatattccctttcctaagtattattttggtgtctaagataaatttatgatttactgtactttatagttntcactcccttttattgaggcaataattt

SEQ ID NO: 226331 - DNA, 508 bp, Glycine max
gcggaaagctaggtactgcctgcgactggagtgagtggttcttcagacatatctataacgctgtttctgtgagagcatcaatggcgacaaaagctttgtccttcgctctgtctctcaatgacctcaccaataaccacttctcttccaatacgccacacaccgccgtcaaagtttccgtctttaccgtcaaatgctcttcttcgggtggtggagagaggccttggaagaattcagatgctagacttgtgcttgaagatggttcaatttggaaagcaaaatcgtttggtgcttcggggactcaagttggcgaagttgttttcaatacatcattgacagggtatcaagaaattttgacagatcctagttatgctggccagtttgtgctcatgacaaatccacatattgggaacactggcataaattttgatgatgaggaatcaatacagtgcttccttgctggtcttgtaattagaagattgagtatcagtacctctaactggagatgtaa

SEQ ID NO: 226332 - DNA, 419 bp, Glycine max
acaattggtgataccagctaccaaaatttagtgttgatagcgataagtaataagtacattaaacctcattgaggtttatgacaatcatggcccgaacgcgagcatgagaaaatcataatctttatggatccctaggaaaccttaataaactcatctacaaaatcatagtaatggactcataacttcgtaatttttcagcagatgcattattctttttgccccgaacgcgagcaggttgcttcaactacttatgcatccaaagcatgtgctgttgatagtaggtgtagccttgcctttgttctgtttttcccttgcttcattagctctataaactccctaaaaatgtagtcagaatcatgaggtccaggggatgcttcaggatggtattgaagagacataagctgttgagcagggaaagc

SEQ ID NO: 226333 - DNA, 626 bp, Glycine max
tcagcaacaatgttatcggactccttaacttcctcaccttcctcttgtccatcccgatcctggtggccggagtgtggctgagcaagcaaggcgccaccgagtgcgagcggtggctggagaagcccgtcatcgcgctcggcgtcttcctcatgctcgtctcactcgccggcctcgtcggcgcgtgctgccgcgtgtcgtggctcctctggctctacctcctcgtcatgtttgtcctcatcgttcttctcttcgccttcaccattttcgctttcgtcgttaccaacaagggcgctggtgaagttgtttctaatagagggtataaagagtataggcttggggattactcgaattggctgcagaagaaggttaataacactaagacgtggaacaggatcagtagttgcttgcattctgggaaagtctgcactgagtttcaatccaagtttctaaacgacaccgttactcagttttacaccgagcacctgtccgcgcttcagtctggatgctgtaaacctgcagaagaatgcctatttacctatgagaattcaacgagctggacgaagcctggaaatgtgaccagttacaacaatcctgactgtgatgctgggaataacaaatcaacagtc

SEQ ID NO: 226334 - DNA, 493 bp, Glycine max
actatataaaattgagcaatttccataacagactgtactgaaaacagtataatccagcatacacataaagcccaaaaaaataaatccaacatataaaccagattgtctagcaaactgatctactcactagtaatactgagtaatctagctaacgagaatatcccttccaattttccctcctattgttcctgaatgcacagcaccctatggagtatacaataatgagaagaacaaggaatacgatgttaacaacagccaccctcttccattcagtcttgaagttttgcagaaagccagccttgcatgattggcaattgaagcacagaactgtttgattgttattccaagcatcacagtcaggattgttgtaactggtcacatttccaggcttcgtgcagctcgttgaattctcataggtaaataggcattcttctgcaggtttacagcatccagactgaagcgcggacaggtgctcggtgtaaaactgagtaac

SEQ ID NO: 226335 - DNA, 521 bp, Glycine max
gaaagattttatccaattgaaattttaaaaatgactgggataaacttaagaattcaattattgaaattgaataagtaaacaatttaattggattggtcgaatggtatcaaaaaaatggagtactaactcccatttcttatttattattgaattaaccgatcaacttgctctgttatcgaacatttctttttgatttcaaaaattttccggaaaaaatttgaatctatttttatatgcgaatcaatcctactacttctggtcctgaggtttctgcgcttgaaaaaaaaaatctgggacgtatcgcccaaataattggtccggtactagatgtagcttttcccccaggtaagatgcctaatatttacaacgctctgatagttaagggtcgagatactgttggtcaacaaattaatgtgacttgtgaagtacagcaattattaggaaataatcgaattagagctgtagctatgagtgcgacagaaggtctaatgagaggaatggaagtgattgacacaggagct

SEQ ID NO: 226336 - DNA, 370 bp, Glycine max
agttattccgatattcggacgcatcaccttgttatgaaatcacattgatagcctctactcgtgtcctagctcgtctaagagctagatttgcctcaattgttagtctcttgccttccgccttattcaaattagcttctgctatttcaagagtttgctgtgcttcttgtggatcaatgtcactacccttttccgcatcatttactaaaacagtgatctcattattgtttattctagcaaaaccgcccatcagagccatcgttaaccatttggctttaagaagacctattctcaaaatacctatatctaccgctgtggcaataggcgcatgatttggtgatactccaatttgtccgctattagtagataaaat

SEQ ID NO: 226337 - DNA, 494 bp, Glycine max
tatttttcttcctcagtagtgtcatttacgcttctcttctctgcagcaactatgcctaaccctaaggtcttcttcgacatgaccatcggcggtcaatctgctggccgcatcgtgatggagctctacgccgacgtcactccccgcaccgacgagaacttccgcgcgctttgcaccggcgagaagggcgtatggcggagcggcaagcccctccactacaagggctcgtccttccaccgcgtgatcccgagtttcatgtgtcagggtggcgacttcaccgccggaaacggaaccggcggcgagtcgatttatggcgccaagttcgccgacgagaacttcgtgaagaagcacaccggtcccggcatcctctccatggcgaacgccggtcccggaaccaacggatctcagttcttcatttgcacggagaagacagagtggctcgacggaaagcatgtcgtgttcggacaggtcatcgaaggattgaacgttgtcaagga

SEQ ID NO: 226338 - DNA, 576 bp, Glycine max
  unsure (1)..(576): unsure at all n locations
ctcccatcatcttttccaatggcctccaacggcgacgccgttcatccccacccttccaaaaagatcaaactcttcagcaattccattaactcaactaattcctcgtttatcacccatgccgagatcgaatcggaattctcccaccaccaccccacgggtggcgcgcctcaacaacggcgccttcgggtgctgcccggcttccgtgatcgccgtgcagcgcgagtggcagatgaagaacctccggcaaccggaccacttctacttcaacgacctcaagaagggactccttcactcccgcaccatcatcaagaacctcgtcaacgccgaacacgtggacgagatctccctcgtngacaacgcctncaccgncaccgccatcgttctccagcaagccgcctgggccttccaggaagcaaaattccagaaaggcgacgtggtcctcgtgctccactacgcctacggcgccgtcaagaaagccatcgaggcctacgtggtgcgcgccggaggcaccgttatcgaagtccccctcccctccccgtcacctncaacgacgacgtagtcaacgaattcccgaaa

SEQ ID NO: 226339 - DNA, 541 bp, Glycine max
  unsure (1)..(541): unsure at all n locations
gcctgacaacttgctgctagatagaaatggccacatgaaattatcagattttggattatgtaaaccgctagactgcagtaaccttcaagaaaaggacttctctgttggaatgaacagaagtggagccctccaaagtgatgggcgtcctgtggctcctaaacgaacccaacaggaacaactgcagcattggcagaaaaatcgacgaatgcttgcctattctacagttggaacacctgattatattgctccagaagttcttctgaagaaaggatatggcgtggaatgtgattggtggtctctaggagctataatgtatgaaatgcttgtggggtatcctcccttttattcagacgaaccaatgttgacttgtagaaagatagtaaactggagaactactttaaagtttccagaagaagctaaactttcagcagaggcanaggatcttatttgtagactcctatgtaatgtggagcagaggcttggaaccaaaggagctgatgaaataaaggctcacccatggctcaaggtgttgaatgggaca

SEQ ID NO: 226340 - DNA, 430 bp, Glycine max
gacctatgctccagcatatcttagcccacatgcatcagggaaacctccttattggagcaaactttgcttcagctgcatctggttatgatgaaaatgctgctactttgaatcacgcgattccgtggtcccaacagatgagttatttcaaggaataccaaggcacgctggccacggtagctggcagtaaaaaagcagcctcaatcatcaaggatgcgttgtatgtgctcagtgctggaagcagcgactttgtgcaaaattattatgtcaatccttggatcaacaaagtctacactcctgatcaggattcgtcctacttaattggttcattctcaagttttgttaaggacttgtatggattgcgaggcacgagacttggagtgacttcactcccaccattgggttgcctacctgctgcaaggactatatttgg

SEQ ID NO: 226341 - DNA, 496 bp, Glycine max
ggtctactatgtttccgggaattgctgatcgcatgagcaaggaaattagtgctcttgcacccagtagcatgaaaatcaaggtggttgcacctcctgagagaaagtacagtgtctggattggtggttctatcttggcatcacttagcaccttcccacagatgtggatctccacgggtgaatatgatgaatctgggccagccatcgttcatcggaagtgcttctaaagttgggtcaagtcgagctggatggtgatcaagttcttcatgcacccagtcctgtgccatatttcagtaaagtttggttgacttatttggtatttgaagctttgggtttttaatagatatatctagtttaatgaatggatttgtaagttgagtatgttataagtttctccgttaggtcaccttggaagccagactttttatgcaattggcggatggtattggaactttgtaggttctgcttggtttggtttttccttttattcgattttcat

SEQ ID NO: 226342 - DNA, 593 bp, Glycine max
cgacaaggccaccctcctggacccgcaggcctgggagagcctcaagtttcccgtgatagcgaagcctctcgttgccgacggcagcgccaagtcgcacaagatggcgctcgtgttcacgcgcgacgcactgaacaagctcaagccgtcgatcgtgctgcaggagttcgtgaaccacggtggcgtgatcttcaaggtgtacgtggtgggcgagcacgtgcgctgcgtgaagcgcaagtccctccccgacgtgtccgacgaggagaaggcgctcggcggcgtttccgaggacctgatgtcgttctcgcaggtctccaacctcgccaccgtgaacgactgcgacggctattaccgtttgatgcatctcgacgacgacaccgaaatgccccccgacgccttcgtcgtcgacatcgctgggggcctcaggcgcgccctcaagctcaacctcttcaatttcgatgtcataagagacgctcgatacgggaaccgttatcttatcattgatatcaactatttccctgggtacgccaaaatgcccggctacgaggccgttttgacccagtttttctgcgaagtaatgctcaagaagaaacagc

SEQ ID NO: 226343 - DNA, 578 bp, Glycine max
gagaaaaaaaaaatttcttttaataaaagaaaactcaaaattgaatcgataaatcgccatgaatcccaaaatcctcttcgtgtttgctcttcttctgaatctcgtatccaattcgttccaaaaccctaaccctaaaacccctaaatcaacgccgtcgcaggctcacgtggagctcgtcaactacggcttacccgtcggtcttctccccgccaccacggtctcgggctacgccgtgaaccgtacctccggcgagtttaccgtcaagctcagcggcgcgtgcaagatcacgctcccgccggacaactacgtcgccacctattccgacaccatcaccgggaagatcgtgaagggaaaaatcgcggaactcgagggaattagggttcgcgcgttcttcaagtggtggtccatcaccggaatccgctcctccggcgacgacatcgtcttcgaggtcggcatggtcacggcgaagtatccatcgaagaatttcgacgatagccccgcgtgcgagggccagcactcttcttcgtgaaagggttttagctacttattcgcagccttcgtgttatgtaatgagatag

SEQ ID NO: 226344 - DNA, 573 bp, Glycine max
  unsure (1)..(573): unsure at all n locations
actgaactaacaaagcaaccctatgtcgaaggtggtttgtgtcaccggagccagcggcgccatcggatcatgggtggtcctactcctcctccagcgtggttacaccgtccatgccaccgtccaagatatcaaggatgaaaatgagacgaaacatttggaggaaatggaaggagcaaagagtcatctccatttttttgaaatggatcttcttgacatcgactccattgccgctgccataaagggttgttccggcgtaatccaccttgcatgtcctaacatcattggtcaagtcgaagatcccgagaaacagatattggaaccggcgataaaaggaacggttaatgtgttgaaggcggcgaaagaagcaggggtggagcgcgtggtggcgacttcatcgatttcgtcgattatgccaagtcctaattggccagctgataagattaagggagaagagtgttggacggaccttgaatactgcaagcaaaaggggttgtattatcccattgcatagactctagcagagaaagcggggtgggaacttgcgaaggagacaagttttgatgtngtcatgat

SEQ ID NO: 226345 - DNA, 500 bp, Glycine max
gcaatacactgtggaaggagtgcagaatcttggagacaaagcagtgatgtgtcatgggctaaatttcagaactgcagtattttactgccataaagtccgtgaaacaacagctttcatggttccattggtggctggtgatggaaccaaaactcaggcacttgctgtttgccactcagatacttctggaatgaatcatcacatgcttcatgaactcatgggagttgatcctggaactaaccctgtttgccatttccttggaagcaaggccattttatgggtacccaatttatctatggatactgcctatcagactaacgttgttgtttaattagtccatgcatctgcatcttgggcaccataagattgtatataaaataaattatggtgtgttgtgtatgttgtgcaagacctggaacttcacctttctacgtacgtgtgctgttaggatgcagtgtgctttgatgatgctatgatgaatatgcagtgtgcttatctaagtc

SEQ ID NO: 226346 - DNA, 459 bp, Glycine max
gacttaaaaaagcacactgcatattcatcaaagcatcatcaaagcacactgcatcctaacagcacacgtacgtagaaaggtgaagttccaggtcttgcacaacatacacaacacaccataatttattttatatacaatcttatggggcccaagatgcagatgcatggactaattaaacaacaacgttagtctgataggcagtatccatagataaattgggtacccataaaatggccttgcttccaaggaaatggcaaacagggttagttccaggatcaactcccatgagttcatgaagcatgtgatgattcattccagaagtatcttgagtggcaaacagcaagtgcctgagttttggttccatcaccagccaccaatggaaccatgaaaggtgttggttcacggactttatggcagtaaaatactgcagttctgaaattaagcccatgacacatcact

SEQ ID NO: 226347 - DNA, 581 bp, Glycine max
agggtttttatttctctcttctctctgcatcgcttcaggttcttctgaaaagatgtctcgcgtgtatgttggtaacttggattcacgagtcaccgagagagatctcgaagacgaattccgtgttttcggagttattcggagtgtttgggttgcacgtaaaccacctggttatgcttttattgactttgatgaccgcagagatgcacaggatgctatccgtgaattggatggtatgtttagaagaattatgttgttggaatgtaatagaattaaaatcaaaattaaaatgtgcatatatatgtatatttgctacattcttcttatctgctaatgtgttattgtttttcccccatgttttttccggttgatatgttgaagggttttcctcaactagctagttaagtcttctttttggcctatggggcaagcagatgctgctctctctttcttctacttctgccttggcctgcagtaatggttttttcttcgttgtgtcttcgtcaaagtctgctgctctgtacagtttgactacttctactactactgcatgtaaagagaattaagaatgtgaacacagggga

SEQ ID NO: 226348 - DNA, 449 bp, Glycine max
  unsure (1)..(449): unsure at all n locations
atctgttccaaaagcaacccaacatcgtcagagttcatgccctcagtctcagagagtgacaaatcagaaggttttggagattaaggatcaaattattagagccagagcatacttggggtttgctacaccaagcagcaactcacacttggtgaaggagtngaagctgagaattaaagagatggaacgtgctgttggagaagctactaaggattcagagctgtcaaggagtgctttgcagaaaacaagacacatggaagcttcactgtctaaagccaactgtgttttcccagactgcactgctatggcagctaagctccgtgcaatgaatcataatgctgaagagcaagttcattctcatcaacgtgaagcaacacatcttgttcatcttgctgcaaggaccaccccaaaaggtcttcactgtctttctatgcagctaactgctgattact

SEQ ID NO: 226349 - DNA, 451 bp, Glycine max
gtttaagagaattaagcactcggttacagaacaaacttctttcactctttcgcttctgaatcttcaacaatggtgctcgaggcgacgatgatctgtatcgacaattctgaatggatgcgtaacggtgattactctccttctcgatttcaagctcaagcagacgctgtgaatctcatttgcggtgctaaaacgcagtctaatccagaaaatacagtgggagttctcacaatggcagggaaaggcgttcgtgttttggtcacccctaccagtgatctgggcaagatcttagcctgcatgcatgggctagatataggtggtgagatgaacctagctgctggcattcaggttgcacaactggctcttaagcatcggcaaaataaaaaacaacagcagaggattattgtctttgctggaagccctgtcaagcatgaaaagaagatgttggagatga

SEQ ID NO: 226350 - DNA, 466 bp, Glycine max
aatcaagaacattttaagttaaaaatcatccaatattcaatcgagagacatgcattggttccaattaaagtgcagagagacacattgaaacatgcgtaaatagttcccccgattagtaacagccgcgaagaatgctaccaagaaaataaaaccatacagggcaaagtggttctcaaagattacttcttctcctcctcgtttgatggcttgtcgtcattcttctgttgaggctcagactgattttgcatggaagccagcaaatccttgacagaagggtcatttgggtcaaccccaggaagcgatgcaaggatagaagatacaaaggattgatcggccaacaatttgctcatgtctgactggctgccttgatcctttgtactatctgctattgacaattggagtgccagagccaagtcaggatcacttgcagaagcttctgacatatctggatcttttacatcatggc

SEQ ID NO: 226351 - DNA, 464 bp, Glycine max
cggcaagactataaccctagaagtcgagagctccgacaccatcgacaacgtcaaggctaagatccaggacaaggagggtatccccccagaccagcagaggctgatcttcgccggcaagcagctcgaggacggacgtacccttgctgactacaacatccagaaggagtcaactctccacttggtgttgcgtcttcgtggtggtatgcagatcttcgtcaagacccttacgggtaagactattaccctcgaggtggagagctccgacaccattgacaatgtgaaggcgaagatccaggacaaggaaggaatcccaccggaccagcagaggcttatttttgctggcaaacagctagaggatggaaggaccctcgctgactacaacatccagaaggagtcaactctgcacttggtggtgcgtcttcgtggggggtattaagctggagctgatttctgtgtgatgttcg

SEQ ID NO: 226352 - DNA, 405 bp, Glycine max
caacacaaaccaaacttattttcaaaggtcattacagacccattacacatcacatttcttcttaaaatgttggggaaaatccaacatcgaacatcacacagaaatcagctccagtttaaaaccccccacgaagacccaacaccaagggcaaagttgactccttctggatgttgtagtcagcgggggtccttccatcctttagctgttggccagcaaaaataagcctttgctggaccggtgggattccttcctggtcctggatcttagccttcacattgtcaatggggatggagctttccacctagagggtcatagtcttacccgtaagggtcttgacgaagatctgcataccaccactaagacgcaacgccaagtggagagttgactccttctggaggttgtttt

SEQ ID NO: 226353 - DNA, 544 bp, Glycine max
  unsure (1)..(544): unsure at all n locations
gagcaattttgtcaccgcagaatatgatatacccattccctgctttggtgtgtaccaactcaacttcttccgcttagtatggaggaccatttttgtgctgttgacgaccctcatagccatgctcatgccttttttcaacgatgtggttggaatactttgccgcttttgggttctggcccttgacagtttatttccctattgacatgtatatttcgcaaaagaagattggacgatggaccagtcgctggcttggacttcagttacttagtgccagttgcctcatcatttcattgttagctgcagttggttccatnggcaggggtggttttggacctcaagacttacaagccatttaaaactagttattaaatcaagggccgtaagaaatagcttagaagtgtttgaacatatgatatttttatacaaaactaatgataagttagtttgtgaaattaaagtatatacgttccatgcctgctgctgttagagcaacttgatttgaggaacaaagtgataattggacataatataccctagatttgga

SEQ ID NO: 226354 - DNA, 494 bp, Glycine max
ttttttttttttttttttatgactaaagaaataacacgttcaaagacttttattccttgtaaaataacacacatacacagactgtatacgtccaaatctgaggtatattatgtccaattatcacttttttcctcaaatcaagttgctctaacagcagcaggcatggaacgtatatactttaatttcacaaactaacttatcattagttttgtataaaaatatcatatgttcaaacacttctagctatttcttacggccttgatttaataactagttttaaatggcttgtaagtcttgaggtccaaaaccacccctgccatggaaccaactgcagctaacaatgaaatgatgaggcaactggcactaagtaactgaagtccaagccagcgactggtccatcgtccaatcttcttttgcgaaatatacatgtcaatagggaaataaactgtcaagggccagaacccaaaagcgccagtatttcaaccacattgttg

SEQ ID NO: 226355 - DNA, 518 bp, Glycine max
gtgtttgtgctggtatttgtcctttcaactttcctgcaatgattcccttgtggatgtttcctatggctattacctgtggtaatacctttgttctaaaaccatcagagaaagacccaggtgcttctgtaatgcttgcagaattggcattggaggctggtttgcctgagggtgtcttaaatatagttcatggaacccatgatattgtgaatgctatttgtgatgatgacgacatcaaagccatatcctttgttggttcaaatgttgccggaatgcacatatattcaagagcagcagctaaagggaaacgcgttcagtctaacatgggagccaaaaatcatgcgattgtcatggcagatgcaaatgttgatgctactcttaatgctttagttgctgctggttttggtgctgctggacaaggtgtatggctctcagtacagttgtttttgttggaggctcaaaccatgggaagatatactttagagcatgccaaagctcttaaagtaaatgccggaactgaa

SEQ ID NO: 226356 - DNA, 440 bp, Glycine max
gagacaagagacagataagatcaggaaaaagaaaagagaaaggtttcaaaacaaagcatagcaggtgacctttgacatttttttcaagagaacaaagacttcagaaacagccttattacacgctctggctatcaacattatttttgagaggttggcattgccaagttaatcttgctaccaccagttgaatccttccattgttgtgttattgtcttaatctgtgtatagaagttaacccctgccttgccatagaagttgagatcaccggcaaacgatgccttgttgccggtaaatgagaagaagggcaaaggaactggaatggggacattgatgccaacctgtccagcctctatctcagtctgaaatttccttgcagcaacaccagatgtagtaaatatagaagcaccattttcgtacttgttactgttgataatgtttat

SEQ ID NO: 226357 - DNA, 514 bp, Glycine max
ctctgccactttctgagtacaatacaacactgccatggctgcctcagtctccactattggagctgtcaacagagctccactgagcttgaacagctctgaagctggagattcggttcccagttcagccttctttggcacaagcttgaagaaggttactgcctcaagggtccctaacgtcaagatttcttctggaagtttcaaaatcgttgcggcggagaaagagattgatgagcaacaacagacaaacaaggacagatggaaaggtcttgcctatgatatttcagatgaccagcaagacatcacaagaggaaagggtatggttgattccctcttccaagctccacaggagactggaactcactatgcagtcatgagctcttttgagtaccttagcactggacttaaacagtataacttggataacaacatggacggcttttacattgctcctgctattatggacaagcttgttgttcacatcaccaagaactttatgaccctgcctaacatcaag

SEQ ID NO: 226358 - DNA, 388 bp, Glycine max
aattaaaacacttggggggaaaaccccttttattttttgaagccacaaagtgtaggggaaccaccgtgaacaccgggaaaaattaatgggtcatcccaagggttttttttaggggggagacaatgtaactcaaaattttaaaggattacaagcccatttgaacaagataaaatattgggttttatcaagggataccttctttttaaggggagaatgcttaggtcctcaggggggggataagcagggtccctcctcacttcttgcagaggggtcgaagtttgaggcatttggatcattacaacctttaggaacgggaattttctcttgcagggccgctttggcaaagaaaggccctcttttggaggcattctggttggcattaccaaaa

SEQ ID NO: 226359 - DNA, 434 bp, Glycine max
gtcttctacatgggtcgtcttcttctctttctgattattcccagccttgtcgcattgtctttcctctcacaggtacaatcagcgtcgttcaagattgtgaacaagtgccgtcacacgatatggccgggattactctccggtgccacctagccggcggttgccaccaccggattcaccctggagagcggcaaatggaggaccataaaaattccaaagtcttggtcgggtcggatatgggcacggacactctgcggtcaagactctgacggaaagttctcctgcgccaccgccgattgcggttccgggaaagtagagtgcgtcggcggagccaaaccgccggcgacattggcggagtttactctcaacggagccgacggtttggacttctaccacgtgagtttggtcgacggttacaaccttccgatgctgatcgt

SEQ ID NO: 226360 - DNA, 551 bp, Glycine max
gtgttctcaaggagattcgtgaaacagttctacaattgaatgcaccatcccatttggtagaggagttgaaaactaaaatgaagagttctggaatgccgtggccgggtgatgaaggtgaacaacgatgggagcaagcttggatagctataaaaaaggtgtgggggctctaagtggaatgaaagagcatacttcagcacaagaaaagtgaaactcgaccacgaatatctttccatggcagtccttgttcaagaagtgataaatgctgactatgcttttgtcatccacacaactaaccctgcctctggagattcatcggaaatatatgctgaggtggtaaagggacttggagaaacactggttggagcttatccaggtcgtgctttgagttttatctgcaagaaacgtgatttgaactctcctcaggttatcctagcaaacctgtcggcctatttataagacggtcaattatttttcgatctgattccaatggtgaagatctagaaggttatgctggtgcaggtctttatgacagtgtgccaatggatgaagcc

SEQ ID NO: 226361 - DNA, 514 bp, Glycine max
gaatagcaattttaattaggaagaagtaagtagatacaatatatatagtagggaaaaagaataagaccatctaattttttaattaatttacattattccatgtttatacacttataaattattccttaattttcaatatatcacgtgtaataaatctataaggccaaatttggtaatcccgcgggttactcttaaactcgcagaagctgccacggccacgtttgaaacgccatgttgcacgggaatgaacatagaacatagttgaggtagttggcttataagacataggtatggaggtctacatttgtggtctggtctggacaacatagacttttgcatccttgatgacaccttgaatgtcctgaggagtgccatacaactctttaattttattttctgcacgggcaatgctggacaagattgactggcgaaaactgccatcaaggatcagtttgtctggaaaataatcaagcaccaccttctcggctttatacattggcacactgtcataaga

SEQ ID NO: 226362 - DNA, 498 bp, Glycine max
gtgttctcaaggagattcgtgaaacagttctacaattgaatgcaccatcccatttggtagaggagttgaaaactaaaatgaagagttctggaatgccgtggccgggtgatgaaggtgaacaacgatgggagcaagcttggatagctataataaaggtgggggggctctacgtggaatgaaagagcatacttgagcacaagaaaagtgaaactcgaccacgaatatctttccatggcagtccttgttcaagaagtgataaatgctgactatgcttttgtgatccacacaactaaccctgcctctggagattcatcggaaatatatgctgaggtggtaaagggacttggagaaacactggttggagcttatccaggtcgtgctttgagttttatctgcgagaaacgtgatttgaactcttctcaggttattctagcacacctgtcggcctatttataagacggtcaattatttttcgatctgattccaatggtgaagatc

SEQ ID NO: 226363 - DNA, 426 bp, Glycine max
  unsure (1)..(426): unsure at all n locations
gaatagcaattttaattaggaagaagtaagtagatacaatatatatagtagggaaaaagaataagaccatctaattttttaattaatttacattattccatgtttatacacttataaattattccttaattttcaatatatcacgtgtaataaatctataaggccaaatttggtaatcccgcgggttactcttaaactcgcagaagctgccacggccacgtttgaaacgccatgttgcacgggaatgaacatagaacatagttgaggtagttggcttagaagacataggtatggaggtctacatttgtggtctggtctggacaacatagacttttccatccttgatgacaccttcaatgtcctgaggagggccatacaactgtgtaatttcatttnctgcacaggcaatgctggacaagattgact

SEQ ID NO: 226364 - DNA, 396 bp, Glycine max
gacttaaaaattcacactgcatattcatcaaagcattatcaaagcacactgtattctaacagcacacgtacgtagaaaggttgaatgtccaggtctggcacaacatacacaacacaccataatttattttatatacaatgttatggtgcccaagatgcacatgcatggactaattaaacaacaacgttagtctgataggcagtatccatagatgaattgggtacccataaaatgggctggctcccaaggaaatggcaaacagggtttgtttcaggatcaactcccatgagttcatgaagcatgtgatgattcattccagaagtatctgaggggcaaacagcatgtgcctgagttttggttccattaccagccaccaatggaaccatgaaagctgtt

SEQ ID NO: 226365 - DNA, 548 bp, Glycine max
gtgatttcagtgagtgatcggtgttcacttgatctcatcataatcgtcagcgtcaattgaagaagatgccgatcagaaacatcgccgtcggaaggcctgaagaggcgactcaccccgacacgttgaaggcggctttggctgagttcatctcaaccttcatcttcgtgttcgccggctcaggctccggcatcgcctacaacaagctcaccgacaacggcgctgccacccctgccggcctcatctccgcctccatcgcccatgcattcgccctcttcgtcgccgtctccgtcggcgccaacatctccggcggccacgtcaaccccgccgtcaccttcggcgccttcgtcggcggcaacatcaccttcctccgcggcatcgtctacgtcatcgcccagctcctcggctccatcgtcgcctccctcctcctggccttcgtcaccgcctccactgttccagcattcggactctccgctggagttggagttggcaacgccttggtgttggagatcgtgatgaccttcggtctggtgtacacggtctacgcaact

SEQ ID NO: 226366 - DNA, 441 bp, Glycine max
aaagagaacttcatgatcatcaaccatccaaggatttaagacgaaaggaacaagtacaaccctcgaaagtgaattaggaagaaaacacaaggaaggaaaaccatacacagaagaagattccagagaaattcaataatacacaatttttttttttttattttcatttccccccctctagtagtcagtggtgggaagctgctcgtgggtgtggctgataaagacaacctcgtaaacaaggccagcgattccaccaccgatgagaggcccggcccagtagatccagtgggtggtgcaggtccagctcacgacaggaggcccaaatagtacagcggggttcatggccgctccagagaaggccccacccaacaaaatgttagcgccgacaatgaaaccaatggcgatgggagcaataattcccaaattacccttcttggggtcaat

SEQ ID NO: 226367 - DNA, 482 bp, Glycine max
  unsure (1)..(482): unsure at all n locations
ccttgtttctttttcttctatagagacacacggagagagtctcagagcaataaacacccttcaatggctaccactaaagtttacattgtttactattctacgtacggacatgttgagaagttagctgaagagattaaaaagggagctggttccgttgaaggtgtggaagcaaagctatggcaggtacctgaaacactttctgaagaggtccttgggaagatgggtgcacctccaaagagtgatgtaccgattattacacccaacgagctacctgaggctgatggcttattgcttggtttccccacaagatttggactgatggctgctcaattcaaagctttcatggatgcaactggaggcctgtggcgcacacaggcactagctggaaagcctgcaggaatcttttacagcactggttctcaaggagggtggacaagagactactctncgtgacatctattactcagctttgtcaccatggg

SEQ ID NO: 226368 - DNA, 520 bp, Glycine max
ggctctccttttttttttgaatagattggttccggcctaccaattttatagcaaacactttgatcttaatgcatatagtaacaattgacaaattcttgatattgacaataacattgattttgaggatacatatttgacaatgacaccacaaacgcattgaacccaagtgttgattactttctctctctctctcattctctctctttaattaacatcttattctgttggaaattatgaactggaaactggacatatgacgcacataacttttttgcttgcttaactatatagaaacatgaaatggttgatgtgtatagatctcactgatattatcccttaagcttcttacccatgcccacaaagtactatccttgatgaaaagcttgagccaagtctaactcatttggtatgttggaaccatacccggcataggtacctgcaccataaggggatccaccctttacatgcttcatctgaaacattccagcaccaaatgtgttaccaatgggcacaaaaatca

SEQ ID NO: 226369 - DNA, 469 bp, Glycine max
gtttgattggaggagatgactttaagagtggtcagaccaaaatgaaatcggtgttggtggatttcctagtaggggccggcatcaagccaacatctatagtgagttacaaccatttgggaaacaatgatggcatgaatctctcagcccctcaaacctttccgctcgaaggaaatttccaagagcaatgttgttgacgatatggtcaacagcaacgccatcctctatgagcctggtgaacatccggaccatgtggttgtcattaagtatgtaccttacgttggggacagcaagagggccatggatgagtactcttctgagatattcatgggcggaaagaacacaattgtgttgcacaacacttgtgaggattcactgttagctgctcctattatcttggacttggtccttcttgctgagcttagcactcgaatcgagtttaaagctgaaaatgagggaaagttccactcat

SEQ ID NO: 226370 - DNA, 437 bp, Glycine max
aagctcagagtacttcgataactttatattattttacatgcatgcatagcatatatagcctgctttcaaattagtcagcaggaaccaagatagagagatcccacgatctttaaatttcacatttgccataaatatttatacagaaaagagggtttgggatatgagttaagttttgatcttattcaactacagtatcccaaaccattacttttaagactttgaactttacttggcctccaggatcatgtggctctcaagagctaattccacacaagcccttaggatgttttccagcatagcattgatgctttgacagggcattaaccactggcgtactcgggggaaccagaggggccctggacaggtaaccgaggtaggtctcaactgggtggaatgagcggaactttgccttattttcagtgttaaagctccatttc

SEQ ID NO: 226371 - DNA, 421 bp, Glycine max
gatagatggtgtctctgaaacttcagaagcggcttgccgctagcgttctcaagtggggtagaggcaaagtttggcttgaccctaatgaggtcaatgaaatctccatggctaattctcgacaaaacataaggaaattggttcaggatggtttcattatcaggaagccaactaagattcattcccgttcccgtgctcgcagaatgaaggaggccaagaggaagggacgtcactctggttatggtaagcgtaagggtacaagagaggctaggctccccaccaaaatcctttggatgaggaggatgcgtgtcctcagacgattgctccgcaagtacagggaagcaaagaaaattgacaagcatatgtaccatgatatgtacatgaagggaaagggtaatgtcttcagaacaagaaagtcttgatg

SEQ ID NO: 226372 - DNA, 551 bp, Glycine max
gagaaggttaccatcgattgccacacacattccaattccacacgctattacgtttggttttcagttaattttcgggacaataataaaataacattcttgctgctgttgaataattacaatgagtgtggggccaagcccaatgcaataagaaaagtggcactctttcttctttctttcattttttttttcggtttctggtttactatgctatgtagcttggagcggtgttacggtgacagagtgagaaatgggtctgctttctaacagagtggagagacatgagatcaagcctggcgatcacatctacacatacagagctgttttcacctattctcatcatggcatttttgttgggggaagcaaggttgtacatttcagacctgaaagaaacttaaagtcaatgactgagacatcatcaaactgggatgatccaacatcaaacccatgtccaacctttcctgattgtggattcagacaaccaaacagtggagtagtcctttcttgcttagactgcttccttcgaaatgggtctctttactgctttgagtatg

SEQ ID NO: 226373 - DNA, 439 bp, Glycine max
gggtagaatgttgcattattataggcaactagaagaaaatttgtctcaaaggaatacatcacattatagttactactataagtaataatattgttccattttcatcccagacacaacttgaataactagacaccaatcacagaagatataacatgaatgaagacatatctgctatgaactagtgtataactaacagtgacacatgcaacagtttcatgtgcatagtaaggatgaagagcaatgctagatcatctggtggtaatctggctgcctggattttcatgttcagctacctactgctgctcttgacaaatgcatgcaaggttcacagccgagttttgcactggcaccttgatcacatcacttgtgacaccaatatcagttgcatatctgcttatgcaagacatttctgcagttacagtagcaacaccaacaggac

SEQ ID NO: 226374 - DNA, 620 bp, Glycine max
gttttattgtgtggatttggatcctacccttttgcttaaactctattaacttgtcataaatggtttgaaatttgaatgaataatacatattttgatgctcactgccatatactgcatattgatcaggaattgtgatgggggctgaacagcaacacatggattcgcacacgacaatggtaattgctgttgctgttgccagcacttcacttggtgcagtcattctgtgtgtgttgtgcatctggatttactacaccaaatacccttcaaaatccaaagggaaaaacgttcaaagatcagatgctgagaaagggctagcttcatcaccatttttgagtaaattcagctctataaagctggttggtaagaaagggtgtgttccaataattgactataagcaaatagaaaaagccaccggtaatttcaaggaaattaacatcttgggcaagggaggttttggatgcgtttacaaagctcatttggatgataatttggatgttgcggttaaaaaattgcactgtgaaaatcagtatgctgagcatgaatttgagaacgaggtggatttgttaagtaaaattcaacatccaaatgtgatctctctgctgggttgtgcagtaatgagg

SEQ ID NO: 226375 - DNA, 539 bp, Glycine max
ggggatacgagaatacaaactacaatcttcccttcaccctctcagatctaactcatccacccattcgatttgttttttcctgttttgtacggaatttcgatcgaccaagatgagcgtggttggtttcgatttcggtaacgagagttgcgttgttgccgttgcgaggcacatagggattgacgttgtgctcaatgatgagtccaagcgtgaaacgcccgccattgtgtgcttcggtgacaagcaacgcttcattggcactgccggtgctgcctccactatgatgaaccctatgaattcaatctcacagattaagagactcattggtaggaaattcgctgatcccgaattgcagcgggatcttaagtattgacgtttctcgtcactgaggggagtgatgggtacccgttgattcatgcgcgatacatgggtgaggccaagacatttacgcctacccaagtgtttggaatgatgctgtctcatcttaaggaaattgcggagaagaatctcactacggcagttgctgattgttgcattggaat

SEQ ID NO: 226376 - DNA, 449 bp, Glycine max
tgtcgtcctttttttttttttttttttttttttttttttttttttttttttttttttgtttttttttttttttttttttttttttcccccccaaccttttttttaaaggcccccccacccccggaattggttgcggatttagacccttttttgggggtcctaaaacatggaaaaaaagaacccgggggaaaatcgggtcccccttgggtaaaacacgttttgaaatgaccccccgccccaaaatagtcctttaaaaaatttacggcaaaaaaaccccgggaaatggggttttgagggaaaaaaggcccccccccattttgggggggcccataagagggggggtgccaaaaaaggccctagaaaaggcttttacccccccccaaggggaaaagaaaatggccgccccccccgggggggggaacaaaatacttgccttggggccaaaaacc

SEQ ID NO: 226377 - DNA, 489 bp, Glycine max
ctcgagccgattcggctcgatgtttgactgaggcagggatctaggcggtaccatattccataagtcggtcagtgagggtgaacctatggtgggtgactcctttgtgtcagatgatattcctttcatgggttggattgataaactcatgggactggatgcacgtcttgacacgcttattcaaggagatggatacgttctaccatgaagccattgatgagacacatgaattctaagaaaaagactccagaggaagaggattcagttgatgtcttacttcaactgaaagagaacaacacgtgtgccatatgtctcacccatgattacatcagagcagtgctcttgaactgactcgtaggagctacaggcacaactgcaggcacatcactttgcgccatgactgcactaagtaatcattcacgcattatgacgaaagtgcaagacgaccttagaggctaaggtggtaccatagattgcctgcatgaagatgat

SEQ ID NO: 226378 - DNA, 420 bp, Glycine max
  unsure (1)..(420): unsure at all n locations
cttattgctcccagcaaccactctccccaagaagatgctgaagctctcagaaaggcttttgaaggatggggaactgatgagaacactgtcatagtaattttgggtcatagaactgtgtatcagaggcagcaaatcagaagagtttatgaggaaatttaccaggaggatcttgtgaagcgcctagagtctgagatcaaaggagactttgagaaagccgtgtaccgatggatactggaacctgcagatcgtgatgctgttttggccaatgttgccatcaagagtggcaaaaactacaatgtcattgtggaaattgccactatcctctccccggaagagcttttggcggttagacgcgcctatctcaaccgctacaagcactccttggaagaagatgtngcagctcatacctctggccatcta

SEQ ID NO: 226379 - DNA, 606 bp, Glycine max
  unsure (1)..(606): unsure at all n locations
gggagatcttcacggcctcaaagtgtgtagaggagcccctcttctcacacacttttttgctgaccatctcttcctattttgcagggctaatgttaattaagttgatatccttcacagtattctcggtgcttttgagaaagcctcaggtctttccatcatcttccaaaaatctgaatttttttagcagaaacacaccacccagcatcaagcaacaaatctctggacaactgcaagttacagattgtctgggaacagggaaataccttgggatgccctctatgaatggtaggaagaaaaaatccatcttctcctatctgagggataaaatttggaggaagatccaacagtggttaacacctttcaaaggttggtagagaagtgctcatcaaatcagtatctcaagctattcttgcttactgcatgagtgtttttctcctcccttctacccttcaagatgagatccaaaagatgatgaactcattctggtggggtagtaatagaaactatgggaaaggcataaattggctaagctgggagcgtctaacaatcangaagagngatgaatgtatgagaattagacatttatatgcctttaaattgtctatg

SEQ ID NO: 226380 - DNA, 432 bp, Glycine max
gcgaaacataggcaggatgacgggaagaagggcgtggtctatctcatgcctcttttcggcaaggcactcctcgccggtggcgtcgctgggctttgcaagaccgtcgctgctcctctcgaacgtggcaagattctctttcagacgcgatggactgagtttccagagcacagggttgattggatcagctgttacaattgcgaaatcggacggccttttgggtttctactgaggaaatggagcaggcggtgcacggattattacttacgcaggtattcattatatgtcctatgaagaataccgcagatggattatacgaagtattactcatgttgggaaaggccctacccttgaccttgtggcaagctcactctctggaggcacagctgtacttttcacttatgcacttgacgtgactcgaaccaagtagcttat

SEQ ID NO: 226381 - DNA, 507 bp, Glycine max
ctcgagccgaatcggctcgagcagtgtgttacccaagagagcatgagagcttgaaggagctacgagagttgacggaaaaacacccttggaacctgatggctacaccacctgacgaaggacaacttctaggcatgctccttaagcttatcaatgccaaagaacacccatggaaataggcgtcttcactggttactccttgctttccactgcccttgccctcccttctgacggaaagatcttagctatggatgttaaccgggaatattatgaattggggttgcccgtgattgaaaaggctggagtggctcacaagattgacttcagagaaggacccgctcttcctcttcttgacgttctcattaaagacgaaaagaataagggagctttcgatttcatctatgtggatgctgataaggacaattacttgaactaccacaagagggtgattgagcttgtgaagcttgggggactgatcggctacgataacaccctatggaatgggtccgt

SEQ ID NO: 226382 - DNA, 400 bp, Glycine max
tttcgtcctttttttttttttttgcttaactatccaagcggacacacattatgtttatttaaggattaggggaaccagtgcaagggggggcttcttccatctgtggtcagcgaaacaagtcaaaggggagggaaggagccaaatgaacatataatgcggcgccacctggtgatgccatcacccacgggaagctggcacatctggaccctggcttcaattgcatgagcttggagcagctccataacaacaatcgtgagggatacttaacactatccatgcgaggaccatcgagtgggagccccaccgtcaccagccctagggggactgcgtgacctatcaatcctcccagcttcactagcacaatcagcctgccgtggatgatcaagtaattgcccatatg

SEQ ID NO: 226383 - DNA, 470 bp, Glycine max
agagcatcactgaactaacaaagcaaccctatgtggaaggtggtgtgtgtcaccggagccagcggcgccatcggatcatgggtggtcctactactcctccagcgtggatacaccgtccatgccaccgtgcaagatatcaaggatgaaactgagaccacacatttggaggaaatggaaggagcagggagtcatctccatttatttgaaatggatcttcttgacatcgactccattgccgttgccataaaggggagttccggcgtgatccaccttgcatgtcctaacatcattggtcaagtatgaagatcccgagaaacagatattggagccggcgattaaaggaacggttaatgtgctcaaggccgccaaggaagcacgcgtggagcgcgtggtggcgacttcatcgatttcctcgattatgccaagacctacttggccagctgataagattaagggagaagagtgttgga

SEQ ID NO: 226384 - DNA, 599 bp, Glycine max
aatggcttcgtcgcgagtagatctggatgggaaccccataaagcccatcaccatttgcatgattggcgccggtggcttcattgggtcccacctctgcgagaagctcatgtcggagacccctcacagtgtcctcgccttggatgtctacaatgacaagatcaaacacctcttggaaccccacacgctcccttgggcctctcgcatccagttccatcgcctcaacatcaagcacgattcccgtctcgaaggcctcatcaaaatgtcagatctgactattaatctggctgccatttgcactcccgcggattacaacacgcgccctcttgacacaatttacagcaacttcatcgacgcgcttcctgtggtgaagtactgttcagagaacaacaagcgtctcattcatttctctacgtgtgaagtctatgggaaaacgattggaagcttcctccccaaagatagtcctcttcgtcaggatcctgcatactacgtacttaaggaggatgagtctccttgtatttttggttcaattgaaaagcagagatggtcctatgcctgtgctaagcagttgattgagaggcttgtttatgctgagggtgctg

SEQ ID NO: 226385 - DNA, 500 bp, Glycine max
gtgaacaaggagtatgctagatactttcttagtcaacttgacaagagattataaaacaatcagcataaacactaagcacaataaacaatcagaatgttttcactgtctgaggaaatttacagcagcccaaatggggaagatcatgataatgccttcaacttgtctgaacattcgtcatgatctgctggtgctttgaagttcttcactgatttacccaagacatttaaaacagcatcacgctgcaattctttacctagctctaatgaaagctgaattgagctcttctctaactcaacagcatgcttgcttagttcaactgatgacagggagcgaagcatttggatatattcttcttgatctgattggtccaatttcctcaaaaacatctgcaattgttggtattgctctttccagtgcaaaatttttaatccctttggattaccaatgggagttgggcccaaagaagctgttacataattggacttaactgggggaaactt

SEQ ID NO: 226386 - DNA, 590 bp, Glycine max
  unsure (1)..(590): unsure at all n locations
aagaaaaaagcgatcatagtttcacttcggccttatccagtttagggtttcggttctctaccctatctttcacgtatcgaaaccttaaatttacgatcaggtctgagcaatctggttggtagaacctttggtcttagtgagtcaagttttatgtctgaattagacgatcaaattcctactgccttcgatccttttgctgatgcaaatgctgatgactcgggtgctgggtcaaaggagtatgtgcatattcgtgtacagcagcgaaatggtaggaaaagcctgacaaccgttcagggattgaaaaaggaattcagctataacaagatacttaaagacgtcaagaaagagttctgttgcaatggaacagttgttcaggacccagaactaggacaggttattcaacttcaaggtgatcagaggaagaatgtttctaccttcctagtccaggctggtatcgtgaagaaggatcatatcaagattcatggtttctgagcgggtggagtcttaagtgtcaaattntacctgcctgactatgtgttaggcataatatataatctgagtcgtgtggatgtgatggggtatttctatgt

SEQ ID NO: 226387 - DNA, 475 bp, Glycine max
aagattaaatactggggtccattaaaccgttttcatataagtcttcaaagcaaataacacacaatgttctgaaatccataatcccacatcacatggtaaaacataagaacacattagaaataccacaatcacatccacacgactcagattatatattatgcctaacacatagtcaggcaggtaaaatttgacacttaagactccaaccgctcagaaaccatgaatcttgatatgatccttcttcacgataccagcctggactaggaaggtagaaacattcttcctctgatcaccttgaagttgaataacctgtcctagttctgggtcctgaacaactgttccattgcaacagaactctttcttgacgtctttaagtatcttgatatagctgaattcctttttcaatccctgaacggttgtcaggcttttcctaccatttcgatgctgtacacgaatatgcacatacttctttgac

SEQ ID NO: 226388 - DNA, 584 bp, Glycine max
cttaacaacagcacaaagcgggttactgtctgttcaagctaccatctctctctctctttcttagtgcctccttgccagaagttaaaatggcccaagaaactttcctattcacatctgaatcagtgaacgaggggcaccctgacaagctctgtgaccagatctccgatgctgtgctcgatgcatgcttggagcaggaccctgacagcaaggttgcctgtgaaacctgcaccaagaccaacatggtgatggttttcggagagatcacaaccaaggccaacgtggactatgagaagattgtgcgtgacacatgcaggaacattggttttgtctctgatgatgttggtcttgatgctgacaactgcaaggtcctcgtcaacattgagcaacagagtcctgatattgctcaaggtgtgcacggccacctcacaaagaggcctgaggagattggtgctggtgaccaaggtcatatgttcggctatgccactgacgagactcccgagctcatgcccttgagccatgtcctcgccacgaagctcggtgccaagctcaccgaggttcggaagaacgggacatgcccttggctg

SEQ ID NO: 226389 - DNA, 553 bp, Glycine max
gaaataggtcatttggttcagcactggaatttgtttggtcttctgagggagaatatgctgtcagagaaagtacatcaaagattaaaattttcagcaaaaatttccaggaaaagaggagtgtccgaccaacattttcagctgaaagaatatttggtggcactctactggcgatgtgctccaacgatttcatctgcttttatgactgggctgaatgcaggttgatctatcgcattgatgtcaatgtgaaaaacctctactgggctgacagtggtgatctagtaacaattgctagcgatacatcattctacattctgaagtacaatcgtgatgttgttgtatcacatttagatagtggaagacctgtcgatgatgaaggtgttgaagatgctcttgagctcttacatgaaatgaatgaacgtgtcagaacaggcatctgggttggggattgctttatctacaacaattcctcttggagacttaattactgcgttggtggtgaggtaactacgatgtttcatatggacccgcccatgtactcgttgggatatcttgc

SEQ ID NO: 226390 - DNA, 608 bp, Glycine max
  unsure (1)..(608): unsure at all n locations
tctaccttgcagcttgagatagtaaagttgcaaactttgaagcaattagtgtagaagatgagtacgttggatgcaacaagggctgaacttggtcttcttgttttatatttgggcaaggctgaagcaagggacaaaatatgcagggcaatacaatatggttcccaaattttgagtaacggngaacctggtactgctcagaatgtcgacaaaacaaccagcttggcacgaaaagtcttccgtctttttaagtttgtcaatgacctacatgctttgataagtccaacaccacagggcactcccctccccctaattctgttgggaaagtccaagaatgcactactctccactttcttgtttcttgatcaatttgtgtggcttggcagaacaggcatctaccagaataaagagcgcactgaactaattggccggatatctctttactgttggctgggttcctcagtgtgtaccaccttagttgagcttggggagctnggaaggctttcttcatcaatgaagaagttagagaaagatctcangaacangaataaatatgataatgagcaataccgtgccanactaaacaagtcaaatgagagaactctatcact

SEQ ID NO: 226391 - DNA, 394 bp, Glycine max
ggcggtttatcaggaaatcatgcctcatgcttttgctttgatgactgatggctctggttatcagggggctcataagtatttggagcctggacgggcatactaaagaagagaattagccaacaaactgctcggccgtgttgtgacacttagcctttcaatgtaagggtagcagcggcatccagagagccacctgaggtgtcgatctgtatcagaagatatagatgggtcaacagcttgatggttacgtcttgcgctgagtacgcgatcagaatgcatatcacgttatgcagctgtgttgcgaatgtgtacctgatgatgcaggcgactgtatcgtctcgacatttcttgatcaggttgggacactatgactccatccatatggttgccggatgat

SEQ ID NO: 226392 - DNA, 561 bp, Glycine max
  unsure (1)..(561): unsure at all n locations
gtgcatggaaatatttcgccctcaaaatttagacagtccagttgagaacaccttaaaaggaaaaataagaattaccaccagatgcctgtggcttgacaaggggaagctgttggatgctctccataaagctgctcatgctgctcttgcaagctgccctgtaagctgtccactggctcatatggaaaaaattgtgtctgagatgttgagaaaaatggtgaggaagtacagtggcaaacggcctgaagttattgccattgccatagaaaatcctgcagctgttcttgctaatgagataaacacaaagttgtctggaaaattaaatgtggatgggatgtcggcattgagaaaagtggtggatggacatgagaaagagaatcagagaaccgaaatgcaaataagagatcgtattgatgtaggtggtctactacctacaaaagacaatgctatctcaagtggagctgaggatggctttgtctgatgcgaggatccaaatgattattttaaaccatttgttgaatcctctncagttgagaagtcaattanactaacaatggtatgttc

SEQ ID NO: 226393 - DNA, 447 bp, Glycine max
cattcttcacctcctgctcatatttctgtaacaaagaagtccacagagatttacactgcccaggacttctgctgatcccattagccaacaaattctgagatatttcttcccagagggccatccttcccttcacaacttgaaatctgtcattcagttccccacgcatatcaatcagcttcttaacttcttcatgtttccatttatttctctttgctgattttgaagatttgggttcagaatctgatgtatttacagaattgcattcttcagtgtcttcagaacagtcatccttcaatggggatgacttctcctttcgtggaacataaccattgttagttttaattgacttctcaactggagaggattcaacaaatggtttaaaataatcatttggatcctccgcatcagacaagccatcctcagctccacttgagatagcattgtctt

SEQ ID NO: 226394 - DNA, 507 bp, Glycine max
gcaatggtggacaggccggacatttgttgtactttttactacacttgccatatttgtacctcttgcgagccttaagcgaattgattcattgagattcacgtccgccctttcagtcgcacttgcagttgtttttctagtcattgccgtgggaattgctgttgtcaagatatttagtggaggcattgtgatgcccagactcttccctgtcacgactgatgtggcatcattcttcagactattcactgtagttcctgtgtttgtgactgcgtatatctgccactacaatgttcacagcatagacaatgaacttgaggactcctcacagatgcaaggggttgtacaaaccgcccttgttctatgctcttcagtgtatgtaatgataagcttctttgggttcctcctatttggcgaaggaactcttgatgatgtactggccaatttcgataccgatcttggaattcctttcggttctgtgctcaatgatgctgttcgtataagctatgctgc

SEQ ID NO: 226395 - DNA, 432 bp, Glycine max
gaggaaattcgttgaccgggtttcaggagtaacttctgatggaggattcagtagtgagagtgtgtccaattcaccacagaaagggatggatggagacaagcctagctcatctgcaaaattgcatgtacctaaggctaaggattctcatgtaaagtttagcatatagtcaataaggattccagagctttatattgaggttcctgaaacttcaactgttggttcactaaagaggactatcgtggaggcagtgatggctatacttggaggtggtgcacatgttggtgttcttcttcaggggaaaaaagttagagatgacaatataacacttgtgcagactggtatatcttgcaatgaaaatttggataccctgagtttcatgttggagcccacttcactacaagcttctccaactgtttgtgttggtgatccttc

SEQ ID NO: 226396 - DNA, 398 bp, Glycine max
attgaatctgagaattctctaaaagagatctttgtctgctctctgaagaaagaagggtctttgcttgattttggagatgtctgtgctctcagatctcatcaaccttaacctctccgataccaccgagaaggtgatcgcatagttcatatgggtcgggtgaatcaggaatggacctgaggagcatagcaaggactcttccaggaccagttagcgacccttcagagctatccaagtggaactatgacggttccagcacaggtcacgctcctggtgaagacagtgaatggattttatacccacaagccattttcagggatccagttctaaggggtcacagtatctggagtatctgcgaagcctacactactgctggagaacctattaccactaacaagagg

SEQ ID NO: 226397 - DNA, 295 bp, Glycine max
gcaatggcatctatggcggctataggttctctcaatgttccacgttctgcttcttcccgttcatcctttgtgggaagaaaaagcgttccacgcagcctttccttctctgcatcacaactttgtggagacaagattcccacagattcagttttattggcaccaaaaataggtcgcagtccagttatcgttactcctaaagcagtttctgattcccaaaactcacaaacgtgccttgatcccgatgctagcagaagtgtgcttggcattatacttggaggtggtgctgggactcggc

SEQ ID NO: 226398 - DNA, 501 bp, Glycine max
aaagaaacttgttttattgaattgattagcgaactttacagcgtgattgctcatagcgggccttctcttccgctattatttacaagccactgcccaaaaatatatatcatgaaacacaaaagcctatcttagacgtggaagcagagcttgataaactcttctgcggtagtaatgagcttcgcagtcaccattaggatttggggtacaagaaattttttggggaggtggttgtgtctagatgactgttccactaggaattaaagcatccttgattactgtgacaatcccactttttatgaaatacccatctgcttcccttgcagcttcttggacattggcactggtgataatcttgacattttccccaattcgagcattcttgtcaataattgcccttttgatatgagagttcctgcctataccacatggaacacttgctttgcagccagaaacctttatcagtcttcgtctcgaaaaatctgccccattaaaaccggtctt

SEQ ID NO: 226399 - DNA, 380 bp, Glycine max
  unsure (1)..(380): unsure at all n locations
ntgatatgctntatgcactgngtatgagggttangtangcttgaccttnntttnagtncnttttttaaactcttctttctctctatttctaaggtttgccctgagatcactttgagcaagggtgattgggggggcaattcttggcatcagcgagggcgtcactggaactattttcttcactcaagagggaaatggccccaacaccgcaacggaatctttgctggcttaaccctggctccatggctttccatgtccatgccttgggggacactaccaatggttggctgtcaactggagcgcctcttaaatccttattacaaccagctcggggcccctgttgaccaaaatctatgctggtgatcttggaatgtaatgctgtg

SEQ ID NO: 226400 - DNA, 519 bp, Glycine max
cttaacaacagcacaaagcgggttactgtctgttcaagctaccatgtctctctctctttattagtgcctccttgccagaagttaaaatggcccaagaaactttcctattcacatctgaatcagtgaacgaggggcaccctgacaagctctgtgaccagatctccgatgctgagctcgacgcatgcttggagcaggaccctgacagcaaggttgcctgtgaaacctgcaccaagaccaacatggtgatggttttcggagagatcacaaccaaggccaacgtggactatgagaagattgtgcgtgacacatgcaagaacattggttatgtctctgatgatgttggtcttgatgctgacaactgcaaggtcctcgtcaacattgagcatcagagtcctgatattgctcaaggggtgcacggacacctcacaaagaggcctgatgagattggtgctggtgaccaaggtcatatgttcggctatgccactgacgagactgccgagctcatgcccttgagccatg

SEQ ID NO: 226401 - DNA, 482 bp, Glycine max
aaaaatgtatactctctataatttgagattattacatatttctagcataaatcttgagagaacattgttttttgtttcatcatataacatatatatgttctgcaagaacacatacaagtacacacaaaaaagggggaaattcatacaaaaatactgaaaagcctaacacagaattgagcaagagggaaggaaccatagagaatattttagcaatcagatcataagaagccagtagaagcgcaaaagtcccttgccaagagtgttggaacccctttaagttaagcaggtgccttctttcccttgagtggcttcaccacttcccatgtgaagtcagggtcagctctgtcaaagcgtacatatgcagtagtgtttaagaacctgccatttacaccccttttgagatcaaggttgatggagatcatgccaggcctgaagccaaaactctgctttacaatgctgaggatttccttgttagggatctt

SEQ ID NO: 226402 - DNA, 554 bp, Glycine max
  unsure (1)..(554): unsure at all n locations
acctcctccaccacccccagctggtgccaaacctggttctcgtccaccaccacctcctcctatgagtggtgtggctcctcctcgacctccgcccccgtttggttcaaaggtgcaacgtcccttagctagtggatcaaaagctacagttgaagctggagtagaaggtgaagctgatgctcccaaagccaagctaaagcccttcttctgggataaggttcaagcaaacccagatcaatcaatggtttggaatcaaatcaaatcaggatcattccagtttaacgaagagatgatagagacgctttttggctataatgccgtggataagaacaatggtcaaaaacagaaacagtcttcctcccaagatccttcaccactgtttatccagatcattgacaaaaagaaagcacaaaatttattgattctgttgcgagcattgaatgtgacaatggaagaagtttgtgatgcactntatgaaggacatgagcttcccccggaattccttcaaaccttgctgaagatggcaccgacatcagatgaagaacttaagcttagac

SEQ ID NO: 226403 - DNA, 397 bp, Glycine max
  unsure (1)..(397): unsure at all n locations
gctactgagtttccacactgcataccttaggtcttccgaattcgaagttaatttgcaagatggctaaggaaaaggctcagatcaacattgtggtggttggtcatgtggaccctgaggaggcaaccaccattaacgagctgaagaagcctgttgtggagaaagaagctccagngcatgccatatgagggcatgcacgtacggcctcggaggggaaccagaaaattatgttaacaaaataatctggaaccctaatgtatcagtgtcatcatcagtgtgtagtttaagctagctttgctatggttacgttctttgagatgagagtcttgatgaacagtaccattctgatgtattgctttccttgaaagttaatgcatgcttcttatcttctgtctagaac

SEQ ID NO: 226404 - DNA, 269 bp, Glycine max
tttctttcttttttttttttttttttttttttttttttttttttcatcaacttgttatggaatcacattgatagcctgtaatagaacactaactgggtaagaggcagatgcacctcaagtgcaagtctcttgccttccggcttagacaaaatagccactgctatggcaagaaccagctgggctcgtgggggaacaaagcaactgccctcgtctgattggcgtactccaacggagagctgcgcaccgctaatacgagcaaaaccccccag

SEQ ID NO: 226405 - DNA, 549 bp, Glycine max
ggttgcacttgtactcactcaatccgagaccaaaacggcgccatgcctaccgtcagtgtggggcgggatcgcctgtttgcggctctaggaaagacttacacgcaagaggaattcgaagacttgtgcttcagtttcgggatcgagcttgacgacgtcacgacggagaaggcaattgtgagaaaagagaagcatttggaggaagaagaagctgatgaggacgaagaagttatctacaaaatcgaagttcctgccaacagatatgacctcctgtgccttgaagggcttgctcaagccctccgagttttctgtgagttccaggagattcccacttacaaactgtccaagatcagtaaggatgcaatgctgaaaatgcacgtgaagccggagacttctctgattcgtccatatgttgtatgtgctgtattaagaggtataacttttgataaagcaagatacaacagctttatcgatctccaagacaagcttcaccaaaacatatgtcgccgaagaacccttgttgccattggaacccatgacctggatacattg

SEQ ID NO: 226406 - DNA, 538 bp, Glycine max
aaaaatactaattgttatgttgtgaatcttgtgattttgatttattgaaattcaaggggcagagttttggagcttcggctccggctaacggtggcggttcgggtcagccgaagcagagggttagagccaggagaggacaagccacggacccacacagcatcgacgaaaggttacggagggagagaatcgcagagcgaatgaaggccctacaagaactagttcctaatgccaacaagactgacaaggcctccatgctggatgagatcatcgattatgtgaagttcctacagctccaagtcaaggttttaagcatgagcagattgggcggtgcagcagctgtggcaccccttgttgctgagggtggcggtgactgcatccaagccaaacgcagcaactcaaacgacagcctcgtcatgacggagcaacaggtggcgaagctgatggaggaagacatgggttccgtcatgcagtacttgcagggcaagggtctatgcctgatgcctatttcgctcgccagcgcaatctccaaaccacgtgt

SEQ ID NO: 226407 - DNA, 507 bp, Glycine max
  unsure (1)..(507): unsure at all n locations
attacctgcaacagttttggtgcctgaggttgtggtcccaaagtggggagctgtctatatcccttccatcatcactattctaaatgcagttggaactccaaggtcactccatttgatggtcttctggattctctttgagaatgtcatgtctctgcatcgaacaaaggcaacaattattggtctacttgaggccagtcgagtgaacgaatgggttgtcactgaaaaacttggtgatgctctcaaggctaaagcaggaggtaaagcacctaaaaagcctcgattcaggattggagacaggattcacttgttggaacttggtgtcgcattctacctcttcttttgtggctgctatgatgttatgttcgggaaaaaccatttcttcatcttcctctntatccaatcttttgccttcctcatcatggcatttggatatgttggcaccattgttcccaactcctagaagggtttggcacttcattcngctatttcagcttctgtgccttcata

SEQ ID NO: 226408 - DNA, 568 bp, Glycine max
gtctgggatcagatctgctctctccgtttggattcaattcgacactttcctcgcctcaaagattaagcgaacaacatggttgtccttgctgcatccattgtgagcaaatctgggaaagtgctagtttctagacagtttgtggatatgactcgcataagaattgaaggtcttctagcagcatttcccaagttggtagggactggaaaacaacacacatatgttgagactgagaatgtgcgctatgtttaccagccaatagaggcactgtacctgcttctcgtaacaaacaaaaacagcaacatactggaagatttggaaactctgagacttctctctaaacttgtacctgaatattcttactcccttgatgaagagggtgtttgcaaacatgcctttgagttgatttttgcatttgatgaagtcatctctcttgggcacaaggaaaatgtgactgttgcacaagtgaagcaatactgtgagatggagagtcatgaaaagaagctgcacaagttggttttgcagagcacgattaatgaaactaaggatgttatgaagcgaaaagctagtg

SEQ ID NO: 226409 - DNA, 471 bp, Glycine max
gagtaaacagacacacttgagcattaattatgtaaatcatactttgcgccatgtcttgcgaggtaaaacaaagtacaaattcgagaatagaggcaagtacaacttagcaaagcctattgataaaaagaactacgactgtataagcaaaactgttataggaacccaaattcaagagggaaagtcaatcacacaatttggtagctatccgttatcagctgtgttctctgagcaaatttgggaggattaccaccctttaatggtatgatgttggtaaccttcaagtcactaaacgtgtcagttgccataaagcagactgaaatgggaaagaatgttgatgaatctgctagtggaacaacaaactgcattgacccactgcggttggaattatcaatcagaaggacagaccactccaaaatggaattgctagagtcatacctgcattgcccatcaatctgcctaacagatggtgct

SEQ ID NO: 226410 - DNA, 442 bp, Glycine max
gaatgggcttgactgaccgagatattgttgcactatctggaggacatacactggggagagcacatccagagagatcagggtttgatggcccttggacggaggaccctctgaagtttgataactcatactttgtggaacttttgaaagaagattctggtgggctgggtaaaacttcaacagacaaggctttattggaggatgctgaatttcgctgatatgttgagctatatgcaaaggatgaggatgcattttttcgagattatgctgaatcacataagaaactttcagagctaggctttgtgccaagttcagagccgatttctattaaggaagggaccatactggcacaaggtgctgtaagagtcgtagttgctaccgcagtggtgatcctcagttacttgtatgaagttcgcaaaagagggaagtaaactggatttgttca

SEQ ID NO: 226411 - DNA, 598 bp, Glycine max
ggggtccatcccaattcccaacccaaaccgccaccacccttttccttcctcctcacgcctcctctattctttgtcaacccaaccaaaacgaccgtcgttattttcctctttctttcaccaaatgatgatgggttcaaccccgcctcgatcataagaaacaccaaactaacaaagaagcagaagaagccaagaaggcgatggttcatcaaaacgacaacgacaacgacggcagcagcaccgccaccttcctccatctcgcgtagtgatcgacgacgacgacgacgacgacgatcggcgattgaattcttcttccgcggggatgatgtcgaacctgtacggcgaatacaaccacaagatcgactacgtgttcaaggtggtgctggtcggagactccgccgtggggaagacccagctcctcgcgcgcttcgccaagaaccaattcaacgtcgattctaaagccaccattggcgtcgagtttcagaccaaaacgctcatcatcgacaagaagaccgtctaggcccaaatatgggacaccgctcgccaagaaaggtacagggcagttactagtgcatattatcgtgggtgctgtggagcaatg

SEQ ID NO: 226412 - DNA, 602 bp, Glycine max
  unsure (1)..(602): unsure at all n locations
cggctcgagatatttttctcactgtcttgtctctccagagaactgtatagagagagatggcagctgcaacatctggtgctgtgttaaatgggttgggatcttccttcttgagtggaggaaacaggagccaaacccttctggccactgctattggaggcaaagttggtgctgctgctgttactgttagtcctagaagactcattgtggtagctgctgctgcaccaaagaagtcatggctccctggtgtcagaggtggtggcaacctcgtcgacccagaatggcttgatggatcgctaccaggtgactatggctttgacccactaggccttgggaaggacccagcattcctcaaatggtacagagaagctgagctgattcatgggagatgggcaatggctgcagttctaggaatctttgtgggccaggcatggagtggagttccatggtttgaagctggagctgacccaaatgcaattgctcctttctcctttggtactcttctgggaacccagttgattctcatggngtgggttgaaagcaagaaatgggtggacttcttcaacccagactcacagtcagtggaatgggccactccatggtca

SEQ ID NO: 226413 - DNA, 540 bp, Glycine max
aaagtgaatgcatccaataatagagcatagaatttgaatttgtcatgaagtaacacaaacgggacaaaggttgatttgcaactgtctagcctctcaattcaattatctacatgaaatgtttagtttacaagccgtgagcaccaaggggggtcttcccttgaccagcctcaaagtagaaaatcagcatggccaacatagcaatcctggcatgctttatctcagccaatttcaatctttcgagcttctcggtatccggaatgtaaactccatccttgatagtgccggccaagctcaaagggtcaaagaatttgcctcctgggtagccttgctcaccagtggcattggcaaagttctcagatgttcttgaccatggagtggcccattccactgactgtgagtctgggttgaagaagttcacccatctcttgctttcaacccaccccatgagaatcaactgggttcccagaagagtaccaaaggagaaaggagcaattgcatttgggtcagcttcagcttcaaaccatggaacttcactccatg

SEQ ID NO: 226414 - DNA, 437 bp, Glycine max
cgctattctaccttattttatttccctagtcaaggagatccatctctgcagcaggttgatacagaaaagaaaaaatgctgaagattggctgcgttgcggctggatatgtggcgggtccaacaatgagcatcgttggactggaacgcctcctagtctgagtggctgctgctcacattgctcatgccacgactgcaggacggaacagtgaccagttacctatctatgagccaggacttgatgatgtggtgaagcaatgtcgtgtctcgaacctttctttaagcactgagggggagacacatgtctatgaggccgacatagtggtagcaatcgctaacaccacgacaataactcgtggtgttggagccgggaaggctgcatgatggacttactgggagagtgcatgacgcaagattgctgacgtgtccaagagtgacaag

SEQ ID NO: 226415 - DNA, 584 bp, Glycine max
aacaccatactaatcaaataaaataaaaaaatccttataaactcaaaacattcaaatagtagtgatgacttgcagtacaaggaaacccaaaacatatgacctcctactttcccaaaatttatactcatttatgccaactattatgggaaagtgaaaaatggcaaccaagaaaattgttccaaaaaacaattgccagtagtaataaaattgaaccaaactgaataatgcctcaaaatccttgagatgaaatgtctctcttatgccacagctggcatgtccttgagccatggatccaatggcttgccaattgagtacacaatgaaaccaatctcacgtagcttctccacattcacaatgttccttccatcaaaaacaaatgctggttttctcatgttgtcatacaccttctgataatcaagactcttgaactcatcccactcagttagaatgcaaacaccatctgcatcctttgttgcctcataagcatcccaaaccacactaactttcttctcaggtgtaggactagttggctgcaagtgaatagggtggtccccatcaaactggttcatccataaatccctctg

SEQ ID NO: 226416 - DNA, 451 bp, Glycine max
aaaaatgattttggaaaggaagaacgtgaacttaaatgggcacatgcacagaggacgcttcacggccttcacccaccagagactaagatgttcaatgaacgtacaagttacacagaacttaatcagatggctgaagaggctagaagacgagcagaaattgcaaggctgagagaactgcatacacttaagggtcgtgttgagtctgtggttagactgaagggtcttaacattgacacaatacagcaagcatacactgtctagaatgttgagtttcatgcatgaatcgtgtatgtataatgtgtgtataatgccgttagaagagtgtgatcatagagcagcaaaaaatatatactttaaatgtttgttaaagcagttttggtggacttttttagacatgaaattattggtgcattaatacttaaatgttaaaaagagttccatttatgctttc

SEQ ID NO: 226417 - DNA, 451 bp, Glycine max
gaaagcataaatggaactctttttaacatttaagtattaatgcaccaataatttcatgtctaaaaaagtccaccaaaactgctttaacaaacatttaaagtatatattttttgctgctctatgatcacactcttctaacggcattatacacacattatacatacacgattcatgcatgaaactcaacattctagacagtgtatgcttgctgtattgtgtcaatgttaagacccttcagtctaaccacagactcaacacgacccttaagtgtatgcagttctctcagccttgcaatttctgctcgtcttctagcctcttcagccatctgattaagttctgtgtaacttgtacgttcattgaacatcttagtctctggtgggtgaaggccgtgaagcgtcctctgtgcatgtgcccatttaagttcacgttcttcctttccaaaatcattttt

SEQ ID NO: 226418 - DNA, 579 bp, Glycine max
  unsure (1)..(579): unsure at all n locations
ctctgctcgtgcctctagggttatcatatctccatttccatttcctctctctcagtttccaagaatcttaagctatgggaaagtcttacccaaccgtgagcgctgattaccagaaggccgttgagaaggcgaagaagaagctcagaggcttcatcgctgagaagagatgcgctcctctaatgctccgtttggcatggcactctgctggaacttacgacgtgagctcgaagaccggtggtcccttcggaaccataaagcacccctccgaactcgctcacggcgctaacaacgctcttgacatcgctgttaggcttttggagccactcaaagcggagtttcctattttgagctacgccgatttctaccagttggctggcgttgttgccgttgaggtcaccggtggacctgaagttcccttccatcctggaagagaggacaaacctgagccaccaccagagggtcgcttgcccgatgccactaagggttctgaccatttgagagatgtgtttggcaaagctatggggcttagtgaccgagatatcgttgctctgtctggnggtcacactattggagctgcgc

SEQ ID NO: 226419 - DNA, 525 bp, Glycine max
aatatcgcaatcgctgaacaatgttatttaacaaaaggatcgaccacaaataaaaacaacccaactccaatcatcatcaccacgtccagcaaaatacattcaaaagctatctaaaaatttgaggaacccacagtggcgcattagaaaccatgaccatagaatttatgagagaaatattatgggcaccgtgcctctccaacaatccccaaaacgttgcttaggcttcagcaaacccaagctcagaaagcttttggtgagcctcagcgtaatcagcgaagaaggcatcttcgtccgatgcatatttctcaacaagagggcggaacacagggtcagacaaaagtgccttgtcagaaggtagctgaaggaggccttctttctcaccactcaacaactccttgaagtatgagttgtcgaaaataagaggattagaggtccagggaccctcgaatccagaacgctccttgtgcgcagctccaatagtgtgacccccagacagagcaacgatatctcggtcactaagcccca

SEQ ID NO: 226420 - DNA, 561 bp, Glycine max
aatacacaaatactaaactttcttacattatatatgaaatcattccatcaatacataatactataatcttggaccgaaaataccaggatacattaaaaattaaaaaccaagaccaaaaggaataataatattagaaattaaaataatagctggaatctcaatttcacatccatatattgtggctggatctaacatccaaccattttcccacatattctatcatttgtttcccttcatttcttttccaaattatcatgcacacacacacatatatatatatatatatatatatatatatatatatcaatcatggcttagaactgcaaatagtatccaagaaaggagaggagggaggcaccaaggaatggaccaagagcagcaacgccgcctttgggtgccagagctggggcggggacgattgcaggagcttcggccttgtcgtgaccggcgtgagccattgcagtgctaatagaggtcacgacgaggaggacgacacatgccaccctcttcttctacataattaaacttttgcagtgtaaagaaagggaattttagtgaaat

SEQ ID NO: 226421 - DNA, 439 bp, Glycine max
cagctgtttatgtttatttgtactcaatatactacttctatgtgaagacgaagatgtcaggcttcttccagaccagcttttattttggatacactttgatgttttctcttggactaggaattctatgtggagctgtgggtttttttgggttcaaatttgttcgtgaggaggatctacagaaatatcaagtgcgattaaggttttgagtcagacctgagcacttccataggtttgttgctgaagacaataaatttttggaggaagcctctggtcatgtgtggggaaacctaacaatgtttacaggtgaatccacagggttttgagaatgaggatgtattatttttctatattggggaagccctgagattttttttccccggctgtaattgattgtctttataattttagataaggagtacaatattcaactcttgtgatt

SEQ ID NO: 226422 - DNA, 616 bp, Glycine max
cgaagcaccaacaacagaaacagtagaaacaacaactacagaagaagccaagccagaggagcctaaagaagttgcagttgagaccgaggaggtggtgacaaaggagacagaggaagagaagccagcagcagaagagaaatcagaggagaaaactgaagaagtgaaagaagaagcataagagcctaaagaaactactgaaacagaaacagaatcagcaccagcagcaaccacagaggaagagaacaaaccagctgagacagtggaagccccagtagaggttcctgttgagaaaactgaagcttagacttatggacagtgtgagtgagaaaaacaagtttaaaaatggtcctagttgtggggatcattaggtctaccattttgcatgtcatgttgaaaagctttttttttatttatttctttagtttactttattattaatatattattattatatgatggctaagtctttggttgtattatggagggtatacctacgtgtgagcacaacacttggctccacatcagcgtgcttaccacgtggtgacatgagaaattctaggagttgtgtattgagtgagcaagctgctgctggtgctggagcttacggatgagggtt

SEQ ID NO: 226423 - DNA, 376 bp, Glycine max
aagcaagttataaagtaaatatcatttattcaaacctaaagaaacacaataacacatgatgacaaactcatgtaaccctgccaataaaataaaccctgatccctaaactccagcaccagcaggagcttgctcacttcaatacacaactcctagaatttgtcatgtcaccacgggggaagcacgctgatggggagccaagtggtgggctcacacgtggggataccctccataatacaaccaaagacttaaccctcatataataataatatattaataataaagtgaactaaagaaataaattaaaaaaaagcttttcaacatgacatgcaaaatgggagacctaatgatccccacaactaggaccatttttaaactt

SEQ ID NO: 226424 - DNA, 628 bp, Glycine max
ctttggattgggacaccagaatgaagattgcgcttgatgctgcaaggggactttcatacctgcatgaagactcacagccctgtgtaatacatagagacttcaaggcatccaacatattgcttgagaacaattttcatgctaaggttgcagattttggtcttgctaagcaagcacctgaaggcagatctaattatttgtctactcgtgtcatggggacatttgggtacgttgctcctgaatatgccatgactggacacctacttgttaaaagtgacgtttatagctatggtgttgtcttgctggaactgcttactggcaggaagcctgtggatatgtcacagccaactggacaagagaatcttgttacttgggctaggccaatccttagagataaggaccggttggaagagattgctgatccaagacttggtggaaagtatccaaaggaagattttgtacgtgtttgcactattgctgcagcctgtgttgctctagaagcaaaccaacgacccacaatgggtgaagtggtacagtcacttaaaatggtgcagcgcgtcacagaataccaagattctgtgttagcctcatccaatgcacgacccaacctacgacagtcctctagcacttt

SEQ ID NO: 226425 - DNA, 559 bp, Glycine max
  unsure (1)..(559): unsure at all n locations
acaagcaattacccaactcatctttttaaataactaatctgctaacgaattttgttctatttatacaagcaattattacaatcatattacccttccactcaccaacaaaatgcttaaatctatttggaaaaattatgtgccttatgcttcatgaggttaaaaaaacattttggttgaaagcttgcaaagtgctcacaaaaatgggaaagaaagaaaacattatgaatggctaagttttctcagttttcatcgtccttcacaaagatcttcagagaaaaccacagtcctagaaatgttgtcattgtcaaaggcacttagaccagagtaaggacctgaagagaacattgaagatgttccatcaaattcaaaagtgctagaggactgtcgtaggttgggtcgtgcattggatgaggctaacacagaatcttggtattctgtgacgcgctgcaccattttaagtgactgtaccacttnacccattgtgggtcgttggtttgcttctagagcaacacaggctgcagcaatagtgcatacacgtacaaaatctttcttggatact

SEQ ID NO: 226426 - DNA, 648 bp, Glycine max
  unsure (1)..(648): unsure at all n locations
cccaaacaaaaacaacacatcacggagccaccaaccatggcttccaagctctgcgactcatgcaaatccgccactgctaccttgtactgccgccctgacgccgcgttcctctgcggcgcctgcgattctaaggtccacgccgccaacaagctcgcgtcgcgccacccgcgcgtggcgctctgcgaggtgtgcgagcaggccccggcgcacgtaacctgcaaggctgatgccgccgcgctctgccttgcctgcgaccgcgacatccactccgccaaccccctcgccagccgccacgagcgcatccccgtctcaccgttcttcgagtccgtacactccgtcaaggcctcctcgccgatcaacttcctagatgaccaccgcttcttctccgacgccgatgctgacgtcagcaccgaggaggccgaggccgcctcctggctgcttcctaatccgaagacagatctaaattcctctcagtacttgttctccgaaaccgagccggttccttacatagatctggattatgctgccgtggatcctaaggcggagcagaaaagctccgccaccgccgacggcgtcgtcccgtgcagagcaacttcgagccattcgcctacggntacaagtacaataccactctctcacagtctcaga

SEQ ID NO: 226427 - DNA, 642 bp, Glycine max
ctctgctcgtgcctctagggttatcatatctccatttccatttcctctctctcagtttccaagaatcttaagctatgggaaagtcttacccaaccgtgagcgctgattaccagaaggccgttgagaaggcgaagaagaagctcagaggcttcatcgctgagaagagatgcgctcctctaatgctccgtttggcatggcactctgctggaacttacgacgtgagctcgaagaccggtggtcccttcggaaccataaagcacccctccgaactcgctcacggcgctaacaacgctcttgacatcgctgttaggcttttggagccactcaaagcggagtttcctattttgagctacgccgatttctaccagttggctggcgttgttgccgttgaggtcaccggtggacctgaagttcccttccatcctggaagagaggacaaacctgagccaccaccagagggtcgcttgcccgatgccactaagggttctgaccatttgagagatgtgtttggcaaagctatggggcttagtgaccgagatatcgttgctctgtctgggggtcacactattggagctgcgcacaaagagcgttctggattcagggtccctggacctctaatcctcttatttcgacactcatact

SEQ ID NO: 226428 - DNA, 583 bp, Glycine max
aatatcgcaatcgctgaacaatgttatttaacaaaaggatcgaccacaaataaaaacaacccaactccaatcatgatcaccacgtccagcaaaatacattcaaaagctatctaaaaatgtgaggaacccacagtggcgcattagaaaccatgaccatagaatttatgagagaaatattatgggcaccgtgcctctccaacaatccccaaaacgttgcttaggcttcagcaaacccaagctcagaaagcttttggtgagcctcagcgtaatcagcgaagaaggcatcttcgtccgatgcatatttctcaacaagagggcggatcacagggtcagacaaaagtgccttgtcagaaggtagctgaaggaggccttctttctcaccactcaacaactccttgaagtatgagttgtcgaaaataagaggattagaggtccagggaccctcgaatccagaacgctccttgtgcgcagctccaatagtgtgacccccagacagagcaacgatatctcggtcactaagccccatagctttgccatacacatctctcaaatggtcagaacccttagtggcatcgggcaagcg

SEQ ID NO: 226429 - DNA, 641 bp, Glycine max
agatataactcaaatgagaaggcagttgtcctttacagtgttggggttcacacaatctccgaactaagagcaatgcaggagaggatggaatcttctcagctcaaaacttacaatctcacagaaagtgacttggtgaaagaccacttgcgttacttgatgggaggccgatcaaacgttcagaatgaggttctttgtcgtctcacctttccagaaagacctggtgctttgatgaaatttttggactccttcagtccacgttggaatattagtttattccattaccgaggggagggtgaaactggagcaaacgtgctagttggattacaggtacccaaaagtgagatagatgagttccatgatcgtgctaacaaacttggatatgattataaagtggtgaataatgatgatgacttccagcttctaatgcactgatgggggttttaggcacttgtcattattgtgtattttagtggacaagattatcatatttaatatttccactgtcgcttcaaaaggttagatgtcattagttgattagaggaacaactagtgctttttacctagtgaggtgtcttatcacatttgtataatcggtagtttatgttttttttttttttttggaagcattggaatcttatatg

SEQ ID NO: 226430 - DNA, 560 bp, Glycine max
aatacacaaatactaaactttcttacattatatatgaaatcattccatcaatacataatactataatcttggaccgaaaataccaggatacattaaaaattaaaaaccaagaccaaaaggaataataatattagaaattaaaataatagctggaatctcaatttcacatccatatattgtggctggatctaacatccaaccattttcccacatattctatcatttgtttcccttcatttcttttccaaattatcatgcacacacacacatatatatatatatatatatatatatatatatatatcaatcatggcttagaactgcaaatagtatccaagaaaggagaggagggaggcaccaaggaatggaccaagagcagcaacgccgcctttgggtgccagagctggggcggggacgattgcaggagcttcggccttgtcgtgaccggcgtgagccattgcagtgctaatagaggtcacgacgaggaggacgacacatgcaaccttcttcttctccataattaaacttttgcagtgtaaagacagggaattttagtgaaa

SEQ ID NO: 226431 - DNA, 597 bp, Glycine max
  unsure (1)..(597): unsure at all n locations
tggatccagacgcgttggcaaaggcattcgtggagcactactacagcaccttcgacaccaacaggaacggcttagcgaatctctaccaggagggttccatgctcactttcgaagggcagaagatccaaggcgcttccaacatcgttgccaagctcacctccctcccttttcagcagtgccaccactcaatctccaccgtcgactgccagccctccggcgtcaacgccggcatgctcgtcttcgtcagcggaaaccttcagctcgccggcgaacagcacactctcaagttcagccagatgttccatttgataccaacacctcagggaagctattatgtgttgaatgacatattccgtttaaactatgcatgaagatgtcatatgaccggaaaggccatagaagaagtttgcctatagcaagctgtttcagattgcacatttgaaattgaaattgggttctttttggttggttgtgttgaacgcttaattgtgcctgttgtgtttagaattttctgttgtgactggttaaaaaccctccttcaaggataaattgttgaaagattactggatattggagattnggaaactgattaatata

SEQ ID NO: 226432 - DNA, 490 bp, Glycine max
cgcggatcacaaatatattaaattcaagttttcaatctccaatatccagtaatctttcaacaatttatccttgaaggagggtttttaaccagtcacaacagaaaattctaaacacaacaggcacaattaagcgttcaacacaaccaaccaaaaagaacccaatttcaatttcaaatgtgcaatctgaaacagcttgctataggcaaacttcttctatggcctttccggtcatatgacatcttcatgcatagtttaaacggaatatgtcattcaacacataatagcttccctgaggtgttggtatcaaatggaacatctggctgaacttgaaagtgtgctgttcgccggcgagctgaaggtttccgctgacgaagacgagcatgccggcgttgacgccggagggctggcagtctacggtggagattgagtggtggcactgctgaaaagggagggaggtgagcttggcaacgatgttggaagcgccttggat

SEQ ID NO: 226433 - DNA, 592 bp, Glycine max
agaatggcagcacttggtgggaatcgtgatgtgacaggaagccagaacagcgttgagatcgatgctctagctcgctttgctgttgaagaacacaacaaaaaacagaatgcccttttggagtttgaaaaggtggtaactgcgaaacagcaagtggtttctggtaccttgtacaccatcactttggaggcaaaagatggtgggcaaaagaaggtttatgaagccaaagtttgggagaagtcatggttgaacttcaaggaggtgcaagagttcaagcttgttggagatgcacctgcatagtctagtgcttaattaggttgctgaagagtgaagaatgagacagcctggttcgaaggggaaaagcctaaggatatatcaaaggatcctatatgtataaaataaatgttgcttttttaccttcggtattgatatctgaagtctaatttgacatcctatatatgaatatatgatctatgtgtttctttctctccctacctctctctcttttaaagattcaaatttggttttactttttagccattgaagtgtattaacatcaatacttaaatctatatctatatctacattataatct

SEQ ID NO: 226434 - DNA, 522 bp, Glycine max
agattataatgtagatatagatatagatttaagtattgatgttaatacacttacaatggctaaaaagtaaaaccaaatttgaatctttaaaagagagagaggtagggagagaaagaaacacatagatcatatattcatatataggatgtcaaattagacttcagatatcaataccgaaggtaaaaaagcaacatttattttatacatataggatcctttgatatatccttaggcttttccccttcgaaccaggctgtctcattcttcactcttcagcaacctaattaagcactagactatgcaggtgcatcttcaacaagcttgaactcttgcacctccttgaagttcaaccatgacttctcccaaactttggcttcataaaccttcttttgcccaccatcttttgcctccaaagtgatggtgtacaaggtaccagataccacttgctgtttcgcagttaccaccttttcaaacttcaaaagggcattctgtatttggtgagttcttaacagcaaagcgagc

SEQ ID NO: 226435 - DNA, 591 bp, Glycine max
  unsure (1)..(591): unsure at all n locations
gccaccgtaccgtgttgcctctctgcaatctacagccaaaatgcctttcaagaggtacgttgagatcgggagggttgcccaaatcaactacggcaaggaatatggcaggctcgtcgtcattgtcgacgtcattgatcagaacagagctcttgtcgatgcccctgatatggtgaggtcccaagtcaatttcaaaaggctttccctaaccgatattaagattgacattaagagggtccctaagaagaaagatcttgtcaaagccatggaggatgctgatgttaagaccaagtgggagaagagttcatggggcaggaaactcattgtcaggaagagaagggcatccctcaatgattttgataggttcaagataatgttggccaagatcaagagggcagcggttgtaaggcaagagcttgctaagctgagaaagagcgcttaagcataacttcacattatagtcttcaaatttttgttatgaatttgcttaccttggttgttgtgagatttcatgtatcattgaaccgcttgatttaatgttagtactccaagtttccaatactctgcattngcttgcatattntataatattat

SEQ ID NO: 226436 - DNA, 580 bp, Glycine max
cttggttccttacccaaggatccatttcatgctttcctcgtatgcccctgttatctctgccgagaaagcataccatgagcagctttccgttgctgagatcaccaacagtgccttcgagccatcctccatgatggcaaagtgtgaccctcgccacggcaagtacatggcgtgttgtttgatgtaccggggcgatgtcgtgcccaaggatgtgaatgctgctgtggccaccatcaagaccaagagaaccatccagtttgtggattggtgccccactgggttcaagtgtggtataaactatcagcctcctactgttgttcctggaggtgaccttgccaaggtgcagagggctgtgtgcatgatttcgaactccactagtgtggctgaagtgttctccaggattgatcataagtttgacctcatgtatgcgaagagggccttcgtgcactggtatgtgggtgaaggtatggaagagggtgagttctcagaggctcgtgaggaccttgctgctcttgagaaggattatgaggaggttggtgccgagtctggtgatggagatgatgatgggtgaagagatgatgat

SEQ ID NO: 226437 - DNA, 593 bp, Glycine max
caatgtagtatagttttgtgttccttttgataattcatgttcgaagtttagtttacaacattataaattaaacataacgatagaagaccctccaaatggcatttctttctaccgtctgtcttcagaattgagaacccaaataaaatgagttttgccactaattcttcacaaagatggcacgagcagacccccattttctcaaacattagcaacaattaattaaacgatgcatcaccaaaacaccgaagagacaagaccgaaaatattggtaatagaagggaacagatatatagaaacttctgtgctatacatagcacatatatttgataacaatcatcattcaaaaaccacacatgtccgacagaagacgaaaaagtagacatcaaacacacgatatttcagacactctaataatcatcatctccttcaccatcatcatctccatcaccagactcggcaccaacctcctcataatccttctcaagagcagcaaggtcctcacgagcctctgagaactcaccctcttgcataccttcacccacataccagtgcacgaaggccctcttcgcatacatgacgggtcaactatgatc

SEQ ID NO: 226438 - DNA, 614 bp, Glycine max
  unsure (1)..(614): unsure at all n locations
catttaaagaaaccttggactccccagccagaagaagaaccaacatggcacccacaatctataatttttcgtattctaaaaggttttcagagtcattcaattcttcaacatcaaaaaaggagtcatccagttccaacatccttgctttccactccatagctcaatggaatgctcattataaagccaccaaagaaactaacaagctgatggtacttgatttcacagccacatggtgtggaccttgcaaactcatggaccctgttatcctagagtttgctggaaattacacagatgttgagttcatcaagattgatgtggaggagttaacggaagtgtctcaagcactccaggtccaccaattgccaacattcgtactcgttcagaaaggcaaagttgctgatagagtggtgggggtgaagaaggaggagctgaaaaggtcgattgagaagcacataaaataaataaatatgattatgcactgtaataaaatcaaaatgctcaacaaccaattcaagaaaaaaaaaaaactaccaacaactgaggttgcaataaagtggtgtcctcatcattntcacccaatgagaagatatatgtgtcattcttttaccatacac

SEQ ID NO: 226439 - DNA, 626 bp, Glycine max
  unsure (1)..(626): unsure at all n locations
gggaaaagtgggtgctcttattgcttccattccacagggcttggctgcttctgtactgtgtttcatttgggctcttatagcagctttgggcctttcaaacttacagtatggtcaatgtaccagcttcaggaacatgacaatagttggtgtttcgttgttccttggtctatcaatccctgcctattttcaacaatacaagcctcaaaccagtctgatactgcctgcttacctggtaccttatggggctgcatctagtggaccattccattctggcaataaacaacttgattttgcaatcaatgctcttatgtccttaaacatggtgattacacttttggtggcattcatactggacaacactgtcccgggaagtaaacaagaacaggggtgtatatatggtcacgagctgaagatattgcaactgatccttctctgcaatccgcatattctttgccaaagaaaattgctaggtgtttccgttgggcgaaatgtttgggagtctgaatattaggctatgtctgatttcttctattcatggactcatgataacattcacttctgatccctagagcttagaagatatntgagctcatgaagaataaaaacaaatatacttggattagtca

SEQ ID NO: 226440 - DNA, 471 bp, Glycine max
ggagattgcatcaaacaaagcactttctttagccgatagcagagttatgtgcatagtagacaatgccaaatgcgtaatgaagattgtaaaagaatgtggatcattcagtagttacatatggggttatgtgaatcataagccaataataagcagatacagatacccaagaaatgtgccattgaggagtccaaaggcagaggcacttagcaaggacttggtgaagcgtggatttcggttcgtgggtccagtgatagtacactcttttatgcaagctgcagggttgaccattgaccatcttgtggattgttataggcatagtgaatgtgtgagcctagcagaaagaccttggaggcatatctaacatacactctttcactggcagaattttcagttggggtttataagcacaccctctcacaaagttttttagagaaattattattacatgaatgaagatcatcatggtttcaa

SEQ ID NO: 226441 - DNA, 589 bp, Glycine max
  unsure (1)..(589): unsure at all n locations
tgaaagttgaccacatgaaaaatgctgtgatttttagtaaaaagagtctcgagtctgatggcttaagggatcacttgggcaattttgctgaacaattaaataaggcaagacaaatgatttatcctcctgatgggagaccatcaaaacttggagctntacttccaactttgacagaggttgtggccaaagaacacaagaggcttcttgctcgaaaatcaattattgagaagaggaaggaagaacaagaacgacagcttcttgaaatggaacgggaggaggagtcgaagaggctaagacttcagaaaataaccgaagaagcggaacaaagaaggcttgccactgagtatgaacagagaaagaatcagaggatccttagggagatagaggagagagaaaatgaagaagcacaagctttactccaggaagctgaaaagcgtattaaaaagaagggaaagaaaccaatcatagagggggacaaaataaccaagcagaccttgatggaattgactttgaccgagcaactccgggaaagacaggaaatggaaaagaaactccagaagttagcaaaaaccatggattatttggaaag

SEQ ID NO: 226442 - DNA, 581 bp, Glycine max
cagcatcttcacgtttccgagcttcctccgcctcacgcaatttttgttgtctctcttcttctaacttgagataatacttcaacttcctcattttttccctctcctgtctcctggactgtaaaatcctagagattcgctcttcacgttctcttctcaatctgttaaactctgcttggcggtgactaaccacccttgcttgatatacttccttattgcccatcattcgaacaagcctctccttctccttgagatctccctcatgcctctgtttgctcagttcaacctcttgctgctgctcacgctcatgaagaagtctctcttccactagacgctgttgatacgcagcttcaatcaggggagcagcctcttctcttttggctctttccaaataatccatggtttttgctaacttctggagtttcttttccatttcctgtctttcccggagttgctcggtcaaagtcaattccatcaaggtctgcttggttattttgtccccctctatgattggcttctttcccttctttttaatacgcttttcagcttcctggagtaaagcttgtgcttcttcattttctctc

SEQ ID NO: 226443 - DNA, 483 bp, Glycine max
caaccctaacgcgtgcagagcagagagagacgcagccatggggcgaagacccgcgaggtgttataggcaaattaagaacaaaccataccccaagtcacggttttgccgtggtgttcctgatcccaagatcaggatttacgatgttggtatgaagaagaagggtgttgatgagtttcctttctgtgtccatctggttagttgggagaaggaaaacgtttctagtgaggccctggaagctgctcgtattgcttgcaacaagtacatggccaaatttgctggaaaggatgctttccacttgagagtcagggtgcacccattccatgttcttaggatcaacaagatgctttcgtgtgctggagctgataggctccaaactggaatgagaggtgcttttggaaagccacagggtacttgtgctagagtggctattggacaggtccttctttctgtccgctgcaggacagcaacagccatcatgcccag

SEQ ID NO: 226444 - DNA, 554 bp, Glycine max
agcttcactgcacaggatttatgtgatcgcaacatgggagtttgtttgagcgcccaaattaaagctgaaagcccatataacactgggttcaattcaaagtatgtgagtacggatggaaatgatttcggcagcacaaacgataaggtttcagcaaactcaattcctcaaactcctcggagtgagggtgagatcttgcggtcatccaatttgaagagctttcccttgtcagaacttaagacggccactagaaatttccgtccagatagcgtgttaggagaaggtggttttggatcagtttttaaggggtggatcgatgagaattcattgactgctaccaaacctggcactggcattgttattgctgttaaaagacttaatcaagatggcatccagggtcacagggcagtggttggctgaagtcaactatcttggacagctttctcatcctcatctagtgagattgattgggttttgccttgaagatgaacatcgccttctcgtctacgaatttatgccacgtggaagcttggaaaaccatttgttcaggagaggct

SEQ ID NO: 226445 - DNA, 572 bp, Glycine max
  unsure (1)..(572): unsure at all n locations
caccgtaagcgtttctgcatacgagatgttctagtaccttcttcgttcacctcttctcttcaccgtcgcaacacaacgctgagctgcagcaattcaccaccgcagagttttccaagtccaatctcacttcacttatcgccagggtttaatctgaatatctttcgcgttgccactgaggttgttatctttcttccaaaatggcgacggtgatgcagaagatcaaagatatcgaagatgagatggcaaagacccaaaaaaacaaggctactgctcatcatctgggcttgctgaaggctaaattagcaaagttgcggagggaactccttacaccttcatcaaaaggagctggaggtgctggtgaaggttttgatgttactaaaagtggggattcaagagttggtcttgtgggcttcccttcagttggcaaatctactctactaaataagttgaccgggacattttctgaggttgcttcctatgagtttactaccttaacttgcatcccaggtgtgatcacatatcgtggagctaanatccagttggtggatctccctggaattatcgggggtgct

SEQ ID NO: 226446 - DNA, 564 bp, Glycine max
  unsure (1)..(564): unsure at all n locations
ctcgagccgtaattctagatcgcgagtggccgcccttttttatgcccttgttatctttgtcgagaaagcataccatgagcagttttttctgttgttggatcaccaacatgtgccttcgagccatcctccatgatggcaaagtgagaccctcgccacggcaagtacatggcgtgttgtttgatgtaccggggcgatgtcgtgcccaaggatgtgaatgctgctgcggccaccatcaagaccaagagaaccatccagtttgtggattggtgccccactgggttcaagtgtggtataaactatcagcctcctactgttgatcctggaggtgaccttgccaaggtgcatagggctgcgtgcatgatttcgaactccactagtgtggctgaagtgttctccaggattgatcataagtttgacctcatgtatgcgaagagggccttcgtgcactggtatgtgggtgaaggtatggaagagggtgagttctcagaggctcgtgaggaccttgctgctcttgagaaagattatgaggaggtcggtgccnagtctggtgatggagatgatgat

SEQ ID NO: 226447 - DNA, 540 bp, Glycine max
atatggagggtcaaatataggaccagaactttataacattcactaagtctattcaatcatgagctagactttctttataacattccgttatcttgccactaactaggtaactcgcaattcagatagaatgactattagtgggcccaaaaaaaaagagatatgccactaatacttaacaaagatggcacgagcagaccacccattttctaaaacaattagcaacaattaattaaacgatgcatcaccaaaacaccgaagagacaagaccgaaaatattggtaatagaagggaacagatatatagaaacttctgtgctatacatagcacatatatttgataacaatcatcattcaaaaaccacacatgtccgacagaagacgaaaaagtagacatcaaacacacgatatttcagacactctaataatcatcatctccttgaccatcatcatcttcatcaccagactcggcaccaacctcctcattatccttctcaagagcagcaaggtgctcacgagcctctgagacctaccctcttcatac

SEQ ID NO: 226448 - DNA, 595 bp, Glycine max
  unsure (1)..(595): unsure at all n locations
gcttattttaagtatctatctgagtcaatcagtacagggagtccaacttgtcttgcaaagatcttgggcatttatcaggtaacatcaaagcacctcaaaggagggaaggaaacaaagatggatgttttggttatggaaaaccttctttacaggcgtaacattagacgactttatgacctcaaaggttcttcccgatcacggtacaatccagatacaagtgggagcaataaagtgctgctggatcagaatctcattgaagctatgccaacctctccaatatttgttgggaacaaggcaaagcggttgcttgagagggccgtgtggaatgacactgccttccttgcatcaatatatgtgatggactactcattgctggttggagtggatgaggaaaagcatgagctggttttaggtatcattgattttatgaggcagtatacatgggacaaacaccttgaaacttgggtgaagacctcaggcatccttggtggacccaagaacacttctccaactgttatatcaccacagcagtacaagaaacggtttangaaagccatgagcttgtattttcttatggtgccagatcaatggtccc

SEQ ID NO: 226449 - DNA, 515 bp, Glycine max
ggttgtgaactttagatcaaaattacgacagatcaagagatttaatacaagatataatatatatatatatatatatatatatatatatatatatatatatatatataaagaggggaatcactgtacacttagttaccctttcaacaatctgtggtaacacaaatcaacagcagctgcattatgcagcagacaaatataatggacataaggaaggaaggagagacccgtgccaatggaatggtactgacatttacaagattcaaactttgaccacatcaatgaaatgggtcccatgcctcacgcattttcgtcgcaaatgtcagattgggacccactggggtgtaactctggaggggaccattgatctggcaccataagaaaatacaagctcatggctttcctaaaccgtttcttgtactgctgtggtgatataacagttggagaagtgttcttgggtccaccaaggatgcctgaggtcttcacccaagtttcaaggtgtttgtcccatgtatact

SEQ ID NO: 226450 - DNA, 658 bp, Glycine max
  unsure (1)..(658): unsure at all n locations
gtttcctttcaggttgctgacgctctacagcaaccattctctgacggccagtttgatctggtgtggtccatggagagtggagagcatatgcctgacaaagctaagtttgttggagagttagctcgggtagcagcaccaggtgccactataataatagtaacatggtgccacagggatcttggccctgacgaacaatccttacatccatgggagcaagatctcttaaagaagatttgcgatgcatattacctccctgcctggtgctcaacttctgattatgttaagttgctccaatccctgtcacttcaggacatcaagtcagaagattggtctcgctttgttgctccattttggccagcagtgatacgctcagccttcacatggaagggtctaacttcactcttgagcagtggacaaaaaacgataaaaggagctttggctatgccattgatgatagagggatacaagaaagatctaattaagtttgccatcattacatgtcgaaaacctgaataaatggagaggcaggattacttttatagaatgaagcaagtttccaacaggtcgtttatttcgatagttgagaaacangagaaaaaataaatgaaagggttggtcgatttttatttagtttctacatatgcaatatctnctatga

SEQ ID NO: 226451 - DNA, 593 bp, Glycine max
  unsure (1)..(593): unsure at all n locations
ggcgttaactaacatttctctttatcacctttacgatgttttcacaagtcacaaatattagttttctatctctatatatacaatacttcttttttaattacttaattataaatactcgtgccacttatttaagtagataatatattttcgccaatcataggagatattgcatatgtagaaaactaaaataaaaatcgaacaacccctttcatttattttttctcttgtttctcaactatcgaaataaacgacctgttggaaacttgcttcattctataaaagtaatcctgcctctccatttattcaggttttcgacatgtaatgatggcaaacttaattagatctttcttgtatccctctatcatcaatggcatagccaaagctccttttatcgttttttgtccactgctcaagagtgaagttagacccttccatgtgaaggctgagcgtatcactgctggccaaaatggagcaacaaagcgagaccaatcttctgacttgatgtcctgaagtgacagggattggagcaanctaacataatcagaagttgagcaccaggcagggaggtaatatgcatcgcatatcttctttag

SEQ ID NO: 226452 - DNA, 614 bp, Glycine max
  unsure (1)..(614): unsure at all n locations
aactgaaccaaatcatcacacacacatactaagaagcaacaattcttctacaatggatctcctccttctggaaaagaccctcataggtctcttcctcgctgcggtggtcgccatcgccgtctccaccctccgcggccggaaattcaagctcccaccgggcccactccccgtcccaatcttcggcaactggctccaagtcggcgacgacctcaaccaccgcaacctcaccgatttggccaaaaaattcggtgacatcttcctcctccgcatggggcagcgcaacctcgtcgtggtttcttcccctgagctcgccaaagaggttctccacacgcagggcgtggagttcggctcccgcacccgcaacgtcgtcttcgacatcttcaccggaaagggccaagacatggtcttcaccgtctacggcgagcactggcgcaaaatgcgccgcatcatgaccgtccccttcttcaccaacaaggttgtgcaacaataccgccatggatgggaatcggaggctgccgccgtcgtcgaggacgtcaagaaaaaccccgacgccgncgtctccggcaccgtcatccgccgccgccttcagctcatgatgtacaaacacatgtacc

SEQ ID NO: 226453 - DNA, 490 bp, Glycine max
agagacaaaagtgtaggtttattagaaaaccatctcaaaaccgtgcatcacttcaagttcagagatttacaatacccattagcaggccaaatatatatgacatttttggaacaaccccattttcaagcattgatacaatacagagtaaagaaaagggaaaagaaaaaagaaaaaattaaggggattgatcatatgatcatgatcatgtggtggagtctaaaatgaccttggctttgccacaatggtggaatgcttgagtatgtgcaagctaaattgccctcctttctcactagtgtcaatctgtgactggccagggggaggcaagagctcaaagttttggaccaaacgtcccaaagtgatgccaagaattggcaatgcaagagtgattccagggcagcttcttctgccaacaccaaagggaaggtacctaaagtcattgccattggcttcaacatgcgactcctcctcgaagaacctctcaggccggaac

SEQ ID NO: 226454 - DNA, 541 bp, Glycine max
attcgtgcagcaccggatcctctcatttctccggcgataactctcccttttccggcgaattcaccgcttcctcgatatgaatcccgagtatgactatctgttcaagctccttctgattggagactctggtgttggtaaatcatgccttcttctaagatttgctgatgattcatacattgagagctacataagcaccatcggagttgattttaaaattcgcactgttgagcaggatgggaagacaattaaactacagatttgggatactgctggacaagaacgatttaggacaataactagtagctactatcgtggagcacatggaatcattattgtttatgacgtgacagatgaagatagcttcaataatgtgaagcaatggctcagtgaaattgaccgctatgccagtgataatgttaacaaacttttggttggaaacaagagtgatctgacagcaaatagagttgtctcatatgacacagctaaggaattcgcagatcaaattggcatacctttcatggaaacaagtgcataagatgct

SEQ ID NO: 226455 - DNA, 463 bp, Glycine max
atcatataaagtttgttattcaatcaggcgaggaaaacagattctccatgcaatgccttgttctccatgattgtttgccattagtcattgttcacaactttttgttctctaatgttcagtgacagtcatggagcaatcacaaaagatggcacgtgtttcaaaccaaacaagtaaaaaaaattaaaactaggccatggtggtaaaaatagatgagcagaaatataaaagttttatcattaacaagtactaagcacaatcatagcattcaagtatatggtaaagaatgggatcatctaggccaattcccaaaccacaggttggattacgtgacactggtccactatttagtgaaatagcatatgccccttacatgcaaaaggtaagtgtggaccaagcagcaccacctggttaggaagagcagcaaccacttttttgtccaacaggttgccctctgatctgcact

SEQ ID NO: 226456 - DNA, 614 bp, Glycine max
  unsure (1)..(614): unsure at all n locations
ggaattaagtgcttccactctagtactttaccctgcatcacagccaccacaagagcctaaaaatgagaacaatgggggcatagtttttgactcaaaaaatttgcagcaaatgcaaggggaaatgcccaaagagttcctttggccttctagggacttggttgacaccacccaagaggagctaaaggaaccccttgtggacctagcaatctttaagaatggtgacgagaaagctatttccaatgcagcagagcttgtgagaaaagcatgcttgaagcatgggtttttccaagtgataaaccatggtgtggacccagatctcattgatgctgcatatcatgaaattgactccatttttaagctcccattgagcaaaaagatgggtgctaagagaaaacctggtggtgtctcagggtactctggtgctcatgcagatcgttattcgtccaagttgccatggaaagagacgttntctttcctctatgatcaccagagcttctccaactcccagattgttgactacttcaagtctgtgttaggggaggatcttcaacacacagggagggtatatcaaaagtactgcgaggcaatgaaagattatttttagtattatggag

SEQ ID NO: 226457 - DNA, 525 bp, Glycine max
aacagaaaatggaacttgattcaaatacgaccgtacatgatatcactatgtggtttgtaagtgcaggatgagctgtactcaaactccgtacagggtatttcaaaagaaaaggaaaatgaataatgattagccaaagggagtagtagtagtggtgacattaggcagccaggcacaggcaaaagcaataataataagcagccaaagggtaaataaagtaaactagaagttggaagggttggaattagagcattgctgccactcaatgaagctttggagggtagcaacatcagccctatagtgcttctgtgtgaattcaaacaaattggaccatgtgaaatcagggtacttcctttcctcatttctgcataacaaattgtctgggggcctcactattttgtcttctcttggacacacaaaataaacaagggaccttctctgcctgtatgtgttcaccaatgccctgtgtagacaactcttgtatctgccatttgacaatgccatgaaagtatcacctatgtttatgac

SEQ ID NO: 226458 - DNA, 573 bp, Glycine max
  unsure (1)..(573): unsure at all n locations
gaccctaaatgggaagatccagagtgcgccaatggaggaaagtggtctatcaccagcaacagcggcaggaaggctaaccttgataacatgtggcttgaaactatgatggctttgattggggaacaatttgaggatgctgaggacatatgtggtgtggttgctagtgtgcgccagtggcaggacaaactttcgttgtggacaaagacagcagcaaatgaagctgcccagatgagcattggaaggaagtggaaggaaatcattgatgttaacgacaagataacatacaactttcatgatgattctagaagcaaaggagcaacaaagggtcggtacaccgtataaacaccgcaggagcatcttcttgcacttgtgctgggctgctggcaaggctgtaatatttgatatctttatcatgtgccatatgtactaagaacatgctactactttggtggngggttaagttttatttttgttcactcaccccacttttgggtgttgatactatcatactcttctcatttttgaaatggtctgtcaaatttttcttcagagttcattggtagtttttttggc

SEQ ID NO: 226459 - DNA, 501 bp, Glycine max
gaccaaaaaaactaccaatgaactctgaagaaaaatttgacagaccatttcaaaaatgagaagagtatgatagtatcaacacccaaaagtggggtgagtgaacaaaaataaaactaaccccccaccaaagtagtagcatgttcttagtacatatggcacatgataaagatatcaaatattacagccttgccagcagcccagcacaagtgcaagaagatgctcctgcggtgtttatacggtgtaccgaccctttgttgctcctttgcttctagaatcatcatgaaagttgtatgttatcttgtcgttaacatcaatgatttccttccacttccttccaatgctcatctgggcagcttcatttgctgctgtctttgtccacaacgaaagtttgtcctgccactggcgcacactagcaaccacaccacatatgtcctcagcatcctcaaattgttccccaatcaaagccatcatagtttcaagccacatgttatcaaggttagc

SEQ ID NO: 226460 - DNA, 638 bp, Glycine max
  unsure (1)..(638): unsure at all n locations
gtgaagtgttctcctaattcagtgagtgaggttctgaattcttcaacttgagatgatggcatcatttgcagggactactcagaagtgcaaagcatgtgagaagactgtgtatttggtggatcagctcactgctgacaacaagatctatcacaaatcatgtttcagatgctaccactgcaagggtacccttaagttgagtaactattgttcctttgagggtgtgttatactgtaagcctcattttgatcaactctttaagaagactggcagcttagacaaaagttttgaaggtattccaagaactgctagacttgaaagatctactgatcaggtccaaaccaatagcaaggtttcaaatttgtttgctggaactcaggaaaaatgtgttgcttgcaagaaaacagtttacccaattgaaaaggtagctgttgatggaacatcttaccataaggcttgtttcaggtgcactcatggggngtgtgtaattagcccctcaaattacgttgcccatgaacatcgtctttattgtaggcaccatcacactcagttgttcaagcagaaaggtaacttcagccaacttgacaagcaagaaaatgatggaggggtgactgagaaacacataactgagtaatagcatg

SEQ ID NO: 226461 - DNA, 557 bp, Glycine max
acacagagaaaaccagattttatcacaataatgaaaaatacaaacttcattaagcttcaaagaaaaatgcagactggtcagccgtataattaagccaaactatctactaattcttctcaattatcaaccccaaaatttgtctcacaaaacttttcacatacacagtaaacagaatttaatgtggattgagacaagggcatttgatgccttaaaatgagtcaccaactgaacttgtattgccaaagtaacttgaaagttgcatgcatgctattactcagttattgtgttctcagtcaccccttcatcattttcttgcttgtcaagctggctgaagttacctttctgcttgaacaactgagtgtgatggtgcctacaataaagacgatgttcatgggcaacgtaatttgaggggctaattacacaccccccatgagtgcacctgaaacaagccttatggtaagatgttccatcaacagctaccttttcaattgggtaaactgttttcttgcaagcaacacatttttcctgagttccagcaaacacatttgaaaccttgc

SEQ ID NO: 226462 - DNA, 625 bp, Glycine max
  unsure (1)..(625): unsure at all n locations
atggtattccagaggaactccttgagagggtgaagaaggttgcctctgagttctataagctggaaagagaggagaatttcaagaactccacatcagtgaagctactaagcgattcagtcgaaaagaagagcagcgaaatggagcatgtggattgggaggatgttatcactctccttgatgataatgaatggccagaaaaaacaccaggattcagggaaaccatggcagaatatcgagccgagttaaagaaattggcagagaaactgatggaggtgatggatgagaatcttggcttaacaaaaggatacatcaagaaggcactgaatggtggagatggagaaaatgccttctttggcaccaaggtgagccactaccctccatgtccccatccagagctcgtgaagggtctgcgagctcacaccgatgcaggaggcgtaatcctactcttccaagatgacaaggttggtggccttcagatgctgaaagaagggcaatggattgatgtgcagcctttgccaaatgccattgtcatcaacactggtgatcagatngaggtcttgagcaatggtagatacaagagttgctggcacagggttctggccacaccagatgggaacagaagatc

SEQ ID NO: 226463 - DNA, 570 bp, Glycine max
caaaaaaaaaaagtggggggaagcgcaaaagcattttctatacgaaagcaagttgcttttctcacatggccctaacagcttggaatcttggttccttgggaaggaacttctgctcagcatagacagacatgtagtcaccaaaaacaaacttaggataagtttcatctacttgttggtcttctttctccacaagttgcggtgcaggacatatggtggccttgaatgaaggattatagaaggaggcaattgatcttctgttcccatctggtgtggccagaaccctgtgccagcaactcttgtatctaccattgctcaagacctcaatctgatcaccagtgttgatgacaatggcatttggcaaaggctgcacatcaatccattgcccttctttcagcatctgaaggccaccaaccttgtcatcttggaagagtaggattacgcctcctgcatcggtgtgagctcgcagacccttcacgagctctggatggggacatggagggtagtggctcaccttggtgccaaagaaggcattttctccatctgcaccattcagtgccttctcgatgtatc

SEQ ID NO: 226464 - DNA, 632 bp, Glycine max
  unsure (1)..(632): unsure at all n locations
tataattttgcgctttgctgatttattggagaaacacaatgatgaagttgcagccatagaaacatgggatagtggcaagacttatgaacaggctgcaaatgttgaaatacccatggtagtacgattgttccgatattatgcaggttgggcggataaaattcacggtctaacagttccagctgatggaccataccatgtccaaactttgcatgaaccaattggtgtagcagggcagattgttccttggaatttcccacttcttattttttcatggaaggttgcacctgcattagcttgtggtaatacagttgtaatgaaaactgcagagcagacacccctttcagccctttatgtgtcaaagctatttcttgaggcaggacttcctcctggagttctgaatgttatctctggctttggtcctactgctggtgcagcactgtgtagtcatatggacgttgacaagcttgctttcacaggatccactagcactggtaaacgtgtacttgaactgtctgcacacagcaacctgaagccagtaactctggagctgggtggaaaatctccattcttgtgtgcaaggatgctgantgtgatgcagccgttgaggctttcacattttgcttattttttaa

SEQ ID NO: 226465 - DNA, 544 bp, Glycine max
gacaccaagggtgatattctaacagaaggtaagttgagttagcaaagattggcacagaaaagctttagttgtgtaataactttggctaattcaatgccttaggaatgttccatgaaagatgtagttttttttctagataagacattatgaacatgaacactcaggtagtgggaaaactacagccatgcgggattcttcaaagcagtgacaacagctttaacttgaaggtagcttctaaggctgtagattccccttactctcccttgaccactcatcttatatccaccaaaaggtattgctgcatcaaagacatcatagcagttgatccataccgttccagcttgcaatgctcgcatcaaggtgttggcagtgtccatatttttagtaaaaactccagcagccaggccataggaagttgcattggctcttcttatcacttcctctagatccttgaatttcaagatagattgtactggaccaaatatctcatcttttgctatcaacatgttgtcctgaacatttgagaaaacagtgggttggatgt

SEQ ID NO: 226466 - DNA, 599 bp, Glycine max
agaagagtctcataaaaggcagcatagacttcattggcatcaataactatggaactctctatgccaaggactgctccctcactgcttgtcctcttggaacagatcgtccaatacgaggcttcgtagaagcaactggaacaagagatggcattccaattggtgatctgacaggaaacccaagattttttgtggttccaaggggcttagagaagattgtagactacatcaagataagataccataacatgcccatgtatattacagaaaatggatattcgtcaccgcacaaaccaaatgtgacaatggatgatctactacaagatttcaaacgaatagattatcataaagcctaccttgcagctctgcttagagccataaggaaaggcgcggatgtaagaggatatatgatatggtcattgatggacaactttgaatggacaagcggctatggcgtgagatatggactttattatgtggatagacacactctcgaacggattcccaaacgttctgttcaatggttttctagttttctcaacgacacaagccacagcaataaacaagactgagtgagcagtatgtcagaagcaaagatgtga

SEQ ID NO: 226467 - DNA, 578 bp, Glycine max
gatgaggtaaaacttttttttttgtagtatccaataaatttcagcaaataacaatgttatagtgtatgctgctagcatttatcataaataaagaatcttagtttacactagaatccatacatttcagcaagttcaaacaactttgaaaccagcagttgtcacatctttgcttctgacatactgctcactcaagtcttgtttattgctgtggcttgtgtcgttgagaaaactagaaaaccattgaacagaacgtttgggaatccgttcgagagtgtgtctatccacataataaagtccatatctcacgccatagccgcttgtccattcaaagttgtccatcaatgaccatatcatatatcctcttacatccgcgcctttccttatggctctaagcagagctgcaaggtaggctttatgataatctattcgtttgaaatcttgtagtagatcatccattgtcacatttggtttgtgcggtgacgaatatccattttctgtaatatacatgggcatgttatggtatcttatctggatgtagtctacaatcttcttaagcccctggaaccacaaaaatctgg

SEQ ID NO: 226468 - DNA, 581 bp, Glycine max
agaagagtctcataaaaggcagcatagacttcattggcatcaataactatggaactctctatgccaaggactgctccctcactgcttgtcctcttggaacagatcgtccaatacgaggcttcgtagaagcaactggaacaagagatggcattccaattggtgatctgacaggaaacccaagattttttgtggttccaaggggcttagagaagattgtagactacatcaagataagataccataacatgcccatgtatattacagaaaatggatattcgtcaccgcacaaaccaaatgtgacaatggatgatctactacaagatttcaaacgaatagattatcataaagcctaccttgcagctctgcttagagccataaggaaaggcgcggatgtaagaggatatatgatatggtcattgatggacaactttgaatggacaagcggctatggcgtgagatatggactttattatgtggatagacacactctcgaacggattcccaaacgttctgttcaatggttttctagttttctcaacgacacaagccacagcaataaacaagactgagtgagcagtatg

SEQ ID NO: 226469 - DNA, 548 bp, Glycine max
gatgaggtaaaacttttttttttgtagtatccaataaatttcagcaaataacaatgttatagtgtatgctgctagcatttatcataaataaagaatcttagtttacactagaatccatacatttcagcaagttcaaacaactttgaaaccagcagttgtcacatctttgcttctgacatactgctcactcaagtcttgtttattgctgtggcttgtgtcgttgagaaaactagaaaaccattgaacagaacgtttgggaatccgttcgagagtgtgtctatccacataataaagtccatatctcacgccatagccgcttgtccattcaaagttgtccatcaatgaccatatcatatatcctcttacatccgcgcctttccttatggctctaagcagagctgcaaggtaggctttatgataatctattcgtttgaactcttgtagtagatcatccattgtcacatttggtttgtgcggtgacgaatatccattttctggaatatacatgggcatgttatggtatcttatcttgatgtagtctacaatct

SEQ ID NO: 226470 - DNA, 574 bp, Glycine max
ctacgtgcctgatcctctgcttcaggcacatactcccgcaggttaaatggcgaggatcaaacctcaggctctgctacagcaaagcaaaaggaagaagggtccttctcggataagtgccgtgactgttatattttactttttgattcttgccttggttgggtttttcctgtttgcttcgtacagacattggtccagcagatcaagattacaatccgaagatcacttgtcagtctccgagggtgaaaatacttttgtggactccaagaaatctgagctgcctggatatgctgttttaaatacctctaaaggttctataataatagaactgtacaaggaaagtgctcctgaagttgttgatgaattcattgacttatgtcaaaaaggacacttcaaggggatgctttttcacaaagtaattaagcactatgtgattcaggcaggggataaccaaggatctggagctactgaagattggaacttgagaggaaagcaacatacaattactagtatgaaacatgaagcattcatgcttggaacttccagggcaaacacaacaacaaaggatttgatcttt

SEQ ID NO: 226471 - DNA, 515 bp, Glycine max
attatttgataatatagattaaataataacgagacattgacggtctaacctaaaaatttatcacatcaccaataaatctaaagaaataatcacatgtaatttttggataaattatatttttaattcttgtatatttaaaatagtcactgatttgacatcagtgtctgagaaatctacacataatcatttaatctaaaatgtattagtaatcatcccatcaaatttcatactcgtgaatcaccattaaatcggataacgttgtgggtatgtcattaattaacattgttatttgataacatgaaattaaagtacaagtgaaaaaaaaagtttgaaaacgactaagagcatgaatctaaaaaagaaatcttatttaaaactagcaacagagaagagtacttgagtgtaaattgattgtcattgattcattcaattattaactgtggttatctttttacagaacttacttgtgggagctacaggtacaactgaagtcacaacactctgggccatgactg

SEQ ID NO: 226472 - DNA, 415 bp, Glycine max
aaacccaacaaaaatatttttattttggggggcttacatctttatttaaaaatcttcgttggaagagtcccatcattaattatttaattttatttttttcagcagtagttaccacttttggattttacatatagcacttggccacaacacacaggggattctttttatgctggggaacccctggcaacactttagtatcaaaggcttcctttttaattccttgggggaattcccagtcaaaggaataaagaaaattagcaggtttaagatccaatgcagcaaatgccattttcataccagggcacaatttacgaccagcaccgaatggaataaacccaaaattttggccctaaagaactatggcgcaatttaaaaacctttcagggttaaaccctttgggattttccaagcctta

SEQ ID NO: 226473 - DNA, 574 bp, Glycine max
  unsure (1)..(574): unsure at all n locations
ctcgagccgaatcggctcgaggtggaaattctgattctgcatctgcccagtctccttccagttccagtggagaagctcagagtcgcacagatcgaattgtttttaagctcttcggtaaagagccaaatgattttcctcttgtacttagagcacagattcttgactggttatctcacagtcctactgatatggagagctacatacggcctggttgtattgttttgaccatttatctgcgtcaggctgaggcgttgtgggaggaactttgctatgatctgacttccagtttgaataggctgttggatgtctcagatgatactttttggagaaatggatgggttcacatcagggtgcagcatcagatggccttcatttttaatggtcaagttgtcatagatacctccttacctttcagaagtaacaattatagcaagattttgactgttagtccaattgctgtaccagcatcaaagagagctcaattntctgttaagggtgtcaacctgatacgccctgccactagggtaatgtgtgctttagaagggaaatatctggtctgtgaagatgatcatat

SEQ ID NO: 226474 - DNA, 499 bp, Glycine max
ctgcaccaagtgaatgtaagcataatggccacgtaaacgggcataatcctcaggtgtcgaacctgtgctgtcacgagcatttttccacgcttcaattccaaccatgcaaggatcattagtcaaagcatcaagtacatcctcagaaccatctttcccggctgctatatggagtggtgtcaaaccagcagtaccatcaacatcaggtctaaacaagaaggtctgattctctccatcaaccagtgccttctcttcaggtcctagtttatcagaaatattctcaggaacatatctcaaaagcaactccactaaatgcttgctatttctccttacagctttgtgaaggagacccatctctgaaagcgcaagatacaaggaaggatgatctcctgtatttacagttccatcaaacagtaggttcaacagttttctcactgctgcacaccaatcatgatccatggaaaactcaataagccacttgaaccgtttcaatggaaagaga

SEQ ID NO: 226475 - DNA, 593 bp, Glycine max
  unsure (1)..(593): unsure at all n locations
gtttgaaacaacaaagtattattgcacagttattgatgcgcctggacatagggatttcattaagaatatgattactgggacatcccaagctgactgtgctgttcttatcattgattcgaccactggtggttttgaagctggtatttccaaggatggacagactcgtgaacatgctctgctttcattcacccttggtgtgaaacagatgatttgctgctgtaacaaaatggatgctactacacccaagtattccaaggccaggtatgatgaaattgtgaaggaagtctcttcctacttgaagaaagtaggatacaaccctgacaagattccttttgttcctatctctggttttgagggagacaacatgattgagaggtccacaaaccttgactggtacaagggtccaactctgcttgatgcacttgaccagattagtgagcccaagaggccctctgacaagcccctcaggcttccccttcangatgtgtacaagattggaggtattggaactgtgccagtgngacgtgttgagaccggtgtcttgaagccttgaatggtggtgacttttgcacccactggactgancactgaag

SEQ ID NO: 226476 - DNA, 492 bp, Glycine max
attttataagattgaatcgactaaaaaatgaaatgaatcatttcatattgatagtattgctatgcttagtgtgcgactcgttagttttttagaacggttccaatttaacaaatttataaaccggttcatcgtataaatgaattaaaaaagaactaataaccaacgcatcgcttcggattatctagatctaaagaactagtcaaaacaaaaaaaaatataagaaaagatatattatagcaactgaactattgtgaagcataaaagaacaaaaatcttatttagttgtaaagcaataaaaatatacagataaatgaagaggtgaaagaaagagagaaaaaaaatcaatgatatagaattctaatatgtgaaggtctatgggttatctcataaaaggtagtgtaataaagcatcaatctaaatcaattcatatctatttatatatgaattaatttataacgtaaacaaattaagagctcttgatcaataaaaact

SEQ ID NO: 226477 - DNA, 508 bp, Glycine max
  unsure (1)..(508): unsure at all n locations
acgttctattatatatatatctatctatattctatatatagatatattgtttaggttatcaagtattaatctgaaataaataagaattgctgcttctaatacttataataattactacaaattctaataattactacaaaagggatatatgttagataaaatagattaattaatctatttcacaaaaaaataatgtatccatagcacagtttcgtcttataatacctcgggtgctaatgaaactatcttagtgaaatttaactgtctcaattcccgggcgattgcacaaaagattcgagttccttttggatttccttcttgatcaatgacaactgcagcattatcatcatactgaattattataccgttgctacgtttgagttctttacaagtacgtacaattacagctctgatcacttctgatctttctaagttcgcatttgggactgcttgtttgttacagcaacaacaatgtgaccaatataagcatatcngccattactagctc

SEQ ID NO: 226478 - DNA, 556 bp, Glycine max
  unsure (1)..(556): unsure at all n locations
caatggcatttccgtccgtaacctctgtaactgtggagaacgtgacattccctcccaccgtgaagcctccctgctcccccaacaccttcttcctcgccggcgccggcgtcaggggcctccaaattcatcacgctttcgttaaattcactgccatctgcatttacctncaatacgacgccctttccttcctctccgttaagtggaaaaccaagtctgctcaccagttaacggaatccgaccaattcttctcagatatcgttacaggtccattcgagaaatttatgcaggtgacaatgatcaaacccttgacggggcagcaatactcagagaaagtggcagaaaattgtgtggccatctggaggtctctcgggatttatacagattcagaagccgaagcaatagacaagtttctttctgttttcaaagacctaacattcccaccaggctcctctatccttttcactgtctcacccaatggatcattaacgataagtttctctagtgatgaaaccattccagaagttacgagtgctgttatagagaataaactactctc

SEQ ID NO: 226479 - DNA, 479 bp, Glycine max
aagtaatgtaattagttgcttcaattcccaacgaaaaatcaaatacaacagttcagtacttagacatggacagtaagaacaacacaataatgttactagaagtttagcacttagaaaaactgtaatttgccctttatttattagtagcacagtactgaaagtcacagcagagtggtaagggattttgatcttgggttgatgatataatgagttcacttatgagattgagggtcacaaaccccaggctctttgaataagtgagataatctggaggccaaactctgttttgctgcaggggaaacgccattcttacctatcattgactccaacacagcctgtgagagtagtttattctctataacagcactcgtaacttctggaatggtttcatcactagagaaacttatcgttaatgatccattgggtgagacagtgaaaaggatagaggagcctggtgggaatgttaggtctttgaaaac

SEQ ID NO: 226480 - DNA, 520 bp, Glycine max
tataattttgcgctttgctgatttattggagaaacacaatgatgaagttgcagccatagaaacatgggatagtggcaagacttatgaacaggctgcacatgttgaaatacccatggtagtactattgttccgatcttatgcaggttgcgcggataaaattcacggtctaacagtttcagctgatggaccataccatgtgcatactttgcatgaaccaattggtgtagcagggcacattgatccttggaatatcccacttcttattttttcatggaaggtcgcacctgcattagcttgtggcaatacagttgtaatgaaaactgcagagcagacacccctttcagacctttatgtgtcaaagctatttcttgaggcaagacttactgctggagttctgaatgttatctctggctctggtactactgctggtgcagcactgtgtactcatatggacgttgacaagctagctttacaggatccactagcactggtcagcgtgtacttgaactgtctgcacaca

SEQ ID NO: 226481 - DNA, 521 bp, Glycine max
gacacctcgggtgatattctaacagagggttagttgagttagcatagatcggcacagaaaagctttagctgtgtaataactttggctaatccaatgccttaggaatgttccatgaaagatgtcgttccctgtctagactagacattgtgaacatgaacactcaggttgtgggaaaactacagccatgcgggattcttcaaagcagtgacaacagctttaacttgaaggtagcttctaaggctgtctattccccttactctcccttgaccactcatcttatatccaccaaaaggtattgctgcattaaagacatcatagcagttgatccataccgttccagcttgcattgctcgcatcaaggtgttggctgtgtccatatttttagtaaaaacttcagcagtcatgccatacgaagttgcattggctctccgtatcactttctctagatccttgaatctcaagatagattgctctggtccaaatgtctcatgttttgctatcaacatgttgtgctgaacatt

SEQ ID NO: 226482 - DNA, 548 bp, Glycine max
gagccctttgaaaatcgttcaaaaccaatctatctatctatttggtataagcatggagctttgttggcaaaaatccatccatggctcttaaagaagcttggaggattttgtgtgagagggttctcacccttcacactccacctcctacagtttgcttatgctttagccattggtttctctaatcaatcaccacaaaagggtatacatggaggaacataattctctgagtggcatgaagcagagaagctatggccacatcttagcaaaccggcaagtcacaaaaaggcaatggactctctctcattaaagggtccttatggctatgtatgtattgattctattgtagttcttcttctttgtttcggtagaatgtattaataaacaaagatgttcttcctttgagaagctacataccaacttgtgttgtccataacactcaatttgcagatgactagaatcaggctttctcttcagtttctgcaaatgagtaggtaggtaattatgaccttatatcatatcccatgtgtgttagtgtgtatgcttgctat

SEQ ID NO: 226483 - DNA, 575 bp, Glycine max
aaggaactaaaacactaccataattcttttattgcatataaggtcacaacatagcaagcatacacactaacacacatgggatatgatataaggtcataattacctacctactcatttgcagaaactgaagagaaagcctgattctagtcatctgcaaattgagtgttatggacaacacaagttggtatgtagcttctcaaaggaagaacatctttgtttattaatacattctaccgaaacaaagaagaagaactacaatagaatcaatacatacatagccataaggaccctttaatgagagagagtccattgcctttttgtgacttgccggtttgctaagatgtggccatagcttctctgcttcatgccactcagagaattatgttcctccatgtatacccttttgtggtgattgattagagaaaccaatggctaaagcataagcaaactgtatgaggtggaatgtgaagggtgagaaccctctacacaaaatccttcagcttcttaagaaccatggatggattttgccaacaagctcatgctatccaaatgatgatagatggtttgacgatttt

SEQ ID NO: 226484 - DNA, 503 bp, Glycine max
gaaattccgtgagatatataattttgcttttggctgggcaaaagagaagggtcaaaaatctcttgcattggatactgctattggtatgtggcaattattatttgctgagaagcagtggccgctggttgatcattggtgccagttcttgcaggctcggcataacaaagcaatatctagggacacatggtctcagcttttggagtttgcaaagactgttggctcaaatttatctgattatgatgccgaaggtgcttggccatatcttattgatgaatttgtggagtatctcaacgagaatggcataatccaaaatgatctgatcaatgattctagtctaaaacgatgatgcattcaaatctcaataaattgttatttaagagaatttgatggagtctcttgtgatgagttgtgctattctgtgattgaactcctctttgttattaagtgggattcggtctaaattcaaaggggacatggctgctagagcaaactcattcttactg

SEQ ID NO: 226485 - DNA, 616 bp, Glycine max
  unsure (1)..(616): unsure at all n locations
caaaacatgatatcaaggttgggctttggatgtgtaggactatctggactttataatgctcccctctcgcacgaagctggatgttcaattattaaagaagcattcaatatgggtgttaccttctttgacacatcagatttttatggacttaatcatgataatgaaattatgattggaaaggctttaaaagaacttcctcgggaaaaagtccagttggctacaaaatttggtcttgttagatctgatggggtgtttgctggggtaaaaggtactcctgaatatgtgcggcagtgctgtgaagctagtcttaagcgccttgatgttgagtacattgacctatactatcaacatcgagttgacacttcagtgccaattgaagacaccatgggggagctcaaaaagctggtaaacgaaggaaagataaagtatattggcttgtctcaagctagtcctgacactataaagagagcacatgctgttcatcctatttctgctttgcaaatggaatattctttatggacccgtgacattgaagaagagattattccactatgcagggaacttgnngatnggatagtggcatatagccctcttggtcatggctttttcgcaggga

SEQ ID NO: 226486 - DNA, 534 bp, Glycine max
aatacaaacacaattcttattcacaacagagtagcacgattcctttcaccaattatcaacaatacactgaaaaatctactcactcattttcgtgaatggattgtgagggaagaaaaagtcgtgtttatcttctctaacacaattactttgatggggtggtagcaaacttccaagtatattgcgataaagaaccaaggcctggtgcttccccagcaacttcataaacaggaactgcatcagaaatttcactcaactctgcatttgtaagtttcacagccacagatccaacgttgttttcaaggttcttgattttagtagtcccagggatagggactatgtcatttccctgatggagaaaccatgctaaggctaactgagaaggagtgcatgaatgtttagaagccaaatcagcaattcgattatagaaaagcttgttcttttccaaattttctccactgaacctggcatcttcagccagtgcgctctgactaggccaagtctctaccgctgccttccctgcgaaaaagccatgac

SEQ ID NO: 226487 - DNA, 405 bp, Glycine max
aaaaaaaataaaaaaaaaaaaaaaaaaaaaaaaaaaaaaaaaaaaaaaaaaaaaaaaaaaacaaaaaaaaagaaaaaaaaaaaaaaaaaaaaaaaaaaagaaaaaaaaaaaaaaaaaaaaaaaaaaaaaaaaaaaaaaaaaagaaaaaaaaggaacaaaaagatgaaggaaacaaaaaaaagagaaacaaaaacaaaaaaaaaaaaaaaaaaaaggaaaggaaaaaaggaaaaaaaaaaaaaaaaaaaaaaaaaaaataagtaaacaaacagctcagtaaattgacttacggacaaaagcaccaaaggtaaaaaatgttaaaaacagaagcatttagaaaaaaaattagaagaaaaaaacagaagcactaagacacaagaaattaaaagaaaaccaccaagagga

SEQ ID NO: 226488 - DNA, 572 bp, Glycine max
  unsure (1)..(572): unsure at all n locations
aacgcccttgtttgtggcctcccgaacacgaaagtcgaaacccgaactcacttcctcaccccatcatcgcagcctcgaaaccctgagtcgccagcgcagccccgaaacctagtccagtttgcagtttcttgtgcggtttatcatgggggatagtcagtattcgttttctctcaccacatttagcccttctggaaagcttgttcagattgagcatgccttgacagctgttggctctggacagacgtctttgggaataaaagctgcaaatggagttgtcattgccaccgagaagaaattgccatctatattggttgatgaaacatcagtccagaaaattcagttattaacaccaaatatagggtgtcgtatatagtggcatgggtcccgattttcgagttttggttcgaaaaagcaggaaacaagctgagcagtatcatcggttatataaagaacccattcctgtcactcaacttgttagggaagttgccgctgtaatgcangaatttactcagtctggtggtgttaggccttttggagggtcactgcttgttgctggatttgatgataatgga

SEQ ID NO: 226489 - DNA, 605 bp, Glycine max
  unsure (1)..(605): unsure at all n locations
aaaatgtaagggctgtcttgagaacttttaatttttagttacacacgtcacattacttttattttgtttcttatttttgaatgttaatatagaaaatagtaaaaaaaaaaaagagatcatttggtttgagaatatgttttctacttttaatacttcattttttttaaacttttaatttaaaaaatactatcttttttttcactttgtttgcaattttcaaaagtttgcataaaagatactgaatacaaactctttttttattttttttattttctgttatatacaattgttttaaataaaaaacaaagtgaaaataaagtgacatttttgtaatagaaaatgaaaaccgtgaacattntctcaaaccaaacagtcccagaaagttgnttttcacttttttctatatattttttttaaaataaaaaataaaaaaaaaaacttcttaccccattgtccagaggctgtttccgaatctgaacccatgaccaacangtcaccaaggcacaactttaccgctacaccagggctcaccctcttttaaaataaaaaataaagggagacaaggatgattttttttcatttaatgaaccatttttttaatcatg

SEQ ID NO: 226490 - DNA, 569 bp, Glycine max
ctgaggacaagacttcatatcctgaaaatattgagattcatgagaagaatgattttccattttctttagacagcaacagttcaaaccagttcaagcagtttgatgtaatagaaaattgccctgaccaccatttttttgttgagggaaaagggttgtcaacatctcaggtaaaaagaagttgggtgaaaaaggttcagcaagaatggagcatcctcgagaaaaatcttccagaaactatttatgttcgtgtgtttgaagaaagaatggatctcatgcgagcagctattgttggtgcatctggaactccttatcatgatgggctgtttttctttgacatatgcttccctccggagtatcccaatgaaccacctatggtgcactacaattctgcagggctccggttaaatcctaatctgtacgagtcaggaaaaatctgtctgagtctcctaaacacttggacaggcacagacactgaagtgtggaaccctggagcctccactattcttcaagtccttctctctctacaggcacttgtccttaatgagaagccttatttcaatgaggctgga

SEQ ID NO: 226491 - DNA, 521 bp, Glycine max
ggacaaatgatatgcgttgtataaaaaatccctcagttctcatttattacaacaaaccaggtcaacaaataaggatttttagcgagctaaagacaatgttatactttggcaattaagctctctctaccttggggtaaaacctgatcaaataaaagttacatctaagacaaaaacagctacagaaaactaaactataagaatagcatgataatcatcatatataagaggaggatgggggcattctctctgaaagaccaacaacaaattcaacatccctaaaggaagctccagattgtgctttttccctttaagccactgcaggcatgttcttgagccatgaatctagaggtttgccaatggagtcaacaatgaaaccaatttccctcagcttgttaacattcacgacgttgcgggcatcgaaaatgaatgcaggcttctgcatgctgtcataaaccttttggcaatcaaggttcttaaactcattccactcaggcataatgcatatgccatgtgcatccttg

SEQ ID NO: 226492 - DNA, 479 bp, Glycine max
cttgctttacatgttgcacattgccttttgcattttagctgcagttgctccaccaattatcttcaaaggaaaatctctcacaggcattttggctgcgattgatgtgttgggagacaatgcattggttgggatattctacttcattggatttggccttttctgtctcgagtcagtgctgagcatctgggttatacagcaagtatatatgtacttccgtggcagtggcaaggctgcagttttaaagcgtgaggctgcgagagggacaatgatggcagctctataacatggcacttacaattgttttcctaatggatatacccgaaaaatgatttcttgagttaccattaccagttctccttacaaactttactctttgtttaatactgggatgcgttttcctaggtttgtgtcaaaccagataattaagatagaagcttagttgtgcatatatagaaatcattgtttgagatagcccctta

SEQ ID NO: 226493 - DNA, 412 bp, Glycine max
tttgtttttttttttttttttttttttttttttttttttttttttttttttatttatggatttaggccattaatacacaaaacaacaaccatgaaccgaaacaagaacaacacaatacaaaaaaagccacggaaaaaccggaggaacccacagaggcgcaaaagaaaccacgggcatagaaattaggaaaccaaaaataggggctgcatgcaacatccacccggcccaccacgttggttaggattcagcaaacccaagctcaaaaagctattggcgagcccacacgcaaacagcgaagaaggcaacatagtccgaggcataattccaaacaagagggcggaccgcaggggcagaccaaaaaggcataggagaaaggcaccgaaggagggccccattataaccaccgaagaac

SEQ ID NO: 226494 - DNA, 557 bp, Glycine max
aagctcgaatctcagtacgttcctttatatatatatatatatattcaacaaggacatttacaatttaaaaattactgcaaacaatatatgatatactctaatgctgggcaaatatattacatcataaccttggacctaaagtaaaggacactgaatttcgaattctgatatattgctcatcaactcctactactaaataggcctaagttcaaaatttagtgttgaaattttctggtcattttcaggtgactaccaaaggtgtaggagctcctgaaattctgaagtaagattcacttgcttgtgcatggggatatgttgcaactgaacccaaggatttattagaattgcatatttgattgaatcctgaccacttcatttgcatgaagctgctcttcctccacggacccacgtgcattttcttttccttcattgatttctttgcagcattgcacattactcgaacaatggcagttaagtactccagttttccaatataaaattcgggcaaacaggacactagttttccggtaattttcacttgcttttgcaatctgaaa

SEQ ID NO: 226495 - DNA, 604 bp, Glycine max
  unsure (1)..(604): unsure at all n locations
atcatcttcttaaaagttaaaaaggccaaggtcctgaatctcacagagacagagagaatgagtacggtgggagaagggaaggtgagtagtaatggtcatggatgttgcaaatcagggccaggctatgcttccccactggaagccatttctggtcccagagagtctctcatttatgtaacctctgtctacacagggaccggaatagagaagccagactatttggcgacagtggatgtggatccaaactctccaacttattccaaagtcatccataggcttcctgttccttatttaggtgacgaattgcatcacacaggctggaattcatgcagctcttgccatggagacccctcagcagaccgacgatttctcatcgtacctgcactcgtatcaggtcgagtatatgtggttgatgtgaaaacaaatccaagggctccatctttgcacaaagatgtcgagcctgccgatatcatacagaagactggattagcttatccacacacatctcactgccttgcttctggtgatataatgatctcgtgtcttggagataaagatggaaatgctgcangaaatggatttcttcttcttgattctgagttta

SEQ ID NO: 226496 - DNA, 538 bp, Glycine max
gagcttaatatatttatgcaattgcaaactgtcttcaaaaagttgaagattcacaagagcattatttatagcatagtagctcattacaaccatttgacagatccgtttattaaagggaaataatgacacgtatgtttaaatccatatatctgaagtacagtcaccaccaggatatctcatctcatgggcaagagaaggaccatcaggctcagttccaaagtccacaaagaagttggggttgattttcagtccacctttctcagtatcaacatcaatctgtattatgtgggagcctttctggacaagctctggataaaattgtttgtcccaagtactaaatagtgagttggtagcatagagccgcttcccatctaaactcaattgaatcatctgagggccccctctcaacttgtttccctgaatctctggaacttcagcttgccatgtttcaccatcatcagttatagctactacagggcttcctttctggataagtccaccaacccatacttgtccagtcaggttaagatttttaacg

SEQ ID NO: 226497 - DNA, 573 bp, Glycine max
  unsure (1)..(573): unsure at all n locations
aatagtaaatagtaatagaattaatgcgaaactgaattacatggaagatatggcaacaagacaataaactcaaacaaatgaagcacccttcattagcttagtttctcacttatgattccttcaagtgatccaatgagggccactaatgacaccagaaagcaaataaagctgaaggtcctaaggacaatccattttctagaccaagcttcaattttcctctgcacaaagtacatctctacagagaaatatatagccaatggccaaaagcctaaggctcctaacactcctataacttgattgaagtaaggaaataggatagcgagtccagtcgtggaaaccacataggttgttctaaaacatatcctgaacatgtttagctgaaaagctggcaaccgaggcagtttcaattggtagaaattattcacaaatccactgttggggtatctttttgaacaccatctgtcaacagctccatagatcggctgactgtaaatctgatatcctnctaccaagtgaagaatcatgcaagcattcgcaaagtcgatgagccagtaaggctcgtaaatccaaacc

SEQ ID NO: 226498 - DNA, 454 bp, Glycine max
ctctacccgaatctgcttgagcggctcgagcggctcgaggtacaacaccgtccatggccagtggaagcattttgatgtgaaggtgaaggactctaaaacccttctctttggtgagaagcaccgtcactcggtttggaagtaggaaccctgaggaaattccatgaggagaggttggcgcatgctatgtcggcgagtcaactggtgtattcactgacacggacaaggctgctgctcactcgcacgctggagccaagaaggttgtaatctctggcccaagcaaagatgcacccatgcatgtcgacggtgttaacgagagcgagtacatctcctgagctagacattgcttccaatgctagcagcactaccaagtagtcttgctgccctcgccaaggctatgaacgatcgatatggaatagaggagggtctcatgaccacttgccatgccatcacagct

SEQ ID NO: 226499 - DNA, 511 bp, Glycine max
gataacgatgcacactaggcggtaggtccttaccagaggaaaaacctatagggtcagataccaactgatcatattgcactgatggtgaatgatatatcttacagcacctcaatgggggcactccgaattcacactataataaactgaattaagattaatcttcggaacggtgttgcgatgatatccaggctcagactcaaccatttaagccacggatgctttgcggtcactcaaatccatcacacgggaactgttacccgattcggtggcataccaggaaacacgttttacaaaggtgtcattcaaggaaattccggcacttggcgttaaacctgctagacctgttatgaccaacgtaattgagagactcagcatcatcttacgtgggacccacattacccttcaatttgccctctgattcctccttgatagcagacatgatatgctcatacgacgctggcttatctagcctaacagtgcggtcaacatctgacacatctacagtggggac

SEQ ID NO: 226500 - DNA, 570 bp, Glycine max
  unsure (1)..(570): unsure at all n locations
gaaaaaagagaaactggttgagcccggaaaaaacaataacaaaacaaaacgtggaggataaaaaagagagaaggatcgcttaaacgtctctctctttctttgaggcttctttccctctcttcgtcccttgctctgtgtcgccgtaacacaaaaagggaagagagagaaagaaccaccccacccaacaacagcttttgttcttcacaagacatagcttcgtgtgtgtgtttcttttcttccttccagcttggaaagactgaagtctctgtctttttcaggttttgggggtgttgttgaagatgttggtagcaaatagctttgatctatggcgaaaggacggttttttctctgcggcggaagaggtgcaggaatcagctgatataatggaatctgcatacagggcatggttgagagagaagagagaaaggtcaactcctgaggaattaaatgaactatgcagagagctgcaaactgctttaggtaccgcanaatggcagttggaagactttgatnaagccgtcaggctacgctaccgacatcacggtgatgacaatacatccactangcata

SEQ ID NO: 226501 - DNA, 558 bp, Glycine max
  unsure (1)..(558): unsure at all n locations
gtttgatgagatttatgtctcttcattggcctttccaatggattagaccaaaggttgatgcaaattataataacccaaagctgaggagctctctgcctgttgactcagtcatgaactggtatcttgctcttgagtctggcaattttttggttccctgctcaagtctataaccgtgagaatggtcatgttggattcatgctatcttgctatgatgctgaacttagctatgatccgcgaactgatacctttcaagccagatatcctccacatggaagaagggcagatgctagagagtgtggcatcccatgggaaaggctaagagcacctcctattgatacttctccgcatgatcttcatgtctccgactgtttaaatgatttgtatccgggtgatcacatagagattcaatggaggagaaacaaagaatttccttatggttggtggtattgtggttgtangccacttggagtcatgcaatgggagtgaaaattattgccgatgtcatagtagtgacactgtggtgctagagttcaatcattacactcctggctcacgatg

SEQ ID NO: 226502 - DNA, 562 bp, Glycine max
gcttccttatgtttgtgctgcaatgcaacaattagaacagaggaagaggtattggagtgagcacaggtctcatgacagtgaaaaatcttctatgattattgattgtggacaccagataccatcaacagttgcaaattctatggatactgatgatgaaaacctgttctaatggatcaataacttcttcttctgatttccttgatcaaaataaggttatgatgttggataagtcaactgctggagcctgttcggatcaaaacttggatgtggagaaagaattaatagagcaggaaatgaatttatcttcttcatatgaggagaaaaatgataatcaaaggcattcagaaggtgttattggagatgtgaaggaaaatagttcatacagtttctaccaggctgctgatggtcagcatctaattcttcatcctctgaacatgaagtgtttgcttcaccattatgggagctatgatatgcttcctcacagaataagtggaaggattctacagttggaaaccagtactcagactgaagccatcaggaggcggtatcgaattcttagtca

SEQ ID NO: 226503 - DNA, 411 bp, Glycine max
gcaagttgcttcctctgatttgcacgcttcttgatttcatctataaatggggccaatgcttcaggaggcaacatctcactcaaatcaacttcacaaagctgaaaggttgtggttaatggaaaatgactaagaaatcgataccgcctcctgatggcttcagtctgagtaactgtttccaactgtagaatccttccacttattctgtgaggaagcatatcatagctcccataatggtgaagcaaacacttcatgttcagaggatgaagaattagatgctgaccatcagcagcctggtagaaactgtatgaactattttccttcacatctccaataacaccttctgaatgcctttgattatcatttttctcctcatatgaagaagataaattcatttcctgctctattaattct

SEQ ID NO: 226504 - DNA, 537 bp, Glycine max
caaaccagtccaagaatgtgtgtgtaattggagctggaccatcagggctagtggcagcgagggagctgaaaagagaaggtcataaggtggttgtgttggagcagaaccatgatattggaggtcaatggctatataacccaaatgtacaagaggaggaccctttgggatgagacccttggctaaaggtgcatagcagcatctatgagtctttaaggctcatgtcccccagagaggtcatgggcttcactgatttcccctttttagtcaagaaaggtagagatccaaggaggtttcctagtcatagagagctccttctctaccttaaggacttttgtgaatggtttgagttgagagacatgatcaagttcaatacaaaggtgcattatgtgggaccattaaattatggtgtccctagtgaggatttgaaatgggttgttagaagcaaagacaagaacagcgaggaggaaagttgaacaagtgtttgacgctgtggttgttgccactggccattactctaaccccagattgccatgcatt

SEQ ID NO: 226505 - DNA, 490 bp, Glycine max
atttaaagctggttatgattcagagattcgccttggctgggcatctctttgggttggagatgaaggtgggaaagccaaaacagctccgatgcagatgaaagttcaattcatgctacaagtgccacaggacgacataaaatcttctgctttgatgtttcggattaagaaaagatgggacttttaaggctctactggtgactttacctgttttttatatataaaaaatgggtatttgactttgggcagttccattgtgttttagtttgttgcatccacagtccactctttgcaaaagggggtattgactatttgacaggttgatatttctccaagtcagctaattgcttcgtggtgtgacaagtaagaacaattttcaatcgtacaaaatttgtaaagatgattttctgatttgtaagttggcagattatggttatcgaatgcagacagtgctgaaattggttatgcatttggctaaaggccattcaactaa

SEQ ID NO: 226506 - DNA, 497 bp, Glycine max
tttttttttttttttttttttttttttttttttttttttttttggtttattttttttttaattttggtttttttttttttatttttttttttttttttattattttatttttgaaggagggtttttaacctggaaaaacagaaaattttaaaggcacatggtttaaaaaaaaagaacacaaaacaaacaaaaaagagggcattaaaaaaaaaaaaagtcccaccagaaacagcttggggtttgtaaaaaaatcggtaggtcttgggggaaaaaaaaatggcaatgcattgcccaaaaaaaaaatgtgggtccaggggggaaccgcaattcgggggcgccggccccaaaaaggaacattaaaaagaactaaaaaaagggctgcccgaaggccaccccaatgtgggggaagaccaaaaagaggtgggaatcgttgacccccaaagggggccccccaaaaagaggaaaaaaaccggggaaaaagtcgaaaatggtggccc

SEQ ID NO: 226507 - DNA, 520 bp, Glycine max
  unsure (1)..(520): unsure at all n locations
gttttggtttggtgtttttcttaagcttgagatcaggaattaatttcagaggttcagagaatggcaacggattcttctaatggtaatggacatcaccaaacaacaacaaagcaacctcctttgccgtctcccctgcgcttttccaaattttttcagtccaacatgagaatcttggttactggaggagctggattcattgggtctcacttagttgacagattgatggaaaatgaaaaaaatgaggtaattgttgctgacaactacttcactggatccaaggacaacctcaaaaaatggataggtcatccaagatttgagcttatccgtcatgatgtcacggagcctttattgatcgaggttgatcagatctaccatcttgcatgccctgcctctcctattttctacaaatacaatccagtaaagacaataaagacaaatgtgattggcacactgaacatgcttgggcttgcaaagcgagtaggagcaaggattntgcttacatcaacttcagaggtatatg

SEQ ID NO: 226508 - DNA, 590 bp, Glycine max
  unsure (1)..(590): unsure at all n locations
caccgactgagttttgacaacttgcctgtggatattcaacacctacgttgtaaagtaaacttccaagctttaacctttgtttctcatatcagaacacttggagatgcccttatcagccgccttcgctatcctcaaggctcagctgaagaaatgggcttcaactaccttcaagaggtcactggtgcaggtgctaggaaaaatgcagggaaatttgttgttctacacctccgatttgataaggatatggcagcccattcggcctgcgattttggtggaggaaaagctgaaaaactggcccttgcaaagtatagacaggtgatttggcaagggagggttcttaactctcaattcactgatgaagagttgaggagtcaaggtcgttgcccaatgactcctgaagaggttggattgttactagcagctatgggatttgacaacagcactcgtttatatcttgcctctcataaggtctatggtggagaggcaaggatttcaactttgagggaattatttcctcggatggaagacaagaagagccttgcttcatctgnagagcngtctgagataaggggaaagcttctctactagct

SEQ ID NO: 226509 - DNA, 606 bp, Glycine max
ctcgagccgctcgagccgattcggctcgagcaactcttcaaaagggagaagaaaaggaaagaaaactctcaaaaaactattatagcaatggcagaacaaaaccaaaaccaaacaactgaagctggaaggcaccaagaggttggtcacaagagccttctccagagtgatgctctttaccagtatattctggagacaagtgtctacccaagagaacctgaatccatgaaagaactgagagagttgacagcaaaacacccatggaacatcatgacaacctctgcagacgaagggcagttcttgaacatgctccttaagctcatcaatgccaagaacaccatggaaattggtgtctacactgggtattcacttcttgccaccgctctcgctcttcctgaagatggaaagatcttggccatggacattaacagggagaattatgaattgggtttgcctgtaattaaaaaagctggtgttgaccacaaaattgaattcagagaaggtcctgctctaccagttcttgatgaaatgattaaagatgagaagaaccatggaagctatgacttcatctctgttgatgcggacaaggacaactacctcaactaccac

SEQ ID NO: 226510 - DNA, 557 bp, Glycine max
gtggaagtaaatcacataagaaaaaagtcacttgcatatagaacgtttaattgtccacagttttccacacgagtaatagagaaaagtacagacacatatttttttttgaaagaaaagtattgattgcttttaaatgcattagcaggtgccactcaatgatgaccagtcatcactatagggtgtgcagaagaagcaacggtggtccacgattatgatgatcagaaatcacttgatccgacggcagatagtgattccatcaccaaccgggagcatgcaaatctcgatcctggggtccacagcgagggctttgttgagctccagcacgaagtccctgtagtacctaacatacttcctaagaggagcatcagggggtgccaccacagatccgttcatagggtgttgtcgtacccgatcacgcgcccaacttttacaagctctatcaacctcttgtggcagttgaagtaagtgtccttgtccgcatcaacaaagatgaagtcatagctttcatggttcttctcatcgttatcatttcatcaagaactggtagagcaggacct

SEQ ID NO: 226511 - DNA, 532 bp, Glycine max
  unsure (1)..(532): unsure at all n locations
ctccaagaggctcatgcaaggagcttctgaactccgttttatcctacatggaactccgagacaatggagtgacaagcggcgagattggatacgaaacgaaaaggacaaaatgctgcgtctgcttgaatctgaagccccaaagagtgggggaaaattaaaagtattagaaaggttttattttactgataagcctccaagcatgcagatgcactttgaaattatagaaagtttagatgcaagttagtagttcattcttgataggtctactggagtctttgctataaaagcttttgagggatggggggctgaagaccctgctagcccccgcataaatccgtccctgatcattaaccagtcaatattctgcaagaatatgtcatatctgagaattatcaaaagaatagtaaaattggaccattgcatcttttgttatctcctctacgtgtcagactatctatgaccaaagatgattgtaatcattgaagngggtatcattgtaattataatactccaatttaaatcttctgtagat

SEQ ID NO: 226512 - DNA, 496 bp, Glycine max
gcattggatttaccaagagaagagctaaccaggtgaagagaacctgttatgcacaatcaagccagattagacagattcgtaggaagatgagggagatcatgaccaaccaggcaacagcatgtgatttgaaggagttggtccggatgtttattcctgagattattggacaagagatcgagaaggcaacatctagtatttaccctctgcagaatgtgtttgttcgtaaagtcaagatcctgaaagctcctaagtttgatcttgggaaactgatggaggttcatggagattactccgaggatgttggtgcaaaggtcgacagacctgctgatgaaatagtggcagaggaacccactgaaattgctggagcttgatttagtgataatgcatattcacattgttctaggttgtctggttcttatggtatcattgaagatttaagtaacaaacttactgttctgtcaaatgtttctgtgtaagctgagtgacagttttgttt

SEQ ID NO: 226513 - DNA, 542 bp, Glycine max
  unsure (1)..(542): unsure at all n locations
gcgttgtatataccaagagaggagctcttcatttgaagagaacctgttatgcacaatcaagccagattagacagattcgtaggaagatgagggagatcatgaccaaccaggcaacagcatgtgatttgaaggagttggtccgggaagtttattcctgagattattggaaaagagatcgagaaggcaacatctagtatttaccctctgcagaatgtgtttgttcgtaaagtcaagatcctgaaagctcctaagtttgatcttgggaaactgatggaggttcatggagattactccgaggatgttggtgcaaaggtagacagacctgctgatgaaatagtggcagaggaacccactgaaattgttggagcttgatttagtgataatgcatattcaaattgttctaggttttctgtttcttatgttatcattgaaaatctaagttacaaacttactgttctgtcaaatgtttctgtgtaagctgagtgacagntttgtttaaacaacgagaagacatttctggtgcgtaatatatatctgggttt

SEQ ID NO: 226514 - DNA, 456 bp, Glycine max
ttcaaagtgaactttgcaactttgagcagaaaatctcacagtcgaaggaagaaataatcaccaatggcaattgaacacgaagacgatctcaaagacgagaagaaccctcgacccctcgacgaggatgacatcgccctcctcaaaacctacggtttgggaccttattccacaagcataaaaaaggcggagaaggaaatcaaagatatggccaagaaagtgaatgacttatgtggtatcaaggagtctgatactggattagcagcaccaagccagtgggatcttgtttctgataagcaaatgatgcaggaagagcagcctcttcaggtggcacgatgcacaaagatcataaatccaaactctgaagatgccaaatatgttatcaatgtgaagcagatagcatagtttgttgttgggctaggagacaagggtttccccactgacattgaggaagggatg

SEQ ID NO: 226515 - DNA, 630 bp, Glycine max
  unsure (1)..(630): unsure at all n locations
tggttgtctcttttggctccttgcaaggatggtattgcagatgaggggtacaattcgccctggcctcaaatgggatgtcatggttgatttgtttttctatagagaaccagaggaggctaagcaacaagaggaggaggaagctccggcaggtgattatgccatcacagatttcaatgcaggtgctattgctgctgatggccagtggcctggtacaattgatcaatcatggagtgatgcagttccacaacctattccagcagcacctggtgtcaactggggggcacctgcagaagcacctgctgctgttgcagaaggagattggggtgaagctgttccaccaccacaacaaatccctgttcctccctctggaattgactctgtccaaccaactggctgggaataaactagtgttttttgatgctatgattttgccctgtccttcaatttagttgtctttcttagaagtaaaatatggatcagtttttttgtagcaaagcaacttggtttttttttttttctagtttggtatgagtggcaaaatattatttttaacatggtatattcggtaagattttattttgttttgatgcagncattgattcatgattgttggaaatgatattttggccc

SEQ ID NO: 226516 - DNA, 638 bp, Glycine max
  unsure (1)..(638): unsure at all n locations
gtanttccggcggaagcttgtacgacnncnnnnnttnntgnnncnnncnnncgnnnggnannnngntngagcttngntngggcgccaaaggcgtttctagtcacacagaagaaaaagacttactcaagaagcttcgagaaaatgtctggaaaagcgaagaggagagatgacgacggtgcttccgacgccgactctgaaggccacgcgccgcccaagaagtccctcaagaaggattccgatgacgatcccgactctattaccgtttgcgagatttcgaagaacaggagggttgccgtgaggaactggaaaggcagcattatggttgacattcgcgagttttacgtcaaagatggcaagcaattgcctggcagaaaaggtatctctttgaccatggatcagtggaatgtgcttcgtaatcatgttgaagaaattgacaaggcaattaatgagaattctagngaagtgggcattctagtcaattttatagtttactatggtagcatgttatatactctttttggattacttaaagtacagttaagggctacagtattttgtctaatcaaaccctttgaggttgctattggaggaattcgattntaactctggttgctaatgcatgtaaagtgtcctctatt

SEQ ID NO: 226517 - DNA, 590 bp, Glycine max
aaaatatttacagaagaagagatttagttttattgagaaggccactgcagtaggaactgaagaagtcgtttttgatgcagtcggggataactttgcatcttacaataggcttaagaaaacaaacaaggggcgtggtaatgtacctgttagttcaggagctcgggagatggcttcaatgttggatactgctctactcgaagctttgcttctaactggacagtcttcagtggctttagaattactgagaggagttaactactgtgatttgaaaatatgtgaggaaatacttcgaaaaggcaaccatcatgttgctttattagaactttacaagcacaactcattgcaccgggaggctcttgaacttcttcacaaattggtggatgagttgaaatctagccagtctgaaattacacaaagattcaaacctgaagatattgtggagtacctcaagccactatgtgggacagacccctacttgttctagagttctcaatgcttgttcttgaaagctgtccatctcaaactatagacctctttctgtcccgaaatattccagcagatatggtgagctcatatttgaagaagcattc

SEQ ID NO: 226518 - DNA, 328 bp, Glycine max
  unsure (1)..(328): unsure at all n locations
gagagtggtttcagtgagtgatcggtgttcacttgatccttcataagtcgtcatcatcatcatcatcatcaccgttgattgaagaagatgccgatcagaaacatcgccatcggaaggcctgaagaggctactcaccccgacacgttgaaggcggngttggctgagttcatctccaccttgatcttcgtgttcgccggttcaggttccggcatcgcctacaacaagctcaccgacaacggcgccgccactcccgccggcctcatctccgcttccatcgcccatgctttcgccctcttcgtcgccgtctccgtcggcgccaacatctccg

SEQ ID NO: 226519 - DNA, 559 bp, Glycine max
atctctttcaaacttcagatctatttcttcatcggttgttcaagtaaatggccttcgtcaccactgctgaagtgtgtgatgcgaacccccagttaattttgagtggggagcttcgtgcccttcagccagtttttcagatttacggtcgtcgacaggtcttctctggacctatagttaccttgaaggtgtttgaagacaatgttttggttcgtgagttccttgaagagaaaggcaatggaagagtgcttgttgttgatggaggcgcgagtttacgctgtgctatattgggtggcaaccctgtggtacaagctcaaaacaatggatgggcaggtattgttgtgaatggatgtataagagatgtggatgagatcaatggttgtgatattggagtgagagccctagcttcccatcccatgaaagccaataaaaaaggcatgggagagaagcatgttcctgtaaatattgctgggacaaggatcagtgatggggattggctctatgcagacactgatggaattctgatctctcgaacagagctgtctgtttgatttcaatcatg

SEQ ID NO: 226520 - DNA, 522 bp, Glycine max
cacactgttgctgctgtagctgattgtttttgcctggctaaagatgctggtttcaaggttgttgctcatatgatgcctgatcttccaaatgttggtgttgaaagggacatggaaagtttccgggagttttttgagagtcccttgtttagagcagatgggcttaaaatatatcctacacttgtaattcgtggaactgggctttatgagctctggaaaactggcaggtatagaaactatccaccagagcaacttgtggacattatagcaaggatccttgcaatggtacccccatggacacgtgtttatagagttcagcgggatattcccatgcctctggttacctctggggttgagaaaggaaatctgcgggagctggcattagctcgaatggaagacctgggattgaaatgtcgtgatgttcggaccagagaagctggaatccaggatattcaccaccaaattaagccagaagaggtggagcttgttcggcgtgattatatggcaaatcagggttgggaaaca

SEQ ID NO: 226521 - DNA, 404 bp, Glycine max
gaaaaagaaaaaagcgatcataggttcacttcggccttatccagtttagggcttcggttgtctaccctatctttcacgtatcgaaaccttaaatttacgatcaggtctgagcaatctggctggtacaacctttggtcttagtgagccaagtcctatgtctgaattagacgatcaaattgctactgccttcgatccttttgctgatgcacatgctgatgactcgggtgctgggtcaaaggagtatgtgcatattcacgtacagcagcgatatggtaggaaaagcctgacaaccgttcatggattgaaaaaggaattcagctataacaagatacttagagacgtcaagaaagagctctgttgcaatggaacagttgctcaggacccagaactaggacaggttattc

SEQ ID NO: 226522 - DNA, 462 bp, Glycine max
  unsure (1)..(462): unsure at all n locations
catttccatcttattagggtttctttccatggattccgattcttggatttccacgcgcatgtcgtcctcttcacgccgctatcattcgcgatctgatctgtacgtggaggagagtgaagggagcgatgatttcagggcggagtttctgtgccctttctgcgccgaggattacgacgtcgtttccctctgttgccacattgacgaccaccaccctatccaagccaaaaacggggtgtgtcccatttgtgggaagaaggtgggattggatctcgttggacatattactacgcaacatgggaacttcttgagggtgcagcgcaaaaggagggtcacgaaagtaggctctggttcaacaatgtctatattgagaaaagagttacgagaaggagccttgcactcccttcttggagggtgttcatacttagctttctgcanttctgagcctgatcctctgtgatcatc

SEQ ID NO: 226523 - DNA, 545 bp, Glycine max
  unsure (1)..(545): unsure at all n locations
gagagaatgggtttatcactcttacggtgggttctgccgctgactctgttgctcacctgcgccctaggtttccaatcggacgagcttctcctcgacgacgaagagttcggcatcgaaggaggacgaacctcctttgattccgattcgcatccaccttccaccgcctccacctcgaggaagaggctttccgactcctcctccgattccaagatccagttccctctccaacacgctttcggcgactccgatttctccgacgccggcaacttctccgctcgcctcaagacttggagccacggcgcccagacgctgacgaagctgcggtttaagcgtgatcttttgactgacgttgagcagaggaaatttaaagagctgttgcgagaagatgatttctataggattagactgccgtccaatgttttgagtcctcccggccgggaatatattatttcttcagtgaaagcacgatgtcttccangggatggattggaggagcattttgtaatacatatggaaggtgttaacatcttggctgtcagttatgg

SEQ ID NO: 226524 - DNA, 580 bp, Glycine max
  unsure (1)..(580): unsure at all n locations
atccaatccccgaagcccttcaccgcattgcaaccatgtcgaggagaaaggtcagagagccaaaggaagaaaacgtgactctgggcccagctgttagagatggtgaacatgtctttggcgtcgctcgcatctttgcctccttcaatgataccttcattcatgtcactgatttgtctgggagggaaacgcttgtccgcatcactggtggaatgaaggttaaggctgacagagatgaatcgtctccttatgctgctatgcttgcagctcaggatgttgctgccagatgcaaggaacttggcataactgctcttcatatcaagctccgtgccactggtggaaacaagacaaagacacctggccctggtgctcaatcagctcttcgtgcccttgctcgttcaggaatgaaaattgngtcgtatagagngatgtgactcccattccttcggatagcactcgtagaaagagtggtagaaggggtagaaggctttaaacttcttgtggtatatgtctggagttgctatattntaatttccatgctagacagaattgtggcattntgaaattntgcttaaattaatat

SEQ ID NO: 226525 - DNA, 583 bp, Glycine max
atgacatgttaatggactatcagggtgcaactgcagctacagcaaatgcatcagttgctgaacgtgtgatcgagcctacacttgtgatgtttgaggttcatgttcccccatcttgtatgcttgatggtgttcattcacagcacttttttggaactggtgtcataatttatcattcccaagatatgggattagttgcagttgacaagaatacagttgcaatatctgcttctgatgtaatgctatctttcgccgccttcccagttgaaattccaggagaggtggtatttctccatcctgttcacaattatgcccttatatcatatgatccctctgcattgggacctgttgggggttcagttgttcgtgctgcagagttacttccagagccagcattacgccggggggattctgtttatcttgtggggttgagtagaagtctgcaagcaacttctaggaaatcagttgttaccaatccttgtgctgcattaaatataggatctgctgattcccctcgctatagagcaaccaatatggaagtaattgagcttgatacagattttggcagtacatttttcggtgtgct

SEQ ID NO: 226526 - DNA, 399 bp, Glycine max
cggctcgagccaagacaacacactctcatatataaaagagtgtctctgataatttgatctttgtttcttctctttctctcctttgagatttttcagcaccccaccaaggttttgtccgaaaagcttgaatttttcgcctaccccttacaatgatctcttcattgagacaacctgttgtagggatcagtggttctgatcttcttttgaggcaaagacatgcaaccctaattaaggcaaggtcctttttaccctctttgtcaagagaaaagggtcaaagatctcttgtttcagttcaaaagccacttcacattgctgcttctcttggtgttggaaattttgtgtcagtgaagagtgatgatgacaaaggggtgatttggtgaagtgtgaggcctatgaagc

SEQ ID NO: 226527 - DNA, 527 bp, Glycine max
  unsure (1)..(527): unsure at all n locations
gcaaaaaggacacaccgtttcatagtttttaagattgaggagcagcagaagcaggtcattgtggagaagcttggtgagcctgcccagggctatgaagatttcactgccagccttcctgctgacgagtgccgttatgctgtttatgattttgagtatctgactgaagggaatgtccctaaaagcagaatttttttcattgcgtggtcccctgacacatcaagggtgaggagcaagatgatttatgcaagctccaaagacagattcaagagggagctggatggaattcaagtagagttgcaagcaactgatcctactgagatgggtcttgatgtgttcaaaagccgtgccaactaaaatgattatataaaatagtaggctttctggtgggagcagcacccctgaagccttagttactcatatggaaaatatcctagtttgtgggatggtcaacttgggtagttatggtcccaaactctcaantttccaagttgtggcataaaattctattgcaccttttgacaagcttt

SEQ ID NO: 226528 - DNA, 406 bp, Glycine max
atccgatcctctgtcctctcgaagctttcatcgttcaacatattctcaccatctcagtcatgggcctgctatcttgttttaggtctaccgtcctgagaaaatgttccaaaggaagctctggcatgtcaagattcctgtatacgaacaattttcaacgaaacttgatttcgtctggtggcaatgaatcgtattatgggtattttaacaggagatcatacacttcactttatatgggaactggaactgtgggtgggattacaagtgctagaatcagggtgccacatgtatgatgtgaaggattcatgtgctcaagtcatctgtcaatcactcaaagaaattcaagattgatccattctactagcaagattgttccaaattctgaaattcagaatataactactgagat

SEQ ID NO: 226529 - DNA, 364 bp, Glycine max
tttctctcttcgcctggtcttggcatcttcgcagcaccaccacccaccaccctgcttagaccaggtcctctctctctctagagagaaagagaagaaagaaaaaaaaaaacagctagcattaagcttttaatagtgagacatggctcaacccagttccaacggggatctgaataataaccagcagcagggtcaggttcagcaacaacagcagcagggtcagtgggcggcggcggcgcagccgcatcagtatcagcagcaatggatggctatgcagtacccggccaccgacatgggcatgatgcaccaacagatgttgatgtacccgcagcattatatgccctatgctcaccctcattacccgacg

SEQ ID NO: 226530 - DNA, 543 bp, Glycine max
  unsure (1)..(543): unsure at all n locations
caacagcacaaagcgggttactgtctgttcaagctaccatctctctctctctttcttagtgcctccttgccagaagttaaaatggcccaagaaactttcctattcacatctgaatcagtgaacgaggggcaccctgacaagctctgtgaccagatctccgatgctgtgctcgatgcatgcttggagcaggaccctgacagcaaggttgcctgtgaaacctgcaccaagaccaacatggtgatggttttcggagagatcacaaccaaggccaacgtggactatgagaagattgtgcgtgacacatgcaggaacattggttttgtctctgatgatgttggtcttgatgctgacaactgcaaggtcctcgtcaacattgagcaacagagtcctgatattgctcaaggtgtgcacggccacctcacanagaggcctgaggagattggtgctggtgaccaaggtcatatgttcggctatgccactgacgagactcccgagctcatgcccttgagccatgtcctttgcacgaagctcggtgccaagctc

SEQ ID NO: 226531 - DNA, 523 bp, Glycine max
caacagcacaaagcgggttactgtctgttcaagctaccatctctctctctctttcttagtgcctccttgccagaagttaaaatggcccaagaaactttcctattcacatctgaatcagtgaacgaggggcaccctgacaagctctgtgaccagatctccgatgctgtgctcgatgcatgcttggagcaggaccctgacagcaaggttgcctgtgaaacctgcaccaagaccaacatggtgatggttttcggagagatcacaaccaaggccaacgtggactatgagaagattgtgcgtgacacatgcaggaacattggttttgtctctgatgatgttggtcttgatgctgacaactgcaaggtcctcgtcaacattgagcaacagagtcctgatattgctcaaggtgtgcacggccacctcacaaagaggcctgaggagattggtgctggtgaccaaggtcatatgttcggctatgccactgacgagactcccgagctcatgcccttgagccatgtccttgcca

SEQ ID NO: 226532 - DNA, 549 bp, Glycine max
  unsure (1)..(549): unsure at all n locations
ttttcctcaatgcctgttcacgcgcttccattttcaaaggactctccgccgcccaaacccaaggaggctcatttccggggtgtccgcaagcgtccctggggccgctttgccgctgagatccgtgacccctggaaaaagacccgaaagtggctcggcacctttgacactgccgaggaagccgccagggcttatgacgccgacgccagaacactccgtgggcccaaggccaagaccaacttctcctacatccttgctcccgctttccacctccctcccccggtgctcactactcccgaagcccatgccctggcccaagcccaagcccaggaacaactcgccagacaggtcgagttctgtggcccaccgtttttctttgcaactgatgtagcttccaccgcgccggtgagggtcgagtcaaggggtacaagttagagaatatcgcgggttttgtggtgagtaacgaggagcagaaagagaaaaatcagcccttcttatttgaccttaacctgcncgcgccgctcttctgagccgncggcggagaatgacggc

SEQ ID NO: 226533 - DNA, 598 bp, Glycine max
cctatggctcgtcactccttgctcttagccctcctcctcttcgccgccgtggccaccgccgcgatggcggtggccgcgtccgacgccgacgacatcctgatccgtcaggtggtgccagatgttggcgaagccgaagaggaggacaacctgctgaacgccgagcaccacttcgcgagcttcaaggccaagttcgccaagacctacgccaccaaggaggagcacgatcatcgcttcggcgtcttcaagtccaacctccgcagagccaggctgcacgccaagctcgacccctccgccgtccacggcgtcaccaaattctccgatctaactccggccgagttccgccgccagttcctcggcctcaagccgctccgcttcccggcgcacgcccagaaggcgcccatcctccccacaaaggatctcccaaggatttcgattggcgagacaaaggagccgtcactaacgtcaaggaccaaggggcgtgtggttcgtgttggtctttcagtacgacgggagcgttggaaggagctcattatctggccactggtgagctcgtgagccttagcgagcaacagctttgtggattgcgatcacgtgtgtg

SEQ ID NO: 226534 - DNA, 540 bp, Glycine max
gtagcctgcctgttcaagaaccaaaaaagatgacacaaataattgtagatgctttggagatcactggacagaggggcatcatcaataaaggatggggaggtcttgggaatttggcagaaccaaaggactctatatacttattggataattgccctcatgattggcttttcttgcgttgcaaggctgtggttcatcacggaggtgctggcacaacagctgcggggctcaaagctgcttgcccaacaaccatagttccttttttcggcgatcaaccattttggggtgagagagtacatgctagaggagttggtcctccacctatcccagttgatgagttttcacttcccaagttggttgatgcaataaaacttatgctggatcccaaggtaaaggaacgtgcaatcgaacttgcaaaggccatggaaaatgaggatggagtgacaggagctgtgaaagcattttttaagcagcttcctcaaaaaaaatcagagtctgatgcagatccgcaaccactggttttttctctgaagaagatgtttg

SEQ ID NO: 226535 - DNA, 530 bp, Glycine max
  unsure (1)..(530): unsure at all n locations
gcacataacaatggaaacgcagctttacgtgttttctctctagattctgctcttaaacgccgtcgttttcaaactctttttttccccttcgcttctctgtctttgtaaccgaaaggggggaaaatataattaacaccgatttcgcgaccaattcttcttctgcgttgaattgggacaacgagaaattggatctcagtttttggcaggaaataaaaattgcatttgagtgtaaaataacagagtatagtgtagggccttgttcttgatactgtgctaaatttgttggatggcggagaaatcatgcatcaagcgccttcagaaggaatatagagccctttgtaaagagccagtttctcatgttgtggctcgtccttctccaagtgatattcttgagtggcattatgtgttggagngaagtgaaggaacancctttgcaggtggatattactatggaaaaatcaagtttcctcctgaatatccatataaacctcctggaatcagcatgactacacctaatggacggttcatga

SEQ ID NO: 226536 - DNA, 506 bp, Glycine max
  unsure (1)..(506): unsure at all n locations
agaaaacagcatcgaacccgtcgtagcagaaaaacttgtcaccatggtttcttccgacaaggatccacgagaggatgtccttcaagcctggtacatggatgatagtgatgaagatcaaagactcccccaccacaaaaaaccccaaggagtttgtctcgttggaccaacttgctgaacttggagtccttagctggaaactagatgctgataaccatgaaaatgatccagagctgaagaagattcgtgaagagcgtggttacacctacatggatgtttgtgaggtctgcccagaaaagttgccaaattatgaacagaaaatcaaaagcttctttgaagagcatcttcacactgatgaggagatccgcttttgtgctgctggaagtggctattttgatgttagggatcgcaatgaagcttggattcgtgtgtgggtcaagaaaggaggaatgatcatcttacctgccggaatntatcatcgctttacgctagatgagagcaactacatt

SEQ ID NO: 226537 - DNA, 538 bp, Glycine max
cgcgtcgctgctccgtaccagttgcactgcataaatttgagagaaaactctgcaaacatgttggtttatcaggacctccttacaggtgatgagcttctctcggactccttccgttacaatgaaattgagaatggaatgctgtgggaagatgaggggaagtgggttgttaagggagcagttgatgttgacattggtgcacacccttctgctgagggtggagaacatgagggagtcgatgacgcagctgttaaggttgttgacattgtggatacattcagacttcaggagcaacccgcttttgataagaaacagtgtgttaccttcatgaagaggcttatcaagaatgtgactcccaagctcgatgcagagaaacaagagttgtttaagaagcacattgagggagcaactaaatacctgctctctaagattaaggatttccagttttttgttgtggagagcatgaatgatgatgcttgcttggtctttgcatactacgaggatggtgctgctgatccaacattcttatactttgcatatg

SEQ ID NO: 226538 - DNA, 478 bp, Glycine max
ctcgagccgaatcggctcgagcccgatttaagaagaaccgcaagaagcgcggccacgtcagcgccggccacggccgtattggaaagcaccgcaagcaccccggcggccggggaaatgccggcggcatgcaccaccacagggatcctcttcgacaagtaccacccggggttcttcgggaaggtagggatgaggtactttcataagctccgcaacaaattctactcccccatcgtcaacatcgacaagctatggtctctgataccccaagacgcgaaggacaaagccctaaaatcgaaggacactgcccctctaatcgacgtcactcagcacgggtacttcaaggttctcggaaaaggtgtgctgccccaaaaccagcccattgttgtgaaggccaagcttatttcgaagatcgcggagaagaaaatcaaggaggcggtggtgctgttcttctacggcttaggtaattttttttccatac

SEQ ID NO: 226539 - DNA, 435 bp, Glycine max
  unsure (1)..(435): unsure at all n locations
gggtcctcggagttcgtgaagctgaggtaccacatgggaccggtcctcacgaccaacatcactgtccacaccatctggtacggcaagtgggagcggaaccagaagaagatcatccgcgagttcataaactcaatatccgcggcgaactcggcgcacccctccgtggccgggtggtggcgcaccgtacagctctacacggaccaaaccggggccaacatttcaaaatcggttcgactcggcgaggagaagaacgaccggttctattcccacgggaaatccctgacccgcttatccatacagactgtgataaagagcgccatcacagccaaaacgaggccgttgccgatcaaccctaagagtgggttgtacctcttgctccnggcncatgacgtgtacgttcaggatttctgcacgtcggtgtgtgggtttcactac

SEQ ID NO: 226540 - DNA, 415 bp, Glycine max
ggggaattgtctcaacaaaatattaaagatcgctattatggggtgaatgatccagtggcttcgaagctacttggcaaggcaggagagatgtccactctggaggctcctgaggatgagagcattataactctttatgttggtggactcgatgctcgggtcactgagcaggattggcgggatcacttctatgcccatggagaaattgaatccatcaaaatggttctccaacgggcttgtgcttttgtaacatatacaaccagagaaggtgcagaaaaagcagtagaagaactctccaacaaaattgttattaagggcctaatgctaaagctgatgtggggcatgcctaacacaacgaaacccgagtctgacggttctgatcaagcaaggcacgcggcatctgtagctcatagtggat

SEQ ID NO: 226541 - DNA, 499 bp, Glycine max
  unsure (1)..(499): unsure at all n locations
gtggtaccagcagcagagcttgtatacgtcgccgcttcagcgtagcaacatgatcattcccgagaagaaccgtaaagagatctgcaaatacctcttccaagagggagtttgctttgcgaagaaggacttcaatctggcgaagcacccggagattgatgtgccgaatctgcaggtgataaagctgatgcagagcttcaaatccagagagtacgtgagggaaacatttgcgtggatgcactattactggttcctcaccaacgatggaattgagttccttaggacttacctcaaccttccatccgaaattgtccctgccactctcaagaagcaggccaagcccgccggaagaccattcggtggcccacccggatgatcgccccaggggcccacctcgctttgacggagagaggagattcggcggtgaccgtgatggataccgtggaggtccacgcggacctggcggtgatttcngtgaccagggtggagctcctgctgacta

SEQ ID NO: 226542 - DNA, 531 bp, Glycine max
aacccgggttcacccggggagacgcccgatcacgccgtcgtcgccgccgacggctacgcctccgaggacttcgttcccgggtcttcttctagctcccgtgaaagaaagaagggtgttccatggactgaggaggaacatagaatgtttttgctcggattgcagaagctgggcaaaggcgattggcgtggaattgcaaggaactatgttatatcaaggacgcctactcaagtggccagccatgctcagaaatatttcatcaggcacagcaatgtgtccaggcgaaaaagacggtccagcttgtttgatattgttgcagatgaagcagctgacactgcaatggtacagcaagacttcttgcctgctaatgagttaccaactgaaacagaaggcaataaccccttgcctgctcctactaccctcgatgaaaagtgtgaatcaatggattccacaaactcaaatgatggagagcctgccccatcaaagccagaaaacacacattcatcttatcctatgtcatatgctgcgtattat

SEQ ID NO: 226543 - DNA, 563 bp, Glycine max
gcacataacaatggaaacgcagctttacgtgttttctctctagattctgctcttaaacgccgtcgatttcaaactctttttttccccttcgcttctctgtctttgtaaccgaaaggggggaaaatataattaacaccgatttcgcgaccaattcttcttctgcgttgaattgggacaacgagaaattggatctcagtttttggcaggaaataaaaattgcatttgagtgtaaaataacagagtatagtgtagggccttgttcttgatactgtgctaaatttgttggatggcggagaaatcatgcatcaagcgccttcagaaggaatatagagccctttgcaaagagccagtttctcatgttgtggctcgtcctttcttcaagtgatattcttgagtggcattatgtgttggaaggaagcgaaggaacaccgtttgcaggtggatattactatggaaaaatcaagtatcctactgaatatgcatataaaccttctggaatcagcatgactacacctaatggacggttcatgacacagaaaatgatctgtttgactatgagtgac

SEQ ID NO: 226544 - DNA, 559 bp, Glycine max
gttcagggttgggacgacatgctacgccttggaataaatacagccataagtgttcgtgtctccaatacgcttggcatgtcgcatccaagagcagccatatactctttctgtgtgacaatgttccagtctctcctccttggtattcttttcatgaccgtaattttctttagtaaagatgagtttgccaaaatctttaccgacagtgaggatatgatactagctgctgctgatttagcataccttcttggtgtaacaattgttctcaatagtgcttcacaggtgatgtcaggtgtggccattggaagtggatggcaagttatggttggttatataaacctagcatgttattacattgttggactccctattggaattttccttggtttcaagctgcatttaggggtcaagggtctctggggaggcacaatgtgcggcagtattcttcagactttagtcctctttacaattatttggaagaccaactggtccaggaagtgggacaaacagctcatcgcatgcgaatatatgtggagcaataacgggactagtcctgtgtgaa

SEQ ID NO: 226545 - DNA, 546 bp, Glycine max
  unsure (1)..(546): unsure at all n locations
gtttcttgagaatgagataaaggacaagaagttctttggaggagaggagattgggttggtagatattgctgctgtctacatagcattttgggtccctatggttcaagaaattgcagggttggagttattcacaagtgagaaatttcctaagctccacaattggagccaagaatttttgaaccatccaattgtcaaagaaagtctgccccctagagatcctgttttctcctttttcaagggtctctatgaaagcctttttggttcaaaatagatttgatgatgtggtgtgagacttagtatttctaagaattatgtgtttgttaaaggcttctatgaaagcctcactgcttcaaaatagattcatgtatgtgagactcagaatctctggggaaaattgtgtgtggtgtggactacttgttntgtttgtcattgagctatatcgctgttaattaggattttgtttcaaaatgatgcttataagttgtaatctaggatttctccctttgaaatcctaggttgttcttgacatttgctatttcaaagaat

SEQ ID NO: 226546 - DNA, 428 bp, Glycine max
gagctgttgaggattgtcaagcagaggaaggtggaactagctaatggaatgtccacaccaacacaagacattttgtctcacatgctaatatattgtgatgagaatggacaatatttggctgaacatgatattgtcaacaaagatccttggcttgctgataggtagccatgaaaccacaagtactgtttgcactttcgttgtcaaataccttgccgagctccctcaaaatatttatgaaaatgtctatcaagaacaaatggcgattgcaaaatccaaagctccaggagagttgttgaattgggatgacatccagaagatgaaatattcatggaatgtagcttgtgaagtaataaagcttaaccctccagcccaaggagcttttaggggagccatcaatgactttatcttcgatggattctcaatttcaa

SEQ ID NO: 226547 - DNA, 494 bp, Glycine max
  unsure (1)..(494): unsure at all n locations
aaaacataagcaccggtcttttctctccgaaatccccatctcccttcacttctgagctctggacgagatcccagatctcaccatctttcacgcactcttccatcagattcaccctttcgtttaacgcaaactcataacttgaagggttaatggctgctccaccggcaagggctcgtgccgcttacgattatctcataaagcttctcttgatcggtgacagcggtgcagggaaaagttgcctccttctgcgtttctccgatggttctttcaccactagtttcatcacaactataggcattgattttaagataagaaccattgagcttgatggcacacggatcaagctccaaatttgggatactgcaggggcaggagcggcttcggacaattacaactgctntactaccgtggtgctatgggcatattgctagtctatgatgttacagatgaagcatcatttaacaatatcaggaattggattcgcaatattgagc

SEQ ID NO: 226548 - DNA, 513 bp, Glycine max
gaatttgccagagaattagaagaataaacataataccccagatggcttcaaaaacttgttcctcccttgcccttttcctcacactcaacctcgttttcttctcacttgtctctgcatgcggttatacaccatgccctggtccaaacccaaagccaaggcccaaccccaaccctaaccctaaccccagcccaagtggctcgtgcccccgtgacgcactcaaactaggtgtatgcgccaatgtgctaaacttggtgaacgccactttgggtcaaccaccagttaccccttgttgctcccttctcgatggtctcgttgaccttgaggctgcagtgtgcctttgcactgctctcaaagcaaacattttgggcatcaacctcaaccttccgatctcactcagcttgcttctcaatgtttgctcaaggaaagccccacgtgatttccaatgtgcctactaagcttatactataagtataacatatcatcttaaatcttcttttgcttcgggtttgctct

SEQ ID NO: 226549 - DNA, 605 bp, Glycine max
  unsure (1)..(605): unsure at all n locations
tttgagctctgtttccaagtttttgagttatggcatcgaaacgcatcgtgaaggagctcaaggatttgcagaaggaccctcctacatcctgcagcgcaggtcccgtggcggaggatatgtttcactggcaggcaacaatcatgggacctcctgatagcccatatacaggtggcgtattcctagtttcaattcattttcctcctgactatccattcaaaccaccaaaggttgcatttaggactaaggtattccacccaaacatcaatagtaatggaagtatatgccttgacattctaaaagaacaatggagcccagcactaaccatttctaaggtccttttgtccatttgctcattgttgacggatcccaaccctgatgacccgcttgtgcctgaaattgcccacatgtacaaggctgacaaggctaagtatgaagccactgctcgtagctggacacagaagtatgccatgggataatcatgctcctnctttagctgctcactgtagctgcgcaatcatgatttatgaagaaacaagatatacttttaatgaatgttntgtcttttttttgtcagtggaaatcaaccatgggtagggaattgatga

SEQ ID NO: 226550 - DNA, 644 bp, Glycine max
  unsure (1)..(644): unsure at all n locations
ggtttttctgcatgtatctcttagacanccngannnntnnttnnnnnnncnnnnnnnnnnnnnnnnnntnnngannattggnacataggtnttttataaaagaattatggaagctctcaagaccatcttcttagccctttctgttgtcttagcttcagcattgtattcagtcaatgccaaaatccaggagcatgagtttgttattcaagcaacgccagtgaagaggctgtgcaacacccacaacactatcacggaatggccaattccctggcccaacattggaagtcaacaatggagacactttggtcgtcaaagtcactaacaaagctcgttacaacgtgaccattcactggcatggaattcgacaaatgagaacaggatgggctgatggaccagaatttgtgactcagtgccctattcgtcctggagaaagttacacctatcgttttaccattcaaggacaagaaggaacactttggtggcatgctcatagctcatggctaagagcaacagtttatggtgctttaatcattcaccccagggagggagaggcatatcctttcactaagccaaagcgcgagacaccaattcttcttggggagtggtgggacgcanacccgatcgatgttgtgagacaagccaca

SEQ ID NO: 226551 - DNA, 544 bp, Glycine max
  unsure (1)..(544): unsure at all n locations
ctcgagccgcttcgaaacccccaacggcaaaatcttcacccagtccttcctccctctcaacctgcaaccccaccaagtcaaagccaccgtctttatgacccacggctacggctccgacaccggctggctcttccagaaaatctgcatcaacttcgccacctggggctacgccgtcttcgccgacgacctcctcggccacggccgctccgacggtctccagtgctacctcggcgacatggacaaaatcgccgccacctccctctccttcttcctccacgtccgcaatagccacccctacaaaaacctcccggcattcctcttcggcgagtccatgggaggactcgccacgctactcatgtacttcaaatcggaaccggacacgtggacgggcctgatgttctccgcgccactcttcgtgattcccgaggacatgaaacccagcagggtacatttgttcatgtacggtctcttgttcggtctcgccgacacgtgggcggccatgccggattacanaatggtcggaaaggccatcaggatcccgaga

SEQ ID NO: 226552 - DNA, 551 bp, Glycine max
taaccatattcttttccaaacccctcaaactaactatatctatccattaagggatattcaatgcaattagcgaatgagagaatgaagagccggtggttcgtgtggcttttggcggtactaggcatcatcggagccacactcttcatagtgagcttgatccaaacctcggagaacaacttcctatgttccataacaagaacgatgcagcagcagcagcagcagttcaccgatggccccacatcgatgcaactcaaagccatcctccactacgcgacctctcagattgtccctcaacaatctctttccgagattacaataaccttcgacgtgctccaaagcctccaccgccccgccaacttcctcgtgtttgggctgggccgcgattctctcatgtgggccagcctcaaccctcacggcaccacgctgttcctcgaggaggaccctaaatggtttcgggatcgtcaccaaggaggcgccctaccttcgggcccacacggtccgttaccggacacagcttcgagaagccgacagcctcatgtcctcgtaccgat

SEQ ID NO: 226553 - DNA, 543 bp, Glycine max
  unsure (1)..(543): unsure at all n locations
gaagctaaattactaggaaaatctgctcctcttgactttgttcatgacaaattcaagaggagcagattgaagctaaattactaggaaaatcttcttttgagattgagatacaccaaagtctttgtggcgatggtgaacgtgtctattgtgaccattgtgctacttcaattattgaccttcatagaagctgccccaactgttcctatgaactctgccttagttgttgccaagaaatacgtgatggaagcattacaccccgggctgagctgaagttcccatatgtaaataggggctatgattatatgcatggaggggaccctctacctgtgccttgtgatttagagacatcagaaggtcatattgagccgtctactgtgtggaaggctaagagtgatggaagcattagttgtgcgccaaaggagttgnggggctgcggtagtgctgtattggagctgagatgcatctatccagatgggtggatatctgacttggaaaccaaagcttgcaatatgctgaaattatgggaaattaaacacaccactc

SEQ ID NO: 226554 - DNA, 581 bp, Glycine max
  unsure (1)..(581): unsure at all n locations
gttttttctctcacctgaaaatgtcttgctgcggtggtaactgtggttgcggaagcgcctgcaagtgcggcaacggctgcggaggctgcaagatgtacccagacttgagctacaccgagtcaaccaccaccgagaccttggtcatgggagtggcaccagttaaggctcaattcgagagtgctgaaatgggtgttcccgctgagaacgatggctgcaaatgtggagctaactgcacctgcaacccctgcacttgcaagtgaggtgttggagagctaaagcttcaagcagaaatggcccttagaaataatgataaaaactatatgtagtttcaaaacttcaaaattatgtagtatgtattatgttgcactctggtgttttgtgtctaaacaaacacccttagaataaagtggtcatttcttgcccttgagcaagttcaagtgttttggacttgtgatgggtgtgttaaggtcatggntgcctttcttttatatatatatatatatataaatgtttggtaattggtcgcttctgtataaagttccgctagttaatcttgaatatgaatctctgcttataatatt

SEQ ID NO: 226555 - DNA, 422 bp, Glycine max
ggcataatggaaatggtcatgccattggggatgctcaacatccagatagggcacatgtggctgtgagaaaggagcttcatactcctgcatctgaacgatcttgcactcatttggaatttgacatttcaggcacgggagtacatatgaaaccgtggaccatgttggtgtttactgtgagaatttgcctgaaactgtggaagaggcgataaggttaataggtttgtcaccagatacctatttctcagtccatactgaagatgaggatggaaaaccacttggtggaagctccttgccacctacattcccaccctgtactctaagaaaagcacttgcacaatatgcggatgttttgagttcacccaaaaagtctgccttgcttgccttagctgctcatgcatctgatccatctgaagctgatcgac

SEQ ID NO: 226556 - DNA, 442 bp, Glycine max
cttgcatcgggtcagggtacagaggcatcacatgtaaacgaggctatagatctggcagaaaaatttgcgtcgatgaaattgagttaatggtgtatttgcagtatatccttcctggggcgtaagcatgatatggatctttcgtttggtggtataatcataatcatacagaagggaagggcacttgaagtaattattagatccggatgagttgaacaaatttctaatttagtgcctgaatatttttttgctctgatagattatgaagatattttgaaattttaaaatgtccatcaacaatctctttccgagattacaataaccttcgacgtgctccaaagcctacaccgacccgccaacttcctcgtgtttgggctgggccgcgattctctcatgtgggccagcctcaaccttcacggcaccacgctgcggctataagatgacc

SEQ ID NO: 226557 - DNA, 460 bp, Glycine max
cgtgcatctgcttttgctaaccagtcaatctatctaaacgtagccatgcatgggacatcaatgtaatgagcgaatgagataatgagatgccggtggcgcgggcgactcttgctggtgcgagacctcaagctggctatactattaagcgtgagcttgatactaatctagaagcacaacttgctatgggccataactagaacgctgcaactgcagcatctgactatcaccgaggctgcaacttcgatgcatctgatagacatccaccactacgcgacctctcagaatgtacctgaacattctcttatcgagatgacaatatccttcgacgtgcttcaaacgctgcaccgcctagccgactgaactgcgtgtgtgctgggccgcgagactctcatgtgggccagccttaacctacacggtaccacgctgatacttgaggaggaccctgtatggtttgggatcg

SEQ ID NO: 226558 - DNA, 444 bp, Glycine max
tgtgactcgttcttcttcgtcgttatcttcttcttttgttgcttgggtgtttgttttttctctcacctgaaaatgtcttgctgcggtggtaactgtggctgcggaagcgcctgcaagtgcggcaacggctgcggaagctgcaagatgtacccagacttgagctacaccgagtcaaccaccaccgagaccttggtcatgggagtggcaccagttaaggctcaattcgagagtgctgaaatgggtgttcccgctgagaacgatggctgcaaatgtggagctaactgcacctgcaacccctgcacttgcaagtgaggtgttggagagctaaagcttcaagcagaaatggcccttagaaataatgataaaaactatatgtagattcaaaacttcaaaactatgtagtatgtattatgctgcatctggtgttttgtgtctaaacaaaca

SEQ ID NO: 226559 - DNA, 403 bp, Glycine max
gactaactcactcactcactgacttactctcatgcttaatgattgattacctagcctggtgttagattgaggggcaggagcaagacctgtcgctggcatcgaacaatttcccaggaagacagccgactgccacatcggcgcaaagccaagacatcagctgggtctgcctatagccgaggccatcagccgactggctacccgagggcttctagcggatggacatcatacatagcgaggatagcctagcttgccgccactagaccgatgatctacatacccgtgttagccgatatgggagtctccagtgctaagtctcagtgtagtgccgatgtgacactccgaatgaatctcgcctgaaggagcatgatctgcagcctctgtgactgagcccctgtggtactat

SEQ ID NO: 226560 - DNA, 453 bp, Glycine max
gtcgtgcaccgcagggaattctattagcacagacagtagtggtgcgaccacaattgcccttaaaagtgcaggcactcattacttatatgttctgttcctggacattgtctggcggatgaaacttgcgtcactgtcaatcaggaaaagcctctgatgccacacccactacttccactactaccgccactaaatcaaactcgtcttcagcgagtagtgtctcaccaattgttgctatgttcattgtttcctcgatctcttactatgttttgcgtatgctataagtttccccactcagtcaggacagaggcagtgctttctttctttcttatattattatcactctgttttctggtttgatttatctctgagtactaatccaggtcacttgttgtcgagtattaattatctaggcaatctcccatgtttgactttcattcttttttttaatatatg

SEQ ID NO: 226561 - DNA, 473 bp, Glycine max
  unsure (1)..(473): unsure at all n locations
cttggactcagtgtgaaccttgtgctcgttcttgctacaagcagcaagatgtaatatttgatccatccaagtctacatcatattccaatattacatgtacatctgccctctgcactcagctctctactgctacaggaaacgatccaggatgttccgcatccaccaaggcatgcatatacggcatccagtacggcgacagttccttctcagttggctacttcagccgcgagcgcctcaccgtgaccgccaccgacgtcgtcgacaacttcctcttcggctgcggccagaacaaccagggcctcttcggcggctccgccggcctcattggcctcggccgccaccccatctccttcgtccaacaaactgccgccaaataccgtaaaatcttctnctactgcctcccctncacctncagctccaccggccacctctccttcggccccgccgccacaggccgctacctcaagtacacc

SEQ ID NO: 226562 - DNA, 496 bp, Glycine max
cagatctgtgtcattcatttcttcttctagccatggacgagaagctcatacagcgcttagaatctgcggtgtcgcgcttggagtcgctatccgccggattccacccctccgccacacaatccggcggcgccgacgctcccgatgcggcgctcgatccctccatcgtcgccttcgccgatctgatcgaccagtacgtcggtagggtttccggcgctgccgaggttatcggtggtcaagtcttggatgtcaccaaactggtgcaggaagctttcaatgttcagaaagagcttctgattaagctcagacagactcagaagcctaaccttgctgggttgtctgaatttctgaaaccattgaatggaagtgatcacaaaagctaccaaattgacagaaggaaggagatctgattcttttaatcacttaaaggctgctgctgatagtctctcggctgtagcatggattgcatatacagggaaggattgtggtatgagcatgc

SEQ ID NO: 226563 - DNA, 563 bp, Glycine max
  unsure (1)..(563): unsure at all n locations
attatgtttacgaaaggcttattcagactgggaagaaaccaggtttctttcagctacttgccactcagaccgttagtgccgtttggcatggcttgtaccctggatacataatattctttgttcagtcagcattaatgattgctggttccagagtgatttacagatggcagcaagccgtgcctccgacaatgtctctggttaagaatgtgttggtgtttacaaattttgcttatacacttttggttctaaattactcctgtgttggtttcatggtgttaagtctgcatgaaactcttgcatcatatggaagcgtgtattacattggaactattgttcctgttgttatgattcttcttggtaaagtaattaaacctggaaagcctgccagatctaaagctcggaaggaacagtgaggtgacaatgctgtttattcttgttggaatttttgaaatcagattaagataatgcggcagaagggtttctagttccacaagttttctgggcctggttttcacattgntgtaacagnctctttggtcttgaaatggttgggcgctttatac

SEQ ID NO: 226564 - DNA, 603 bp, Glycine max
  unsure (1)..(603): unsure at all n locations
gacccttgttcactatgaatcaaaccctcacaaaggacaagctgtgttgtatgttggagacctctcttatgcagataatcacccaaatcatgataacgttaggtgggatacgtggggaagattcgtagaaagaagtactgcttatcaaccttggatatggactacagggaaccatgaacttgactatgctcctgaaattgatgaaacagaacctttcaagcctttccgccaccgttactatgtgccttacaaagcatccggaagtactgaacccttttggtattctgtcaagatagcttcggcacacatcatagttttggcttcatattcagcttatggcaaatatactccccaatatgaatggcttgaggcagagctaccaaaggttgatagaaccaagaccccttggttgattgttcttgtgcattctccatggtataatagttacaactatcattacatggaaggggaaaccatgagggtaatgtttgagccttggtttgtgaagtacaaggttgatgttgtgtttgctggtcacgtncatgcctatgaacgaagtgaacgaatcttcacactggatacaacattaccaatggtcgatgc

SEQ ID NO: 226565 - DNA, 502 bp, Glycine max
gcaacagcaacagcggcgacgcgattaactcgacgctgctccacgggaagtacgagctggggcggctgttaggccacggaagcttcgcgaaggtataccacgcgcgccacctaaacaccggaaagagcgtggcgatgaaggtggtgggaaaagagaaggtggtgaaggtaggcatgatggaacaaatcaagagagagatctcagccatgaacatggtgaagcacccgaacatcgttcaacttcacgaggtcatggcgagcaagtccaagatctacatcgccatggagctcgtgcgcggcggcgagctcttaacaagatcgccagaggccggctccgggaggaaaccgccagactttacttccaacaactcatctccgcggtggacttctgccacagccgcgtgcgtcttccaccgcgacctcaagccggagaaacctcctctcgacgacgatggcaacctcaaggtcactgacttcggcctcagcactatcttcgagcatct

SEQ ID NO: 226566 - DNA, 582 bp, Glycine max
gcaacagcaacagcggcgacgcgattaactcgacgctgctccacgggaagtacgagctggggcggctgttaggccacggaagcttcgcgaaggtataccacgcgcgccacctaaacaccggaaagagcgtggcgatgaaggtggtgggaaaagagaaggtggtgaaggtaggcatgatggaacaaatcaagagagagatctcagccatgaacatggtgaagcacccgaacatcgttcaacttcacgaggtcatggcgagcaagtccaagatctacatcgccatggagctcgtgcgcggcggcgagctcttcaacaagatcgccagaggccggctccgggaggaaaccgccagactttacttccaacaactcatctccgcggtggacttctgccacagccgcggcgtcttccaccgcgacctcaagccggagaacctcctcctcgacgacgatggcaacctcaaggtcactgacttcggcctcagcactatctccgagcatctcaggcacgacggcctgctgcacactacgtgtggcacgccgggctacgttgcgcctgaggtcatcggaaaaagaggtacga

SEQ ID NO: 226567 - DNA, 483 bp, Glycine max
cgtttatcactctcatggtgtagcaagaacatgaataacttggtcctatctcttgttcctaaattcgcaaaactgcaaactctaatcctccgtcaagacaagcctcaactagaggataatgctgttgagactattgcaaaatgctgtcatgaactgcagatcctggacctcagcaaaagtttcaagctaactgatcgttcactctatgagctcgcccttggttgtcgcgatcttacaaaactcaacatcagcgggtgttcagcatttagtgacaatgctctggcttaccttgccagcttctgcagaaaactgaaagttctaaatctttgtggatgtgttagagctgcatccgatactgcattacaggctattggacaatactgcaatcagctacaatctttgaaccttggatggtgtgataatgttggcgatgttggagtgactactttagcatatgggtgtcctgatctctagatagttgac

SEQ ID NO: 226568 - DNA, 417 bp, Glycine max
  unsure (1)..(417): unsure at all n locations
gctggaatttgctgtggtgttgttggagaaggtgacactccggctccactcgagcccactcctcgcccctccaggcgccggagtttggacatcttacctttaaaatatatcgccgacatgcccatgccgccgccggaggctttacggaagcgtcccaagctcaacctcagggactgcgataacgcaattgaaaattgcgacgaatccactggacacaaggtgacgaagaaggaatccaaagtagactacgacgacgacgtcgtttcggaaactaagaacgtaactgtttcggaagttgaagaagaatctcccaagttcggcgtgacgtccgtttgcggcaggagaagagacatggaagattccgtctcggtgcggccttgcttcacccaaggccttcactacttcnggcgtcttcga

SEQ ID NO: 226569 - DNA, 553 bp, Glycine max
ttcacatatcatcatacttagatagtcagatacatcacccaataattaaattaaatacatgctagcactttaacagtactcctttctctaatatctctctcatattttcctttctgcggatattcagctaattaaactaagtcactaagatgactgagggaaagctagttgaagctgcagaagctcataagacacttcaggatttcgatcctccaaagaagcgcaaaaggaacaagtatgcttttgcttgtgctatgctggcctccatgacttccatcttgcttggttatgatattggagtgatgagtggagcagccatatacataaaaagggacctgaaagtctcggacgagcaaatcgagatcctgctcggaatcatcaacctatactctctgataggctcatgtctcgccggcagaacctccgactggataggtcgccgttacacgattgttttcgccggcgccatcttctttgtcggagcacttctcatgggtttctcccccagtattcctttctcatgttggccgtttcgtcgctggcattgggcatc

SEQ ID NO: 226570 - DNA, 469 bp, Glycine max
  unsure (1)..(469): unsure at all n locations
ggacgacgaagaagaagaatccaaaagcaatcccatctgtgtgtttgcacatcggaagggagggctatcaaactctaaggattgctctgaatcggtttcgtcttcttcgtttttcttcaaaatcctcgtgacagatctaatctaatcagccttttgggggtgtttcagacattgcatgcatatgggagcagtggttgtgttggatgctataaaaggccttcactgagtcccacagtggatgtgccatcaaaagggttggcaacacaaagtaacgtagtgaggaaaccgagttcatcagaggatttttggaccaccagcacgcatgatatggacaacagcgctgttcagtcacaagggagcatctcttcagccagtctaacaaaccaagcttgtggtttctcatgcctggtttctnccaaaagcagcacccaaccccacttgaatttgtaaatcaccggtggtaattctt

SEQ ID NO: 226571 - DNA, 570 bp, Glycine max
  unsure (1)..(570): unsure at all n locations
cgaacacactatataacggcgccacatgccgaatccctctccggaaccaatccctggccttctctcgccacgtttccagatccctctctttcctccctataacacgtgcggcaaaacaacccaacgcaattgcggttaaagcttcttcgcactctgacttcgacgttgacctttcgctcagtcctcgtgtcaatgccgtcaagccttccaaaaccgtcgccatcagcgaccacgccaccgctctcgtccaagccggcgttcccgtcatccgcctcgccgccggcgagcccgatttcgacacgcccgctcccatagccgaggctgggattaatgcaattcgtggaaggttacacgaggtacacgcccaatgccgggaccatggaactgcgccaagcgatttgtcacaagctaaaagaagagaatgggattacttatactcctgcncggttgtggttagtaacggagccaacagagtattgctaagcagtgcttgcagtttcctgccctggagatgaggttattattccagctccaatctgggttagttacccagaaatggcaagttggctg

SEQ ID NO: 226572 - DNA, 594 bp, Glycine max
gccgcaactcactgtcttccttctctagggtttttagctcccccaatttcttcgctcaacatggttcttcaaaatgatattgatttgctaaatcctccggttgagcttgagaagaggaaacacaagctcaagcgtcttgttcagtcaccaaactctttcttcatggatgttaagtgccagggttgcttcaacataaccactgtctttagccactctcagactgttgttgtatgcggaaactgccagactgtcttgtgtcaaccaaccggtggccgggcaaggctaaccgagggatgctcctttaggaagaagggagactgagtggattgccatctttttttgtttgtgattggagagtttcagtaatgccttcttttgttttggttatgatgatatgttaattttgttaaatttgtaagacttgagtctacaagcttatccaagacattagggattacacctaattttgcatttctctttactgcaattgggttcatgtggctatgttagatgcttacttttaaattaaattagagtgcatgttatggtaaatgtatctttggttcttcagtatggtagatatttttctgataa

SEQ ID NO: 226573 - DNA, 558 bp, Glycine max
agcgacgccgtttgggtcctcttccacctcgccttcttctcccaatgccttccctccgcctgggcccactcggcgatcctcctcccgggtcaactcgcccgtgactcaccgcagagctgccccgcccctgaccccaacctctactacaagccagtcatcggaatcgtcagccatcccggcgacggcgcctccggccgcctcagcaacgccaccggcgcctcctacatcgccgcctcctatgtcaaattcgttgaggccgccggcgcccgtgtcgttcccctcatctataccgagcctccggagaagcttctcaagaagctcgaattggtaaatggggttctcttcactggtggatgggctaaaagtggtttatattttgaaactgtcacaaaaatatttaagaaaattttagagaagaatgatgctggagatcatttcccattatttgccacctgcttaggctttgaactcataacgatgatcataagccaggacaataatattcttgaagagtttagtgcatcaaatcaggcaagtactcttaatttgtggagaatg

SEQ ID NO: 226574 - DNA, 490 bp, Glycine max
ctcaaaatctagtttcatactttttttcttcttcttgaaatggctctccaggctgcttctcttgttcctgcttctttctcggttcttaaagagggaaagagtggtgtgtctctcaaggactccaccttgttcggtctttcattttcagaacctatcaaagctaacttcagctcttctgcattgaggtgcaagagggaattcgaacaaaagctctgtgctgtgagggccgaaacagtggctacagcctctccagcagttaccaagtctacaccagaagggaagaaaacattgaggaagggcagtgttgtgataactggggcttcatctggactaggcctggccactgctaaggctttggctgagacgggaaaatggcatgtaataatggcctgcagggattacctcaaagctgcaagagctgcaaaatccgctggcatggctaaggaaaactacaccatcatgcacttggaccttgcctcgctcgacagtg

SEQ ID NO: 226575 - DNA, 507 bp, Glycine max
aatcagtagattggagctgaacccgagctggaggcgcgtatgggtgcggctaaccagcagttcgaggcacggcacctatctgtagaagggtcaatggaaacttcaagagacactgaacttgaccaatacgtggcagcatactatgacacgctggagaagtacagagaggaattaacagggcctattcacgaggctatggatggaatgcgactgatagaaactcagctaaatatgcttggctatggacccgagcggatcctatctgatgatgaatgtgaaggtgccaggtcatcagaataggatcaagacgacactggaggataaacagatgtcaccgagattgatccgcgtgcagatgaccgagaactctaaatccacttgctgaagaagttcagtgcttacttaaggagcctgaagcaagaactctccatgaagaatgagaagggcatgcttaccatagatgcatacgcatcagctacttaactggagggaattacattacaaatg

SEQ ID NO: 226576 - DNA, 563 bp, Glycine max
cacaaacaccaaatcaaacatggccaccacttttctttctctcctcttcctcatcttctctctcctcaccccagccctcatttcctcttcccctgtccaagaccctgaatttgtggcccaagaagttaacaggaaaatcaatgcttccgtagctagaaggaatttggggtacttgtcctgtgcgacagggaaccccattgacgattgttggaggtgtgacccgaactgggagaagaaccgccagaggctagcggattgtgcgattggtttcgggaaaaacgccatcggaggaaagaacggaaaaatctacgtggtgaccgattccggcgacgacgatccggtgacaccgaagccgggaaccctccggtacgcagttattcaagacgagcctctctggatcatcttcgcaagagacatggtgatcaagctgaaggaggagctcatcatgaactccttcaagaccatcgacggaagaggcgccagcgtgcacattgcgggtggtccatgcataacgatacagtatgtgaccaacgttataatccatgggataaacattcatgact

SEQ ID NO: 226577 - DNA, 541 bp, Glycine max
gcaggcttcagaagcttaatgcaatggtgttggcagcatcatcaacacctgattctgaagatcagttagaagcccctattcacgcaggaaatggagagtacttaatagagttagccattggaacaccaccagtgtcttaccctgcggttttggacactggcagtgaccttatatggacacagtgcaagccttgcacacggtgttacaaacaaccaacacccatttttgatcccaagaagtcctcttctttttccaaggtttcatgcggtagtagcttgtgcagtgctttgccttcttcaacatgcagtgatgggtgtgagtatgtttattcatacggtgattattcaatgacacaaggcgttttggctaccgagactttcacttttgggaagtctaagaacaaggtttccgttcacaacattggttttggttgtggggaggacaatgaaggtgatggatttgaacaagcttcagggctggttggtcttggacgtggtcctttgtctttggattctcaactcaaggaacaaagattttctta

SEQ ID NO: 226578 - DNA, 519 bp, Glycine max
gaacagagaataaaaatgttcatattattgcaacaactaagagattcaatcataacaacacaagtccggcaacagaaaattatcaaacaaacaaagcaataaaaacatacactaatcagtaaatatatcacacactctcacaactgatcacacgacgtaggaacaaaagaaatggtctccttttcaagatcatggttcaccaaaatgttctgctgttgaacatttccaaatatagacattccactagaagcacccatggccaaacaagccactcccaaattggagtcaccaatcatgtagttctcagcaggaagctccaaatccccacccttgaaatggaaaacaagctttggaatctccacttgtgttgaccctgatggcaaggagaaacaaagatccaaccctgttgagctagttttgtccaaagcaagtttggtttgagaaatgaactcttttttgagtgcctcataggccttttgttgaacgtaggtgattgtggtgccagagtctatgatcaca

SEQ ID NO: 226579 - DNA, 605 bp, Glycine max
  unsure (1)..(605): unsure at all n locations
gtccatttcattttgcagaaaacaacagggaaagaaatttctgaccctaaccgcgtgtcgttaaaatcctcaaacgcagagtagacatagaattatcaaaaagcggggaaagggagattgaattcgatcctgggacgttaacgttgtttcaattcaattgtggtcctgtcggtgccctatctcagacgacgatgtcatctttatatagaggggaatccaggaggtacaacaataaaccaagaggacgtcataatttgacaacgcagaagaagcaagagattaaggaagcctttgagttatttgatactgatggctcaggtactattgatgccaaggagctgaatgttgctatgagggcccttggatttgagatgacagaagagcaaatcaatcaaatgatagcagatgtggacaaggatgngaagtggagcaattgattatgaagaatttgagtacatgatgacagccaaaataggagaaagggacactaaagaggagctcatgaaagctttccatattatggatcatgataaaaatggaaagatatccgcattagacatcaagcgcattgcanaagagctaggtcaaaatttcactgacagaga

SEQ ID NO: 226580 - DNA, 550 bp, Glycine max
aaaccaaaatatggacatacaccaattttattcataggcaatacccaaacatagataggaatcattcatacaacttttacaatagcaaagagtacatagcttcagttgtttattttatttttaattttcctatactagtagtgcagccaaacaaagatatcaactgcccccatatagataagactagtgatggaagcgagttctgttcatcatcgtgatgaactcctccgcactaacctctcgatcattatcttggtctgcttcctcaaccatctcctgaatctctctgtcagtgaaattttgacctagctcttttgcaatgcgcttgatgtctaatgcggatatctttccatttttatcatgatcaataatatggaaagctttcatgagctcctctttagtgtccctttctcctattttggctgtcatcatgtactcaaattcttgataatcaattgctccacttccatccttgtccacatctgctatcatttgattgatttgctcttctggcatctcaaatccaagggccctcatagcaacattcagc

SEQ ID NO: 226581 - DNA, 469 bp, Glycine max
aacgattccctcgttacaaaactcgggagctctatatcactggagagagctatgcaggtcattatgttcctcaattagccaaggaaatcatgacctacaatgcaaaaaccaagcaccccatcaatctcaaaggaatcatggtaggaaatgcagtgacagacaactactatgataacttgggcacagtgacgtattggtggagccatgctatgatctccgaccagactttccggcaactaatgagtagatgtgattttcacaggcagaaggaatctgatgagtgtgagtctgtgtatagctatgccatggatcaagagtttggtaacattgatcagtacaacatctatgatcctccatgcaacaactctgatggtagtagtagtggtagtggctctgccacccgccgcaccatgcggttacctcaccgaccccatgtggcttttaagcattggtctggttatgatccatg

SEQ ID NO: 226582 - DNA, 546 bp, Glycine max
  unsure (1)..(546): unsure at all n locations
gaagaagggagagaaaagaaaatgggtagaggagaagatcgagaaggggtcgcagcagccgggggctttttctggtcctacaccgacgaaccccatgccacacgacgtcgtctgatcctctccaaataccctcaaatcaaacaactctttggccccgaccactccgcttttttcaagattagtggagttgttttgcttcagcttggtactggtgctttactccatgatgctggctggctgaagatttttttagtagcatacttttttggttcatttctcaaccaaaacctctttttggctatccatgagttgagtcacaacctggccttctcaactccagtctacaaccgttggttagggatttttgccaacctccctgtangtgtgcccatgtctgttaccttccaaagtatcacttggagcaccaccgctttcaaggtgtaaatggcattgatatggatgtccctaacctcactgaagtccgtcttgtgaaaatatgattgcaaaaaccatttgggtctttttacagctcttcttttatgcatt

SEQ ID NO: 226583 - DNA, 506 bp, Glycine max
gggtcaaaaactacattacattcttctgttgcacataaaaattgtccaaaataggagacatcaaaagggggaggggggatgaatgatgtgtattagaacatctattcggctttactggattttctcttcattcggctaaaaggtccaactgttcgatccataatgtacatgtaaatgatctggctccaagatctgtaggatgctaaactatcataaaactccggagcaatctccttcaccttgtaaagcttgtttccaggaattcttgggaaatcatggtgttcattatggtatcccacatgccaagctagataattcagaggtccatagtaagaataagtctcctggtcaggattgaacacataatgctctgaaatgaagtgagcagccattggatgcatcccaccaccaagaaatgaggaacgtttcaaataggcaacggctttccagccaaaaaagtaaaccatcgacacattaagtgctatctgaacagagaagttgatgaa

SEQ ID NO: 226584 - DNA, 553 bp, Glycine max
  unsure (1)..(553): unsure at all n locations
ctcagcaagtctcaaggcgttcttctctccctccttggagattcgaggtttatgagttatctaccttctgtattggcaactgctacgatgatgcacgttgtgaaaagcgtggagcctggtctagaagctgaatacaagagccagctctttggtattctcagaatcgacaaggagaagcctgagaaggtgaattcttgttgcaagctgttgttggaggtgtggtcagggtacgaggaggaggagcaggagcaggggaagcaatgcatgaaacgcaagtttggaatagggtcgattcctggaagcccaaacggcgtgatggatgtgtcgtttagctgtgatagtagctccaatgactctttggtctcttcctcaccggaacctttgtcaaagaagagtagaagtgaagaacaagagcagcttcttctaccaaacccaaaccattccaactcagattttctccatcgcctttaatgtcaactcttttatggaaaacatatataggctttcccctgttttaataaccctgtatctntcggttggttctctttttgac

SEQ ID NO: 226585 - DNA, 539 bp, Glycine max
  unsure (1)..(539): unsure at all n locations
cattttccatttccctctccctccaaaaatgcattcctcgctctctctctcgttctccgccacttcctcctccgtcgccactgtttccagatcacgccactcattccactctcccgccgccgccatgcctctcaatctccgcttctgcggcttgaggcgcgatgcatttggttcaggtctcgctgcttctctcaaccgctaccactcccacctccctcgccgccctcactccgccgcagtctctgccgcgctatctagcaatggaagccctcccaaatcgtttgactacgatttgctgataatcggcgccggcgttggcggccacggcgccgcgcttcatgccgttgagaagggtttgaaaacagccattgtggaaggagatgtggtgggagggacatgtgtgaacagaggctgtgttccttccaaagctctntagccgtgagtggtcgtatgcgagaactaagagcgatcatcacttgaagtcctttggctacaggtttctgctgctggctatgacagacaagagtcgctgatcatgc

SEQ ID NO: 226586 - DNA, 564 bp, Glycine max
gttgagaactaagaaggagaagcaaatggcttcctcaatgatctcttccccagctgttaccactgtcaaccgtgccggtgccggcatggttgctccattcactggcctcaagtccatggctggcttccccaccaggaagaccaacaatgacattacctccattgctagcaacggtggaagagtgcaatgcatgcaggtgtggccaccagttggcaagaagaagtttgagactctttcctacctgccagaccttgatgatgcacaattggcaaaggaagtagaataccttcttaggaagggatggattccttgcttggaattcgagttggagcacggtttcgtgtaccgtgagcacaacaggtcaccaggatactacgatggacgctactggaccatgtggaagctgcctatgtttggttgcactgatgcttctcaggtgttgaaggagcttcaagaggctaagactgcataccccaacggcttcatccgtatcatcggattcgacaacgttcgccaagtgcagtgcatcagcttcatcgcctacaagcccccaggcttctaagt

SEQ ID NO: 226587 - DNA, 517 bp, Glycine max
caacacaatagcttattcattagttctcatccattaatttccattgaagtccgaaaacagaaaccaaaaatacaggatgatgaaatctcaaaaagcaaaaacaaatgggaatgtagtttaagtacaaacaaacaaagtggggtggcggctacaaatgctttgcaaatttttcacacttagaagcctgggggcttgtaggcgatgaagctgatgcactgcacttggcgaacgttgtcgaatccgatgatacggatgaagccgttggggtatgcagtcttagcctcttgaagctccttcaacacctgagaagcatcagtgcaaccaaacataggcagcttccacatggtccagtagcgtccatcgtagtatcctggtgacctgttgtgctcacggtacacgaaaccgtgctccaactcgaatttcaagcaaggaatccatcccttcctaagaaggtattctacctcctttgccaattgtgcatcatcaaagtctggcaggtaggaaagagtctcaaact

SEQ ID NO: 226588 - DNA, 482 bp, Glycine max
agcctttgcgcggcggtagcaatatattgggcatttgcgattcttacaccccacaaggtgagcctatccctacgaacaagagacacagagctgctgaaattctcagggacccataggtgcaagctgaagctccatggtactggaatagaacaagagtacaccttacttgaaacaaatgtgaaatggccattaggatggccggttggtggatatcccggtcctgaggggccttattattgccgtgctggtgcagataagtgattcggacgggacatatctggtgctcattacaaggcttgcttatatgctggaattaacatcagtggctccaatggggaggttatgcctgtgcagcgggagtaccaagttggtcctagtgtacgtattgaagctggtgaacatatctgggcttcaagagaatgactgagcaagctggtgttgagctctctcttgatccgaaaccgatgtagggcgactggaat

SEQ ID NO: 226589 - DNA, 611 bp, Glycine max
  unsure (1)..(611): unsure at all n locations
cattgccttatttagatcccgagctcgacggggaaagattgcttgttggtgccaactttgcttctgctggtattggaattctcaatgacactggaatccaatttgtaaacataatcagaatatatagacagttggagtactggcaagaataccagcagagggtgagtgctctgataggacctgagcagactgaacgcttaataaatggagcattagtcctcattactcttggaggcaacgactttgtgaataactattacttggtcccttactctgcaagatcacgccaatacaatttaccagattacgtcaagtatatcatttctgagtataagaaagttctcaggaggctatacgaaattggagcacgtaaggtgctggtgacgggaacgggtccttgngttgtgttcctgcggaattggcccagcgaagcaccaacggtgactgctcagctgagctgcagcaagctgcagccttgttcaaccctcaacttgttcagattatcagacaactcaatagcgaaattggttccaaatgtcttcgtggagtcaacacgcaacagatgcacatngatttcatcagtaaccctcaaagatatgggattgtacatc

SEQ ID NO: 226590 - DNA, 540 bp, Glycine max
gaaaaaaagagaaattattgaagataaaaattcactcaattattatatatgcagtctttcttttgtactgcccaagagaaggagaacgaagacggcacttaacatcatccatccaccccaacattataatatactattcactgacacattggagatgattaattactatatatggcacctaatttgaacacatatatgacaaattaacaggcgtaggtagacttttgcaagacacagaagatgtgcggtaataaaatgatggacacagacccttgatttatctagttcttagacgaatccaaagccataatggtgctgagattcattgggtacatatactctgaggtgcctgacaaaatctgttgaacgattatcctattagccctttctgttggatggaaaggatcccaaaacgcataactgtcacggttagggcacaagttggatgccggagtgcacagtccaagaccattgtagggtccttgaccgcaacatgctacttttgatgtaacaaatccatatctttgagggttactgatg

SEQ ID NO: 226591 - DNA, 440 bp, Glycine max
ggggactgcatctgtagctcttgctggggtcgtggcaaccttgaagctcattggcggtaatctggctgaccacacattcttgcaccttggggctggagaggctggaactggaatagcagaactaatagctcttgaaatgccaaagcagacaccgacacctatagaggagactcgcaagaagatatggctcggagactcaaagggttggattgttggttcaagaaaggcttgactgcaacacttcaagcaatctcgggctcatgagcatgaacctggtggcagtatgctagaagctgttaacgtaatcaagcctacagatcagatcggatcatcaggagtgggaaaagcatttacacaggaagtaatcgaggctgtgacttctatcaatgacaaacctcttgatgtggccctctccaatacaacttcacagtctgagtgta

SEQ ID NO: 226592 - DNA, 384 bp, Glycine max
cataatacaaagcattatatgcttattacagccaaagttaacagtgatttgccccataacagaacgcatgattgacctgcaatactggagatttcgtaataaatagcataagaccactttaacttatgcgtaaggtcccttagacaactaacatatgccaccaaaacatatgaatattacagccaatgttaaatgacttgccccataattcacctatagtttcagtcgacaggggtatacatgcagctctcaggatacttcacacgagtctgaggacgagggagacgagtagccaagcctagctgatatgccttggcaggtacacttgcagctatgtgagctgaaatttttctgatgatcgagaatggtggataaatcaagccc

SEQ ID NO: 226593 - DNA, 532 bp, Glycine max
  unsure (1)..(532): unsure at all n locations
aaccgtgtcaaatgacattgtgtgatccatgtagccgacctcacctagtgggataaggctttgttgttcttgtttttgttattgctgtttactgtctaatgcctatggagttgcgagtctctctgacttttattgttccccttgtttatcatctccagtcataccaaatggccaacagagttcaaattcctaccaacaattcagccctcattgctatgattgcagatgaggatactgtagttggatttctgttggctggagtgggaaatgttgacatacgtaggaagacaaattacctcattgtggattcaaaaacaactgtcaaacaaattgaggatgcattcaaagaatttacaacaagggaaggatgttgcaattgtgctgattagccaatatgttgcaaatatgataagggtttttggttgatagctataacaagcctgttcctgcaatacttgaaatcccttctaaagaccattcttatgatccagcacatgattcagntctgtcacgagtggagtatctcttcata

SEQ ID NO: 226594 - DNA, 528 bp, Glycine max
atataaatgcatatttcaagctaaattttcatctgaatctgacatgacaccataaaatattcgcccgtcttgaagttctgtgacaggaattttaaattatccccaagacagcacaaattatttaagctacatctacatagaactctgaatttcaagaaaagattattaaccataatgtacaaagaaaaacaacaaacacccccaaaaagctgcaactgtaaacggtgaattcagcgtctcccagatgcaactgattcggtattgaagagatacttcactcgtgacagaactgaatcatgtgctggatcataaggatggtctttagaagggatttcaagtattgcaggaacaggcttgctatagctatcaaccaaaaaccttatcatatttgcaacatattggctaatcagcacaattgcaacatcctcccttgttgtaaattctttgaatgcatcctcaatttgtttgacagttgtttttgaatccacaatgaggtaatttgtcttcctacgtatgtcaacattttcc

SEQ ID NO: 226595 - DNA, 500 bp, Glycine max
ttggattggtaaggagtacttcatgagtgggccacgcggaaatgacattcagagaacaaacgttcctcacattcgattggaattccgtgatacgatttggagagaggagatgcaacaagtttatttgggcaaagccatcattcctgaagtagtagacaaataagatgccagtggcattcgtttcatacacaatgaggttgtaaacatattctattaccatatttcctgttcttcattttttgaaatgtttggtgcaggttcttctttgtttacgtattggaattatgcaattcctcacttgctcccgaagttaactgaatctgctcacttgctgtaggtagaaagtatatttcctcaaacccatgcagcatcagagatgtactaaggctgaagacattacaacactggtctgatgatatgaaccagatacatactatagagaatcagcaagatcgctgagcttgagtatcgatcaacgtttacagctacaaatcgacgta

SEQ ID NO: 226596 - DNA, 529 bp, Glycine max
  unsure (1)..(529): unsure at all n locations
tcctgatattgctcaaggtgtgcacggtcacctcacaaagaggcctgaggagattggtgctggtgaccaaggtcatatgttcggctatgccactgacgagactcccgagctcatgcccttgagccatgtccttgccacgaagctcggtgccaagctcaccgaggttcggaagaacgggacatgcccttggctgagacctgatggcaagacccaagtcactgttgagtactacaatgacaagggtgccatggttccaatccgcgtccacactgtgctcatctccacacagcatgatgagactgtcacaaatgatgagattgcagctgatcttaaagaacacgtgattaagcctgtgattcctgagaagtaccttgatgagaagaccattttccatttgaacccttctggcaggtttgtcattggagggccgcatggcgatgctggtctcaccggccgcaagatcatcatcgacacctatggaggatggngtgcacatggtggtggtgccttctctgggaagggatctacc

SEQ ID NO: 226597 - DNA, 525 bp, Glycine max
ctcacttctctctcttatattaatcactcccgcacacagagcataattcacctttcttttccgaccaaaggttcgccagaaaatgcttctatcctcctcctgctccgccgccggctccgccgtctccggcgagatcatgctgttcggcgtgagagtcgtagtggactccatgaggaagagcgtgagtatgaacaacctctcgcagtacgagctccctcgcgacgccgccaacgccaaagacgacgtcgctgccggctacgcctgcgctgacgatgccgctccgataaactccggcaagaaccgcgaccgcaagcgagggattccatggacggaggaagagcacaagctattcttggtggggttgcagaaagtggggaaaggtgattggagagggatctcaaggaactatgtcaaaacgaggacgccaacacaggttgctagccatgctcagaagtactttctccgccgcaccaacctcaatcgccggcgccggagatccagcctctttgacatcaccaccgactc

SEQ ID NO: 226598 - DNA, 635 bp, Glycine max
  unsure (1)..(635): unsure at all n locations
ctcttttttcgaaaaacgaaaataatttctacaaaattgacgaggagaaatataaattagggtttgttaaaaaacctctcgtaaacattcttttcaattataaacgatggaatcgtccatttcgatatataaaaaataatcgatttgaaaatgtcgtaaaaaatgaaatttcagaatttttttttcatacatgtcaaagtgatggaaaagaaagaatatcttttatgtatccaccaaatttatcaacttttcataaaatgatggaaaccaaattttatctcttcacaaaagataaaatttcctatgatgaattgtctaattattggagctatactaatgaagaaaaaagaaacaaattgagcaatgaatttgtaaatagggcaaaagtaatggataaggaattaatttctctggatatattagaaaaccgaattcgattgtctaatgatgaaactaagacaaaatatttaactaaaatatatgatcctttcctgaacggacgctttcgtggacaaatcgaaaatgttttttcaacctcaatccaatatgaaaaaaatgacaaaaaaaataccattttgataaataaaaatcatggtatccttatttctaataatacttatanaaaaaataatagt

SEQ ID NO: 226599 - DNA, 555 bp, Glycine max
cagcgttatcagtatctcctgtaggattataagtatcgtacttcttaaaaaatttagatttattagtcaaaattactacacgtttggcttttctagaacgaatttgataattctctgcttcattttttccctccagttgttccaattcgtcaataaatttgtatgaccatcgaggaacttttttacggatttcgtttattctaatacactttgttctatttccatttactattgttttttcgttcaaatcagttctaattgcatcaaataatatttttattatttgttttttttcttcttcataatttatttttacttgttcatgttctggaaataaagaaagtgcttcaaaactcaagcttgatactaatttttttgaaaatttactgattagattgaaaaaaaaaaatgtcagtactaaagattttctatcaaatatatttatttttttctctaattctggataattactattattttttttataagtattattagaaataaggtaccatgaattttatttatcaaatggtatttttttttcattttttcata

SEQ ID NO: 226600 - DNA, 487 bp, Glycine max
ctctgcctgaccgattgctagaatggaataccgatgctcagtcatctatattaccatactcttgtgtcttgctcttgcaggagagagccatgtacatgcatcggtacctgaggaagattattgggaagctggctggacgaacactcccattcccactgcactgcgagagcttctaaagcctgtccctgcaggcgttgaaatcgctgaacgccctaagcaaagtgatgatacacagtacccaaaaacattcttctataaagaagaccttcattcaggcaaaacaatgaaagtacaattcaccatagcgttcctatgcacaaccttatggtggatatacatggataacggatattagagacacctgtaaagaatgatagtagaatgaagagatatgcatcaagaaagaagcgatcgatggagtagagaagtgctgtgcaaagccttgtggacagtaattggttctgccatttcaagctgggaaagaaca

SEQ ID NO: 226601 - DNA, 407 bp, Glycine max
gaaaattaaggacaccgtttttacacaatgtcaactacttttcttaaataacggacctttagttataatcgagacaacactgaaccccggtggaagaactaaagtccttagtgaaaagagagtgcatgaaagtgatagacttaaaaaagcacactgcatattcatcaaagcatcagcaaagtgcactgtatactaacaggacacgtacgtagaaaggtgaatgtccaggtcttgcacaacatacacaacacacgataataaattttatatacaatcctatggtgcccaagaagcataagcttggtctcatggagcaacaacgtgaggctgatagggcaggtccatcgataaattgggtacccataaaacggccttgctttcaaagaaatggctaacagggttaggtc

SEQ ID NO: 226602 - DNA, 558 bp, Glycine max
  unsure (1)..(558): unsure at all n locations
cttcaattcttacagtggagcagctttcatcgcccatcactggaattgatagcttgattgcaagtaactggcctatcggataccaagtaggatcatttgcttacaactatctgacagataatctttatgtatcaaaatcaagacttattcccctaggctcccccgaggaatatgctacagcacttcagaaggggccatctggtggaggggtggcagctatcattgatgagcttccatatgttgagttatttctgtcaaatgaaactgattttggtattattggacagccattcgccagaagcagttggggatttgcttttcagagagagtctcctcttgcctatgacatgtctacagcaattttgaaactctctgagaatggagatctccgtaagatacatgagaagtggttctgtaaatgggttgtgctgaagataggacaagcaactccaagcctgaccagcttcacttgattagcttttggggtctgtatctctatgcngtattgtcttgcttggtgcacttgcactgtttctgctgctaatgattcgccaatat

SEQ ID NO: 226603 - DNA, 581 bp, Glycine max
gactataaaataaagacttatgatagaagaaaaaaactagtactacaaataatgtacaagactatcattattgtcactctacaaagatatattgctatcaggtatcatataaacatcttaagcaaactgcccaaatgacagcagtttactgaaatctaccactttgagccctcttgcaacacaaccataataattatctcagttggggttgtgatgattgtcacattgagtgaacattttcttgatggcctcttccttctcatcaatgaagttaaagaagttaacaacaacctgggaacaatgaatgcccgatggttctgtggatgaagaagcaacatctttttgtctttgtttgaagcgggcatattggcgaatcattagcagcagaaacagtgcaagtgcaacaagcaagacaataccgcatgagagatacagaccccaaaagctaatcaagtgaagctggtcaggcttggagttgcttggcctatcttcagcacaacccattttacagaaccacttctcatgtatcttacggagatcctcattctcagagaggttcaaaattgctgtagacatgtcat

SEQ ID NO: 226604 - DNA, 581 bp, Glycine max
  unsure (1)..(581): unsure at all n locations
ttggcagcaagacaagtggaatggctgctttcctcttaagtggcacgttgttaaggatgttcctaacaatttgttgaggcacattaccctggataacaatgagaacaaacctgtcactaacagtagggatacacaagaggtaatgttggagcctggcctgaaattaatcaaaattttcaaggaatataccagcaagacatgcattctggatgattttggcttctatgaggcccgtcagaagactattttggagaagaaagcaaagcaacaattcccaaagcaggtatgggaagggaaacctgctgatgagaagattgagataaatggggaagtcaatactcaaaaatctgaagttagctcggaagtgctcaaggagtcccttgctgagaaggatagtgatgaccacaaagttcccgagatnggatgtgctacaaaaactggagatgccccaagggtgctaaacaggtgttcctgagagcangattgtagccatggggttgtttctaatggttgctaagctctactgtgtttgaaggaagcngtcctatccatttcagtggcatatattggttctagaagta

SEQ ID NO: 226605 - DNA, 421 bp, Glycine max
aataataataataattggtcatttattaattgaaggctttaggccaccataaaacaaaacttaaatgtacctgagcaataaaagaaacttgaatacacataagcatcggatactcataaaaacaaagatatggcttcaagttttccaccatacttgacagtgctttatgaaaagtacctaacagccacctattgtctacttctattcacattaacgagaagaaacaatacaatatcacattcaaccatacaaaaatttagaagcttaaaaatttagacatttgaccttcatgatacaaatacaggccaagaccaaaccgggcacaagatttgcagaaagcaattttctcagcagcagaaactggatcgccaatggagccatcactgggtgatatcgtcccagttgactcacgatatgcctc

SEQ ID NO: 226606 - DNA, 478 bp, Glycine max
gaagaatatactgatgctaaattttttgtcatcaagtcttacagtgaggatgatatccataagagtattaagtataacgtgtgggccagtacccaaaatggcaacaagaagcttgatgctgcatatcatgaggcacagcagaaacctggtggctgccctgtttttctctttttctcagttaataccagtgggcaatttgtggggcttgctgaaatgattggtcctgttgattttaacaagagtgttgagtattggcagcaagacaagtggaatggctgctttactcttaagtggcacgttgttaaggatgttcctaacaatttgttgaggcacattaccctggataacaatgagaacatacctgtcactaacagtagggatacacaagacgtaatgttggagcctggcctggaattaatcacaattttcaaggaatataccagcaagacatgcattctggatgattgtggcttctatg

SEQ ID NO: 226607 - DNA, 603 bp, Glycine max
ccctatttcaagtgaaaaaaaaccaagtgatttcttctaattacaacacgtataaaaaagaattattggatatcatagataatctctttatcaagaattatatatcggaagatgcgattctagatatggaaaaaaatatgtatagaaagtattttgattggatgggaatcaatagagaaatactaaatcgttccatatcgaatccagaattttggttcttttcaaaatttgtgatattttatgacgcatataggggtaactcgcaggttataccaatcaaattacttgacttttcttctaatgtaaatcaaaatgttagtgaaaatacaaagaacattactagaaagaaaataaatgaatctcttgaattggagttagagactcgaaatcgggcaaaagcagaataccctgatcaacgaaatcttgaatcatctatctcaaaccaagaaaatgatattgacaacgattatgtaaggatcagacagtgacaagaatagtaaggggtatcaaagacaaagaaagactagaacaagatggaggcagaacttaattgcttactaagtaaatttctgattttacatgtaaatgggaataatttcttag

SEQ ID NO: 226608 - DNA, 540 bp, Glycine max
gatctcttgctcttgtaatatatttataaaaatttttcttattaacatgaattttttctgggtatttgtgataaatttttcgtttattcttttgaattaatgaaagacctatggtttgatacatcaaaaattgtttattgtcttttctagacaggcgaactggttcgataacaaatatttcttttttcataaatttgctatttttctttttccttaagcctagaagaattaaattcttctgattttgaatcatcataatatctagacctagttctcctctttgaatagaggctattgtaatgactcttaaattttgtaatctaatcaggagacaatatactttgacattgttaaatattctttgacctaagaaattattccaatttaaatgtaaaatcaaaaaatctcttagtaagaaattaagttctgcctccaactcgtacttgacttctttatctttatacccttactattcttttcactgtctgatcctacataaatcgtttcaattatcttttcttggtttgagatagatgattc

SEQ ID NO: 226609 - DNA, 561 bp, Glycine max
  unsure (1)..(561): unsure at all n locations
gaaggcacttttattcttcacaacgagaaaacaaggaagggcaagataaaacctgttcatgttgttgatgttcctgggcattctcggcttcgacccaaactggatgagtacttgcctcaagcagctgggatagtttttgtggtagatgctttggactttttaccaaactgccgtgctgcttcagagtacctttatgatctattgactaaaggaagtgttgtgaggaagaagattccagtgcttattctctgcaacaaaacagacaaagtcactgctcatactaaagagtttatccgaaaacagatggagaaggaaatagacaaattacgggcatcaaggagtgcaatatcagcagctgacattgcaaatgagttcaccctgggggtacccggtgagccatttttttttacccagtgctctaacaaagtgacaactgcagatgcttctggtttaactggggaaatatctcagctggaagagtttatcagagaacatgntaagcaatagctggatgttgtgtataaaacttgcggattttgctgaaatgatgaatgtgtagtg

SEQ ID NO: 226610 - DNA, 594 bp, Glycine max
  unsure (1)..(594): unsure at all n locations
tgcatttccctctctaaccatatttactacatccaaacagggacttaattaaattactagaactggagtttttaagctatcccatgatgttcgccaagaaacgttcccggcgaggcgtcgtttcatcgttcccgagctcgaacgcgaagaagctattgagactgccgcacgtgttcgcgaaaatactagagcttccttttccttcagaagacgacgtttccgtggaggaaacgccgcagttttttcggttcgtggcgtcgtgcaatgccgatggtggcgtgagagctctggcgatcgacatttttccggggataacgaaaatcgtgataaagagaatggacggtggtgacgtggcggttccgggtcagcagcagcagcaggttccttctggctttggactgtggcggttccggcttccgtcgtggacgcagccggagatggttaccgncgtgtgcagcggcgggaagctgatggtgacggtgccgaagatcaagagcagagcaaactgattcgattcctcaaccgtacgtggaatatatgaaagaggcgtgtgctttgaaaagtagcgtntggatataaactatgtgagatgtg

SEQ ID NO: 226611 - DNA, 566 bp, Glycine max
tcttatacttgagctttgtatcaatttaatatttcccctaatcaagtgttttgcgtttaacagccttttgttttagttttataataataattgatgatgatttgtgtcttatttcaagtctcttacacttacgtgatgataaattgacaaggtatcctgggggaaaaaagcactgctcattggagggaaaacagacccaggaagtgacagaatttcagtatgggcatttgatacagagacagagtgctggtcactcatggaggccaagggggacataccggttgctcgcagtggtcatagtgttgttagagcgagctctgttctaatattgtttggtggtgaggatgcaaaaaggaggaaattgaatgatctacatatgttcgatctcaagtccttaacatggcttccacttcactacacgggaacagcaccttctccaagattcaaccatgtagctgctctttatgatgataaaattctttatatatttggaggatcatcaaaatccaggaccgtaaatgatttatattcacttgactttgaaactatggcatggtcacgagtga

SEQ ID NO: 226612 - DNA, 484 bp, Glycine max
  unsure (1)..(484): unsure at all n locations
gaaattcaaaattctcaacacttctctttaaccaatctcttctcagatcaatacaacaatgggttttcgtttacctggcatcagaaaggcatcaaaagcggcggacgcaccaaaaggctatcttgcagtctatgtcggagagaaattgaagcggtttgtgattcccgtatcatacttgaaccaaccttcattccaggacttgttgagtcaagctgaggaagagtttggatatgatcatcccatgggtggcctcacaattccttgcagtgaagatgtcttccaacgtataacttcttgcttgaattgagcagaaatctcagtataggagactgacatagattagaggagacattctgtataataggcgtcttctctaagtgtacagatccccctttctcaagagagaggaaatacanacataatatgtcattctattgattaattgcaatgaagtcagcaactcaagcagcttcgatctctatac

SEQ ID NO: 226613 - DNA, 608 bp, Glycine max
caacaacaatcgcaacattaatagtgctaaaagcattggtggcaacaacaaccgaaacagtgatagcaccaaaagcagttacaatggtagcaacaaccccaacaatgatggtgcttatagcaatgccaacaacagccacgacactagtagcactaaaatcattggaaatggcaacaacaacaacaacaacattgatgatgcttctggcaatggcaagaaaaacaacaacattgatggtgcttctggcaatggcaagaaaaacaacaacattgatggtgcttctggcaatggcaacaacaatcgcaacattaatagtgctaaaagcattggtggcaataaccgcaacagtgatagcactaaaagcggcgacaatagcagcaacaaccgcaacagtgataacactaaaagcggtgacaatggaaacaaccaccacaacattgatgttgcttatggcaatggcagcaccaaccgcaacaatgatagttctaaaatcggtgacaatggagacaacaaccgcatcaatgatagttttaaaagcaatagcaatgccaatggccataacaacagcagcgacaagagtgtggtgctaaagtaatggcatagcaata

SEQ ID NO: 226614 - DNA, 601 bp, Glycine max
caccatagtaatctcctcaatagaagccacccaagaggttctccaaacccatgactcattattctcggacagaacaaaccccgacatcacaacctcgtacaaccacaaccgttacagcttggtttttctccctgtctcacccctctggcaagaactaagaaaaatctgccacggaaacttgttttcggcaaagacccttgacgcaagcacggaccttaggcgcatgaaaatgaaggagcttcttaccgatatccgccaaagaagcctcaacggcgaagtggtggacattggaagagcagccttcatggcatgcattaactttttatcgtacacgtttctctctctggattttgttccctctgtaggtgatggcgagtacaaacacatagtggggactctgttgaaagcaacggggacaccgaacttggtggattattttccagtgttgatggtgtttgatccacaagggatcaggaggcacaccaccaactacattgacaagttgttcgatgtgttcgatcccatgattgatgaacgcatgatgaggaagggagaagagggtattgcactagccatgacatgttggatatcttgctggata

SEQ ID NO: 226615 - DNA, 623 bp, Glycine max
  unsure (1)..(623): unsure at all n locations
caatctccgaactccgaagcccttcagcaaccatgtcgaggagaaaggttagggagccaaaggaggaaaatgtcactcttggtccagccgttagagacggtgaacatgttttcggcgtggctcgcatctttgcctccttcaacgacaccttcatccatgtcactgatttgtctgggagggaaacccttgttcgcatcactggtgggatgaaagttaaagctgacagagatgaatcatctccatatgctgctatgcttgcagcacaggatgttgctgccagatgtaaggaactgggcataactgctcttcatatcaggctccgtgccactggtggaaacaagaccaaaacacctggtcctggtgctcaatcagctcttcgagcccttgcacgttcaggaatgaaaatctggtcgtatagagggatgttactcccattccttcggatagtacacgtagaaagagtggtagaaggtgctagaagactctaaacttcgtatggtatacgactggagttgctatattntactttcgatgccaaagagaatggtggcctttcgatgctcttcagttaatatcagaactcttgcatttcttgaggtgttagaaccagaatttagttgact

SEQ ID NO: 226616 - DNA, 531 bp, Glycine max
gacgaacaatgattagatttccaattcattcattgcttaaaagtagccgagagagagaagcgaattataaaaaacaataatcaaccaaacctagggcgcaatttatcaaagtagtgattaacacatttgcaagccacgaagcaacatactcaactttcaaaaatctgacaataatgcagtcaactaaaattctgttctaacacctcaagaaatgcaagagttctgatattaacttgaagagcatcaaaaggccaccattctctttggcatcgaaagtaaaatatagcaactccagtcgtataccatacgaagtttaaagtcttctaccccttctaccactctttctacgtgtactatccgaaggaatgggagtaacatcctctatacgaccaattttcattcctgaacgtgcaagggctcgaagagctgattgagcaccaggaccaggtgttttggtcttgtttccaccagtggcacggagcctgatatgaagagcagttatgcccagttccttacatctggcagcaacat

SEQ ID NO: 226617 - DNA, 506 bp, Glycine max
tttcagctttcattggtgtggcctagctgttttctcaatgagaaagccttcatctctgcaaagcgcacttttgcgctttggggttcccttgttgcttgttatcaccttctgttatgctacttctactgctgcagcaacaactcaagtttcagggaatgaagagctgccaaagacaaacctaaatgggcatgatgaagaagcaaaattcggattttttcatcataaaccaatattcaagaaacatattccaattccagtatataaacctgtaccaaagccatttccagtgtataaacctataccaaagtcagttccagttccagtgtacaagcctattccaaagccagtgtataagcctattccaaagccagttccagtgtacaagcctataccaaagccagttccagttccagtgtataagcctattccaagccagtgtacaagcctattccgagccagtgtataagcctattccaaagccagttccagtgtacaagcctatacca

SEQ ID NO: 226618 - DNA, 539 bp, Glycine max
gttactggttgtattatcagaatgttgaaattatgatagatttatgaatcctcttttctcccgagattatcgatgttactttttatattatcagatactatttgtgaactacgtgtccaaaaccgaacaacacagcaatgcttagctattagcacactacctgcaagaaacatcccaagagctgataagaaaatgcagttatatcatcatcccttggatttggaaagccagagggtgagacttgcattggaggaggagggtgtagattatacatctcaccatgtcaatcccattactgccaagaacttggattccactttcttcaagatgaatcgccatggaagagtcccggttttccaaaatggctctcacatcatttacaatactattgatataatccagtacatagaaagaattgctgtggtttcctcaggggctgagagtatcagcgccagtagccaggaagtgattgaatggatgcagaagatacaagactgggaccccaaaattttcacactttcacacatacccgagaaata

SEQ ID NO: 226619 - DNA, 488 bp, Glycine max
gtataatattaagttctcctaattttaccatacacagaaaggttgtttcctatattcatttattcaacctccttttggaaatatacaagtactgcactagtaccttttcaacaaacttctaatacgaactaagaaccatgcttttaatagtgttctgtgctttctccaaccattaaagtacttaccaatcacctttttgtaactaagcctttgctgaaccaaaatccagtactcagcaatgtttggccttccaattatgtactcattctctaaatccaagagttctaaacgagctaatactggaacaagcatcacatcagccatggtaaactcttgacctgccaaatgaggtgtttcactcagctgcctctccacctcatcaagcagtctaaccaaatgatccttgctccttttcaaaacatctgcttctttcaatttctcttcagtctcgtaggcttctttcaacttcctatggtaatcacttgcta

SEQ ID NO: 226620 - DNA, 551 bp, Glycine max
  unsure (1)..(551): unsure at all n locations
gttcttattctttccaagctcagcgccaccgcttcatctccttccgatttcatcaacatcatcttaacatgcaagaggctaaaccgctcaggcctgcaccgtcttgtgttgtctaaagctgggcccaaagtattcgccataaagccgaaaaattggtcagaatatgctcactcttttctcaaacactgcgtcaatgccggtaacgtggatgcctgttacactctcggaatgatccgattttactgtttgaaaaaccgagggagcgggctctcgttaatggcgaaggcggctatgaagctgcacgcgccggcgctgtactcgctggcagtgattcagttcaacggtagcggcggttcaaagcgcgataaagatctacgcgctggcgtggccttgtcggcgcgtgcatctttactcggccacatcgacgcgcttcgggagttaagccattgccttcaagacggatacngcgtgcggcagaacgtcacccgagggagaaggctcctcgtgcaggccaacgtgcgcgagctcgcgtatgtcctacgcgccgtggc

SEQ ID NO: 226621 - DNA, 478 bp, Glycine max
atagaatcgcttcttttcctctctattttcttatttttcaaccttagaaattgattctgtcgctgaaacacttcttcaaacggcatcgtttgggaccacaaactcattctccacatcaacaccaccatcaccgtacatttccaccggcgaacactcaatcttatgccgcaacttccaatccagcgcctgacatccacgtgaacagtaattcactttgccgcaaaccgaacaccggcgaaactcgtgtggccgcgtctccggtcgaccgcacccaatgtgcgcgcaaagcctcagtccttcttctaatttccccttacctgactcaaaccactctctcagaaaccaattcgccggttgcacttccggcggcgccacgctgtaaccgtaatcactcagcaacggacacgccagtgatgacaccgcgttgttgttttttctctgacatctcagcgcgccccacgtcagcagcgaggaggac

SEQ ID NO: 226622 - DNA, 532 bp, Glycine max
caaccgtcatgtgctgcatcgtgatataaaggggtcgaaccttcttattgacaatgatggaattctcaagattggtgattttggattagcttccttctttgatcctaatcacaagcaccctatgaccagtagagtggttactttatggtatcgacctccagaacttcttcttggggccactgaatatagtgtaggagtggatctctggagtgctggctgcattcttgctgaattgttggctggaaagcctattatgcctggtcgaacagaggtggagcagctacacaagatattcaaactatgtggttctccttctgatgaatattggaaaaagtcaaagttgcctcatgctaccatttttaagccccaacaatcatacaagcgatgcattgcagagacatataaagattttcctccatcatctctgccacttatggatacccttctcgcaatcaatccagatgaacgtttgactgccactgctgcattgcatagtgaattcttcacaacaaaaccatatgcttgtgagccc

SEQ ID NO: 226623 - DNA, 487 bp, Glycine max
ggctttcagtttgccgtcaaacatcttgatggtaggcaactattgatcaaatcaaatcctggggaagtcatcaagccaggtcaatataaagcattaaatgatgagggaatgccacaacacaataggccattcatgaagggtcgcctttacatccaatttaatgttgatttccccgactcagggtttctttcccctgaccaatgccagttattgggaaaggtgttgcctcagaagagcagcaagcacgtctcagatatggagctggatgattgtgaggagaccactttgcatgatgtcaactttaaggaggagatgagacgaaagcagcaacagcaacaccgcgaggcatacgacgaagatgatgatgagccatctggtcaccgagtgcaatgtgctcaacagtagtgcaatttatggtagtcgaggttctataatttctgcttggtttatcttttgtttggataatgcagttataactgcgtgataa

SEQ ID NO: 226624 - DNA, 509 bp, Glycine max
ttcatgggcaacaaaggacaagattcaacaagccaattactttgggtcgctgacccaggcatcagctatcagagtggggtctttccaaggggaagaaatatatgctccattcaagagcctgcttccaatggtgaaccctgatgatgttgtgtttgggggatgggatatcagtaacttgaacctggctgatgccatggccagggccaaggtgtttgatatcgacctgcagaaacagttgaggccgtacatggaatccatggttccactccccggaatctatgacccggatttcattgctgccaaccaaggagaccgtgccactaacgtaatcaggggcacaaagaaagaacaagttcaacaaatcatcaaagacattaaggagttcaaagaaagcactaaggttgacaaggtggttgtcctgtggacagccaacacagagaggtacagcaacgtagttgtgggactaaacgacaccatggaaaacctctttgctttcttggacaggaatg

SEQ ID NO: 226625 - DNA, 512 bp, Glycine max
caggaattaatttcttccctgaagccatcaaaagacataattcaaagcattgggagaatattcccaagcaatgcacgtttaattgttcgatccagtgccaatgttgaggacttagctggaatgtcagcagctggactctatgaatcaatacccaacgttagtccttccaatccaacagtttttggaaatgcagttagccaagtatgggcttcactgtacactcggagagcagttttgagccgccgtgctgctggtgttcctcagaaggaagcttccatggcaatactgatccaagaaatgctttcaccggatttatcattagtactacataccgtgagcccaacagaccaggatagtaattgtgtggaggctgaaattgcttctggccttggtgaaactctagcttctggaacccggggtacaccatggcgtatatcatctgggaaatttgacgggcaagtgcatacattggcttttgcaaacttcagtgaggaattgctggtacgaggtgc

SEQ ID NO: 226626 - DNA, 581 bp, Glycine max
  unsure (1)..(581): unsure at all n locations
atcttatttcaattctaaaacggggaaaagtagaggaggatcttttggacattttcccccctacaaaaagatccattgaagctttctctgagcatttcaccaaggaaggattggtggccttggtggagtataatgaaaagaaaatttttgaggtgaaacttaaggaaatgaagtcttctttaacagcacagataacagaggaggctgatacatctgaagtcattgagactgtgaagctgcgagttagagatgctaaattgccggaaattgaggtggtgcggatcttgtgggatgttttaatggatgctgttcagtggtctggaaaaaatcagcaacagaatgcaaatgcagcccttcgtcaggtaaaaacttgggcagaattgttgaatacattctgcaccagcgggaaacttgagctggagctgatgtacaaagtacagatgcaatgctatgaggatgctaaactgatgaagctgttccctgagattattagatctctntatgaccangatgtgctggctgaagataccattcttcattggttccgaaaaggaacaaactccaagggcaggcatgaattc

SEQ ID NO: 226627 - DNA, 537 bp, Glycine max
cgcaagcaaaaagaaagaatcccaggcgaggagaaagatggaggggaaggagcaggatgtgtcgttgggagcgaacaagttccccgagagacagccgattgggacggcggcgcagagccaagacgacggcaaggactaccaggagccggcgccggcgccgctggttgacccgacggagtttacgtcatggtcgttttacagagcagggatagcagagtttgtggccacttttctgtttctctacatcaccgtcttaaccgttatgggagtcgccggggctaagtctaagtgtagtaccgttgggattcaaggaatcgcttgggccttcggtggcatgatcttcgccctcgtttactgcaccgctggcatctcagggggacacataaacccggcggtgacatttgggctgtttttggcgggaagttgtcgttgcccagggcgattttctcatcgtgatgcaatgcttgggtgctatttgctggcgtggcgttggtgaagggtttcgaggggaaaaacaaataacgtgcgttgaatggt

SEQ ID NO: 226628 - DNA, 473 bp, Glycine max
gaaaataaagagatgcatatatatgactctggtgttatttttgattttgcaaattaaattacacaatcacagccgtacatcacacatgagttgggcctcttccaacttaaaagcagaggataacattggcccatgacgcgacacatgcaccacctaataatcataattttacatctttacatacaaaatacaaagactttaaattttaaaaagaagaaaagagataaacagatcatcttaatgaaatgaaaccaaaacccacaaacattggcttgatttttgttgttgttgttgttcccaacttgattaagcatgaaccgtttgattgaatcacttggacttgaagggaatggccctgattacgacctggtggtagagtgctgcaagagctgcaccgatgaatggtcccacccagaagatccagtgttcatcccaaccaaggtccttgttgaagatgatagcagcaccaagac

SEQ ID NO: 226629 - DNA, 566 bp, Glycine max
gggaggaggcactgtggcagaagtcctaggagtgtaaaacagagacgcaaaatgaagacgatcttgtcgtctgagaccatgaatattcccgacggcgtgagcatcaaggttcacgctaaggttatcgaggttgaaggccctcgtggaaaactcgtgcgagacttccaccatctgaacttggacttccaacttattaccgacgatggcggtaaaaggaagctcaagattgattcttggtttggttctcgtaaaacctccgccgccatccgcaccgccctcagccacgttgagaatttgatcaccggcgtcaccaagggataccgatacaaaatgagattcgtgtacgcacattttccgatcaacgctagcattggcaacaacagcaagtccatcgagatcagaaatttcctcggcgagaagaaggtgaggaaagtggacatgcttgcggcgtgtcggttgttagatctgaaaaggtcaaagatgaattggtcttggatggaaacgacattgaactcgtttctaggtcatgtgctctcattaaccagaaatgtcatgttaagaacaag

SEQ ID NO: 226630 - DNA, 537 bp, Glycine max
gccaaagctaatgaactcacaacatttcttgcaaatatagcatcttattacaacttcaacgtcccatataaaaacatatttaaggtaattcaaaagacttatttgttatcgatcgttgtataattcttgaataagacaggtggaagtaaagttcctataagtttcatggatctaactaaaaaataagcattccacgttcacaaaaacacatgtggagacactaaacatcagaaacacctgagagattgtcatgtaaacttggattattgggtcatgttttattgccacagctttataaaaattagaccccaaaggcaacagggcttagttgggtatggcagcctccctcccttccctggccttccatcaaaaaagggtctccaaaccaaaaaccaatacaaatgttttcatcctctactcttccaatattgctcccttctcgctgacataaataccatcaagaaacttccggatatccttggtcttaacatgacattcctggttaatgagagcacatgacctatgaacaagttcaat

SEQ ID NO: 226631 - DNA, 535 bp, Glycine max
  unsure (1)..(535): unsure at all n locations
ggtgaatgcgtagaaaaggataataaagaaattagcgtgaaaaatgttgggtgtgttcagcagctccatagtgtcgccgccggaggagctcgttgccgccggcagccgtacaccgtcgccgaagatgacggcggcggcgctgcggaagtggttcgaggagaagaacccctccgcagtgtcggtggaggtcggagagcatgtccagctcgcttatacccaccagaacgagtcgccgtttcagcccagatcctttgctgtgaaggatgaggtattctgcttgtttgagggagcccttgacaatttgggcaacttgagacaacaatatggattggccaagtcaaccaatgaagtattgctggtcattgaggcttacaaagcattgcgtgacagagcaccctaccctgctaatcacgttgttggccatctcagtgggagctttgctntcatagtttttgacaaatctacttctaccctctttgtggcctctgatcaatatggtaaggtacctctatattggggaantactgctgatggc

SEQ ID NO: 226632 - DNA, 372 bp, Glycine max
gggaatccaaaaccagactttattagattgaaaagcgtaactggacattgatagaaacagcaaattctttatttaatgaacaaagttacacccctaatatttcccaattccagggatcactccccatgccatttaattacattggccctcatggatgccttttacaggctccttcactaatcatcatatgggatctcaccagcagaaaggaaaatctattggctggctacaacaactggtggcccttccaccttgaaagtcgctccccagatttcctcctcattagcaggaactggagtaatcttatttttaggattctcatagcacattaatccttcaacagctgtagagtagaaacatccttgggggaaa

SEQ ID NO: 226633 - DNA, 422 bp, Glycine max
  unsure (1)..(422): unsure at all n locations
ggagtacacatttgcatacattgatgacccctgcagtggaacataccctttgatgcaaaagctaaggcaagtgcttgtggactatgcattggccaatggagagaacgagaagaacacaaacacatcaatcttccaaaagattgcaacatttgaggaagagttgaagacccttttgcctaaggaagtggaaggtgcaagagttgcatatgagaatgaccaatgtgcaattccaaacaagatcaaggaatgcaggtcttaccccttgtacaagtttgtgagagaggagttggggacagcattgctaactggtgaaagggttatctcaccgggtgaagagtgtgacatagtgttcactgctttgtgccaagggaagatcattgatccacttttggaatgccttgngaagtggaatggggcacctc

SEQ ID NO: 226634 - DNA, 495 bp, Glycine max
attattcaagagaaaacatccttcacatggaaggccatgtattgatatttgcacgcaaagctacggcaaacaaatggaattctattacattatgaattacaagttccttgcatggcatacatcaaggaaaactgggaagttgttgtatgtggattgatttgccacagccttatatagacaaaccaaatgcttaatatcaacacaaacacgtgtacagaaaagaaaccactcttcaagaaaacagaaaataagaaaaactaacatattggaagaggtgccccattccactccccaaggcattccaaaagtggatcaatgatcttcccttggcacaaagcagtgaacactttgtcacactcttcacccggtgagataaccctttcaccagttagcaatgctgtccccaactcctctctcacaaacttgtacaaggggtaagacctgcattccttgatcttgtttggaattgcacattggtcattctcatatgcaact

SEQ ID NO: 226635 - DNA, 557 bp, Glycine max
  unsure (1)..(557): unsure at all n locations
tggaaatggaatcggcagctgaaaaccctaattacccggcggtggactacaagcgaccttccatcttgtcatttcctcggaggcccgccctcagagttacatccgagttcgatagtgaaagcgcagtcttcttccataagatttcctgcaagttgttggacagccttgccaagttcaagttttcgttcaaccacagcggtaagggcggcgacatctccgaacctcaattcagctttgtctccaagcaccttagcctccactacgacctcgaagaccataatgctctcgttaagacctccatcgatcttgctcccagtttgcaactcactgcttctcatgatctcaaggctcaacaaggagaggttaccgtgcttgcaaacctcgccgatcctgcctattcacttcaactatctactccacnttcatccgttggattgccaaaagctaccttcagatttcctctgggtgaactttcgctgcaggagaaacaagaggaggaagtcaataatttgttgtcagtcgatggggtttctaaaggacaattgtttatgggctct

SEQ ID NO: 226636 - DNA, 524 bp, Glycine max
  unsure (1)..(524): unsure at all n locations
caaagaaccaagaaaccaagcaaatcattgttctctctgtcctgtgttttgtgatttcccccttcaagccaccaccaatggccaacaacgagatgcaagttgagaggggtttggacttggaaaggtacatggggcgttggtatgagatagcctctttcccttcaaggaaccagcccaaggatggcgtgaacaccagagccacatacactcttaggaatgatggcactgtgcaagtgctcaacgagacttggagtaatggcaagagagggcacatagagggaactgcttttaagtctaaccgcacaagtgatgaggccaagttcaaggtcaagttttatgtccctccctttttgcctatcattcctgtaacaggggactactgggttttgttcattgatggtgattaccagtacgctttgattggccaaccaagcaggaattgcctttgggtaagtaagcctatttgccttttacttntcatgttttggtcttgtctcagttttttttctccaagttttaatttg

SEQ ID NO: 226637 - DNA, 208 bp, Glycine max
aacggatctggagcactgatctcaccctgctaatgaacatgtgccatgactgggctattataaggtgagaggctacactgatgctaggcttctcatgacggagctcgtgacctgaaggaaacagatcgaaactttacattactaaacggcaggtacagtgagaccatccaagacgctttgcaaagagaatgccctgaactaggctcat

SEQ ID NO: 226638 - DNA, 498 bp, Glycine max
gatggaaaaatgaatcgtttctgtgatgtatcccaaaagtacaattcgaagagaagcatcatcccaaaactcaaatttcggaaaatcaacaagcacaattttcttcagcagcaaaaaaaaaaatctatactttttataccctatcactgaaagtaagaaaaaaaaactgaccctaataataacaccatgatcatgattatcacataacaacagatctctgcgccttcctccgctcataatcagcatcatcagtggggaactcatagcgacaaacgggacacgtgtttcttatccccaaccacggcacaatgcagtcctcatggtaacgatgcgaacacggcaacaccttcaccccttccccaacgccaaactcgtctttacaaaccgggcaaacgacgtcagcttcggtcacaaccaccgacggaagattcctcacgaccgaggcggaagccggaggcttcccattaaacgcatcgtcgttgaattgcccgagcatca

SEQ ID NO: 226639 - DNA, 618 bp, Glycine max
  unsure (1)..(618): unsure at all n locations
agatgatgttactattctagtgaactcatcccctgacaagttaatgggtctgaatctttcctttgccaatggatttccgtctgtcagtaatgcagtgctatgtgccaaagcatcgatgctattacagaatgtgccccctgccattctccttaggtttctgcgggagcatagatcagaatgggcagacaataatatggatgcttacacagctgctgctattaaagttggcccttgcagcttatcaggatctcgtgttggaaactatggaggtcaagttatactcccccttgcacacacaattgaacatgaggagtttttggaggtcattaaattggaaggaattgctcattctcctgaagacacaataatgcccagagaaatgtttcttttgcaactttgcagtggaatggatgagaatgctgttggcacctgtgctgaacttatatctgctccaattgatgcttcctttgctgatgatgcccaccttttaccttctggatntcgcatcattcctcttgaaatctggaaggaagcttccagccccaatcgcacccttgaccttgcatctgctctagacattggtccagtgcaaaccgagcttcanatgatgtgctggaa

SEQ ID NO: 226640 - DNA, 420 bp, Glycine max
gaataaggaaacaagttacatactaagctaataacacataaatagtcataaaatgtgcaatccaagtatttagcgcaaatacagtgaagtccaaccaacaaagctcaagtgtcgagtaaatctttatctaacactttagattacaataagcactactgtactcagaacaaaatgtcaaacaaaagaccagttcataaacataaagcacatacaatgagcattctcttcttcattcagcaccttccaagcaacaactctttcgtacgagacaggtcgccccatgcttgaaagacaaataccaccttgaagacatacaaaaccctgttgaataatctggggaaactctgaaaaaagtatttttcgtccatgatcatcaaatattttctctaaaggtgtatcccgtaatgcaacaagggtggt

SEQ ID NO: 226641 - DNA, 619 bp, Glycine max
  unsure (1)..(619): unsure at all n locations
ctgttcgctactttatacgtcnnccagntnngannttnnnngnnnnnnnncnnnnnnnnnnnnnnnnnnnnnnnnnnnnnnnnnnnnnnnnnnnnnnnnnnnnnnnnnnnnnngnnngngnnnttnngnnngngggngctaatacaagtggcagtttctgaaatcatttttgaagagcgttttgatgatggatggcgaggtaggtgggtgaagtcagactggaaaagcagtgaaggcaaagcaggttcattcaagcacacagctggaaaatgggccagtgatccagatgataaaggtattcaaacatccagtgatgccaaacactttgccatctctgcaaaaataccagaattcacaaacaagaacagaacattggtccttcagtattctgtaaaatttgagcaagagattgaatgtgggaggttacatcaagcttctctctggatttgttaatcaaaagaagtttggtggggatacaccatatattttaatgtttggaccagatttatgtggcacggatacaaagaagctccatgtgatactctnctaccacggtcaanattaccccataaagaaggacctgcaatgtgaaactgacaggtttactcacttctacaca

SEQ ID NO: 226642 - DNA, 580 bp, Glycine max
aatcccggaaacaatttgaagaggaaagaaagtggtggtggaaaatcagctttggatgaaatgatgagaatgggtttaaatgccattgcatgagtgaagggcaccagcgtcaaatgcagatttttggacaaaacccacaccggatagttgagggctattccgaagagtttgagagtacttttctggagcacatgaagcgcagtcaccgattcagccgtgtggcagccactgtagtttataacgaatacataaatgacagacaccacattcatatgaactctactcagtgggccacgcttactgagtttgttaagtacttgggtcgaactggcaaatgtaaggttgaggaaacacccaagggatggttcattacatacatagacagagattccgaaacccttttcaaggagaggatgaagaataagagaatcaaggcagatatggtagatgaagaaaagcaagagaaggagatcaggagacagattgaaaaggctgagcaaatgatgcagccgtctacttctgaggctgatcagccttcacaggttgagccttcgagggaactaaatatggaagatggaat

SEQ ID NO: 226643 - DNA, 513 bp, Glycine max
gaaaattccaatctcgatgcaacttggaacttgcagatctagataaggttgaagaggaagaggacattcttgcacttagaatgttgatacagcagcatcaacgtcacacaaatagtctgctagccaaagaagtgcttgatgattttgagaatcttcttcctaaatttatcaaggtgttccctagggagtataaacgtgttcttgcaagtatgaagtctgaggaaacctccaaagatgcattggtgcatgctgctaaagacgaccaagatgatgaagcacaagcagtggagaaggatgcttttgaagagcttaagaaactggtgatggcatctttgaatgaggaaccgagtcaggctgaatcacccaagaggccaagtcgagtcactggtgccattaaacatagagggtttgttgcttatgagcggatgggtgttcagtatacggatcctaatgttcgcatgactgattggaaggaagtgatggaggagacaaagcctgatcccctactgaaaa

SEQ ID NO: 226644 - DNA, 532 bp, Glycine max
gaacaagttttctcaacatactctgacaaccagcctggtgtgcttatccaggtctttgagggtgaaagagcaaggaccagagataacaatttgttgggcaaatttgagctatctggcattcctcctgcacccaggggtgttcctcagattacagtgtgctttgacattgatgccaatggtatcttgaatgtctctgccgaagataaaaccactggccagaaaaataagatcactatcaccaatgacaagggtagattgtcaaaggaagatattgagaagatggttcaagaggctgagaagtacaagtctgaggatgaagagcacaagaagaaggttgaggccaaaaacgctttggaaaactatgcatacaacatgaggaacaccgtgaaggatgacaagattggtgagaaacttgacccggctgacaagaagaagattgaggatgcaattgagcaagcaatccagtggttagacagcaaccagcttgcagaagcagatgagtttgaggacaaaatgaatgaattggaaagca

SEQ ID NO: 226645 - DNA, 534 bp, Glycine max
  unsure (1)..(534): unsure at all n locations
gatttaggtcagaagatgtggagaatcaatcagcggattgtgaaattgatcgtggaacttatgaggaatcatgagacttcagaatcattggtaattgtggcaagttcttcagatttactactgcgagccacagatgggatgctggttgatggagaagcttgcactttaccacagttggagctattggaagcaacagctagagcagttcagccagtgctcgagtttggagaatctggattggctgtggcagatggcctttcaaaccttttaaagtgtcgcctctcagctacaattagatgtctttctcatccaagtgcacatgtccgagctctgagtatatcagttcttcgtgacattttgcatactggttcaatcagatgtagtcctaaacctcggagattaaatggcacccacaacccctcttatcaatacttcaatttggatgtcattgactggcaagctgacatagaaaaatgcttgacttgggaagctcacagccgactttcaacggattgtctattaactntcttgata

SEQ ID NO: 226646 - DNA, 430 bp, Glycine max
tttttttttttttttttttttttttttttttttttttttttttttttttggttttggttttttttttttaaaagagagaagaaaagaaaagcccgcctgatcataccttaatccaaacaattggaaatgacttccatttcaagctaaatcaacataagccttacccaaaatgggaccatttataaaagggcctggttaccgggtttttcgttactggacaagactggtctatcgagagcagactcacaagccagttcagggggaaacttaatttagctaccgtgcatacatgattccaaatgggctttttataaacatactagaattatgactgcaggtcttttcaacaggactagcagaattatgcttatttgcaaacccgtttgttcaataagcctattaataacctttttttttctatacgcctagg

SEQ ID NO: 226647 - DNA, 542 bp, Glycine max
  unsure (1)..(542): unsure at all n locations
caccaacaaagattgacaaatgccggattgtggatgcaataatctcccatggatgtttcctgagagaatgcactgtccaacattccattgtgggcgaacgttcacgtttggattatggtgttgaactccaggacactgtaatgatgggagctgactattaccaaactgaatccgaaattgcttctctgctggcagaggggaaggttcccattgggattggaaggaacacaaaaattaggaactgcataattgacaagaatgcaaagatcgggaaagatgtcatcatcatgaacaaagatggcgttcaagaagcagatagaccagaagatggattttacattcgatcaggaatcacagtcatattagagaaggcaacaatagaagatggcactgtcatataaataaatgggtgngaagtacttatttcatggactggtgtantggctagcagtactagctcgaagaagcattccaggaactttggggacagaaggattccaatgaaaaatcagcactccccttttgctatatatgcaacacat

SEQ ID NO: 226648 - DNA, 583 bp, Glycine max
ctcgagccgttgcactgtaaaattactcattaaatttctttagtttaaaaaattaattaaaaatctaaaaaaataaaaattctactaataactaaacctttttagaatttagaatataaaaattctactaatcaattttaaccaaatctccaaatacggttgaaactcagtgggtagagtaggggatttgccagccatgtccgttgaactcaagctctctcgttccaatcgtatctatcgcccttcggtaaaaccttaaccaacatctctctctctctctctatatatatacattgttgatgatttgaatttccaggaagctctggaaggaaaaatcgttgtcaaaactcagtcttcaatctcccactatggaattcgccttactgtcaaaggatccgtcaacttgcaggttcgtggaggatcagctggggttgttgaatcatttacggtgttattaagcccatccctattgtgaataggaccattgaggttaaatcttctggaagattgggtctggtacatcagagataccattctcagtgaatcttagacagcgggatgaaaatttagaaagatttatgag

SEQ ID NO: 226649 - DNA, 487 bp, Glycine max
ccgattgctagaatggcatttcgatgctcaatcgtcacttgaaccatactctgctctcttgctcttgcaggagagagccatggccatgcatcgctacctgaggaagattatggtgaagctgattggccaaacactgccattcgcactgcactgcgagagcttataaagcctctccgtgctggtgttgaaagcgatgaacgccctatgcatatagatgatacacagtacccaaacacattcttctataaagaagaccttaattcaggcaaaacagtgaaagtccaattcaccaagcggccctatgcacaaccttatggtggatatacatggctaacggatattaaagacacctctacagaaggatgtaggtctgaagagatatgcatcatgacagaagcgtatgatgcagaagagaagttcagggcataatccttgggcacagtgaatggctgtgccatttcaaagctgggaaagaacattcaagtac

SEQ ID NO: 226650 - DNA, 451 bp, Glycine max
agacttaaaaaagcacactgcatattcatcaaagcattatcaaagcacactgccttctaacagcacacgtacatctaaaggtgaaaatccaggtcttgcacaacatacacaacacaccataatctatattatatgcaatcttatggtagcccaaaatgcaaatgcttggactaataaaacaacaacgctagccctagacgcagcgtccatagataaattgggtacccataaaatggtcttgctttcaaggaaacggttaccagggttagttacaggatcaactcccatgagttcatgaagcacgtgatgattcattccatagagttatgactggcaaacaccaagggcccgagtttcggatgcatcaccagtcaccaatggtaccatgaaagccgctgaatcacggactttatggcaataaaatactgcagtcctgaaatccagaccatga

SEQ ID NO: 226651 - DNA, 495 bp, Glycine max
ggcttaaatgctgtgagaattcccgtgggatggtggacaaccctagacccaacaccaccaaagccatttgttgggggatccttggaagtgttggataatgccttcacatgggcagaaaagtatggaatcaaggtaattgtggacctgcatgctgctccaggctcacaaaatggaagacctcacagtgcctcaagagatggatatctagaatgggatgattcatacatatctgacactgtggcagccatagactttctagctgaaagatatgctaacagttcaggtctagttgcaatagagctaatgaatgagcctcagggagttaatttggaaagccttaaaagctattatcaagcaggttatgatgctgtgaggaaacacacttgtagtgcctatgtgataatgtctaaccctcttgatagagattcaaaagtgcttttgtcctttgctggagctctcagcggaatgggcattgatgtgcactactacaatctc

SEQ ID NO: 226652 - DNA, 531 bp, Glycine max
attcccattgcaaggccacaacttgtcacgttaccaaccattaacaacgttgaacaaaacacgggtctctctcagttgtgttcacagaaaccgctctacctttcatccactgagaacttggcattggtgaagagaaggagggagactgagtgccaggcctatgaagccgataggtcacggcctctggagattaacattgagctgccgggcgaagaggcggcgcagaggttcaagattgggctgtattttgctacatggtgggctttgaatgtggtgttcaacatttacaacaagaaggttttgaatgcttttccttacccatggctcacctccactttgtcccttgctgctggctccctcatgatgttagtctcctgggccaccagggttgctgaggtcccaaaagttaacttggacttctggaaggcctatgttcctgttgcggtggcacacacaattgggcatgttgctgcaactgtgaacatgtccaaggttgctgtttcattcactcacatcatcaagagtggagag

SEQ ID NO: 226653 - DNA, 545 bp, Glycine max
cttcttcttctcttaaaagttattaagagcttttgcttttctttctgcgcgcttttcccaattaagtagttcttccttttctcaaagcaaaaaaaatgttcatcgagagtttcaaggttgagagtcctaacgtgaagtacacagagactgagattcagtccgtgtacaactatgaaaccactgaacttgttcacgagaacaataatggcacttatcagtgggttgtcaagcccaaaactgtcaaatatgaatttaaaaccaacacccatgtccctaaactaggggtaatgcttggggtggggggaaacaatggctcaaccctcactggtggtgttattgctaaccgagagggtatttcatgggcaacaaaggacaagattcaacaagccaattactttgggtcgctgacccaggcatcagctatcagagtggggtctttccaaggggaagaaatatatgctccattcaagagcctgcttcaatggtgaaccctgatgatgttgtggttgggggatgggatatcagtaacttgaacctggctgatg

SEQ ID NO: 226654 - DNA, 575 bp, Glycine max
gaaagcttgctgacaactgcactggtctccaaggttttctggttttcaatgctgtgggtgggggcactggctctggtcttggttcccttttgctggaacgtctttcagtggactatggcaagaagtccaagcttggtttcactgtctatccttcaccccaagtttcaacctctgttgttgagccttacaacagtgtcctctccactcattcccttcttgagcacactgatgtggctgtcctgctcgacaacgaagccatttatgacatctgcagacgttcacttgacattgagaggccaacctacaccaaccttaatcgtttagtttctcaggtgatttcctcactgaccgcttccctgaggtttgatggtgccttgaacgttgatgttaatgaattccagaccaaccttgtgccataccccaggattcacttcatgctttcatcttatgctcccgtgatttcagctgagaaggctcaccatgagcaagtatcagttggtgaaatcacatacagcgcattcgagccatcatctatgatggccaatgtgatcctcgccatggaaaatacatggctt

SEQ ID NO: 226655 - DNA, 487 bp, Glycine max
gggcagtgccggcgcgcgctgaagtttgctaggttcatgagcaggttcgggaagagttaccgaagcgaggaagagatgagggagaggtacgagatattctcgcaaaacctcaggttcatccgctcccacaacaagaaccgcttgccctacactctctctgttaatcattttgctgattggacttgggaggagttcaaaagacacagactaggcgctgcccaaaattgctctgccactcttaacggcaaccacaagctcactgatgctgttcttcctcccacgaaagactggaggaaagaaggaatagtgagtgatgttaaagatcaaggcagctgcggatcatgctggacattcagcacaactggggctttagaagcagcctatgcacaagcatttgggaagagtatctctctttctgagcagcagctagtggattgtgctggccgtttcaacaactttggctgtaatggtgggttgccatcacaag

SEQ ID NO: 226656 - DNA, 552 bp, Glycine max
  unsure (1)..(552): unsure at all n locations
aaatcatcctgaactccagaatatacccatctattatgcttctccacttgcaaaaaaatgtttgactgtgtatgaaacatacaccctttccatgaatgacaggatccagaatgcaaagtcaaatccgttttcctttaagcacgtatcggctttaagtagcattgaagttttcaaagatgtaggaccatctgtggtgatggcaagccctggtggacttcagagtggcttgtcacgacaattatttgatatgtggtgctctgataagaaaaattcttgtgttttaccagggtatgtagttgaagggacattggcaaaaaccatcatcaatgagcccaaggaagttactctcatgaatggactcactgcacctcttaacatgcaggtgcactacatttccttttctgctcatgctgactctgctcaaacaagtgcgttcttagaagagctcaatcctcctaacataattcttgttcatggagaagctaatgagatgggcaggctcaagcagaagctcataagtcaatntgctgatcgcaacactaannatcttac

SEQ ID NO: 226657 - DNA, 547 bp, Glycine max
ggctactttaatcagtgttttgatcacaaccgttttctatatgttatgtggctgctttggctatgcttctttcggagatgcaagcccgggaaaccttctcactggcttcggcttctataacccatattggctcattgacatagccaatgttggcatagttatccaccttgttggtgcataccaagtttactgccaacccctcttctcattcgtggaatcacatgcagcagcaaggttcccaaatagtgattttatgagcagagagtttgaagtaccaatccctggctgcaaaccctacaggctcaacctcttcaggttggtttggaggacaatttttgtgattatgtcaactgtgatagccatgctcctaccattcttcaatgacattgtaaggcttattggagccattggattttggcccctcactgtttatttaccagtggagatgtatataactcagactaagataccaaagtggggcccaagatggatatgcctacacatgcttagtgctgcatgctttgtagtgactctattagctgcagca

SEQ ID NO: 226658 - DNA, 551 bp, Glycine max
aactctgaaaacatataatttttttatataggtaaaaatgtctacaaggttactaagcaataaacaagtaagaccacattcctatagatttcaatctgcaagaattttctctttatttttctttcttgttgctaatgaaatctttgacaatggtgatcatgatcactaagtaattatcctattcaattagtagctggtgacgaatggcttgtaaactttaagatcatcaattaccccagcaatggaacctgctgcagctaatagagtaactaccaagcatgcagcactaagcatttgtaggcatatccatcttgggccccactttggtatcttagcttgagttatatacatctccactggtaaataaacagcgaggggccaaaatccaatggctccaataagccctacaatgtcattgaagaatggtcggagcatggctatcacagttgacaaaatcacaaaaattgtccttcaaaccaacctgtagaggctgagcctgtaaggtttgcaaccagggattggtactttcaactctctgcttataaaaatac

SEQ ID NO: 226659 - DNA, 559 bp, Glycine max
  unsure (1)..(559): unsure at all n locations
agaagaacaagtagttgagaactaagaaggagaagcaaatggcttcctcaatgatctcttccccagctgttaccactgtcaaccgtgccggtgccggcatggttgctccattcactggcctcaagtccatggctggcttccccaccaggaagaccaacaatgacattacctccattgctagcaacggtggaagagtgcaatgcatgcaggtgtggccaccagttggcaagaagaagtttgagactctttcctacctgccagaccttgatgatgcacaattggcaaaggaagtagaataccttcttaggaagggatggattccttgcttggaattcgagttggagcacggtttcgtgtaccgtgagcacaacaggtcaccaggatactacgatggacgctactggaccatgtggaagctgcctatgtttggttgcactgatgctttcangtgttgaaggagcttcagaggctaagactgcataccccaacggcttcatncgtatcatcggattcgacaacgtttcgccagtgcagtgcatcagcttcatcgcctacaagc

SEQ ID NO: 226660 - DNA, 547 bp, Glycine max
aacacaacacaatagcttattcattagttctcatccattaatttccattgaagtccgaaaacagaaaccaaaaatacaggatgatgaaatctcaaaaagcaaaaacaaatgggaatgtagtttaagtacaaacaaacaaagtggggtggcggctacaaatgctttgcaaatttttcacacttagaagcctgggggcttgtaggcgatgaagctgatgcactgcacttggcgaacgttgtcgaatccgatgatacggatgaagccgttggggtatgcagtcttagcctcttgaagctccttcaacacctgagaagcatcagtgcaaccaaacataggcagcttccacatggtccagtagcgtccatcgtagtatcctggtgacctgttgtgctcacggtacacgaaaccgtgctccaactcgaattccaagcaaggaatccatcccttcctaagaaggtattctactttctttgccaattgtgcatcatcaaggtctggcaggtaggaaaagagtcttaaaacttcttcttgtcaactggtggccaca

SEQ ID NO: 226661 - DNA, 450 bp, Glycine max
cctagagcttgcacctattggtatcttctacaatatcctaaagcgtttttcttcttcttcatcaccatgtctttactttcagacctcatcaacctcaatctctcagaatccacagaaaagatcattgctgagtacatatgggttggtggatctggtatggacctcagaagcaaagccaggactcttcctgggccagtgagtgaccctgcaaaacttgcgaagtggaactatgatgggtctagcacagatcaagctccaggggatgacagtgaagtcattctatacccacaagctattttcaaggacccctttaggagaggaaacaatattcttgtcatttgtgatgtgtacaccccagctggtgagccacttgcaaccaacaagaagtatggtgctgccaaaattgtcagtcaccctgatgttgctgctgaagaaccatggtatggtatt

SEQ ID NO: 226662 - DNA, 481 bp, Glycine max
aaaaagtgaaatcaagaagcaattcttgttattaatgaagagattattctctaccatacacatggtacatggaggctcaaaagaccacttggcaattcctaactaaacaacaccttgcaaatataaaattttagatcaaatgactattgaacacacaattttaagtggtccaaatctagagacatatgactgtgttttcatggtttccagaggatggtagtctctgcgatcatggaggtgactacatagggatccatattagaagcaggccttctgtcctcgaagtaacctttgccatttttctctgtgtctcttccaactctaatggagcttccacggtttgccacaccccaagagaaggtgttgatgtctgcaggttcatgtcttcccgtgagacgtctctcgttgacttctccatatgctgcgatgcgctccttgtgcctcaaaccaagcttttcaatggccctcttgatcacctcat

SEQ ID NO: 226663 - DNA, 478 bp, Glycine max
attacatctcgttcttctcgtccatccgtaaccatgtctcaaactgttgtcctcaaagttggtatgtcatgtgaacgatgtgacggagcagagcagagagttttaggaaactcggatggtgtggaatcatatgacattgatttgaatgaacataatgtggtcctgaagggcaatgtccagactgacacagggcttgcgaccgactccaaaactgggaagaagactaccttttgggaaggtgacacagctgcatctcgaactagcgcaggagctgcctagatcatttcgctctattatgtgcaggacaagtagctgcgtggatccaatactattgtatggacttgagattacgatgggacttgttatctggtgtactccagcgtgacgcatcatacattgctgaatatgactggctctgacatctgtgctactgaatcaatgtgctgttattgccagtataacttcctttggcaaaaag

SEQ ID NO: 226664 - DNA, 436 bp, Glycine max
caaaggaagttaaactctcaataaaagcacattaatacaggagcacagatgttgaaagccgtgatatacggcagtttttgttgcgacacactaaaatacacctgatcacaagttcgatcgttttttcaagtccataaaatggcatttgatctacgcagctacttcttctgcacattatagagctaagtgtgctaggcaatggctgtgctaggatcggatgctgctggatcaccttcccagatggttgtctacttcccagttttggaaacggtcggaagaactgtgtctggctggacatttcccttgagtaccaccttatgttacttgaaatcaatgtgatatgattccacaccatgcaagtgtcctaagactgctgttactgctccaacacatacttgacatgacataccaacttcgaggctacagtctgagacat

SEQ ID NO: 226665 - DNA, 560 bp, Glycine max
gatcttacggcatcaaatccctggttgctttcgcagatcgctcccttttgcaactccaactcccttctcttgatgtccaccatcagaataggtgtgctcctctcctccatggggactgtgatgcttaagatccaagcttgggagacagagaaagagaaagagaatggacgccattgattctgtgttcgatccgctgagagaattcgcaaaggacagcgtgaggctcgtgaagcgctgccacaaacccgatcgcaaagaattctccaaggttgccgtccgtactgcaattggtttcgtcgtgatgggattcgtcggtttcttcgtgaagctcattttcattccaattaacaacatcattgccggatctggttaggatgaagggaactacaattgcctcagaattcaggttgtcaagcaaaaggaggtagacagagttcccacatcaatagatcattttatgcccccaatcttagttctggtttcatttttgttttttcttatatctggaaacgttaccttagatgtaaaattttatttatcctttgctagaccttgacaca

SEQ ID NO: 226666 - DNA, 489 bp, Glycine max
  unsure (1)..(489): unsure at all n locations
atctgcagattcttgctaaatgaaacaaaacgttattctgcaaaggccaataaacagccatcaaaataaattcgaaagcaaagtcaacatagaatcaaatcaagtttcaggtttgaccattgttttttcctccttatcctaaatcaaaacaatgtgtcaaggtctaacaaaggataaataaaattttacatctaaagtaacgcttccagatataagaaaaaacaaaaatgaaaacagaactaagattgggggcataaaatgatctattgatgtgggaactctgtctacctccttttgcttgacaacctgaattctgaggcaattgtagttcccttcatcctaaccagatccgacaatgatgttgctaattggaatgaaaatgagcttcacgaagaaaccgacgaatcccatcacgacgaaaccaattgcagtacggacggcaaccttggagaattctntgcgatcgggtttgtggcaacgcttcacgag

SEQ ID NO: 226667 - DNA, 585 bp, Glycine max
gttatatgaaatattatgatgtgtagtttatactttaaagcatccacaaaggaaagaaagaaaaaaaggcataatgaagtgtgaaaacaaaaactaaaatccaaattgatacaacaggaaaatatgatggagggtgtatttattgatttattttctttcttctatgccttttgttggaatcaggcaaacatgtcagagagggttgggagctttatctctcccttctgagaaagaggaatggtgaagttgccaatgacaggaaggtcaataactagaccaagatccaattggtaatcaatgtcccaatctgcaccaatgtcctttgccaagctcagtaatatgctatgaggcaccttcactggcacatccagcattgttgtgtcacttgccttcagtgaccctgggtcaagtattgtccctgatgctatctccttgccagcacttttgagggagtacttgatctcacaaatgggaatgggagtggaataagggttggaaacagagaccttagccaaatactcgacgctgtcgcggctcacgcgcttgaaatccacgtcggtgacactcgcctcgggcttggcatgt

SEQ ID NO: 226668 - DNA, 448 bp, Glycine max
ggcgaagaagaaatgggttccaaggcgaagaagaagggttcaccggaggacattctggaaaccctaggagacttcacgagcaaagagaactgggacaacttcttcaccctccgcggcgattccttcgagtggtacgccgaatggccccatctcagggacccactcctctccctcctcaaaaccatccctctccctctcccgcttcagctcctcgtccccggctgcggcaactcccgcctctccgagcacctctacgacgccggccacaccgccatcaccaacatcgacttctccaaggtcgtcatcggagacatgctccgccgcaacgtccgcgaccgccccctcatgcgatggggcgttatggacatgaccgtcatgcagttcgaggacgagagcttcggtgcggtcattgacaaaggtggactcgatgctttgatggagcccgagc

SEQ ID NO: 226669 - DNA, 521 bp, Glycine max
  unsure (1)..(521): unsure at all n locations
gaaaaaaccctaaaaccagaaaacgttcctcattgaaaaatcccatctttcatttcaacgttcctcaatagcgcattctagtcttcacgagcaataatttttcgattgctttcccaacatgaccgcttccaataagaaaaaccccaaagagaaaccaattcgccgcaaggaagaaaaaccggaagaaccggaagtgccgaaatacagagatcgagctaaagagcgtagagaggatcagaatcctgattatgaacaaactgagcttggatttcatgcagttgcaccacctggtactgtggatattcggtcatctgatgcgcacaagttatctattgagaagagcaagtaccttggagggtgatgtggaacatacacatttggtcaaaggtttggattatgcattngctgacaaagtaagaagtgagatagataagaagccagaggctggggatgacgttgaggggatatccaggtctgctatggaagacaacangtgtcgattccacagcactgcaagtcag

SEQ ID NO: 226670 - DNA, 576 bp, Glycine max
cataaaaaatatgaagtttctatttaaggaaaaaaatagatcatactaataatggaattctcatctcattctataaacattacaatgtggtaactagaactcatattctaagcttctttccaggtgttggttcatcatcataatggttacccccctcaccattcgtgtccttttccatcttctttctggcaagtatcttattgatcttgtgcaaatcattattgagcttctggtccttgttttgctttcgggtcttccggccatcttgcatcttcacaccgaactggaatgcagcttttggcattgcttccttctgctcattgtaagttgcccattcctcttcagtttcaaagtcccatctatgaagacgaccctttgcccttccacccatgtccattttggacaagtcgtcttcatcatcactgtccactatctcacggttatattcttgatatcctgggtaacattcagagtaactctctgagatgaagttgggatctttttcacgagcatctttctcccttcagctgtgaagtctctggtcatctcgcttaaacactgatcctaaaccccgat

SEQ ID NO: 226671 - DNA, 475 bp, Glycine max
  unsure (1)..(475): unsure at all n locations
acacgaacaacacaacagagagacagagcattaaggatgttggagctgtgccgcaagccactgaagatgtggttcggtggtggaggcaacgacgacggcctcctctggcacacagaccttaagccccacgcttcagggaactactcaattgcagtggtgcaagctaattcatccttggaagaccaagcacaagtatttacctctccctccgcaacctttgttggtgtatacgacggtcacggtggtcctgaagcttcccgtttcatcaccaaccacctcttctccttccttcgcaaattcactacagnaggagggtggtttgtcggaggaagttataaagaaggcgttcgaggcaacggaagatgagtttttgcgtgtagtgagggaatcatggattgcgcggccacagatcagcttcgtgggttcgtgttgtcttctgggagcgatttaaaggggagtctttatgttgctaatc

SEQ ID NO: 226672 - DNA, 551 bp, Glycine max
gcaacctcttctagtgcagctctcgccaatcgttttgcaattcctattctgggacttctggagatgatttcaacagccgcttcatcagttaaatgctcccaaagtccgtctgatgcaaagatcaaaaacagatcatctgccttcaatttacgcgccaatatcgatggttcagctgtcattacaggtctcctcaagtatagtggacatacaaattgttggaacagaggattagtgtcaaattctggcttctttaggtaaacatctcctattgatcttgagacctgaataatgcccttgattcgccaaactccacgagtgcaaaccacaatgtgtggatcatcagggtgaagagcttcaacctcctttctaacattctccactccaacattatgatcagtggacaaacgctctgccaccacagcaccagcaccacaattcacctctccttccaacgctttccgacccaaaaccgccctcgaatccccgagattagcaacataaaagactcccttttgaatcgctcccagaagacaacacgaacccacggaagc

SEQ ID NO: 226673 - DNA, 286 bp, Glycine max
gccatctctgtagtccgattgaccacaggctaacatttggtactaaaagccaacgatgtacctgataatgagagacttggcgatgctgctactggacatggtggacaggcacagttcaatctagcctagcaggcgaccaactgtgcaattatggtgaagtaggaatgcatactgggagcgtcagaatatataggacgacaattctccacatatggcgagaggaaacctgtggaggatttcttgatggcaggggattacctcacctcatgggatatctcatccattt

SEQ ID NO: 226674 - DNA, 492 bp, Glycine max
gtcaattccaattcccacaatcttaaaccttcaaattcttcacctttccttcacttcagagagcgagtgtgagacagacaacaaaacagaatgggtgtggtggtgatcgacggcagcaccgtgcgcgacttcgtgaacgacgaggcggccttcgcgaagagcgtggacgagcagttcggggtgctggacctcaacaacgacggcgtcctctcgcgctcggagctccgcacggccttcgagtccatgcgcctcatcgagacgcacttcggcatcgacgtcgccacgccgccggatcagctcgcgaagctctacgactccatcttcgacaagttcgacggcgaccggagcggcgccgtcgaccgtcgcgagttccgggatgagatgaggaagatcatgctcgccatcgccgacggcctcggctccttccccatccgcatggtcctcgaggatgatccccatagtcttcttcagaaagctgcagatctcgaagct

SEQ ID NO: 226675 - DNA, 502 bp, Glycine max
attcctagaattacataaccgatcaacagtctccataataataacagtgtcacatacattacacacagaacagatcctcagcttcgaaacacagtcagggcgctctctacataaaccctttattaaggaaaaaaaaaacaaagtgaactcacgaaagcacgatcaattactattaagtttaccgaaccgaaaacggcgccgttttggattcaggtcttggaagcttcgagatctgcagctttctgaagaagactattgggatcatcctcgaggaccatgcggatggggaaggagccgaggccgtcggcgatggcgagcatgatcttcctcatctcatcccggaactcgcggcggtcgacggcgccgctccggtcgccgtcgaacttgtcgaagatggagtcgtagagcttcgcgagctgatccggcggcgtggcgacgtcgatgccgaagtgcgtctcgatgaggcgcatggactcgaaggccgtgcggagctccgagcgcg

SEQ ID NO: 226676 - DNA, 525 bp, Glycine max
  unsure (1)..(525): unsure at all n locations
ctcgagccgctctgatctcactcaccattcaccaacctgcttctctgttctcttctttcccttcccaagaagaagaagaagaagatgccttcttcagaatcatcaacaggcttctccgaaaccatttgtgtgaccggcgctggtggcttcatcgcctcttggatggtcaaactcctcttggagaaaggctacactgtccgaggaaccctcagaaacccaggcatgcctatctatttaagttatatgacgtgtagcggggacatgcatgcatgaattttattattttgggttggttttcagatgatcccaagaacgggcacttaaaagagtttgaaggagcttcccagagactaactctgctaaggttgacctccttcatcttgactccgttagatctgttattaacggctggccatggtgtctatcacactggctttcccgtcaccgataaccccgagaaatggtggagcctgcggtgaatggagcntagatgtgatcatagcagctgcagaggtaaagttagac

SEQ ID NO: 226677 - DNA, 492 bp, Glycine max
acgaaatccaaatacagaaatcttctaatgtaggattctctataataatataagatgagcccagattgccaaaagctgcagcttcttgtttgttgacaaattagataaaaagggatagctcgtttaaggtttcacagtagttgaatcttcctgctgccttgcaggaacaggaaggtgccctttctcctgcaggttcttgacggcttcatataaacactgactcactggggtgaattccaatcccaaatctttcagtttttgatttgaaaaagtgtagggttttgctctcggattcttttcatctgaacacttggtgggaactgggtagtcggggaaatacttggcgagaatttcaactaattctccacggtggagagagctttcggcacatatgtatctaccagaggcagaaggcttctcataaacaagtatgtgggccaatgccacgtccctaacatgaacatacgcctgtgtggcatttgcataagtctt

SEQ ID NO: 226678 - DNA, 480 bp, Glycine max
aaccctatacatgctgcagcagcatcagctcttgcattttcagttggtgcattggtgcctctccttgcagcctcttttataagggactataaggtgaggcttggtgtgattttgggagcagtgagtttagctcttgtggtgtttggttggttgggggcagtgttgggtaaggctccaacatttaggtcttgtgtgagagtcttgcttggggggtggctagccatggctattacttttgggctaaccaagttgattgggtcaagtggtctttagcttgattatgatccatatatatatatgtgtgtgcacgcttttatatatcatttaggtcttgtgaaagagagttttgctaactatgtcaattaagtatattctatgtatgtgcttttatcatttctctctctctttacagagtcccctcattttgctttcacaataaatggtgaggtgagacgtgaatagatgaaagttggcttgggt

SEQ ID NO: 226679 - DNA, 480 bp, Glycine max
accaagccaactttcttctattcacgtctcacctcaccatttattgtgaaagcaaaatgaggggactctgtaaagagagagagaaatgataaaagcacatacatagaatatacttaattgacatagttagcaaaactctctttcacaagacctaaatgatatataaaagcgtgcacacacatatatatatatggatcataatcaagctaaagaccacttgacccaatcaacttggttagcccaaaagtaatagccatggctagccaccccccaagcaagactctcacacaagacctaaatgttggagccttacccaacactgcccccaaccaaccaaacaccacaagagctaaactcactgctcccaaaatcacaccaagccttaccttatagtcccttataaaagaggctgcaaggagaggcaccaatgcaccaactgaaaatgcaagagctgatgctgcttgcacatgtatagggttc

SEQ ID NO: 226680 - DNA, 243 bp, Glycine max
aatataatgataaaaaaaaaataataaaaaaaaaaaaaaaaaaaaaaaaaaaaaaaaaaaaaaaaaaaaaaaaaaaaaaaaaaaaaaaaaaaaaaaaaaaaaaaaaaaaaaaaaaaaaagaacaaaaatataaaaaaaaaaaaaataaaaaaaataaagaaaaaaggaaccaaaaaactaaaaagaccaaaagaaatacgccataactagacacaaaagaagcaaaaaactcacacaagacca

SEQ ID NO: 226681 - DNA, 480 bp, Glycine max
gcggagagtttgcagctgcatcatcgatcatcgtcacctcatggacggacacgattcacaagacccgaagcagagccctgctgacatgactgcctttgtgcaaaatcttctccagcagatgcaaaataggttccagacaatgtccgactccattgttacaaagattgatgatatgggaagtcgcataaatgagttggaacaaagcatcaatgacctaagagcagagatgggagtggagtcctctccatcacctgcgacccctgctaagccaacagaggaaatcaccaaagaagagggttcagcttaagtggcgtgttctgatttcagttgctcgttattcatgtattcatgtattgtattgcacaaggattgatgttatgcatctacttttgtctgctgtagtggttcagaaaacagatgtgctgtatactatgagtgcatctgatatttgtagctactcgtatttttttatgactatgg

SEQ ID NO: 226682 - DNA, 396 bp, Glycine max
cccacctctccatttaagatgcatattttctacaagaccctcaccggcaggaccatcacccttgaggtggaaagctatgacaccatcgacaacctctaagccaacatccatgacaaggaaggaatccccccggaccagctacgtcttgttttcaccggaatgcaacttgaggacggccgtacccttgctgactacaacattcataacgagagcactcttcacctcgtcctccgactacgaggtgatatgcagatcttcggttacacactcaccgaccagaccataacccttgaggttgaaagctccgacaccatcgatgacggtaatgccaagatccaagacacggagggtatccccccggaccatcatcagcttatgtttgccggatagcagctc

SEQ ID NO: 226683 - DNA, 443 bp, Glycine max
gggatattagagtactattattaatgggacacagttgattgtgacacaaaccgaacttattttcaagggacattattacagacccattaaacattaaagttcttcacatgttttgggaacacctccagcattacacaacgagcttaaaaccccccacggtgacggaggacacggtgaagggtcgctttcttctggatgttgtaatcagcgagggtcctttcatcctggagctgcttgccagcaaatatcagactctgctggtccggtgggatgccttacttgtcctgaatcttggccttcacattgtctatggtgccagagctctccacctcgagggtaatagtcttacccgtgggagtcttcacgaaaatctgcataccaccacgtagactcttcaccaagtggagaggagactccttctggatgttgtaacaggaagggtg

SEQ ID NO: 226684 - DNA, 429 bp, Glycine max
cactctctcacatattgcctctctctttcctctttccattgtccatggcggacctcatcgaatctggctgtacttgatcacacatttcagtgactttcaactggcgtgtatgggaagcttctttctacatgaaggcgttttcttcttgtctggacttccctttatatggcttgagagggcacggtggatgagcaagtactaaattcaggccaaaaataacacccctgcagctcaggagaaatgtattggtcgtctgttgctttaccattgtggggtcaatctacctgttatgatgttgtcatatcctgccttcacatacatgggcatgcggagtactcttcccctaccgtcctggaaagaagtcctaattcaaataatcttttacttcattgtggaggactctatattctactggggacatacagtact

SEQ ID NO: 226685 - DNA, 494 bp, Glycine max
agcaaagggaaacatcccaaaattgaaattactgtcaataatgaagtttttctaataacagggcatgaatgtccagaaaaagccatcagcacattgaagacaaacaccagctactacaaaaacacaagaacacataaggagttgatatcatagacatttttcaaatatgcccttttgcaaatcaactctctaatcattcctggatattcctaaaaacgtattcttattgtttcttttgctcgccactgtcttcaactcctatgctcttcaatgctttcaactttctgtagcctatatcagtcccaaatatccggtccatgtaagtaaaagttgatgaatagttcccagacttggtgtacaataaacggtgatgatagtcatggaaatcagctcctccatacaatggaaggaagttggaaagactccatgggaaatggtaaccacaatgagcctcaactgtctctaggactctcagaaccatccataaccagaga

SEQ ID NO: 226686 - DNA, 389 bp, Glycine max
gactggcaccgatggaggatgacttttacctcctcggcggctaggaaatggatctcggccaatacgacgtcagtgaggagagggagatcggctctggcgggctcatgaagaagctgcttacggactgtctaggctgggataccctcgaattcggtgaccatgttctagttcattacacggggactttgctcgacggcactaaattcgattccagccgcgacagggatcttctcttgagacttacgctgggacattggcacgtaaccaaaggatgggatgaaggtattacaaccatgaagaaatgtgaaaatgctcatttcaccgtccctaccgagctagcttatggcgaatctggatcccactctactattactactaatgctacactc

SEQ ID NO: 226687 - DNA, 445 bp, Glycine max
ggaagctatagaatatttactagcttaaaacacgacatttagcgattctttcttaataccagcagcttaaagtttctattaagcgatcagatcccaggactccttctctttctcaaatgacactacctgaactcaaaaatactcggatgagtaaggaggaactacagccaccccctgttgggactctgatgtaccgaacgcttaatcaggtgcaatggtcaacaacgcgaccttaccgttcttcatagtcaatacagctctatcacgtccatcaacaacttgttcctaaaccgttttgaattcaaacagcttctcttcttaatcatggccctgtattaaaaaagcggcaccatggtgtagcttacccattagtttcactttaacaatgggcccctcatttggacgctcatgtccttccccttacttgaggatcttcggtatgacc

SEQ ID NO: 226688 - DNA, 500 bp, Glycine max
  unsure (1)..(500): unsure at all n locations
gacgtcgatgatgaaaatgaaattggtgaaaacattactgcttctcctttgtgtgaaactcttctgttatgcagtgattggtgctcctcaaacttgtcctgctaacaatgaggataaatgcggcgattcagatgaatggaaaggggagtttttccctgacattcccaaaattaaatatgagggtccgtcaagtaagaatgtgctttcatttaaatggtataatgcagaggaggaaattcttgggaagaagatgaaggattggttaagatttagtgttgcattttggcatacattccgtggaacaggtgctgacccatttggtgcacctaccaaatactggctatgggaagatggtaccaattcattaaacatggctaaaagacgaatgagagctaactttgagttcataagcaaactccgtgttgactattggtgtntccacgacagggatatagcccctgatggaaaaactcttgaggaatctaatgcaaacttggatg

SEQ ID NO: 226689 - DNA, 407 bp, Glycine max
cactctcccacatatggctttcttatagacctcattcctcctaacatatggtccggtcatcgggaagctaatactatggaccggctcaaacacaatctcaccacctaattggctgatctctacaccgacatccctactgctatagagtgtgaatctgcataaatgcagttcaatacacagaagatggcacagaccatagggaggctggctgaaaaaacaccacacgttggctaaactgacaggggttggctagtaaaaaaaggctcgacatatcagataatggcacctgatgatcttcatgtctgttcacagctatgagcagcgaacgtaactgagataattaccgggccttactctggtgcctataattatatacagcatacactgaaacggatatatgatagtgt

SEQ ID NO: 226690 - DNA, 266 bp, Glycine max
gactatcgggcatgaggcaactgtgtttacgcttgggctgcctgagaaacggaccaggggctgtccgcttaaacgtgatgccgcaataagatagctttctctgcgactgtatctgaaactgatgacgacgtgtcggctacctctgcgggtctgatgctgaatgtatcttgtacagaagcttgtgctggtgccacatccacctgaatagcgccacactttgcctaaggagatgactcttatggctgcatatcctgctaagccttcaa

SEQ ID NO: 226691 - DNA, 422 bp, Glycine max
aaaaacaaaacactcttatattgatatattagaaagccgtgactaacaacaagatagagagttataatgttcctgtaaaggaataaacccaaattagacatgcatctgattgtatggagtgacgagatctcaacacgaaccatactgacacacatgaactatatttaccccattcagcaatgcccatccgaatctgctggagctaaactatgcatactttagtaggaccgcccacggtgcaccggtattacaaagcatggggctggaaatgaattgtgtgactagaatcgttctgtgttcccggatattgccatggatattgttgcaagagcaggaccaatggcctcctttgcgtaaatgatgcgtcaacgctcgcacgagacatcaaacatttcctatgggacatggacgacaagcttaca

SEQ ID NO: 226692 - DNA, 469 bp, Glycine max
aatcaattgtatatgatattttttggatatttataataattggcaggaattttggtaatataattaaagtttagtttgatgtgaaggtagctgtaaacctagggaaaggactatttttaactgccttctgaccatacttccgccatctgtagccatcctcaagatgatcaacttcactcttggtcataaatgcaaaccgtggctgccgtattcgcttttgccccttgtttttacctttactcggtatctcaggcggtttatcgtcggagacggtggatttctccggtggatcctcgctggagctggaagaaatcgattggttgttcgaccgcgacggcgcggcggcgaccggttcaatcgaatcggtcagagaggactgaaccggcttccacaatccgtcgtcggtgccgatccggttcggctggtccggttcgaggttccacacgaattccctgagtatgctccgctc

SEQ ID NO: 226693 - DNA, 581 bp, Glycine max
cgcagagtctggaaagactattacgcgaaggtggatgcagtagtttacctggttgatgcctttgacaaagagaggtttgcagaatcaaagaaggagcttgatgccttgctttcagatgaatcattggcaaatgttccatttcttgtgctaggcaacaagattgacattccatatgctgcatcagaagaagagctacgttatcatctaggcctgaccaatttcaccacggggaaggggaaggtcaacctcacggagtcgaaccttcggcctctagaagtgttcatgtgcagcattgtacgcaagatgggatatggagatggcttccaatgggtctctcaatatattaagtagattctggcatcatttccccccttatcttgatctaccagcactgtctgcagttacatcagaagaggttttttctgtttttgctattgatgatttcattttgattggattatttaatacaactgcagttatgttatgttatgtgtcaaaatttgtatctttagatattctctcttgtggtgtggaggatattcctgttgaaacactggattctgttgtaagggttatgtatg

SEQ ID NO: 226694 - DNA, 474 bp, Glycine max
ccattcaaaatcttccgggaagaaagtggaataaaatttttccagtgttattattgtgtttctccccggtcatacataacccctacaacagaatccagtgtttcaaacagaatatcccccaccccacatgagaaaatatctaaagatacaaattttgacacataacataacataactgcagttgtattaaataatccaatcaaaatgaaatcatcaatagcaaaaacagaaaaaacctcttctgatgtaactgcagacagtgctggtagatcaaggaaaggggggaaatgatgccagaatctacttaatatattgagagacccattggaagccatctccatatcccatcttgcgtacaatgctgcacatgaacacttctagaggccgaaggttcgactccgtgaggttgacctttcccttccccgtggtgaaactggtcaggcctagatgataacgtagctcttcttctgatgc

SEQ ID NO: 226695 - DNA, 476 bp, Glycine max
  unsure (1)..(476): unsure at all n locations
ggggtggctacagggggacccttagcctggggcttatgctacagcaaggaattgagtcctgataaattctactgcgatgactactataaattaacctacccttgcactcctggcgcagcatactatggccgtggtgccatcccactttactggaactacaactatggaaaagccggggaagccttgaaggtggatctgttgaaccatccagaatacatagaacaaaacgccactctagccttccaggctgcactctggcagtggatgaccccaccagagaagcacctaccatcaccccatgatgtctttgttggcaactggaaacccacaaaaaatgacacattgtccaaaagggtacccggatttggtgccacaataaacttgctctatgggatcaaacttgtggtcagggatcagataatgaggccatgaacaacatcatttcacactatctntattatctntgatctcttggg

SEQ ID NO: 226696 - DNA, 476 bp, Glycine max
accaaaatatattcgaattatagaagagaaaggaaacatcaaaagccaagatatatggcaaagtaatataatctatacacaaattaacaatgagtagtgtccactccaaactcatttcactctcatttgaaggccaaagtagttgaaatatcttgtctacttgttgctttctttattaagaattttttgaaagattcaagaatggaccggccaagaatctcagccaaggaatgctcaatttgtggcagaagatggtgagccagagggcttaaaagcagcttgttcagcacaggagagaacttcattaggccctgcctcttctctgccaacacccaagagatcaagataataaagatagtgtgaaatgatgttgttcatggcctcattatctgatccctgaccacaagtttgatccccatagagcaagtttattgtggcaccaaatccgggtacccttttggacaatgtgtcatttt

SEQ ID NO: 226697 - DNA, 477 bp, Glycine max
aagaaatcctgctggaagtggacttggcctggcaatttgtaggaggttcgtaaatcttatggaagggcatatttgggttgaaagcgaaggtattggtaaaggatgtacagtcacttttattgtaaaacttggaatcccagaccgatcaaatgaatttaagctaccttttgtacctaaagtaccaggaaatcatggatctacaaactttgctgggctcaaagttcttgtcatggatgacaatggggttagcaggacagtaacaaaaggacttcttatgcatttaggatgtgatgtaacaactgcaagctcaagtgaagaatgtctgcgtgttgtttctctggaacatgaagtggtcttcatggatgtttgtacagggttagatggttatgaacttgcagtccgtatacatgagaagtttacgaagcatcaagatagaccactgatagttgctcttactggaaacaccaaaagggtaca

SEQ ID NO: 226698 - DNA, 416 bp, Glycine max
  unsure (1)..(416): unsure at all n locations
cactgttctctatccggcaaacagatagacaggttaggctatggctgatgacagcgttgctgtctgcccagtcatgaggccgcaatatgatggcgatcaaacggcgtgtttgtgaagcatggaccctgagggcggcaaagtacccttgactgaccgtgacatgatctgngactcctgggtggatctctgacatcacggctatgatgccggcacaggctcactcctctgctgtggaggagaggttgcttgagggaatgtcacaataccaaaatgttgtgggctttcacggctcaacatatgggaatgttctagatatggagggaggcattcagctgactattacgggacaatgtgccgaccacgaaatgatcactcatcttcctctcgtgcactagtccagaccctaaactggtttt

SEQ ID NO: 226699 - DNA, 547 bp, Glycine max
  unsure (1)..(547): unsure at all n locations
ggttcttgcagctgttcttgtggggactgattccgaagtcaaggagtttttctcatttcagaaggaagctaaatttacagacatgaagtctttggtgttcctggtggttgcaaatgggttagctgctggctactccttaatccaagggttgcgctgtatccttagtatgatcaggggaagagtactcttcagcaagcccctagcttgggccattttttctggtgatcaggtaatggcctatgtaacagtggtggcattggcggcggcagggcaatcgggtatgattgcaagggttggccagccagaactgcaatggatgaagatatgcaacatgtatgggaaattctgcaaccaagtgggagaagggatagctagtgcttttgtggctagccttagcatggtggtcatgtcttgtatttctgctttcagcctcttcgtttgtatggtggtaacaaaaccanaaatgtgcattggtaggttagaaactactaccagtggttcaggggctcttctgatatgtagtaatgaatgattatgggtatatcta

SEQ ID NO: 226700 - DNA, 572 bp, Glycine max
aaacgcaagtatctgcttctctgttttggacttttaatgtattaattggaactcgtgctaacagattcacaaacttagccttagccatacgggatgtaaggatatgcaaaagtggctaaatttatcaaagaacctaaactttatattactgccatcaattattaagtgatcattgcaatagatattaccataatcattcactactacatatacaagaagaaccttgaaccactggtagtagtttctaacctaccaatgcacatttttggttttgttaccaccatacaaacggaagaggctgaaagcagaaatacaagacatgaccaccatgctaaggctagccacaaaagcactagctatcccttctcccacttggttgcagaatttcccatacatgttgcatatcttcatccattgcagctctggctggccaacccttgcaatcatacccgattgccctgccgccgtcaatgccaccactgttacataggccattacctgatcaccagaaaaaatggccaagctaggggcttgctgaagagtactcttcccctgatcatactaaagataca

SEQ ID NO: 226701 - DNA, 512 bp, Glycine max
gggtttttgagtgcggtgcggcgatcctagcactctcttctgcagctttcgccgacagcttcattcaccatggctgagcaaaccgagaaggcttttttgaaacaaccaaaagtgtttctcagctcgaagaaaactgggaagggaaagagacccggaaagggtgggaaccgcttttggaaatccattgggcttggatttaagactcccagggaagccatcgaaggaacctacattgacaagaagtgccccttcactggcaatgtttccatccgtggccgtatcttggctggaacatgtcacagtgctaagatgaacaggactattattgttaggaggaattatctccattttatcaagaagtaccagaggtacgagaaaaggcactccaacattcctgctcatatatcacctgctttccgtgtgaaggaagggagatcacgtattattggtcaatgcaggccactttctaagacctgtgagggtcaatgtgtgaaagtgatcccagctggatc

SEQ ID NO: 226702 - DNA, 477 bp, Glycine max
cgaaaaccataatgtattataacaagatcctaaacataaagccagaacgaaacctcaaagaaaatccaaaattgacaaggttttcatatttgttatcatccagaaaagaaatcagatataataattaataaggtaacatttatcttcaataaaaactggaaatcaaagctcacattccagtaaaagccttctttgcaccgctagaagatccagctgggatcactttcaacacattgaacctcacagtcttagaaagtggcctgcattgaccaataataacgtgatctccttccttcacacggaaagcaggtgatatatgagcaggaatgttggagtgccttttctcgtacctctggtacttcttgataaaatggagataattcctcctaacaataatagtcctgttcatcttagcactgtgacatgttccagccaagatacggccacggatggaaacattgccagtgaaggggcact

SEQ ID NO: 226703 - DNA, 476 bp, Glycine max
  unsure (1)..(476): unsure at all n locations
acaagatatgggttcctctaaaatgatgccctatctcaacatgttcctcttctccaacattggcggcgttgtcgctgactacttgatcaccaggagaatattatctgtcaccaaaaccaggaaattcttgaacaccttaggattcttggttgcttctcttgccttggtggtgattcccagtttcagaacttctggtggtgctgtcttctgttcttctgtggctcttggtttcttggcacttggcagagctggctttgcagtgaaccacatggatgttgctcctagatacgctggaatagtgatgggtgtttctaatactgccggtacgttagctggtattgttggtgttgacctgactgggaagcttcttgaagctgctaaggctgctaattctgatctttcaagtcctgaaagctggagaatagtgtttttcattcctggttttctaatgcgtnttaagtcttttgtatttctac

SEQ ID NO: 226704 - DNA, 523 bp, Glycine max
tcgcgatctagaactttaatcgtaaaaacatttttacgattaaagaaactatggaagtgacattcagaaatacataaatgaaaatatcactcttgatgcaagctgggttgtagcctttactagctaggaatagtacaagatggagaaaaaataataacaacaaaaattcatatccagttatgacaacatgacctctcctatccaagaatgatataataaggagatggaataaaaattaaatccccagaataacaacagctcacgagccatgaaaatgacaaggctacctcaatcaaaaattctctccccagttgaaaatagtagaaatacaaaagaactaaaaacgcatagaaaaccaggaatgaaaaacactattctccagctttcaggacttgaaagatcagaattagcagccttagcagcttcaagaagcttcccagtcaggtcaacaccaacaataccagctaacgtaccggcagtattagaaacacccatcactattccagcgtatctaggagcaaca

SEQ ID NO: 226705 - DNA, 466 bp, Glycine max
  unsure (1)..(466): unsure at all n locations
cggttacacaagggtccatccgatnaccntagctactgagcgtatgaactgcagcgctgtcccgtcaggcctgtagagacttcggactttgcaggctgggagacgtcttgccaagctgctatcagttttattcatgtgtgcacacttcatgggaacggacaacgatggggcaagacccgaagcagagccctgctgacatgactgcctttgtgcaaaatcttctccagcagatgcaaaataggtttcagacaatgtccgactccattgttacaaagattgatgatatgggaagtcgcataaatgagttggaacaaagcatcaatgacctaacagcagagatgggagtggagtcctttccatacctgcgacccctgctgagccagcagaggaaatcaccaaagaagaaggttcagtttaagtggcggggtctgatttcaagtgctcgctatttaagtattcatggatt

SEQ ID NO: 226706 - DNA, 479 bp, Glycine max
agacaacttgaggtaccaagccatgaacattgtagctgcgaggctaggccgagctgaaccgcctttgaggaaggaggtggtggagtacatgttggatgttgattcccatatgtggagcatgagaagaagcaaggctaatttcttccgaatcatgtcccttttctctggtatgatcacaatgggaaagtggttcagtgatgtttgcctttggaagaaccatgttacatcagtcctggttcacattcttttcctcatactgatatggtacccggaattgatcctgccaaccgtgtttctctatatgttcttgattggtctgtggaactataggttccggcctagacacctcgctcacatggatactaaactctcgtgggcagaagccgttcaccccgacgaactcgatgaagagtttgacacgtttccgacttctagatcacggatgttgtgagaatgaggtatgacaggcttagaactgt

SEQ ID NO: 226707 - DNA, 396 bp, Glycine max
aataatcaattctgataatatgggccctaaaggataatttcattggtcccctttccaaatgactaccaccggggggaagtacccaggatttttaaaaaggaaatgattataaacaaaaaagtctgtacctttgtataacaaactaaacctttgaaaaaaccagatcacaataaactatctggtttagctgggaccctcttgaaaaaattacttggtactgaaggcattttactcctaaactttggatgccccaaaaagtttaaacctttcaccagagccccccctttgaatggggttgcctagagaaccccagtagcacagaagctaaaccctccaaaaaggctggttgctctggggattttccaactcaggaaagactgaaacctttccccttgg

SEQ ID NO: 226708 - DNA, 484 bp, Glycine max
  unsure (1)..(484): unsure at all n locations
ctcgagccgaatcggctcgagtgaagcctttgctctcatgcctgatgacttgaagtgtgttgcttcccaatttagacgtcttataaacagcaaacaacttcaacacactttcaggttctattccttgcaatggaagacatggggtgcatgtttcatacaagcagcttggcgcagatacaaaaaaaagaaggctgagaggttgttacgtgaagcagaagaaaggatacaagctttggaaaatgaggaagggtcctcacctagctttgctgctacaatatatgcatcaaggtttgcatcaagtggattgcgccacttgcgaagtggtaaacgcaccagagtgccacagccacagagatccctgatgcctcagaagccagatgatttcactgctcnagaaaactagttntaaaaaaaattattgcaactntaattntttatangactgtgcctgaggattaaatctgcatattttacatatccttaa

SEQ ID NO: 226709 - DNA, 557 bp, Glycine max
ctagaggggattttttacagacccatattagtattcaaccaagaaaacatatacacaggtaaaatccaaaccaaacccactaaataattgcaatcctaaatttgtaagtggcagtccaaatataaatctccctactggcctactcttcttttgcctaatggataaacagattccaacaacacatacacagacaccaccctacagctaatccttgttgacacaatcagtgttacagtcagctgtaatttaatactacacgaaacctaaaaagaacaaagttcatgaatcaccaccagcctcagcgacaggatgatcatgttgacgtacaaactgccccttcacccgaggccgctgctctgccagtcttttccggctttgatatcgaacctttttctcgaagcatctctctttccgcttcagtcgaaacttcactagcactgcttctctttgactggagcgatgaggatctgtcactctaaatccatcataattatgacaaccactatcactgaaaccatctggggcgttcttggatactatagctgaagtagcatttc

SEQ ID NO: 226710 - DNA, 464 bp, Glycine max
ggtagaaactgctggaaccggactttttctgaccatggcgaagaggttcgaaatattgggcggaacggcatatatgggttgaaagcaaacgtcttggtaaaggatgcacagacactattattgtccaaacttggaaacccagaccgatcaaaagaaggtaagctaccttttgtccctaatgaggccagaaagaccggatctacaaactttgatagggtcaaagtgcttggcatggatgacaatggggttagcaggacaccaacagatggactatttatgcgtttcagatgtgatgcaacaactgcctgctcaactgaaaaatggctgcgtgttgattttttggaacatgaaccggccttcatggatgtttgtacaggggtagaggggtattaacttgtagtgcgtatacatgagaagtttacgaggcatcaagatagaccactgatgggtgcttttactgggaa

SEQ ID NO: 226711 - DNA, 511 bp, Glycine max
agataactagaaacagtgagatgaaaatgaaggtccttgttttcttcgttgctacaattttggtagcatggcaatgccatgcgtacgatatgttccctctccgaatgaacactgactatggtgcccgtactccggaggtgaaatgcgcaagttggaggcttgctgtggaagcacacaacatatttggctttgagaccattcctgaagagtgcgttgaagcaacaaaggaatacatgcatggcgaacaatatagatcagactccaaaacagttaaccaacaagcttacttttatgccagagacctggaagtccatcccaaggacacatttgtgttcagtatagatggcaccgtactctctaatattccatactacaaaaaacatggatatggggtggagacatttaactcgaccttgtatgatgaatgggttaacaagggcaatgcaccggcactgcccgagactcttaagaattacaacaagctggtgtctcttggcttcaagattatatt

SEQ ID NO: 226712 - DNA, 416 bp, Glycine max
ggaacaagggcgcataatttattaaagccacgaaagagaaaacaacatagggaagtctcttacatgactggttgacacacagctgaaacaacataaagtgaagctggtgcccctattagaacgcatgttattacatatagatagataggagcaagctctattgttgggaggtgaaggaactactgaatgtagtacaggggattaggaagcttaaaggtcctgctttggcctttgtggcctccgaggagatcgttccattggtctccaatgatcccaacaatgttgtatccctgccttatcagattctctctcgctgctgatttgtatgaaactgcatttggagtggacggatcttgtggatccttgagaattaatttttcccatgtgtggttgccagccttctttaagtttgcttc

SEQ ID NO: 226713 - DNA, 250 bp, Glycine max
cctcctcttctcttttcttcctttcttcagcctcttgtcttcgagctagtgcctcttgcatctccctaacatgctttggcactttcttatcagctgcttttttagcctttgaatcattcttctttggttcaattacctcagctttatcttctgctgtttcattttctggtacagttcctgctactgctgctgctgctgctgctgccgccgcagctgccttcttctccttctccttttcctttttcttctt

SEQ ID NO: 226714 - DNA, 480 bp, Glycine max
cagagatttacgaaaaggcggtcaagattcttgagacatactggttggaggaggaagatgagactatgcctccaggggatgcttctcagtcagggttcaactttggtagcagtgacgctcctgctgtgccgtccggtggattcaactttaattagaagatattcatgctctactggggagttttggttggtctatctgtgaagtcctcctttatgacacgacagcagttgggggacaagtcaacgtcttgtcattgtcctaatgtccttgggttgtacgaggtccagcaagtaaatacatggttgctggactgccttgggtttttgcaatgcctgatatttcatatctcatggtgtaaaatgctttgtggctatatttttttgccaccgtagagaatactagagtcttctttctgccaagtgatcatttcatagaattaatgaatgctcagtctcgtgatttttcttttctttgttatat

SEQ ID NO: 226715 - DNA, 514 bp, Glycine max
aaatgcaaggaaacagttctatactgctggcagtaaaagcaaacaaaatcttgcaaatgcatgctaacagattggctgaagtggtttaaaaattacagagtggagctctggttactctaacaagtcagcacttaagcacaattgccaaaatcatggttgatacaacaaggcatacatattttgttaggaaacaaatcactgttctagagctaaagttgtttaatcatagatatttactattactactactaatactatcatgtgaatccaaataggcatgtcaagtatttccagatactttccagagtgcttctttgatcatcctcgttggtgctgttgctgctcctcgacacttagatttaagtgccaatgtgagaacaccataacttgttgatgattcaactgtttgagcatctaaatgtacgttgttaatggtgtccatgatgtcataccgtatgtgttccctggaaggacatttcatctcaatcagaacctgctgttacttgacattgac

SEQ ID NO: 226716 - DNA, 452 bp, Glycine max
cactctcatttttcgggtacactcttctaaaatggcgaatctagcacgcttctccaagagagccctaagaagcgcacacgcgctatcaaggccccacgtgcagcctcagctgctgacagcagaacgcgctttttcgacggatgcgccgacatcgattaccccgacggcggatcgcgtgaagtgggactaccgtgggcagaggaagataatcccgttggggcagtggctccccaaagatgccgtggatgcttacgtggcacccaacgtggtcctcgccggccaagtcaccgtctgggacggagcctccgtctggcccgggtgcgtcctccgcggggatcttaacaagatcagcatcggattctgcttcaacgtccaggaacgctccgttcttcacgcgggttggaccctctccacaggccttgcagctgacacttcaatagagaggtacgtga

SEQ ID NO: 226717 - DNA, 502 bp, Glycine max
  unsure (1)..(502): unsure at all n locations
tgctgactctgctcaaacaagtgcgttcttagaagagctcaatcctcctaacataattctcgttcatggggaagctaatcagatgggcaggctcaaacagaagctcacaagtcaatttgctgatcgcaacaccaaaatccttactcctaaaaactgtcaatctgtagaaatgcatttcaattcacagaaaatggcaaaaaccatagggaggctggctgaaaaaacaccagaagttggtgaaactgtcagtggtttgctagtaaaaaaaggcttcacatatcagataatggcacctgatgatcttcatgtcttttcacagctatcaacaacaaacataactcagagaattaccgttccttactctggtgcctttagtttcatacagcatagactcaaacggatatatgagagtgtagagcagtcagtggatgaagaatctggagttccagaattgcangttcatgagtggtgttactggtgaagcatgaagctgannagcata

SEQ ID NO: 226718 - DNA, 462 bp, Glycine max
  unsure (1)..(462): unsure at all n locations
aaagaaaatcctcacccattttcttcgtagccaaacactctgaaattctcagttatgtcgtggcaagcgtatgtggatgatcacctactgtgtgaaatcgaaggtaaccacctcactcacgccgctatcatcggccaagacggaagcgtttgggctcagagcaccaacttccctcagttcaaacctgaggaaataactgccatcaataatgactttaatgagcctggatcacttgctccaactggattgtatatcggtggcaccaaatacatggtcatccagggtgagcctggtgctgtcattcgagggaagaagggtcctggtggtgttactgtgaagaagaccggtgcggccttgatcattggcatttatgatgaaccaatgactccaggtcaatgcaacatggtagttgaaaggcttggcgattatctcattgatcanggtctctaatctttgctttat

SEQ ID NO: 226719 - DNA, 561 bp, Glycine max
  unsure (1)..(561): unsure at all n locations
gattgaagataagtgatgctgttgttttgatcgattgagagcaaggcgggagagagaatttggaggagaatggtgaaaattttgagcaatcatgggaaacttgatgaagagatggtaggggttgttatgaaattttaagaggagaatcagaaggttgctgctttggcaaaggtggggaagcctgcaactaaggtcaaggctttgtcatttggggagagggctaagctgtcaaaaaatccaatcggaaagaggttgtttgagataatggctgaaaaggagagtaatctgtgtttggctgctgatgttggaactgcagctgaattgcttgaaattgctgggaaggttggacctgagatatgcttgctgaagactcatgtggatatttttccggattttacacctgattttggctctatgcttctctcgattgcagaaaaacataacttcttaatcttcgaggatcgtaaatntgctgatattgggtacacagtgaccatgcaatatgaaggaggggatctttcatatattggattgggctcatatagtanatgctcacataat

SEQ ID NO: 226720 - DNA, 553 bp, Glycine max
  unsure (1)..(553): unsure at all n locations
acaaaaatagaatataaatgttattcaatgtaaaaaatagaatacaggaatccaaaatcgaattcaagatagatgagcttgggtagcttgctatttgactactctatttgccctattcttgatcaagttctctgtttcaatataagtaaaccttggtgcagaggagttgatttatcctcttaaaccttactgctacatatctattgtgaggaaattatataaaattctatattaccattctatattttatatttattttcatttaatttccctcaaagaaaataaacaattcacttcaaaattccaactgaaaaatgactaactttatattgagagggtgtcccattaaaacaacattttggctcacccttttattctaggaatgcaggcatcaagtacatttagccaaatacgcattccatccttgaagacggtattcacgagctgcctcttctggatttactgctttgatgatgccacgccccacaatgatgatgtcactgcccctatcatggaccacttttgcanatctttatcttaagcaggaactttc

SEQ ID NO: 226721 - DNA, 516 bp, Glycine max
ggagctggagagaccctgaaacagattctcccaaaatatccttcaatgaaaggaattaattttgatttgcctctggtgattcaaaaagcaccacctcacccaggtatagagcaaattgcaggagatatgtttgaaagtgttccaactggtgatgccattttagtgaagtttgtatgtcacaattgggctgatgaagattgtataaagtttttaagaaactttcacaaagccttgccacaacatggaaaagtgattgttttcgaatatataataccagaagtcccgaatccaagctatatatctaagcatacttgtactctcgacaatgtcatgtttttagcacatggtggaagggaaagaactcagaaggaatttgagaacttgtgcaagagctctggtttttccaagtttcatgtagcaagtagtgacatctcatctacgttaggagtaatggaattctataagtagaaattgcccatgacaaatagtaaatttgaatctatgatagcccacatg

SEQ ID NO: 226722 - DNA, 580 bp, Glycine max
  unsure (1)..(580): unsure at all n locations
ccaaaatattggaactacataagttatttatccaaactttttattcatgattacatagtctcaaaagcaataacataaataatcttacagttgctgaccagtgggctaacatttgccgggccaacatcagattttatgcaactgggcccaatttatttaaaggcttttgggtctggatgcacccaatgtaacatgtgggctatcatagattcaaattactatttgtcatgggcaatttctacttatagaattccattactcctaacgtagatgagatgtcactacttgctacatgaaacttggaaaaaccagagctcttgcacaagttctcaaattccttctgagttctttcccttccaccatgtgctaaaaacatgacattgtcgagagtacaagtatgcttagatatatagcttggattcgggacttctggtattatatattcgaaaacaatcacttttccatgttgtggcaaggctttgtgaaagtttcttaaaaactttatacaatcttcatcagcccaattgtgacatacaaacttcactaaaatggcatcnaccagtggaacactttaaacata

SEQ ID NO: 226723 - DNA, 572 bp, Glycine max
gattgctagaatggaatttcgatgctcagtcatctcttttaccattctcttctctcttgctcttgcaggagagagccatgtccatgcatcgctacctgaggaagattattgggaagctgtttggccaaacactcccattcccactgcactgcgagagcttctaaagcctctccctgcaggtgttgaaatcgatgaactccctaagcaaattgatgatacacagtacccaaaaacattcttctataaagaagaccttcatccaggcaaaacaatgaaagtacaattcaccaagcgtccctatgcacaaccttatggtgtatatacatggttaacggatattaaagacacctctaaagaaggatatagttttgaagagatatgcatcaagaaagaagcgtttgagggagaagagaagttttgtgcaaaatccttgggaacagtaattggttttgccatttcaaagctgggaaagaacattcaagtactttcaagttcctttgtcaataagcaagagcaatacactgtggaaggagtgcagaatcttggagacaaagcagtgatgtgtcatgggc

SEQ ID NO: 226724 - DNA, 509 bp, Glycine max
aaaaaagcacactgcatattcatcaaagcatcatcaaagcacactgcatcctaacagcacacgtacgtagaaaggtgaagttccaggtcttgcacaacatacacaacacaccataatttattttatatacaatcttatggtgcccaagatgcagatgcatggactaattaaacaacaacgttagtctgataggcagtgtccatagataaattgggtacccataaaatggccttgcttccaaggaaatggcaaacagggttagttccaggatcaactcccatgagttcatgaagcatgtgatgattcattccagaagtatctgagtggcaaacagcaagtgcctgagttttggttccatcaccagccaccaatggaaccatgaaagctgttgtttcacggactttatggcagtaaaatactgcagttctgaaatttagcccatgacacatcactgctttgtctccaagattctgcactccttccacagtgtattgctcttgcttattgac

SEQ ID NO: 226725 - DNA, 592 bp, Glycine max
  unsure (1)..(592): unsure at all n locations
ccaggacaaagtcctcatggaaagctggtactatttgaaagatgctgtccttgaagggggtattccatttaacaaagcatatggaatgacagcctttgaataccatggaacagatccaaggtttaacaaggttttcaacaaggggatggctgatcactccacaatcacaatgaagaaaattcttgagacctacactggctttgagggtcttaaatctctggttgatgttggtggaggaactggagccgtagtcaacatgattgtctcaaagtatcccactatcaagggcattaattttgatttgccccatgtcattggagatgccccatcttatccaggagtggagcatgtcggtggagatatgtttgtcagtgttccagaagctgatgctatttttatgaagtggatttgccacgattggagtgatgagcactgcttgaagtttttgaagaactgctatgaggcacttccagacaatgggaaggtaattgtggcagaatgcattcttccagtggctccagactctagcttggccacanaagggtggttcacatcgatgtgatcatgttggcacataatccangtgggaaag

SEQ ID NO: 226726 - DNA, 559 bp, Glycine max
gtataaaccacagtatgaaacttgttattatataaaaggcagtatacattgaacttgtttattattcttttcctaatgaattaagagaaatttacatttttccgggaaagcttttgtaagtagcaccacatgcagagtctcaaagtcaaaactcaaatgcaacttatgaatccacgccaaagaacttaaacctttttgagaaactccatgacgtaggtattgaaagcacagcacaggactcggaaaccttggaatccagaccctttggccagagcctcaaactctttctctgttctctctttcccacctggattatgtgccaacatgatcacatcgatgtgaaccacaccttttgtggccaagctagagtctggagccactggaagaatgcattctgccacaattaccttcccattgtctggaagtgcctcatagcagttcttcaaaaacttcaagcagtgctcatcactccaatcgtggcaaatccacttcataaaaatagcatcagcttctggaacactgacaaacatatctccaccgacatgctccactcctggat

SEQ ID NO: 226727 - DNA, 591 bp, Glycine max
gaaccataaccatgtcagacgaggagcaccacttcgagtcaaaggctgatgctggagcatcaaagacatttccccagcaagctggaaccatccgcaaaaacggttacattgtcatcaagaacaggccatgcaaggttgtggaggtttcaacttccaaaactggcaagcatggacacgcaaagtgtcactttgttgcaattgacatcttcactgggaaaaagcttgaggatattgtcccatcttcccataactgtgatgttccccatgttaatcgcattgactaccagctcattgacatctcagaggatggatttgtgagtctgctgactgagactggtggtactaaggatgaccttaggcttccaaccgatgaaaatctgctttcgcagatcaaggatggatttgctgagggcaaagatctggttgtgtctgttatgtcttccatgggggaggagcagatttgtgcccttaaggacattggccccaagtaatagagttgtgtcagttgaatatctggaaagcagaagttgaaactgagatgataaatagtatttattattattttttcacttttatgtgggtttgtatact

SEQ ID NO: 226728 - DNA, 589 bp, Glycine max
  unsure (1)..(589): unsure at all n locations
aatgaagaaaaatttattataaaggttataaggtcttctaagcgtataaatagatttaatggccagtgaccaatataacttcacaccatttaacagaatatggttctagcattgatccaacacgtttaaaaatatagtaggtcaaggactcccaaataaagccattcaagtttgaccacatcttgtaagaaaggtacaaactttggctgatttagtatacaaacccacataaaagtgaaaaaataataataaatactatttatcatctcagtttcaacttctgctttccagatattcaactgacacaactctattacttggggccaatgtccttaagggcacaaatctgctcctcccccatggaagacataacagacacaaccagatctttgccctcagcaaatccatccttgatctgcgaaagcagattttcatcggttggaagcctaaggtcatccttagtaccaccagtctcagtcagcagactcacaaatccatcctctgagatgtcaatgagctggtagtcaatgcgaataacatggngaacatcacagttatgggaagatgggacaatattctcagctttttc

SEQ ID NO: 226729 - DNA, 575 bp, Glycine max
  unsure (1)..(575): unsure at all n locations
ttaagaagagcccaaagcgaattcgaacttagatcttaatcttcacttgttcttcgatctcgcgaaccagtgagctggagtttcaacaatgatggagaaggcagactctgtgcagaagctgtacacgcgcatgcgactctgggaatttccggatcagtatgtgattgagccaacggatggatcttctggttcttctttggctgttagtcgagtcgatggctccatgaagctcattgatgagcttccagaatgcagcacgcttcgagttcctaagatttacacgatttttggtgttgttgggatgttgaagctgttggctggatcatatttgctggttataactgagcgtgaatctgttggatcttacctggggcatccaattttcaaaatttctaaattgaaggtttttccatgcgataattctcttaaaaatacccctcctgaaaagaagaaaatagagatggaattttctgggctgcttaatgttgctgagaaaacctctggtctgttcttctcatatgaaactaatttaactctgagtgcacaacggtgaatgacctgngtgatgagtctag

SEQ ID NO: 226730 - DNA, 374 bp, Glycine max
gtaagaagagcccaacgcgaattcgaacttacatcttaatcttcacttgttcttggatctcccgaaccactgagctggagtttcaacaatgatggacaaggcagactctgtgcataagctcgtcacgcgcatgcgactctgggaatttccggatcagtatgtgattgagccaacggatggatctcttggatcttctatggctgttagtcgagtcgatggctacatgaagctgattgatgagctaccagagtgcagcacgcttccagttactaagatgtacacgattgtcggtgcagacgggatgaagaagctagtggctggatcataattgctcgggatcactgatcgtgaatctgttggatcctacctggggc

SEQ ID NO: 226731 - DNA, 535 bp, Glycine max
ctcaggaggatcctgtaattgatcctgttgctgctctagacaaaagcaggctgaggaaggtcactgaacgtgttatgccccccagagcaccaaaggaagatggaagagaatcactgttagaaatgataagatcgaagtcattcaacttgaggcctgctgcggttcaacgaccacccaggattcagggtccaaaaacgaacttgagggtcgctgccatcctggaaaaagcaaatgcaatccgccaggcattcgctggaagcgatgaagatgatgcagatagttggagtgattcttgatcttactagggaaaagtactggagcgagtcattcttccctgtaatgaataggaaaactacgtgatacagtcatacaaaagattctttgtcctacactatgttcatagtatatgatggtatacttcagacagcatatgtttttttgctagtccttccaattcacacatagatgcacgaacattggagcaggcatacagcgtagcatccattcagagcctttttcggaggtcaaactcact

SEQ ID NO: 226732 - DNA, 551 bp, Glycine max
  unsure (1)..(551): unsure at all n locations
ccttcatcttttgtcacattggtggcacttcttctagcagtgtctcttttcgttgctccaacatcctcaacatccagaaaaactattctcaagcaccacccttacccaacaaaagggttccgagtcatgcttcgccacgttgattcgggtaaaaatttaaccaaactagagcgtgtccaacacgggatcaagcgtgggaagagtaggcttcagaggcttaatgcaatggtgttggcagcatcaacactagattctgaagatcaattagaagcccctattcatgcagggaatggagaatatttaatggagttagccattggaaccccaccagtgtcttaccctgcggttttggacactggcagtgaccttatttggacacagtgcaagccttgcacgcagtgttataaacaaccaacacccatttttgatcccaagaagtcctcttctttttccaaggtttcatgtggtagcagcttgtgcagtgctgtgccttcttcaacatgcagtgatgggtgtgagtatgnttattcatacggtgactattcaatgac

SEQ ID NO: 226733 - DNA, 574 bp, Glycine max
caatcgagcaaatgcaacaaacgaaaccagagattcataattgcacgttctcttttgttgtctccagctcatagaatattacattaactctgattcattcagaatttcagattcaccttttcttcttctcttttttttttcctctgaaagctttttgcagaaagttgtgatttttccttgaaagatggcatctttgagcatgacccagatcagaactgggaattgtgcatctgggtttggcttgaattgtgctgggaaggttaaggttggtcccagcagagttgggtttaaggtgtttgcttcagagactcaggctacagagcctgatcttagtgtcactgttaatgggttgcacatgcctaacccctttgttattgggtcaggtccaccagggaccaattacactgtcatgaagagggcatttgatgaaggttggggtgctgtgattgctaaaactgtatcacttgatgctgcaaaagttataaatgtaactcctcgatatgcccggctacgggcaggtgcagatagatctgcaaaaggagaaaatattgggtgggagaacatagaacttatc

SEQ ID NO: 226734 - DNA, 504 bp, Glycine max
gcctcttcttatccagacagttctttgaaatcaaagaaataacaaccaagaagagcaacgctacatattcattcagttcaacaaaaatccgcaagtttaaacacaatatccagctatcgctttacatgttctctgataaactcttccagctgagatatttccccagttaaaccagaagcgtctgcagttgtcactttgttagagcactgggtaaaagaaaacggctcaccgggtacccccagggtgaactcatttgcgatgtcagctgctgatattgcacttcttgatgcccgtaatttgtctatttccttctccatctgttttcggataaactctttagtatgagcagtgactttgtctgttttgttgcagagaataagcattggaatcttcttcctcacaacacttcctttagtcaatagatcataaaggtactttgaagcagcacggcagtttggtaaaaagtccaaagcatttactacaaaaactaccccagctgcttga

SEQ ID NO: 226735 - DNA, 607 bp, Glycine max
aagcacaaaagacgtggataacttgatattattttattacatacatgcatagatagcctgctctcaaataagtcggcaggaacaaagatagagagattcaacgatcttcaaatttcacatttgccagaaatatataacagaaaagaggggtatgggatatgagttaagttttgatcacattcaactacactatcccaaaccgttactcttaagactttgaacttcacttgtactctaggatcatgttgttctcaggagctaatccaacacaagccctcaggatgttttccagcatagctcgctgctttgacaacgcattcaccactggtgtacccggtggaaccagaggggccttggtcaggtaactaaggatggtcgcaactgggtggaatgagtggaattttccctcattttcagctttaaactcgattcgagtgctgagctcagcaagaaggaccaagtccaagataataggagcagcttacagtgaatcctcacatgtgttgtgcaacacaattgtgttctttccacccatgaatatttcagaagtgtactcatccatggcccctttgctgtcccctacataaggcacgtacttaatgacaac

SEQ ID NO: 226736 - DNA, 574 bp, Glycine max
aggaaaaaaatttagtatcggaatcagcttgggaaatatagacaaaagttaataggtttagaattttccagtcaaacacaataaaataaaattaactatgcatgaagatttaactatgcatgttttactattagttcctgcaattttctttttgcttgtatgcataaaagaaatagaagacacattcaagtattcaacttcagccgtgtgcaccacccccacggtcagacacaaggtaattaaaatgggggtgttgaaaacttgttcttccaagtgaaacaaacattttagagacgggaagatgattttgtagaccttggatctttactatattcatacacaccaatacctcgttttcttccaagtctttcagcatcaacatactgcacaagtagagggcaaggtgcatatttgttgtcaccaaggccagcatgaagaactctcattattgacaagcacacatccaatccaatgaagtctgcatgctctaaaggacccattggatggttagtacccagcttcattcctgtgtaatattccttttggttgcaacacccgtgtaaagagcaaaaat

SEQ ID NO: 226737 - DNA, 402 bp, Glycine max
gttcatgaaacaaacctacgggggaggaatataacgaatgaagaaattggaaaatagtataacctcggacacgaagaaaattacacttaatagacaatgataataatatccacatcactttgtttctcgcatttgcatatcatcttctgttttccaaacaacatcatccaggcttgttgaaaggttcttgtaaaacttatggaactccaatgtatctacttttgccttccgttcctccaccatgtgacagagaaaacagaagagctgcctacattcttgaatgcatttgagttaatctccatgttcaaaggactgaaccttgaaaacttgctagatactgagcggggatgtaaaaggtaaacaagattcaccttaaatatgccctgtggatgacatgattaa

SEQ ID NO: 226738 - DNA, 638 bp, Glycine max
tataacctagagttggttgaaaggttgagcaagcctagtggtaattcaaaagaattgcattttccaacaaagtattgccggtcatcttttgagcagttcctaacttgtctatggaagcaaaatctttgttactggcgtaaccctcagtacactgctgttcgctttttttacactgtcataatctcattgatgctcgggtcgatatgctggagatttggtgctaaaaggtccttctctattcatttttcttttcttctatggatctttaatttcaagtaacattctgtttcaaatgtttcaaatttgggaagctatgcactttccatttattttcattattaggtacatctctgcaatgctctcctgcaatgtctaaccaggccataaatgtgtaaacatatattaagaaacccctgctagacatgagcaattgacagactttatcatcttgttgaataagttttggttagaacaccgtgaagattagtttacaaagtttaagttttaatgtaaccggtattttttttttctaaatcaccaaaagagaggcccatatagttggccaagtgctattcaagatgtctggatattcatggcatggttagaactcagtccggcaactatatactaaaattggg

SEQ ID NO: 226739 - DNA, 565 bp, Glycine max
gacaaaaaatatataacttattgaatattattcactttcaccaaaatctgtcattaccaaccagtaatctgatttcatgtctaacagaaaccctataaaccaatagtacgtcactttacaacaatttgtccctgaattatgtaaaacaaaaataatttggataatgtattcttattagtttacaaaccctaaaagcacactagtgctatgctataatcatatcgctatacagatgtcacgcttatttttatgaggtatcgaagatctaacatacaatttggttacaatgtctctagtggctagcaagtctcatcccatcatctcctttggaaattgaaggatttaattgcaaaggcaaatataattgcaaaaaatatgcagaagccagccaccataacagcagtaacgcacaagaaatcatgcctgtacccaacacgtgtttgagtacctctcttatagtcatcgagtttccattagagagcttcactaaatgagtatcaccaccatactgtgaaagtaggagaccatacagactccaggctacagggtttgcccagtaatacca

SEQ ID NO: 226740 - DNA, 560 bp, Glycine max
gaggttggtcacaagagccttctccagagtgatgctctttaccagtatattctggagacaagtgtctacccaagagaacctgaatccatgaaagaactgagagagttgacagcaaaacacccatggaacatcatgacaacctctgcagacgaagggcagttcttgaacatgctccttaagctcatcaatgccaagaacaccatggaaattggtgtctacactgggtattcacttcttgccaccgctctcgctcttcctgaagatggaaagatcttggccatggacattaacagggagaattatgaattgggtttgcctgtaattaaaaaagctggtgttgaccacaaaattgaattcagagaaggtcctgctctaccagttcttgatgaaatgattaaagatgagaagaaccatggaagctatgacttcatctttgttgatgcggacaaggacaactacctcaactaccacaagaggttgatagagcttgtaaaagttgggggcgtgatcgggtacgacaacaccctatggaacggatctgtggtggcaccccctgatgc

SEQ ID NO: 226741 - DNA, 477 bp, Glycine max
tcgcgatctagaactagcggctcgtgttttttgaaagaaaagtattgattgcttttaaatgcattagcaggtgccactcaatgatgaccagtcatcactatagggtgtgcagaagaagcaacggtggtccacgattatgatgatcagaaatcacttgatccgacggcagatagtgattccatcaccaaccgggagcatgcaaatctcgatcctggggtccacagcgagggctttgttgagctccagcacgaagtccctgtagtacctaacatacttcctaagaggagcatcagggggtgccaccacagatccgttccatagggtgttgtcgtacccgatcacgcccccaacttttacaagctctatcaacctcttgtggtagttgaggtagttgtccttgtccgcatcaacaaagatgaagtcatagctttcatggttcttctcatctttaatcatttcatcaagaactggtagagc

SEQ ID NO: 226742 - DNA, 516 bp, Glycine max
cttcaagcaacaatcccaagtgagcaaactcagcatgctacactcaagtaaataaacaagaccacctcaatcattgtggtcgaatccaaccaaatcaaagccaaatactttgcccttcttgctcactcaccacgacccttttgcatgttttaaggagaaagattctcatctttagaaagaaaagacaacaagaagcttgaaagagtttataaagagatatggagattgagtcagtgaaatgcgagtgttgtggcttgaaggaggattgcacccaagactacataagcgaagtgaagtccaagtttgatgggaaatggttatgtgggttgtgctcagaagcggtgagagatgaagtgagccatggagggaagaaggcatcatcagctatggatgaagctgtgaaggctcacatgtcattctgccgcaagttcaaatccaaccctgcagttagagttgctgaagggatgagacagatgctaaggaagaagtctgacttgtcatcatcatcatcatcat

SEQ ID NO: 226743 - DNA, 584 bp, Glycine max
  unsure (1)..(584): unsure at all n locations
gttcacaatggccacgctttgctaatgactgacacccgtaggcggcttcttgagatgggttataagaatcctgtcctcttgcttcatccactgggaggctacaccaaagctgatgatgtcccacttgattggcgaatgaaacaacatgagaaggtacttgaggatggtgttcttgatccagagaccactgtggtatccatattcccttctcccatgcactatgctggacccacggaggtgcagtggcatgcaaaggctaggatcaatgcaggggctaacttctacatcgttggtcgtgaccccgcaggcatgagccatccagttgagaaaagagatctgtatgatgctgaccatgggaagaaagtattgagcatggcaccgggactagagcgtctaaacattcttcctttcagggttgctgcatatgacaagactcagggtaaaatggcattctttgacccttcaaggcctcaggacttcctgttcatatcaggcacaaagatgcgcacactgggcaggaacaaagaaagccctnctgatggattatgtgccctgtggtttggaagtactggttgatactatga

SEQ ID NO: 226744 - DNA, 533 bp, Glycine max
gatcaaaccaaatcctccttagcacaaccacattcattatattacagagagttggcatgcacaattgcaccataagtgcaagaggctgtctaatgccatacatacagagagaggcaatgtatctgtgcctgtgcctccccagagttttaattattattattattattaaattgggccaggagtatgtatcttagcaggagaatacataaagcttaaggtttctcccaatcatgagatatacattataatacaagattaagctggaacagcttccggcactttgccattgcttgagagtactaagctatcatagtattcaaccagtaccttccaaccaccagggcacataaatccatcaggagggctttctttgttccttgccagtgtgcgcatctttgtgcctgatatgaacaggaagtcctgaggccttgaagggtcaaagaatgccattttaccctgagtcttgtcatatgcagcaaccctgaaaggaagaaatgttagacgctctagtcccggtgccatgctcaatactt

SEQ ID NO: 226745 - DNA, 516 bp, Glycine max
ctagaatggaatttcgatgctcagtcatctcttttaccattctcttctctcttgctcttgcaggagagagccatgtccatgcatcgctacctgaggaagattattgggaagctgtttggccaaacactcccattcccactgcactgcgagagcttctaaagcctctccctgcaggtgttgaaatcgatgaactccctaagcaaattgatgatacacagtacccaaaaacattcttctataaagaagaccttcatccaggcaaaacaatgaaagtacaattcaccaagcgtccctatgcacaaccttatggtgtatatacatggttaacggatattaaagacacctctaaagaaggatatagttttgaagagatatgcatcaagaaagaagcgtttgagggagaagagaagttttgtgcaaaatccttgggaacagtaattggttttgccatttcaaagctgggaaagaacattcaagtactttcaagttcctttgtcaataagcaagagcaataca

SEQ ID NO: 226746 - DNA, 569 bp, Glycine max
gtggaattggacaacatcattcgcaaaattgatgatgatggtcgtttggttggaattgtgaatggcatggatgttcaggagtggaatccaaccactgacaaatatatagctgtcaaatatgatgtttcaacagtattggaagcaaaggctcttctgaaagaagccctccaagcagaagttggattgccagtcgacagaaatattcctctcattggtttcattggtaggcttgaagagcaaaaaggttctgatattcttgcagaagccattccccaatttatcaagcagaatgttcagttggtagccctaggaacaggaaaaaaacaaatggaaaagcagcttgaggaacttgaaatatcataccctgataaggccagaggagtggcaaaattcaatgttcccctagcccacatgataatagctggagctgattttatattggttcctagcagatttgagccttgtggtctcattcagttacaagctatgcgctatggatctgtaccaattgttgcctcacaggtggattagttgacactgtcaaagaaggcttcactggattcaaatgg

SEQ ID NO: 226747 - DNA, 516 bp, Glycine max
  unsure (1)..(516): unsure at all n locations
aattgattaaacaaaatttatagaatccaatacaaatagcatcagatcacatgtctttgatctctaatgggtaaaatatatagagagaaaatgagcacaaataatacttgccaaatagaataagaacctgatgacttaacagagaacaaacattaactcatcagagtaaatcagcaacatttgatggcagctcctttacagtcacattgtagaacttctgaatatcagacagcatcctggaatcatctgtcgtgacaaagtttatagcaactccttttcttccaaatcgaccactacgtcctatgcggtggagatagttttcaggttgggttggcagatcatagtttatgaccagagacacttgctgcacattgataccacgggccagaaggtccggggtaatgagaactcgagaagagccggaccggaattcacgcatgataatatcacgtgtgtattggtccatgtcaccatgggtggcanagactgtgtggtcattgcttcgcatcttgttag

SEQ ID NO: 226748 - DNA, 583 bp, Glycine max
  unsure (1)..(583): unsure at all n locations
atggatccagtcattggagccatttccgcaggcaatgctgtggtcctgaaaccatcagaaatttctccagcaacatcatcactgcttgcaaatttgatcgaacaatatctagacaactctaccataagagttgttgaaggggctattcccgaaacatctgcactcctggatcagaagtgggataagatactttatacaggtagtgctagagtaggtcgcattgtcatggctgctgctgcaaagcatcttactccagtgattctggaacttggaggaaagtgcccagctgttgttgaatcagatgtcaacttacaagttactgcaaggaggataatagctggcaagtgggcatgcaatagtggacaagcatgcatttctgttgattatatcatcacaagaaaagagtttgccccaaagctggtagatgccttaaaagaagaattggaacaattttttggtaaagatcctatggagtcaaaagacatgtcaagaattgtgtctccaaaccagtttgcgcggcttgtgaatctcttggatgaggataaggtatctgacaaaatngttttgggaggtcagagggatg

SEQ ID NO: 226749 - DNA, 456 bp, Glycine max
gccacttcaaccaaagggggaagccacgagtcactgcccttgcacattgttttagtacagtacttttaattcatgaacgttttttttttttaaagggaccttattattcttaagaccaccccaaaagagaaagaataatttgaacaatattgccactaataagggccttcaataatttttccttttgaggggtatacggggggtacctaatggtagaatctgcattaaaacttttatagagaactgacttcctgtggctgaaactatcaaaagagaattttccatgggaacaacccattccactttttttaactcctccaaaaggcaacccacgagttgcaacatggatgacggcgtcattgatgagcatccctccagaagatatcttatccacataatccttcttcagctgctcattgtttgtgaagagatatgcaccaagagggtttggctttg

SEQ ID NO: 226750 - DNA, 377 bp, Glycine max
ggggggggaaaaaccccaaatcacgggttttaaataggggagaaacaattattacattttttacaaattttttacacaaaataaaagatacattggtttctggggtgcataaactttattccaaaaattgcttttttgcatttggggggggcaaaacaattgggaaaactgggttgaaaagaatataccaaactggcttcatttgggaaatcagcaactaataaaatgactcaatctaaagcatttattactggatccacaaccttttggggggggcttggccctccaaaaacctttggtcggcatttgccctccaaaatgacttttttcacagcagtttccaaacgggtagcaaatgcaggaaactggagatgcct

SEQ ID NO: 226751 - DNA, 432 bp, Glycine max
gcaccgacgatatttgctttcttattgggttttttacgtgagatgtgcggcaaacctttagatccagaatcaattcaatgtttaaacgataggagaagaagggaggagcgactaactcaagcggcgttgcatcgactggtcgatcattgattggatagaggggagagagagatctggtctcggtcgcggaagatgtataagggtaagatcgaagagcgtgaacgagaagcaagtcctgacggtggcgcaggccagggaggacaacatcgacgacgagatcgtcgccctggagcgtctggacgccgatgacatcagggccctgcgtgagcgctgcctgcagcagatgaagaagatggcggagaagcgctcccgctggatctccctcggcgactgcgaatatttcgagatttcctccgagaaagacttcttcca

SEQ ID NO: 226752 - DNA, 484 bp, Glycine max
aagcattgtatcaatttcaaaactcataaaataaaactattaacaaagattaatgaagttactataatcaggggggagggcgctaactcaaaaataggcactgtaaaaaaagagatgaccctctggaagatctactagacctagaatcctgataaatatttacagattgagacacaccacaaagcagtccctgagaccacgtttaaagtgtataacccggtcgctcagggtgcaggtgaattaaacaaactcatcaggaaatgcaggttactcacaatctgaggagtttgctttggagctctgtctaacacttcttggggttttggcactggaccttgcatgattgaacgatgattcgccctcataaaagatcacttgagctttacccaagctttcttccagctgctctgtgctaaactgatcaatcgcaccaaggtgatcataccccaccacataatcatcgacttttggcatctttgatgag

SEQ ID NO: 226753 - DNA, 274 bp, Glycine max
gataccatgggatatgctatgctaatgactgttatacgaatgtcgatccttgagacgtggtataagaatccaatgacatagataagtgacctgaggggctacaccgaaggttcagatgttcctccagagcgatgaatgatgcaccacgacatggtaatagtggactgttggcgcgatccatagtccactaagatttcgatattgccggggtccctgctctaggcgaagccgaccacagtgaaaaggcccgtaagggatccgagcctggcagggc

SEQ ID NO: 226754 - DNA, 534 bp, Glycine max
ctttgttcttttaccttgtgcgaaagagaaaggttaagctttggctgatgagatcgcttgtgcctccccccacaatactctcaaaaatgactgctatcaaaatggcgactttgtttacatggacgccatgggcgatcgtgacactgttagatacagaggatcatgtttgattaccgtttgcacatatcaagtcattacagagcgccctgaagaggctaactgcttgaacgtggacagtatttttatacaccgagagctaagactactccctgggaataggcttccagtcatcaacatatgggatactgatgatgttgtgtggagtacttcagctgacaaagttgcatgcatgtgcctaccagaaattgagcactcaggatgcctctttgctctattgcaaaccctaaacggttttggttatcgatataggtgatggaggggtcatcaagaagtacacgcccatttttaattgaaaagatgacatttgtgaaatgacagatggttgttgatgtctccaaacatacttcctgatgt

SEQ ID NO: 226755 - DNA, 573 bp, Glycine max
atcacttctgtttccttcttctcttccgccacttcaacttccttcttctcctccgtcccttcaacttccttcttctcttccgccacttcaacttccttcttctcctccgtcacttctgcttccttcttctcctccgtcacttctgcttccttcttctcttccgtcacttcaacttccttcttctcttcagagacttcttcctccttcttctccagtgctttgagttccgttttcttcttctctggttctggtttgggagcagttagctcatggttgttgagcgcttcttgaacaagcctcttgagctcatcaagggctttcctctgcgcctcggggaggtcgccaaccacgttggtctcctccttgaacgaaaccgattgggaaatcttgtcttctgcaccactctgggccttctctgctttcgccaccacttcttcgatgctttttgcatttgcttcaacttcagcttcagcttcagcttcagattgggaaatcctgtcttctacaccactctgggccttctctgctttcgccccacttcttcgatgctttctgcatttgcttcaacttcag

SEQ ID NO: 226756 - DNA, 581 bp, Glycine max
cagagagtgatttcagtgagtgatcggtgttcacttgatctcatcataatcgtcagcgtcaattgaagaagatgccgatcagaaacatcgccgtcggaaggcctgaagaggcgactcaccccgacacgttgaaggcggctttggctgagttcatctcaaccttcatcttcgtgttcgccggctcaggctccggcatcgcctacaacaagctcaccgacaacggcgctgccacccctgccggcctcatctccgcctccatcgcccatgcattcgccctcttcgtcgccgtctccgtcggcgccaacatctccggcggccacgtcaaccccgccgtcaccttcggcgccttcgtcggcggcaacatcaccttcctccgcggcatcgtctacgtcatcgcccagctcctcggctccatcgtcgcctccctcctcctggccttcgtcaccgcctccactgttccagcattcggactctccgctggagttggagttggcaacgccttggtgttggagatcgtgatgaccttcggtctggtgtacacggtctacgcaactgccattgaccccaagagggtaatttgg

SEQ ID NO: 226757 - DNA, 582 bp, Glycine max
  unsure (1)..(582): unsure at all n locations
gttgggactcctggacgagttatagatcacctaaaacacactaaaggattttctcttagtagattaaaatacttggtcttagatgaggcagataggttgttgaatgaggactttgaagaatcacttaatgagattttacaaatgattcctcgtgagcggaggacatttctgttttctgctacaatgactaagaaggtccagaagctgcaaagggtttgtttaaggaatcccgtgaagattgaagcatcatctaagtattccactgttgacacattgaagcagcagtatcgctttttgcctgctaaacacaaggattgctaccttgtatacattctcactgaaatggctggaagtacatcaatggtgttcactcgcacttgtgatgcaactcggcttctagctttgatccttaggaatcttggtctaaaggccatccccattaatggtcatatgagccagtcaaagagacttggagccttgaataagttcaaatctggggaatgcaatattctcctttgtactgatgtagctagtaaaggactggatattccgactgtggatatggngattaactatgacatt

SEQ ID NO: 226758 - DNA, 506 bp, Glycine max
gaattgttgtaactttttgattcctaaattctctaaaattcgaaattctaatttcgttaggggaaagagattgtttgtgtgtgagtgagtatggctggaaaaggcgagggtcctgctatcggaatcgatttgggaacgacgtactcttgcgtcggcgtgtggcaacacgatcgtgttgaaatcatagccaacgatcagggtaacagaactaccccatcctacgtggctttcaccgacacagaacggctgatcggcgatgcggcgaagaaccaggtcgctatgaacccaaccaacaccgtttttgatgctaagcgtttgattggaaggcgtttttccgatgcatcagtacaaggtgacatgaaattgtggccgttcaaggtgattactggccctgctgagaaacctatgattgtggtgaactacaagggggaggagaaacagttttccgcggaagagatatcctccatggttcttatgaagatgaaggagattgcggaggcgtatct

SEQ ID NO: 226759 - DNA, 311 bp, Glycine max
ggggcaaaaacttatttcattgttcaagtaaaaacggggaaaagtccctttaaaaaaaaagagaaaattttaatccccaaaaaaaacataatgacccccttttttttaaacttcaaaagggtctttgacaaaatcaagaacaacccatgagaatcttctgcttaaacaccttcctcaaatttgggtccagcaccggttccactggcaggtgcaggaccattcttatccatgggtccacccgcataaccaccagccccctggaacatttttgttatgatgggattacaaaagctctccaactcctttatttt

SEQ ID NO: 226760 - DNA, 623 bp, Glycine max
ttcaagggttggagaagatggtctttgggattgaccatgtcaagtcctttgaatggggaaaggacattgaaagtcatgatatgctaagacaaggtttcactcatgctttcttgatgacattcaatgggaaagaggagttcaacgcatttcagactcacccaaatcatcttgagttctcgggagtgttttcacctgctattgagaagattgtggtgctggatttcccatctaacctcgtcaaagcaccagcatgatcctcaacttattcaagcaaataaacttttccatctttaaaagtgtatgcatgtgtgtgcatctgctatttgtagtctgttatggttgttcctagctagttcctacaatctcttatgcaatttcaaacttgataataagttcttcttttttcctaattaatggaaatttctagcattattggtatttgttaatactaattctatgatttctctccatgtttctactgccacaaagggtgtgatgaatgatgaatgtgaacagtatgagccccttgattggatgttttctatttggatatagaggagggaatgtgattatcaatacagagtttgaatatatcatcacctaactagccaggggtaattttc

SEQ ID NO: 226761 - DNA, 432 bp, Glycine max
gatacgatgagatatgctttgatattggctgttttacgatagttgagcctggtgaccttgtataaggaatccatgacattgataaatgtgctgagaagaccgaacgatgccttaaatcttgctacagagcgttgactgatccaccattacttgttaatggtgcactgtgggaacaatgcatcgtcgcctacggattctatattgcataggcccctgctcaaggggatgcccactacactgatatacctcgatagagaactgagcctggtggagctaatgctatcgattgtttgtatggagcacccagtgttgaggaagcatgcgtagacctcaatgctgcataacatggcaaaggacaagaaccaggtcaacatggtttctcaaatagagcgccaatacatcagagcttccttggtgcatgcatttgtcaag

SEQ ID NO: 226762 - DNA, 479 bp, Glycine max
gaaagcccatttccaatttaaaataaagctctaatgaccagcacatagccatgatttgtaaaaatccaggacccctctttaaaaaagttatgactcgtgcccaaatagaaaattcctttccaaccatgagattactatcccaagaaaaaaaaacatgaaaaaaaaggaaattctgatttaaaggccaagccctggccactcagtcatgtaccagtattgggcagggctgccattaaggaattgtaagaagactcaagatcaaagggaagctgccgtccctgttgttcagccaacttatcagctgcacccatcttggataaccccgcaatccactccttcatttagggtttccccttaaaatcaggtggcaggaaaggcaactttttgagtgaagcataaaggtccttgacaacgggtgcccctgatccacagcccccatgttaagtttcaagaaacctgggagttttaaaattttggac

SEQ ID NO: 226763 - DNA, 478 bp, Glycine max
atggtctgcggatcacacactctgttcaatttctaaggggtagctattgctttgacgacgtgccccctttcttacaaaagacaacgccttctctctggatcctacgtatctattctatgcgtttggctattgggtgatagaaggcattcacagtgaaattcgttgctgtatcataatcgatttatctaaccaggactgagtgacctaatggagtctaaaggtgggaaaacgaagtgtagtacaagtcataggaaagcaatttttgacgaagctgccctacgatacagcattggggactttagacccaaccgtggaatcaagaaatacagatctgctggttactctaactgtcatcgcataccatactgatacacatccggatggagagtagcagcgcatgcaaccataagtatattaggaatgcttcttgttaggtttcaaatagggatggtggcagcgctccttaaaactccatctt

SEQ ID NO: 226764 - DNA, 575 bp, Glycine max
gaagataacacgaaacaaaaaccatcatttagttgccatccatctcccaccgatgtccactcccaacaccgattccggcacggcgccgccaccgcgccccaccatcacgctccctccgcgcccctccgccgaggccttcttctccgccgccgccggcgccagccccggccccatgaccctcgtctccagcttcttcggctccgacgccgccgccgactgccgctccttctctcagctcctcgctggtgccatggcctccccgatggccttctccgccgctgccgcagccgccgacaactccggcaaggacgacgatgggccccacaaggggttcaagcagagcagacccatgaatttggtcattgctcgttcccctgtcttcactgtgccacccgggttgagcccttctgggtttcttaactcccctggcttcttttcccctcagagcccctttgggatgtcccaccaacaggctttagcgcaggttacagctcaagctgtcctagctcaatcccatatgcacatgcaagctgattatcagatgcctgcggtaacagctccaaccgaaccacctg

SEQ ID NO: 226765 - DNA, 518 bp, Glycine max
  unsure (1)..(518): unsure at all n locations
ccgagattccccctaaacccgtttgcgttgttgtttgcgaagaaatggcgactaagaggagcgtgggaacgttgaaggagggtgatttgaaagggaagagggtgttcgtgagggtcgatctgaacgtgcctttggatgacaaccttaacatcaccgatgacactagagtccgtgctgctgttcccaccatcaagtacttaactggtcatggagccaaagtgatcctttctagccacttgggacgtcctaaaggtgtaacacctaaatacagtttgaagcctcttgtgccaaggctgtctcaacttctcggaattgaggttacgatggcaaatgactctattgggggngaagttgagaagttggttgcacaacttccagaaggtggtgttttgcttctagagaatgtgaggttctataaggaggaagagaagaatgaccctgagtttgcaaagaagttggcttctcttgctgatctctacgtgaatgatgctttcggcactgtccacagagctcatgct

SEQ ID NO: 226766 - DNA, 353 bp, Glycine max
aaccaacaaagtaaaactccttttgaaatgaacattgttcaagaacaattagatcaaagctcaatgccaccccaagggtgccacaaaacccttttatttcgaaacctaacctattttaagcctctacaggagcaacaagagctcttttattggacctcaatccactgggggctgaaatccaacccttataataatataaagcccaaattaccggggaactaggggtgtttactcaagcctcatcaagggcaaggacacccgggggttgcttcccctcaagaagctctaagctggcaccaccaccaggggagatgtgggtcattttgtttggaagaccaacctttttcacaggg

SEQ ID NO: 226767 - DNA, 597 bp, Glycine max
gaataaattaattgcttgagtttttacatgtttcgtgcatttttttattttttttattttccggaacattagtctatgttccttaattccttaatgttgccaatgtttattaaaattagaagaaatgttaggttgggtggatgatgtatttgggtcgttgtatgatgtgttgttacctgcctctcttatgatgatgtcgtgagggttgttatattgctaatgcacctttttttttccagatttttctgcatcagtctatttgtagggtgtattcccttgattttgtgtgggtttgagtgagggtgcgtgtgaatgaaaaggaaatttgctggaggtgatgcatttgcatagatgaagacagaaaaagtttggcgtttaggcggcatgggtgatatgcagatactgcctgggtctcgccaccgtcctcccatgaagaagccgaagtggattattgtcttggtgttgtttgtctgtgtctatctaatctgtgcttatatctacccaccgcaaaacagttcgacctgttatgtcttctctttcaaagggtgcaagggttttgttgattggctttcgtctatgcctgcaagagaatacacc

SEQ ID NO: 226768 - DNA, 639 bp, Glycine max
ccgggctctaccgtggtttcaacatctcatgtgttggaatcatcgtgtatcgtggtctgtactttggattgtatgattctgttaaaccagttgtcctcacagggtcattgcaggatagcttttttgccagctttgcccttggatggctcatcaccaatggtgcaggtcttgcatcatacccaatagacactgttagaagaagaatgatgatgacctctggtgaagctgtcaagtacaagagctccttggatgcattcacacagatcctcaagaatgagggtgccaagtccttgttcaagggtgccggtgccaacatcctccgtgccgttgccggtgctggtgtgcttgctggttatgacaagttgcaggttcttgtgttcggcaagaagtacggctctggtggggcttaagttctaatgctgagtcagtactattatttgtttttagatggcgatgaacaaaaccattgagttccaagagtcttagactaattgctgccgcaaattttgtttaataaatatactagatgggatattgtcccaaaaaccgtttgtaatttcatcatgatggaaattctacatttgagaatatgatttatttgagtggcaggcgaaagctgtcacttggaattccaattta

SEQ ID NO: 226769 - DNA, 480 bp, Glycine max
gaacaaacgtactgaacgtatatttattatataactgaagaacaagtaaagaaaacacacatgttaatgtcataaatatatctttatttaagcataggttttccatatatatattattgtgttcctttcaaactttcgatcaaatttgtttcacaaagatcctacttaagttgattggaagaatttgtgtgtctggttggcagaaacttctccctcagttcagcagcatcaacctgtccaaagtgattctcaggaatccaatttccactcttaggatctctcatccaaaacttttcctctttaatattaatgacattatcggatgctgactttgacttcatcgttgtgccttctatttgcttccttaaactttccgttacaacaacataacatctcttcctgcacctgagaagaaaagaaggacagacaagaatgttggccatgatgcttagagttagaaagatgagtgtaagggtgctt

SEQ ID NO: 226770 - DNA, 570 bp, Glycine max
aatctacatggtggagggacttgaagattgtagctcagcaccctcaacagggtcaagtgctgaatagatcgatagtgtggaaggtaggacgtggggacaaatttaaattttgggaggattcttggataggggaagagacccatttactagagaaatatcctaggctacacagtatatctcttcagcaagatcatttcattcagcaaatgggagatgtcaaagattcagggtgggaatgggattttaaatggaggagaccattgttcgacagcgaaatagatttggcggtatcattcttagaagatatccaggggcacagaattcgggccaacagtgctgaccagtgggtatgggtggcagatcctagtggccagtacacggttaggagtgcatacactgtgcttagagaggacttaatgcaggaggaccagtatggtgagttcaaggagttatggaaggtgaaggttccatctaaagtagctgagtttgcgtggaggttacttaaagataggttaccaaccaaagacaacttgaggagaaagcatgttgattacaagaatttacatgccc

SEQ ID NO: 226771 - DNA, 540 bp, Glycine max
ggagcaaagcactaatatgcagagagaaaattaataatccagcaagagaaaatggtgacatacaaaactgtatcgtaatggagttgtcaacaaagttaacagttgcactagaattgagtttaaaaagccaaataagcacaaaattaacacagaaacagctctaacaaatttcatgcattactataatcattaatcacccaaacctaaaatccctccaaaaagatctttatcacttttctcaaaactcagcccttcaaagcttgcttttcctttgtcttttggatcttcaatacctttttcacaatcttttgctcttcaaccaagaaagctcgaatgattctctctctaacagcactgccagacaacacaccaccatatgcacggttcacagtccttcggtttttgggtaaccttgatctcttatattctgttggccttaaatgtggaatcccttgaatccttttttcagtgacagggcacttgggtccgctggccctcttctcgtggtctgataaacaagcttgccaccgggagtcttga

SEQ ID NO: 226772 - DNA, 530 bp, Glycine max
gtcagattgatgagattgttcttgttggtggaagcacaaggattccaaaggtacaacagcttttgaaggactactttgatggaaaggagccaaacaagggtgtcaaccctgatgaagcagttgcctatggtgctgcagtgcaaggaagcattttgagtggagagggtggtgaagaaaccaaagacatccttctcctggatgtggctcccctcactctcggaattgaaactgttggtggagtcatgacaaagttgattcccagaaacactgttatcccaaccaagaaatctcaggtgttcaccacctatcaggaccagcagactacagtctccattcaggttttcgaaggcgagaggagtctcacaaaggattgccgccttcttgggaaatttgatctgtctggaattcctccagccccaaggggtacgcctcaaattgaagtgaccttcgaagttgatgccaacggcattctaaatgtgaaggcagaagaacagggcactggtaaatcagaaaagatcaccattacaaac

SEQ ID NO: 226773 - DNA, 583 bp, Glycine max
attgcaaaacaaatgctcttgttttatttatatttgattatttgactttggcattcctcctggcaaaattgtccatgcaaggagctattccgcaaaacaacaatttccgtacaggacacaattccactaatagtgggagggcacaatgccaaacatcgatcattgcattttacgtaagacagtgtaatgcacaactttgtggacctatatatgcaatggtgcagtacattatagataaggcccgtgaaggtgaaatcatgggtcagggaatttagaagatagacatgcatctacggcttcagcaacagtaaggaaaacccactgccttccgattttatccacaaaatgtgccactttgagcttgtgaatcactagccaccttgggttcaccatagccaattgtacgccacgcgagagcaacctcttgtgcagttccttcagtattagaatcccagaagtatcaacattcatcaagttgctcatgtctaagattactgcttggactcttcccttagcaagctcgttttcttcttccgcgacccattttagtattctttctctaacaaaatttgcatttgcaaag

SEQ ID NO: 226774 - DNA, 531 bp, Glycine max
gcctcagaagcaagtttggaaacctgagatcggaagagagatgtttctcttttagggagttctccaaggatatcttttaaaccccctgctcgtatttcaattttatatgctgattgaatcacgttacggatctgctttcctgcatgtctgagttttgtccttccatgtaagaattgctcttctgcatgtaatgcactcttctccaacttttcaccttcagcctttaaaagctcaattgattgccgcaattctttcacttcagcatgggctctagaaatcatggactcttcactaacaaaaaggcgcaaagtgttgtagtacaagacccgacgaggcctcttaagtaccagaagccccagggaagcagtagccccacatgtaatcaccggatgcgaagctgcaacaactacaccctctttgatctttccaaacaaaagaccctcataagcagtgtactgagatttgagatcatccaaagaatccaaggtctggtgaaagtgggcggaagaagttgagcggatttgggagaaa

SEQ ID NO: 226775 - DNA, 466 bp, Glycine max
ggcggggggacttcttctggatgttggagtgagtgagggtgcggtcgtcctgcagctggtactacggatccgccgtggtgccaagatgcgcaagaagaagacctacaccatgccgaggatgatcatgcacaagcaccacaaggtgatgcttgtcattctccagttctgcacggtcgacgagtctggacaagtgcagtaggatccgtagggagtgcccacacatcgagtgtggtgccgggactgtcatggccaatcactttgatcgtcactatagcggcaagtgtggcttgcctatgtgaccagacgccgagctatattctgggagagaatctctgggtctatttaaattagtataaccagaagggcattgcattcgtagttaccgtctgactgcatgggcttggattcaacctttatgaactgtgaagcgttacggattccgtacgtgaacataagcaatttgggc

SEQ ID NO: 226776 - DNA, 598 bp, Glycine max
  unsure (1)..(598): unsure at all n locations
tcggttctttacttgttgggttgttctgatcttctctcatagcaatcaaatcacactcccatcttctcatctcgtaaaccctaaaccccgttttcagtgacatcgagatcgatcgaacatggatgaggagtacgatgtgatcgtgttgggcacgggtctcaaggagtgcattctcagcggtcttctctccgtcgatggcctcaaggttctgcacatggacaggaatgactattacggaggagaatccacttcgctcaatcttattcagctttggaagagattcaggggagatgacaagcctcctccacatttgggagctagcagggactataacatcgatatgaaccctaagtttattatggctaatggcaatttggtgcgggttctcatacatactgatgttactaagtatctctctttcaaagctgtggatgggagctntgtgtttaataaaggaaaggttcataaggtgcccgcaaatgacatggaggccttgaagtctccacttatgggggctattgaaaaacgccgagcacgcaagtttttcatttatgtgcaaaaatacaatgagagtgatcccaagaccccatgagggatg

SEQ ID NO: 226777 - DNA, 519 bp, Glycine max
aaaaaaaaagaaatattttatatcaatttattataaacgttaataacattcattatcaagtccattacggatcccatcagcaacaaatcatgaaggaaggacatcaccgagttttctttactcttctgcagcactagcagcactaagatccacactcaggtcaataacctttccagttatcaatgtatacatgttgagaacatcatccacggtcgactcaaagtgagtagtagcatcataacttgttgatacaaagcagttgtccaaagtgggttcattgaccggttcatatctgtcatagatatcaaaaaatatctcatcaacaggtcctagaaggtcaattccaggttttagttcaattgctggctgatctgtctctgcctcggttgatacaaatgcaataaattttccctttggagcaacattgtgagtatatgaacaacaaaataggtacatgtctgacttccgacccaactgtttctgtggtaaaataatttgcaccgaatgggaatcatcagt

SEQ ID NO: 226778 - DNA, 590 bp, Glycine max
gagcgagaagagagaagaagaaagggagagagataatgcagtgttatggcttaaccgtaccgggaagcgtgcccaccgtatctccagtgttcttgaggcccaacaggcccattatcgcgacccgaatcgcgtttcccaaggcgaccctgaataagaaccagggcttcgtggtggagctgagcttctacgagcttctgggcatacccgaatcggtttcggtaacggagatcaagaacgcctacaagcaactcgcccgaaagtaccaccctgacgtgtcgccaccgggtcgggtcgaagagtacaccaagaggtttattcaggtgcaggaggcctacgaaaccttatctgatccttcccgaagagctatgtacgataaggacatggccaggggcattaacttggccttcaacgctcgtcgacgctataattatcacgatcaggtggttgaacaaaaaagtgaatggaaagtcaggtggaaatctcaactgtcagagctgaagagaagacgtaacagcaaggatgttggagggaatatgtcatgggcagcacgaatgcgccagcagagggatgatttgtcaaatgaatcatga

SEQ ID NO: 226779 - DNA, 407 bp, Glycine max
atgagaggaaattgtttttttatttttactagatataatgtaaaataataagacaccgtattataaaatgcacaggctacatccgtgagcaataataataatttatgtttaaactgctactagtaactactaagctcggcacatgcaaaaaggagctggatacatatatattgcttgatttgggtgcctcagccttagatccccttgtctattttggtgaccgtcacccactgcatcctgaaactctagacactgtatgggactattcaggacggggctgagccatctatgccgagaaacggccttatagtcgatacagtgcaagtctgttcggtgtccaaccaatgcattgtgcgtatttcccggggaagcagggatgaatatgtggctatgcacgccaacatatt

SEQ ID NO: 226780 - DNA, 501 bp, Glycine max
gggctggagcaaccctcgaaacaacagttaactatatataaaaccatcattctgaacaccatgtagactctcttcttctctcttcttctacatgaggggcttcggatgtcattattcattctcagctagttgtgttctggggggcaaacggggtcactattcagagccgagagggagctcctttatccatcatcatcatggagctccttgggtacctgaatcagggtcacccttctacaggaacaacactcgatattactctttcattggtgctatcgacacttgtgttcgtgttcactaacacacatgccttctgttcttatgagatggcggaactgaatcctataaaagctaggcactcacgtctggtcacgagtgccgcgcaacatgaagcttctacatgacagttttctgaagtatggtcacctatggaaagccaaggatggaaaccttatgtggaatcaaataagccatcattaccagagaagtgcgagggatata

SEQ ID NO: 226781 - DNA, 305 bp, Glycine max
aagagtggaaattgcttttttatttttactagatataatgttaaataaaaagacaccctattctaaaatgcacagggtacattcgtgagcaataataaatatttaagtttatactgctactagaaactactaagctttgcacatgcaaacaggagctgggtacgaatatattgattgatttgggtgcctcagccttagttccccttgtgtattttggtgacctataaccactgcttcctgaaactctgaacactctatgggattattcaggaaaggcggacccatcaatgccataattggtctta

SEQ ID NO: 226782 - DNA, 353 bp, Glycine max
aagaaaggaaatatcttttttatttttattagatataatggtaaatgataacacaccgtattataaaatgcacgggctacatacgtgagcaataataatagtttaagtatcaagctactactagtcactactaagcttgtctcatgcaatctggagctggatacctaaatattgattgaattggcgtgcctcagccgtagatcccattgtctattttggagaccatcaaccactgcatgctgaaactcagaccactctatgggtttattcaggaaaagctgagccatcaatgccgtgagtgggtcttatagtggctaagacaagtatgctcggtgtccaaccaatgcattgtg

SEQ ID NO: 226783 - DNA, 516 bp, Glycine max
cggctgaagcaatcatcgaaactatatataactatatatagatccatcattctgaacaccaagaacactctcttcttctatattatgttacactaggatcttgaaagacattatataataccacagtctagttgcgcttcaggggggcaatacgggtgacaattccgggcctagaatgagctactttatcaatgatcattatggtgctcctagggtacctgagtcagggtcaccctactacaggcacaacactcgttagcactctttcattggtgctttcaacactagtgaccgtgttcacttacacacacgccttctgtttttctgcgacacccgaactgaatcctataaaacctaggcactcaagtcttatcaagagtgccgcgcggcatgaagctccaacatcacagataattgcaatatggtcacctctggaaagccaaggctggaaaccttatgaggaaaataataagccaacattaccagagaagtgcgagggatatatacaagactttc

SEQ ID NO: 226784 - DNA, 382 bp, Glycine max
ttccatatttttttgaaatcatattcttttttatcatagcatcgggcatatattattccacggatggatttatgtccacccctacataggacaagttttccctttgcatggaaaacgtcccccgccctcatcctaaagactatacctggctcgccggatgccaccaagggctcctaaataaggggctgtggcaaaaaagatcaatggtcgccggattgccatactggaagtactaagcgaccggtcacaagccttttccacctgcaatgtggagggaatggagggcaagcctttacttcgaccgtaagctacttccgcaacataggattgatgctccgaagaaaaccgttcactcgacaatgccaactttgtatcatggaat

SEQ ID NO: 226785 - DNA, 582 bp, Glycine max
  unsure (1)..(582): unsure at all n locations
ctgctatgcccacttttccttcttccatggtgagaagtgggttgtgcgtgtggccaaatgtgagacaactttgctttagaaaaggcattctatatgggtttatgcgattgttttctactccgttgaaaacgctgcgtggagctagccgctcgctgagagtggctcaattttgcagtgttgccaatatgtcttcctcattgcagattgaattggtaccttgcctgaaggacaattatgcatatctgttacatgatgtagatacgggtacagttggtgttgttgatccttctgaagctgtgcctgtcatagatgccttgagtaggaaaaatcgaaatttgacatacatactcaacactcaccatcatcatgatcacacgggtggaaatgtagaattgaaagcaagatacggtgcaaaggtgattggttcaggaactgacaagaaaaggattcctggcattgatatccacttgaacgatggtgataagtggatgtttgctggccatgaggtgcgtgtaatggacactcctggtcacacncaaggccatataagcttctatttttctgatctggggcatttttact

SEQ ID NO: 226786 - DNA, 473 bp, Glycine max
atgaaaaagacaatacaagagaaaataatgttgctaagattaaagttgtggtacgcaaaagacctttaaataagaaggagcttgctaagaaggaagatgatattgtaactgtatatgacaatgcatatttgacggtccatgaacccaaactaaaggttgatttgacagcttatgtggagaaacatgagttttgttttgatgctgttcttgacgagaatgttaccaatgatgaagtatatcgagttactgtagaaccaattattcctacaatttttgagaaaactaaagctacttgttttgcttatggtcaaacaggagtggcaaaacatacacaatgcaaccattgccgctcagagctgcagaagaccttgttagacagttgcatcgaccagtatatcgaaatcagagaattaaattgtggcttagctactttgagatatatgtgggaaactttttgatcttcttagtgacag

SEQ ID NO: 226787 - DNA, 586 bp, Glycine max
ggacagaagtacaacgcataatctttttttttttggcaacagttccattgaaataattcttatctcatgctgccacagagcatatttatccaaattatcttgatatctttttttccccaaacaaaagaaaaactacttggttatgctggatgttttctaatcacaacggaaaggataactataaatattactttggtaaaaaaaaaaactaaatattactatcaatacccatgttcttcaagaatacaatttcacccgtaactccgtaagcagtgttaaaagaaagaacagaaagtaacgcgaagaaaacaaaaatgtccacacgactgtcctcacttctgaccaccagcctcagttggttcaaccacctcagcttctaaagtttctggggtatggggctgggttactgtggactggaactgaccaggtgtggaccatttaccagtgagagccatacccatcatctcatatatcttccctccaagttgtgctggattatcaggcgttaaaccactggaaaccaaagcagcatcatacaaaagatcaatagctcttagggcatcttcatcatcgggatttggtttaa

SEQ ID NO: 226788 - DNA, 578 bp, Glycine max
  unsure (1)..(578): unsure at all n locations
agacaccgtgcctagcattgagcgatttgcagatacttacaagatggagtgcccagcggcgattaaccgtcttgtggtttccggtgttcctgctacggtggagcatcgtgcgactgtggctgcctctgcttccacctcggctgctattgtggccgagtgcgtccagaattttattacttctatggattctttgaaacttaacatggtggctgtggatcaggtgcacccgttgctctcggacctttatgcttcactcaataagttgactatcctgccacctgattttgaggggaaaacaaaaatgaaggagtggattgcgaggttatccaagatgggtgcagctgatgagttgactgaacaacaggcgcggcagcttcactttgatcttgagtcttcttacaattcctttatggcagccctgcccaatgctggtacatgactgagtggccagtgcttgtacattaaatcagaattntcctttttttcatgtttttttttctttggatactaatctgatgattggaaaggaattttctatttggtcacagctcatacatttttaatgctggatcctggat

SEQ ID NO: 226789 - DNA, 530 bp, Glycine max
gccacagtctccttttgatcaggttaaacctgcacttcctgctcttgcccgtcttatccattcaaacgatgaagaagtattgactgatgcatgttgggcactgtcatatctttctgatggcacaaatgataaaattcaagctgttattgaagctggtgtttgtccccgacttgatgagctgctgctgcacccatccccttcagtgctaattcctgctcttcgaactgttggaaatattgtcactggagatgatatgcagactcaggttatcatcaatcaccaggctcttccttgccttcttaatctgttgaccaataattataaaaaacgcatcaagacggaagcttgtcggaccatatccaatatcacagctggtaataaacagcagattcaggctgtgattgaggctaatctaattgctcctttggtcaatctgcttcaaaatgctgagtttgatatcaagaaagaagctgcttgggctatctcaaatgctacattcggtggttctcatgaacatatcacgttcctag

SEQ ID NO: 226790 - DNA, 456 bp, Glycine max
gatcacttggcagaaagaagactctagtattctctacggcggcaaaaaaatatagccacaaagcattttacaccatgagatatgaaatatcaggcattgcaaaaaccccaggcagcccaccaaccatgtatttacttgctggacctcgtacaacccacggacattaggacaatgacaagacgttgacttgtcccccaactgctgtcgtgtcataaaggaggacttcacagatagaccaaccaaaactccccagtagagcatgaatatcttctaattaaagttgaatccaccggacggcacagcaggagcgttactgctaccaaagttgaaccctgactgagaagcatcccctggaggcataggctcatcttcctgctccaaccagtgtgtctcaagaatcttgaccgcctttgcgcaaatctctgtgttgtcatgactctggaggatctcaatttt

SEQ ID NO: 226791 - DNA, 534 bp, Glycine max
gcctcaccctgcttatgatcaggttaaacctgcactgcctgctcttgcccggctaatgcattcaaacgaggaagaactattgactgatgcatgcagggcactggcatatctttctgatggcacacacgataccattcaagctgcgcttgaagccggtgtatgtccccgactggatgagctgctgctgcacccatccccttccgtgctcatgcctgctgtcagaactcgcggaaatattgtcactggagatgatttgcacactcacgttatcatcaatcaccaggctctgccctggcttcttaatctggagaccaacacttataacaaaagcatcaatacggaagcttgtcggaccatatccaatatcgcagctggtaataaccacctgattcaggctgagattgaggctgagctaatcgctcctttggtcaatacgcttcagaatgctgagttcgatatcaagaaagacgctgcgtgtgctatctcaaatgctacatatcgtggttgtaatgaacatatcacgatcctagtgag

SEQ ID NO: 226792 - DNA, 466 bp, Glycine max
aatttatggcacctaatgaatttggattgagatgtcgttggactaggaaacctgagtatttgtatggaatatggtgttctccctgagcaaaaatgggaaactagatgaaaagatggaagggggtgctatgaaatgtgaaggaggagaatcagagggttgatgctttgagcaaggcggggaggcctccagctaatgttaaggctatgtcatttggggagagggctaagctgggaaataattcaatccggaggaggatggttgtgataatggcttgccacgcaagatatcagcgggtggctgatgatgttggaactgcggcggcattggtgggaactgatgggaaggatgggcctggcatatgctggctgaatactaatgtggaaatctgtccggacaatacacctgatgtaggctctatgcttctgtcagaggcagaaaaacataacgtcgccatggtgggggatcg

SEQ ID NO: 226793 - DNA, 503 bp, Glycine max
  unsure (1)..(503): unsure at all n locations
ggtattcaatgttaaaaatagaatacatggatgcaaaatcgaactcaagatacatgagctagggtggtttgctattagactactttattcgccctattcttgatcaagacctctgcttcaatataagtaaaccttggagcagaggagctgaattatcctcttaaaccttactgctacatatctattgcggggaaatcctttgaaattctctattaccattctatattttatatttatcttcatttaattggcctcaaagaaaataaacaattcacttaagaatttcaactgaaaaatgactaactttatattgagagggcgtcccattaaaacaacactttggctcacccttttattctaggaatgcaggcatnaactacatatatccaaatacgcattccatccctgaagacggtatttaccagctgtttcttctggatttactgctttgatgatgccacgctccacaatgatgatttcactgcccgtatcatggaccactt

SEQ ID NO: 226794 - DNA, 538 bp, Glycine max
atcattgaaagcagaaggtgaggtcattcttgaacatgttcaaccaaaacttgctcaggcagctgccccaccatctacagatcccatttctttagctgttgaagagaaactaaatgtgacactaaaacgagatggtggagtcagtaattttgatgttcaaggcacattgtctctccaaattcttgacaaagaggatggacatattcaagttcaggtccaaactggggagaatcaagccatcattttcaagacacaccctaacatgaataaagaattatttgccaatgaaaatgtactaggtctaaaggatcccaataggcctttccccacgggtcaagctggtggttctgaaggtgttggtcttttaaagtggcgaatgcaaagcactgatgagtcaatggtgcctctgacaatcaactgctggccctcttcttctggaaatgaaacttatgtcagcattgagtatgaggcttcatcattgtttgatttgcggaatgttgtgatctcagtacctcttccagctcttcgagatgcacca

SEQ ID NO: 226795 - DNA, 372 bp, Glycine max
aaaaaagacacttttaagtttcgtattatgaaaaaaatactttgccccatgcttgcaaaaagtaaaaccaaattttgaatttacgaatttaataaaatgatgcaacatgggaaaaaaaagccctttgataaaagaatcacgaatgtaaaagcaaaactgttataaaagctcagtgtcgggagggaaaaccatcaccccatttgggggttttctgggaacaactgggttctctgggaatacttaggggggttacccccatttagcgggatgatgctggggaccttcagggcactaaatgtttcagttgctataaaacgaactgaaatggggaagaatgctgatgattccgcttggggaacaacaaattccatt

SEQ ID NO: 226796 - DNA, 495 bp, Glycine max
cggctcgagcaaccctccaaacaacatttaactatatataaaaccatcattctgaacaccatgtttactctcttcttctctcttcttctacattagttcttgttattcattattcattctcagcttcttttcttctggggggcaaaaggggtcacttttcagatccgagattgagctcctttacccatcatcatcatggagctcctcgggtacctgaatcagggtcacccttctagaggaacaacacttgttattactctttcattggtgctttcgacacttgtgtccttctccactttcacacatgccttctcttcttctgcgtttccggaactgaatcctataaaacctaggcactcacgtcttctcaagagtgccgtgcaacatgaaactcctacatcacagctttctgaaatatggtcacctctggaaagccaaggatggaaaccttatgttgaatcaaataagccaacattaccagagaagtccgaggga

SEQ ID NO: 226797 - DNA, 466 bp, Glycine max
aggagtggaaatagcttttttattttcactagatataatgttaaataataagacaccgaactataaaatacacaggctacatccgtgagcaataataataatttaagtatatactactactagtcactactaagcttggcacatgcaatcaggagctggatacgtatatattgattgttttggcttcctcagccttagttccccttgtctattttggtgaccttcaaccactgcatcctgaaactctgaccactctatggttttattcaggaaaagctgacccatcaatgccatatttggccttatagtctttaagttcaagtatgtccggtgtccaaccaatgcattgtgcatatttcctggggaagcagagatgaagatgtcactatgcaagccaacatagtagtcaagtgcagctaatagagaagcttttccctttatctgagaacgctcttcagatgaagca

SEQ ID NO: 226798 - DNA, 503 bp, Glycine max
atctgaaagtctcaaaggttcatatgattttcttggtataaattattacacctcaaatttcgtggaatatgctccaccaaccaccactaacaagacctatttcactgatatgctagccaaactttcttcgaccaggaatggtgtacccattggcacaccgactcctctgagctggctctttatctatccggagggaatttataagctcatgacatacataagggacaactacaataatccaccagtgtacattaccgaaaatggcgttgcggaatcaaagaatgactcacttgcaatcaatgaagcccgaaaggatggtattcgaattagataccatgatggccatctcaaatccctgcttcatgcgatcaaagatagagttaatgtgaagggctactatatatggtcattttcagatagctctgaatgggatgctggttacacagctcgatatggcatcatatatgtggattacaagaacaatatgagtagataccctaagt

SEQ ID NO: 226799 - DNA, 415 bp, Glycine max
gttgaaaagataatttattccattctctggcatgccattatatatttgatatcaacgatgacttgattacattgatccgaatcgaagagcaagcgatacacactgcatgtttgtgatctccaggaaacaaacaagaagaaaaactgggcatgcatgccaaaggaacaatagatttagatcacttgagaaggaattttttcagccaaaacgcagaggacttagggtatctactcaaattgttcttgtaatccacatatatgatgccaaatcgagctgtgtgaccagcatcccattcaaagctatctgaaaatgaccatatatagtagcccttcacattaactctatctttgatcgcatgaagcagggatttgagatggccatcatggtatctaattcgaataccattctttcgggc

SEQ ID NO: 226800 - DNA, 564 bp, Glycine max
acctttatattttatactgttttgaccagcattatatcattggatagagtttgcctaaagcaaaaggtagtagatgctccagagatcttgacagtgattggcaaaatcccatatctttcagagtttttgaactccttatatgattgccaatacaagtcttttttctcagcatttgctggcctgacggagcaaattaagttggaccgctatctgcatccacactttcgttattacatgagggaggtcagaacagttgcttattcccaatttttggaatcttacaagagtgtgacaattgaagccatggcaaaagcctttggagtgacagtagatttcattgatgtggagctatcacgttctattgcagcagggaagcttcattgtaagattgataaagttgcaggtgttcttgaaactaatcgccctgatgctaagaatgctctttaccaagcaactattaagcaaggggacttcctgctgaatcggatccagacattgtcacgtgtgatagatctttagggcatctctcgcattctagattaaaatttactggaaaggcagaga

SEQ ID NO: 226801 - DNA, 382 bp, Glycine max
ggatgcagcaagttcaaccgttcatatttggaactcaaatggactacagaactgtattcaaaaggacgtccttcaaatttgaaattgtcattatctctgcctttccagcaaattttaatctataatgcaagagacgacctaaagatctatcacacgtgacaatttctggatccgattcagcaggaagcccccttgcttaatagttgcttggtaaagagcattcttagcatcagggcgattcgtttcacgaacacctgcaactttatcaatcttacaatgaagcttccctgctgcaataaaacgtgatagctccacatcaatgaaatctactgtcactccaaaggcttttgccatggcttcaatagtcacactcttgtaagat

SEQ ID NO: 226802 - DNA, 493 bp, Glycine max
cacttgacccctaaattcgtgcccattcccacaactgcacattcttctttctatatattccaaatcccttttccgatttccaccaaaatctaaaccgaaattcccaattacccttcccaattttcaccaaaacctaatactcccacaccaatcttcgatcatggacgccgattcacaacctcaacaactcgaagagagaacagaggagcaagaactgaagtacctggaattcgtgcaattcgcgaccatacaggctctgatgcgctgcgccatcctctactcatacgccaaggagcgcgcgggtcctctgaagcccggtgtcgacaccgtggaggaggccgtgaagaccgtcgtggctccggtctacgataggttccaccttgtccccggcgaggtcctcaaatacgcggatcggaaggttgccgagttagacagacacgttccctcaacgtgaagaaggtctcctcccaggcctgctccgtcgtctctgagt

SEQ ID NO: 226803 - DNA, 506 bp, Glycine max
  unsure (1)..(506): unsure at all n locations
aattccttttgaatccacagcaccgtggttgtaggtttgttttgcctatgctctttatgcttagtgcttactctgttggcattggcaaacatatattcatctgtttctcaagacaccttcagcaccatcaacatcaatatcgcttactctttcattcctccatttccatgaataacctacgccaaactgaaactcacgtgcattacaaccacactcatccctccaaatacgcaagatggaccgctagagagagcttcgaatttatgtatgcaaggccttggcaacgagtaaatgatttttacttgaacattgtccgtgccaacttgtctctgccacttctcttcggagcccagacacttgttgttgatcacaatgatactggaattgcagcactttctggttcaagtgagttggaaagtgttgcattgacgatcgcagtgngaggtgggcaaggacaacctttaaaatcattctttcgtatcacgggggttcatttgatgggtggc

SEQ ID NO: 226804 - DNA, 350 bp, Glycine max
cccggacacagacattagggaatgattgtactctgagaacgacgctggcctggacgggggtttatcatcctacaaatcatatggaatgacgtgctttgaataccatgaatgaaatccaacgtttaacaccggttgcaactcagggacgggtgcacactccacactcaccttgaagggaacccaggaaacctgcgcagcctatgatggttgtaaatgactggtagaggttgatccaggaactggaacctgtgcccacacgtgtgtctcagaggatgcaactattagagccgttccttttgatgcgcccactgtcactggagatgccctatgttatccatcattggcgcatg

SEQ ID NO: 226805 - DNA, 570 bp, Glycine max
  unsure (1)..(570): unsure at all n locations
cataacttctttggcttcttgataaaacaaaaaatacatcagaatatctacccctttagccgatcaaaacttttgtttttgtttcaaatcaagctgtcttgaataatagtatagccgtatattattatgtatgtacgtagtagcatcatcaatctctggttaattaatttatttccgcacccagagagtgacgctaaagcgcaagaatcccagttgaaaatatttgttcccttgtatatggcgaacttgacatttccacagaccttgaagcttctgaactacaccgttccttcctttcgtccatcgttatttgactcgaacgacactcagggctacaaaacgctttctctcctctgtacatgtatatgtctttgccgtggagtttctttccacataagtgacatgaactgagaaaactcgatgtggggtacgatgattcgggctcaatcaaaggttgtggttcggttcttctgagaactacaancgttgttttgttgttggtggtggtgttttgtcttcgaataatatcacctttcacaccatcatagtttaccttagtgaacgttttgt

SEQ ID NO: 226806 - DNA, 550 bp, Glycine max
ctcctctcacagtcacagggtctgtttgttagggtttccttttttttccatttcccccctttctcccacactatctctttccgcattttcccaattagggtttgttctttctttcgcttgttacccattctctcttccttcttcttctgttcttcattcattcattattattgttattttgtggcgcagatgtgtcattgagacagaagaagaagaagaaattggagggggtgtgtgatcgggtcctcaggtgaagatctgaggctgttggtgtctcttttcttttctccgagttccaaagatgagcgcttctaggttcatcaagtgcgtcactgttggggatggtgctgtgggcaaaacctgtttgcttatttcctacaccagcaacacttttcccaccgattatgtgccgactgtttttgacaatttcagcgcaaatgtggttgtcaatgggagcattgtgaatctgggtttgtgggatactgctggacaagaggattataacagattaagacctttgagttaccgtggtgccgatgttttcatactg

SEQ ID NO: 226807 - DNA, 566 bp, Glycine max
gaattgaaaaataatataatttaaatatatatcttcaagcaaacaaggtcgttatcctaactggatattccagtctattaatacataaatcaaaacgaaagttacaagaaaaaaaggtgggaatcatgaaatgcaaatttgactattagagtttacaataattcaaagaaaggaaagcattaagccaacttatgcttcaaggagatctagagtatttgtctgaggaacacccacataaactacaacttcttcaatagcaaggaaatgataaaaataaagaaggggagggtaatacagggagaacaaagggcagtcaaatgttaacacctagtgaatcacaatatcgaacaggccttttgtgctttacccttctttttcttctgcttaggtggttgaaggacaactcttatggctgcatcaaagactgccttcacgttctcctgtgtttttgaactgcattcaatgtaagctggcgcattaatcagcttcctaagctcttctccctgagctgtggtaataggtaccgcaccaggatggtcaatgcagaactgcttatcatcccgaag

SEQ ID NO: 226808 - DNA, 495 bp, Glycine max
attccatagaaatccaatagaagaaatacgaaagatgaagaggtctcttataaagtcgggagttctggcagtagagaagcatgagcgtgaccgcacaaacattatgcctttgtcccagctggaggagctcgctcaggctacccaggagatgcaagacatgagagactgctacgatagcttgctttccgcggcagcagcgaccgccaacagtgcttatgaattctcagagtccttgggagatttgggctcttgccttctggagaaaaccgccttgcatgacgacgaacaaagcggcaaagttctcataatgctcggtaaaatacagtttcaactccagaagcttattgatagatatcgctctcatatcacccagacaattaccattccttcggactctcttgtcaatgaacttcgaattgctgaggagatgaagcaacaatgtgatgaaaacagagaagtgtatgagtccatgttcacaagatatagagaaagagg

SEQ ID NO: 226809 - DNA, 551 bp, Glycine max
acaatataataataactttcaaataataattcgaatccaaagataatatacaaaccttaatttaaaaaaaaaaaacggacacaagaaccaacatctcctgtcagtattcacataacataaaaagacattcaatatgccgtgagcacttggtaactggcgtagaaaacatacgttacaacaagagggtcaataataaacttgatacctactccgggccttgcattggaaccatcatatgtcgaccctgagaattcgggtaagtaacattttgtgagaaagaaccttgatgagcaagctgagcattaggacttggctgaacatctctcttagcagatgagtctccacccttggcagagcccttcgtatcaccctccatctctcggtatctagtgaggtaaattttaagaggatccatataatcctcgaaaccgagagtggccatcgcccagagcaaatcatcgccgttaatagtctttctcttttctctctgacacttatcagaggcctcgctggtgatgaagctgatgaactcggagacgcattcctgaacg

SEQ ID NO: 226810 - DNA, 533 bp, Glycine max
gaacaaatgaactaataattataaaaagttgagtttggtacaacatgattaggcaaataaaaaacatgcctaaaacaatgcaactcaattagtgaaacccaatcacaaagatgaaatcatatctttaacaaaacaagcacacatgtatactcacaccaagaatctgataaatctcacgtttgatggaaaaactcagtcagttaaattttgctcctacactagatcatctggcccagcgagcacgacattgcaatcaagagcatatttcctggcaaccataatggctgcatttctgtctctctctgattcaaaggttaatacaaatgagaggccctttcttgcttgccaaaacaacgccttcgctgcattagcgatatcacttctaactccacatagctgcattgatggggagtaaatctctcttgcttttgtaatccaacctctgcatagctttatcctcattctccccacattaaatgaatgagtagaatgtgaagagtgatcttttccattcatttgagaaataactacct

SEQ ID NO: 226811 - DNA, 532 bp, Glycine max
gccaaatgtttggcactctcactaatcatagcaggcctcttcattggcttggtgagtccacaatggaacatattgaatccaaaatggggaagaagtgatgaagtagtgaatcgtccggaatggaacatattgaaccaaagattgggaaaaggggttgttgttggagacaacttgaagaactactgcgagagttggaggataaatgttgaactaaacaacattagagggttcagtgttgtgcctcaagaatgtgtggaccatgtgaagaagtacatgacctcatctcaatacaaggctgattctgttagagcagtggaggagattaggctctacatgagtggattctgcactttgaaagatgatggcaaagattcctggatttttgatattgatgagacccttttgtccacaattccttattataagaagcatggttttgggggagaaaagctgaacgcaacatctttagaagatggatggagaaaagcaagggcaccgctcttgatcacacactcgagctcttccatgaaat

SEQ ID NO: 226812 - DNA, 542 bp, Glycine max
ggaagacaaagaaaagagggatgccattgacacaaagaaccaggcagattctgtggtgtaccagacagaaaagcaattgaaagagcttggagataaggttcctggccctgtaaaagagaaggttgaagcaaaactaggggagcttaaagatgcaatttctgggggttcaacccaagctattaaggatgccatggctgcactgaaccaggaagtcatgcagcttggtcagtccctttacaaccagccgggagctgcaggtgcaggagggccaacaccacctggtgccgactctggcccctcagaatcctcaggtaagggacccgacggagatgtcatcgatgcagatttcaccgactctaaatgagcagcagccagctaattacacccatagagagtatatgttagtattttttccccgttatatgttttcttctgttccaaattcttaatgatttttgtcaatggaaagtaggtgtgtgttttcttcaaaaattagacacggattttataggtgcttcatgatgctcgctttgtaccctgga

SEQ ID NO: 226813 - DNA, 576 bp, Glycine max
ggagaaagaaagaagatggcaggaaagaaaatcccagatgtgttgctgaattcaggacacaaaatgccagttataggcatgggaacttcagtggagaatcgtccatcaaatgagacccttgcttctatctatgttgaagccattgaggtgggttaccgtcattttgacactgctgcagtgtatggaacagaggaagccataggcctagccgtggccaaagccatagacaaaggccttataaagagtagagatgaagttttcatcacttcaaagccttggaacacagatgcacaccgtgaccttattgtcccagctcttaagaccacattaaagaagctggggacggagtatgtggatctttatctgattcattggccagtgaggctgagacatgatcttgaaaatcctactgtttttaccaaggaagatgtgctgccctttgatatagaagggacatggaaagctatggaagagtgttacaagttgggaatagcaaagtccattggcatatgcaattatggtatcaaaaaactcactaaactcttggaatagccaccattcctcctgcagtcaatc

SEQ ID NO: 226814 - DNA, 541 bp, Glycine max
agaaccaaaatttctgaaatcatatacattgagaacatagcatcaagcatatattattccacggatggatttatatcctaccctacatagaacaagtttcttcaaacgttcaaaatattgtaagtcaaaaatctaaaaattatcctttgcttgccggatgccaccaagggcttctgcatcatttgctgtggctgcaatgtttagtgattgccggattgcagcactggatgtacgaaggaatggattacaagccttttccatcttcagtgtggtgggaatcgtgggcaggcctttacttcgaaggtaagctacttgggcagcataggattgaagttcctcgttttcaggttcgatagacaatgcaaactttgtattattcaatgtatactcgtgtccacagtatatatttgtattatctggcaaagacatgatctttttaagagaagatagcatctgctgtggggttccttcaaagagcttgccacatgataagctgaacaaagtgtctccagtaaaaattgccccagatccaggaaaatag

SEQ ID NO: 226815 - DNA, 499 bp, Glycine max
  unsure (1)..(499): unsure at all n locations
ctccgacatagccgcgggaatcgacaaggccatagaagacggcgtgaatgttttgtccatgtccattgggggaagcttgatggagtattatagagatatcatcgcgattggttccttcaccgccacgtcacacgggattctggtgtccacatcagcaggaaacggtgggcccagccaaggaagtttgtccaacgtggcaccgtggataactacagtgggagcgggaactatcgaccgtgattttccagcatacataaccctcggaacagggaaaacatacaccggagcttctctttacagaggtaaacccttgtcggattcgccgcttcctcttgtttacgctgggaatgcgagtaactcttctgtagggtatctttgcttgcaagattctctgattcctgaaaaggtatctgggaaaattgttatatgcgaaagaggtgggaatcccagagtggagaagggttnggtggttaagctcgcaggggtgctggatgatttt

SEQ ID NO: 226816 - DNA, 549 bp, Glycine max
gaggagtacaatgaattctacaagaagacttttaatgaatacctggagccattagcatcatcacactttaccacagagggtgaggtagaatttagatctatactttatgttcctgccttcgctccctctggaaaggatgacataatcaatccaaagaccaagaatataagactttttgtgaagagagtgttcatttcagatgattttgatggagaactgttcccccgatacttaagctttgtaaaggtgttgttgactcaaatgaccttccactcaatgtgtcacgtgaaattcttcaagagagccgcatagttcggattatgaggaaacgtctagttcggaaagcttttgacatgattctgggaatatccatgagtgagaacaaagaggactacgagaagttctgggagaacttcggcaaacacttgaaattgggttgcattgaagaccgtgagaatacaaacgtattgctcccttgcttcgttttttctcgtcccaagtgatgaagactgatcagcttggatgaaatgttgagacatgaacctgatc

SEQ ID NO: 226817 - DNA, 591 bp, Glycine max
  unsure (1)..(591): unsure at all n locations
aaaatgaacaaaagcctttaaaactatattgctaacaaacacggagatattacatcaagaacatacacatcatcactgaataagagaaatggagcctctcaacggggcactctttttctacttagtatctcttgttcttttagtcgatgttggaatcttgcaaggcgtgcttggagactaacgagactagctgctttgcgagaaagcacgaaactcaactgggttacgtagttgtcaataagacttcctggctggtccacttctgccagtagtttcatttcttcacgaacaatctccattgtgtcttcaatttccttcctatgagcagcaattagtgcttcttcctcctcaagtattgcactgatattcacatcagaagaggattctgtttcagactgccccgatccagtggtaatgctataatttcctgtgctctgctgcttggagcttgcagtggaatgatcagaaccattggcatcccgttttacccaatttacagatctttcagatttctcctncttagtcccctttctgcgtggnggagacaccccttgcactttctcattgtaacatctatggaaaagagtcatc

SEQ ID NO: 226818 - DNA, 476 bp, Glycine max
  unsure (1)..(476): unsure at all n locations
tggaacatcacgaggtggacatgacaccaaaaagatagttgacagtattcaagatcggggaatcaatcaggtttatataattggaggagatggaactcagaagggtgcatctgcaatttttgaggaagtcagaaggcgtggtctcaaagtttcagttgtaggtatccccaaaaccatagataatgatatcccggttattgataagtcctttggctttgacactgctgttgaggaggctcaacgagctataaatgcagcacatgttgaagctgaaagtgttgaaaatggcataggtgttgtcaagttgatgggtagaaacagcggatttattgcaatgtatgctacacttgcaagtcgagacgtggactgttgcttaattccagagtcaccctttntaccttgaaggtcctggtggactctatgaatatatagagaaaagactcaaagaaaatgggcacatggttatcgtcattgct

SEQ ID NO: 226819 - DNA, 510 bp, Glycine max
  unsure (1)..(510): unsure at all n locations
ctcgagccgccgagctttatagagatgcaaagagggaagaacttgatgctgccatttttaatcttagggagattgacagtaagcacagttaattttgtcaatcagttttacttaaacacatagcagactcttcaatgaggaaaatacttcttgtttctttttttcttcttgcagactatgatgaatatgagaggtcaatgctgatttcacaaatgagctttgagaaaacatttggtttgtccactgttttcattgaatctacactgatggagaatggaggacttcctgaatcttctgatccctcgatgctgatcaaagaggccattcatgttattagctgtggttatgaagagaagactgcatggggaaaagagattggttggatctatggttcagttactgaggatatcttaacggngttcaagatgcaatgccgtggatggaggtcagtttactgcatgcccctaaggcctgcattcaagggatcagcaccaatcaatctttctgatc

SEQ ID NO: 226820 - DNA, 495 bp, Glycine max
atttttaataaggccagggatgagaaaaagacaggtggcaacccagagtcaccaggaaagactgctactgatcctcatagcaaacctgcagtagagcctggcaaaactcagactaaaaaatggttttgctgcatgcaaaacccttctgccgaatcatagcatagcaatggttgctcctgtgaaaagcctgaacagaagaacaatgtttatgtgtaactagcgtcacagtattttctcaaagataagagctgtagagccataagcgaattctacggaatttatattttgtgatgtaaaagtgagctgcaatgggggaaagaaaagaagacagactattatttatgtgtgtgtatcaatgatgtggtttattattaggagccagggttgcttcctgttttgccttgtcttgcgctatgagctagagcgttgcttgtcacattgtattgcttgtattatgaaacaaatcctattttatgaacccattttattccttcc

SEQ ID NO: 226821 - DNA, 488 bp, Glycine max
ggcaatctccatggcatcctagttgggagagaggtctttccacatgggattttgtatgcttcacgggagtcacattattctgtgtttaaagctgctcgaatgtacagaatggaatgtgagaaggttgatactctttggtctggggaaattgattgtgatgatttcaaggccaagcttcttagtcaccaggataagccagcaattataaatgtgaacataggtgcaactgtgaaaggggctgtggatgatcttgatctggacataaaaaaacttgaagaagctggattttcgcatgacagactctacatccattgtgatggggctatgtttggtctcatgatgcctttcgtgaaacgagctccaaaggttacttctaagaagcctgttcgcagtgttagtgtatatggccacaaatttgtagggagtcccatgccttgtggtgtgcaccatacacgattggaatatgtaaatgctcttgccagggatgt

SEQ ID NO: 226822 - DNA, 451 bp, Glycine max
gaaaagtgaaaagtgaaaatggacttggaagcagtgaagaggtacttagagaaaggaggagaaacagcatcggcggtggatgggttgcctccgaggtttctggaaccgttaataatgaacgctcttaaggtcgatctcatcgaaactggtcgcgttgtctgctccatgaagatacctccgcgtttactcaatgctgggaattcgttacacggtggcgccatcgctgctctggtcgacgtggtggggtccgctgcgattcccaccgttggatattcggctcccaatactggggtttctgttgagattaatgattcgtatttggatgctgcctatgccgatgaggagattgagatcgaagccagggctttgcgtgtagggaaggctgttgccgttataagcgtggagttcaagaagaaaaaaactggcaaagtttttgcccaggggcgtcata

SEQ ID NO: 226823 - DNA, 543 bp, Glycine max
ctctctctctctctctctcgcatttccgttttggttgcatgcaactctttgctctctttctctctctctccattcgctctcatttttcatttttctttttctattctttgcttcagtggccttaccagtgtgttgctcactgagaaaccaccaattttcagcatgacaaagataagtcctgaagttgaaatcaggatgccaatggaggcatttccaccagtttcagctgatgtgagctttatttctaatagttttccgaaatacaaactggatgttgataatcaagttctggaagagccagttgaggataacctgggtccttctttgaaggatgttattgaacaagaagctttcaatttgtcagaccaacacaagcgtatctcagttcgtgaccttgccagtaaatttgacaagaacttggctgcagctgctaagttgtctaatgaggcaaagctgagagaggtggcatctttggagggacatgttcttttgaaaaagctaagagatgcattagaatctttaagaggacgttttgcaggaata

SEQ ID NO: 226824 - DNA, 574 bp, Glycine max
  unsure (1)..(574): unsure at all n locations
gagtaacattattctatattattatatagtaattaacaaaacagaacattcacatcatcatatatccaatccaactcacacactaacagtagcaactagcaacaacactttgtaaagaaagtaaaaacaataagaaattcaaaaccgcaatagatcgagatcagtttccaccgaagactttggcgatcttctcagtaggcaccaaaggaagataagcagaaaccctgtaacctttctcagcagaggaaacaaccgcctcgttgtacttctcggtgcaataggcagccttgggcaacacaacattggccacctgagggaagagcggaagctggttgagcttccgccatgcagacactgcgcactgctccgccgtaggctcgtacttggagtaaacggtcttggcgtaagcggagacgccatcgcggcggacttcagagacgacggagcaggcctgggaggagaccttcttcacgttggagggaacgtggctgtctaactcggcaacctttcgatccgcgtanttgaggacctcgccggggacaaggtggaacctatcgtataccggagccacgac

SEQ ID NO: 226825 - DNA, 544 bp, Glycine max
  unsure (1)..(544): unsure at all n locations
aagagattgagaaccttgaatcttctcgtggtaaggttatgaaaaagctttccataactgttagcaagtttgatgagcttcaccacctgtctgcaagtctcctttctgaagttgaaaagctccaatcccagttgcaagaaagagatactgaaatttctttcttgaggcaagaggttactagatgcactaatgatgttcttcttgcatcacaaatgagcaaccagagttctgatgagatctttgagttcttgatgtgggttgacacaattgtgtctcatgatggggtgcatgatatatatcctgatatgaagagcaacagtaaggttcatgaatgcaaagaaatacttcataagaagcttacgtctttattgtcagaattggagaatctaaggaagttgcagaaagcaaggatgcaatgttgcaaatagaaaggagcacggtagaagaactgagccacaaaacagtaactcttgagacatccttacatgagaaagaatngcaaatgaatttgcttgaaggtgtggaagacactggaaagggagct

SEQ ID NO: 226826 - DNA, 523 bp, Glycine max
agcttccaaaccctaacactcctcttcctcttcgatcatcacctctccacaatgccgccgaagttcgacccctcccagatagtcgacgtcttcgtccgcgttaccggcggcgaagtcggcgcggcgagttccctggccccgaagatcggtcccctcggtctctcccccaagaagatcggagaagacatcgccaaagaaaccgccaaggactggaagggcctccgcgtcaccgtcaagctcaccgttcagaatcgtcaggcgaaggtcacggtggtcccctccgccgccgccctcgttatcaaggccctcaaggagcccgagcgcgaccgcaagaagaccaagaacatcaagcacaacggcaacatctcgctcgatgacgtcatcgagatcgctagggttatgaggccgaggtccatggccaaggacctcagcggctccattaaggagattctcggacatgcgtttcggttggttgcaccgttgatggaaaggattccaaggacttgcagcaggagattttcga

SEQ ID NO: 226827 - DNA, 555 bp, Glycine max
agtaatctaatacaatttaatcgctggagcgactcgtaatcattacaagtggaagatccaattgcatattattgcataaaaaatgcagccctggattaaactctgcaaatgtgtgactgactctataaacttggttaggaacctagtagacatatgggcttaattaccacttgtttccatcaaatgaaagatttctacgacttcagcgaagctttactctatcagaatgaagcatttttggggctcaaattcagtatagcctacatcaactagacataaaccatcagggggtgctggaggagcagtagcacgcctacatgtggcatccatgagctttatcaatgcatcatcttcagcaccagcagcagcttctctaattgaggtcgccacaagcactcgaaccatcttacgcaaaaagcgattagctaccagctcaacgcacataacatttgtttcttctccatgatcagttgcaggcagtttgacttccatagctcgagcatggtaaacaaaacactcagttggtggaccatcatttcttgagcttttgatcac

SEQ ID NO: 226828 - DNA, 581 bp, Glycine max
caataaaagaccatgtcggtgaaggagtgcgagcaccacaaggggaagaagaggaagatcttccggcaagtgttctggtgcttagtggtgttccttttcatcgtgctggtcacaattcttttgatatgggcaatccttagacccaccaaacccaccttcacgctccaagacgtcaccgtctacgccttcaacgccaccgtggcgaacttcctcacttcgaattttcaggtcacgctcatctcgcgtaacccgaacgaccgcatcggtgtttactatgatcgcctcgaaaccttcgtgacctaccggagccagcaggtcacgtaccgaaccgccatccctccgacatatcaaggccataaagagatcaatgtttggtctccgtttgtttatggcaccaacatccccgtcgcgccgttcaatttcctcggcctcagccaggaccagagtaacggtaacgttctcgtcaccatccgagccgagggtagggttcgttggaaggtcagcaccttcatctccggccgctaccacctctacgtccgctgcccggacgtcatcagctttggaccccgcagcaatggaat

SEQ ID NO: 226829 - DNA, 409 bp, Glycine max
gaatgactcactttttgaggctgggaagtatatataaggtacttacatcgcacttggatgtatgcctattcctaatgaatctgcagaaaattacattggtacctggaagctttgttagtcccaccagatgcaagaggtctatgtcaacactaacatgctcctctatgaatacacgcctaatagcttaggcctttttgagaaactgcatgacattggtattgatagcgcatcacaggacttgtaaacctcggaatctaaacccttcggccagaaccttaaactctttgtatggtgtctgtatcccacctggattatgtgccaacatgatcacatcgattggaaccacacctttatgggccaagctatagtatggagccactgcaagaatgcatgctggcacagattacct

SEQ ID NO: 226830 - DNA, 544 bp, Glycine max
acctttgtcccagggctgattgatctggccatcaagaggaacagtttgattggaggagatgactttaagagtggtcagaccaaaatgaaatctgtgttggtggatttccttgtgggggccggcatcaagccaacatctatagtgagttacaaccatctgggcaacaatgatggcatgaatctctcagcccctcaaaccttccgctctaaggaaatctccaagagcaatgttgttgacgatatggtcaacagcaacgccatcctctatgagcccggtgaacatccagaccatgtggttgtcattaagtacgtgccttatgtaggggacagcaagagggccatggatgagtacacttctgagatattcatgggtggaaagaacacaattgtgttgcacaacacatgtgaggattcactgttagctgctcctattatcttggacttggtccttcttgctgagctcagcactcgaatcgagtttaaagctgaaaatgagggaaaattccactcattccacccagttgcgaccattcttagttacctga

SEQ ID NO: 226831 - DNA, 527 bp, Glycine max
aacaagttgttgatggacttgatagagctgtattgactatgaagaagggtgaggttgcgttgttgaccattgcacctgattatgctttcggtacatcagagtcccaacaggagttggctgtagttcctcctaactcagccgtgtattttgaagttgagctagtgtcatttgagaaagagaaggagtcctgggatctgaacactgaagagaaacttgaagctgctggtaagaagaaagaagagggaaatgtcttgtttaaagctagtaaatatgcaagagcttccaaaagatatgaaaaggccgtgaagtacatagaatatgattcctcctttggtgaggaggagaaaaagcaggccaagaccttgaaggttgcctgcaatctgaacaatgctgcttgcaagttgaagttaaaagactacaaagaagcagagaaattgtgtactaagggtgtggaccttgagagtacaaatgtgaaagcctctatagagggcccagccatatgcgtgctactggattgctgactgcat

SEQ ID NO: 226832 - DNA, 386 bp, Glycine max
aaagaccatgtcggtgaaggagtgcgagcaccacaaggggaagaagaggaagatcttccggcaagtgttctggtgcttagtggtgttccttttcatcgtgctggtcacaattcttttgatatgggcaatccttagacccaccaaacccaccttcacgctccaagacgtcaccgtctacgccttcaacgccaccgtggcgaacttcctcacttcgaattttcaggtcacgctcatctcgcgtaacccgaacgaccgcatcggtgtttactatgatcgcctcgaaaccttcgtgacctaccggagccagcaggtcacgtaccgaaccgccatccctccgacatatcaaggccataaagagatcaatgtttggtctccgtttgtttatg

SEQ ID NO: 226833 - DNA, 381 bp, Glycine max
aggttcgattcttttccaggaaggatttcccgtcatcactgtatgacgtcctccattctttgggggggggggggggggggggggggggggggggggggggggggggggggggggggggggggggggggggggggggggggggggggggggggggggtgttgggggtgtgggggtgttgtgtgtgggtgtttgccccaaaaaaaaaaaaattccccctcctggttaaaattttaaaccctcgcaaatacctttatataaagaaaattttacccccctatatatttggggggggtggaaaaattttaaaaccccccccttatcccccaccccaaaaaaaaaaaaaataaaaaattttaattttttatgaaaaagagtgagatt

SEQ ID NO: 226834 - DNA, 504 bp, Glycine max
  unsure (1)..(504): unsure at all n locations
gagttggaaaacaaagtatagagtgaaagaatgggtgagaaaagcaagattttgatcataggaggcaccggctacatcggcaaacatatagtggaagcaagcgcaaaggctggaaatcccacttttgctttggtgagggaatccacactctctgacccctccaaggcacaactcatccacaattttgaggctttgggcgttaatttggtccgcggggatctgtacgatcatgagaagttggtgaaagctatcaagcaagtagatgtcgtcatatccacgctgggtcacctgcagcttgccgatcagctcaagatcatcgctgccattaaggaagccggtaatgttaagaggtttttcccttcggaattcggtaacgacgtggatcgtgtccatgccgaggaaccagcaaaatctgcattagctatcaaagcccaaattcgacgcagcattgaagccgaaggcatncnctatancgtacgttccagcaactactttgctggctat

SEQ ID NO: 226835 - DNA, 456 bp, Glycine max
ggagtggaaaaactgttctcttctatcagcttagggatggctcaactcatcagggtacagttacatcgatggagcctaatgaaggcacttttattcttcacaatgagaaaaccaggaagggcaagataaagcctgttcatgttgttgatgttcctgggcattctcggcttcgacccaaactggatgagtacttgcctcaagcagctggggtagtttttgtagtagatgctttggactttttaccaaactgccgtgctgcttcagagtacctttatgatctattgactaaaggaagtgttgtgaggaagaagattccaatgcttattctctgcaacaaaacagacaaagtcactgctcatactaaagagtttatccgaaaacagatggagaaggaaatagacacattacgggcatcaagaagtgcaatatcagcagctgacatcgcaaatgagttca

SEQ ID NO: 226836 - DNA, 562 bp, Glycine max
ctccagcgtccgattctctcaccgatctcgcgccaaatacaaattcgtgtcaacccaacccagggttccggcgagcatggccgacggtccggctagcccaggcggcggcagccacgagagcggcgaccacagccctcgctctaacgtgcgcgagcaggacaggtacctccctatcgctaacataagccgcatcatgaagaaggcacttcctgccaacggtaaaatcgcaaaggacgccaaagagaccgttcaggaatgcgtctccgagttcatcagcttcatcaccagcgaggcctctgataagtgtcagagagaaaagagaaagactattaacggcgatgatttgctctgggcgatggccactctcggtttcgaggattatatggatcctcttaaaatttacctcactagataccgagagatggagggtgatacgaagggctctgcaagggtggagactcatctgctaagagagatgttcagccaagtcctaatgctcagcttgctcatcaaggttctttctcacaaaatgttacttacccgaattctagggtcgacatat

SEQ ID NO: 226837 - DNA, 471 bp, Glycine max
atctaattcaatttaatcgctggagcgacttcgtaataacacaagtggaagatccacttgcatattattgcataaaaaaggcacccctggaaaaaactctgcaaatgtgtgactgactctataaccttggttaggaacctagtacacatatgggcttaattaccacttgtttccatcaaatgaaagatttctacgactaccgcgaatctttactctatcaaaatgaagccctctaggggcttaaattcaatatagcactacatcaacttgacatataccatcagggggtgctggaggagcattagcacgcctacatggggcattcatgagctttatcaatgcattatcttcagcaccagcagcatcttctctaattgaggtcggcacaagcactcgaaccatcttacgcagaaagcgattatctaccagctcaacggacataacatttgccgattctgcatgatcagttgc

SEQ ID NO: 226838 - DNA, 515 bp, Glycine max
  unsure (1)..(515): unsure at all n locations
ctttttctttaggcctttccgaattaagtacttgtttcattttctctcgaagcaagaaaaatgttcatcgagagtttcaaggttgagagtcctaacgtgaagtacacagagactgagattcagtccgtgtacaactatgaaaccactgaacttgttcacgagaacaagaatggcacttatcagtgggttgtcaagcccaaaactgtcaaatatgaatttaaaaccaacacccatgtccctaaactaggggtaatgcttgtggggtgngggtggaaacaatggctcaaccctcaccggtggtgttattgctaaccgagagggtatttcatgggcaacaaaggacaagattcaacaagccaattactttgggtcgctgacccaggcatcagctattagagttgggtctttccaggggaggaaatatatgccccattcaagagcctgcttcaaatgtaaaccctgatgatgttgtgtttggggatgggatattagtaacttgaacctggcagatgcca

SEQ ID NO: 226839 - DNA, 579 bp, Glycine max
gaataacaaaagttccataattcataaacctttgacatgatgaaggggcaatagcttatgggtattatggcctcatgcttatgctaatgccaataaagttaaaagtatgttcatataataggtaaacagtgagaaattaatttatgctttatagtaaatagaattgggtagtttaaatgttctcttggccattggaagtccatcaaaagtgctccattgatctcccacaataccccatatgcgataaccttcatcgaccaattgttgcctcaccttggaatggtattttttcacgtccatcaattcatcatcaaaacccctcaatgtaagcctattccatccatggtatccaacactcacaaggttgtctacggtgggagatcttaggttttcctttcttgaagaaatcagaaagattttgaaccctttgttcttgatttcatggaagagctcgagtgtgtgatcaagagccggtgccttgcttttctccatccattcttctaaagatgttgcgttcagcttttctcccccaaaaccatgcttcttataataaggaattgtggacaaaagggtctcatc

SEQ ID NO: 226840 - DNA, 584 bp, Glycine max
gagaggatataaaatccgtcaaaggaaccagctaagactttcacagaattccaatctggccgtaacccagaacgatacaagatagcagcagagcaatccacaagaacaagaacatgaagaaatcacaacataaacagattccatgatggaaaaatgaatcgtttctgtgatgtatcccaaaagtacaattcgaagagaagcatcatcccaaaactcaaatttcggaaaatcaacaagcacaattttcttcagcagcaaaaaaaaaaatctatactttttataccctatcactgaaagtaagaaaaaaaaactgaccctaataataacaccatgatcatgattatcacataacaacagatctctgcgccttcctccgctcataatcagcatcatcagtggggaactcatagcgacaaacgggacacgtgtttcttatccccaaccacggcacaatgcagtcctcatggtaacgatgcgaacacggcaacaccttcaccccttcctcaacgccaaactcgtctttacaaaccgtgcaaacgacgtcagcttctgtcacaaccaccgacggaagaatcctcacgacg

SEQ ID NO: 226841 - DNA, 546 bp, Glycine max
ctttggtgctgtatcatatctgacagttgctgttactcccttctgcattgtgtttgctgtgctttggggagtttatcgccgtgtatcatttgcttggattggtcaagatattcttggcatcacattgataattacagttcttcagattgtgcggataccaaatctcaaggtcggaactgttcttctcagttgtgccttcctatacgacatcttctgggtgtttgtctctaaatggaggttccatgagagtgtgatgatagtggtagctcgaggtgataggagtggagaagatggtatccctatgctactcacgataccacgtatgtttgatccctggggtggttacagcatcattggttttggggacatcatcttaccagggcttctagtagcattttcactaaggtatgattggttggcaaagaagaaccttcgagatgggtacttcttgtgggcaatgactgcttatggattaggtctccttatcacatacgtggcttatgacttaatggatggacatggtcaaccagctttgctttatatagt

SEQ ID NO: 226842 - DNA, 531 bp, Glycine max
cctaattttcactctgcccctgtcagtgttggctttcagttgcagaatttctcttcttctaacgctgttgtcgctgctgctactgctgctgatgcttcgcgcattgaagctccttccgctcctgttgttgttgaaggcaaccaggttcccaaggaaagtactcaaactaaggtgaagagaagaggtggcccaggaggtctcaccaaaatctgtggtgtttcgcctgaacttcaggtcattgttggccagccagcattgtcgaggactgagattgtgaagcaactgtgggcttacataaggaagaacaatctccaagatcccagcaacaaaaggaaaataatttgcaatgatgaactgcgtgtggtgtttgagacggattgtactgatatgttcaagatgaataagttgctatctaagcacattatcccccttgaaccaaccaaaaagcctgttccaaagaaacagaaggtagatgtggagtcaggaacaagaagtgctgaacctactccttctgtaataatatctgatgca

SEQ ID NO: 226843 - DNA, 466 bp, Glycine max
ctggaaatggcgacggcaacataccctccaccgccaccttattacaggctttacaaagattacttgcaagaccctaattctgctcccgaccctccaccacctattgaaggcacttatctttgttttggagccaattacactactagtgatgttctacctaccttggaagaacaaggggtgcgccagctctattctaagggccctaatgttgatttcaagaaagagctgaggtcactcaacggagagttgcaactacatgttttggagcttgctgatattcttattgagaggccttcacagtatgcaagaagagtagaagaaatttcaactgtattcaaaaacttacatcaccttttaaattcattgcgtcctcatcaggcgagagcaacattgattcatattttggaacttcagataccagcgtcgtaaacaagcagtggaagacataaagaagaggagagaagaa

SEQ ID NO: 226844 - DNA, 411 bp, Glycine max
  unsure (1)..(411): unsure at all n locations
ctcgagccgattcggctcgagctgatctgcgtttccagagccatgctgtgcttgcattgcaagaagctgctgaggcataccttgttggactctttgaggatactaatctgtgtgccattcacgctaagcgtgtaactattatgcccaaagatatccagctggcaagaaggattcgtggtgagcgtgcttgatgtggtggtggtggtggaggttngtgaaaatgatgatgggtggctgcggatggtgatttgttattcagatttcttttttattcaaagatagggttgttagggagtatgtattaattgtgatacgggcaaatactgctaagagtacatgactgtgtcttcttacttacacaaaattggaatgcaattgatttttggacgtatgtgtctgaatgtcataatg

SEQ ID NO: 226845 - DNA, 462 bp, Glycine max
  unsure (1)..(462): unsure at all n locations
tggacttatacgtctaatggaaggggaaaacactggtccaatcaacattgggaacccaggcgaatttactatgattgaacttgctgagaatgtgaaagagcttattaatccaaaagtggagataaatatggttgagaacactcctgacgatcctcgtcagagaaaaccagacattacaaaagcaaaggaattgctgggatgggaaccaaaggtcaagttgcgtgatggccttcctcttatggaagaggatttccgtcagaggcttggggttcccaagagcaactaagcttgttttactccttcacttcatatcatataatcataatgaatattttgatagtaactgggatgaatctgttaagtgttaagatgatttatattgaanattatgtagaggatngcttctccacccaacttctatgggaaatactggttgtgagatgagtngaagttattttattg

SEQ ID NO: 226846 - DNA, 421 bp, Glycine max
tttaccgatatcctttccaggaaggtttcccgtcatcactgtatgacgtcctccttctttggggggggggggggggggggggggggggggggggggggggggggggggggggggggggggggggggggggggggggggggggggcaaaaaaaacaataaccccttataaactggccaaaaaccctaagggaggccaagggacccaaaagcgataccttttagccccccaaagaatggggataaaacaccggtccctaaaaaaaggccaaatggaaaccttccggaaaaaaaaaaattttggggcatggaaaatagtttgtttcccaaaaaaaaattcccctttttaaaagggggggttttataattaaggggagcctttaaactgggggaattaaacccaaaatttccaaaaataaagccc

SEQ ID NO: 226847 - DNA, 414 bp, Glycine max
ggctgaagctggatcctgggttgaagaacaactttctgagagaatcagtaaaaagggtcaagtgaatttatttgaaaccacaattcgggttttgggtgggcttttaagtgcgtatcatctaagtggtggggaaaaaggaacaaacttaactcatgcaggacctaaaccagcagtttatctagaaattgctaaggatttggctgaccgtctgttatctgcttttacagccagtccaactgctattccgtttagtgatgttattctgcatgacaagtcggcacatccagctcctggtggactgagtagcacatcggaagtttccactttacagcttgagtttaattatctcagtcagatatctggtgatcagaaatatagtttggaagcaatgaaagtcatggagcacatgaagac

SEQ ID NO: 226848 - DNA, 521 bp, Glycine max
cagtcctgagtctcacattaaagctttgatgggtaaactggaatgctcaggtgatgcctccttacaaaacgcactggagcttgttcttggatatctaaatcaaatcccatcatatggtcatcgagaagttctgatcttatattcagctctcagtacatgtgatcctggtgatctcatggaaaccatccagaaatgcaaaaagagtaaaataaggtgctcagtcattggtcttgcagctgaaatgtttgtttgcaaacatctctgccaggaaactggagggacttattctgttgcactagatgagtcccactttaaagagttgatcctagagcatgcacctccacctccagcaatagcagagtatgctactgctaatttaattaagatgggtttcccacaacgatcagctgagggttctgtcgcaatatgcacatgtcatgaagaggccaagaccggagggggatacacttgtccaagaatgcaagttcgtgtctgtgagcttcccacttgatgtcgtgtgt

SEQ ID NO: 226849 - DNA, 617 bp, Glycine max
ggacagagaataaaatgttcatattattgcaacaactaagagattcaatcatagcaatacgagttcggcaacagaacatcatcaaacaaacaaagcaataaaaacatatagtgaatatcacacactcacagctgatcacacgacgtaggaacaaaagaaatggtctccttttcaagatcatgattcaccaaaatgttctgctgttgaacatttccgaatatagacattccactagaagcacccatggctaaacaagccacacccaaattggagtcaccaatcatgtagttctcagcaggaagctccaaatccccacccttgaaatggaaaacaatctttggaatctccacttgtgttgaccctgatggcagagagaagcaaagatccaaccctgttgagctagttttgtccaaaggaagtttggtttgagaaatgaactcttttttgagtgcctcaaaggccttttgttcaatgtatgtgattgtggtgccagagtctatgatcacaccaccattcccatcatcccccacttcaaagtggacttctcaatggacaatcgagtgtccccaacagagatgcctctcagagaaagatagtataaagaaggttgcaaaggg

SEQ ID NO: 226850 - DNA, 519 bp, Glycine max
ggactggatgtgattcaacaggctcagtctggaacaggaaagacagcaacattttgttctggaattttgcagcagcttgattatggattggttcagtgccaggctttggttttggcaccaacaagggagctagcacagcagatcgagaaagttatgcgagctcttggtgattacttgggagttaaggtccatgcttgtgttggtgggacaagtgttcgtgaggatcagcgcattctccaagctggtgtccatactgttgttggcactcctgggcgagtgtttgacatgctgcggaggcagtctcttcgcccagattgcataaagatgtttgttttggatgaggctgatgaaatgctttcacgtggtttcaaggatcagatctatgacatcttccagctgctgccatccaaaattcaggttggagtgttctctgctacaatgccgccagaagcccttgaaatacaagggagttcatgaataagccaatgagaatcctggaaagcgtgatgaactgaccct

SEQ ID NO: 226851 - DNA, 587 bp, Glycine max
gcatgaacatgtaatcatataagaaaggttacttaaatgtgtttggaaatgtaaaagctagaacttgtaacatttagatgtgagaaaccatgtccgtggtccatttccaaagacgctatatataatttaactgcacattttattttcagtttgaaaccatgctttcagtttcttgcacaaaaccatctcctgtccagtctttgtctgactgcaaccctttctttatggctttcctcttctgaactgcttccttctgccttcttaccaagtcagtgtgagtagtaaagtactcaagagaaacccctctgaaatcttctatggatgtgaaattgtgctttttcataaagtcttgaagctcaagacatagtttcttcacaagaccatagccatgcatcataaccccagtgcacacctgaacagtgtttgccccgagaaggataaactcagcagcatcaccacctgtctcaacgccaccaatggcagaaagtgtatagttctcactatcaaactctgacttcatcatctttgcaatgctcatcaccttcccaagtgatatgggatggactgcctttgcagaataaccccca

SEQ ID NO: 226852 - DNA, 517 bp, Glycine max
cacaagtccaaagtttgattccaaaatgcgatcctcaagcattcgcagcttcaccatcttcaccctctttctcattgcgatcctcccccacggacacgcaacaactccaacctccaaacttcgcctcaaacctctctcttctcccttttcaaccgccctcgaaaccctccagaaacaactcgggtacaccttcaagagcatcgatcttcttcgtcgcgccatgacacacgcttccttctccgaagaaaacaacaaagctttcgccattctcggcgccagcgtcatcgaaacctccgtctctttccatctgctctccagagacgttgatctttcttccaaagagctgaaccgtcgattgtcccaaatcaccaacgtcgattcctcctgcgccgtcgacggaacgcgattagggttgcacaaggtggttcgcgtctcgcccaaacaaattcctccgcccccgccgtcgtttgcggcgccttccgagcaatctttggcgctgttgctattgacaccggca

SEQ ID NO: 226853 - DNA, 569 bp, Glycine max
ccttgccaagcctctctgacaatgtagtgataacctcccatgattattcaggcttcatagtgaatcgaatccttatgcctatgataaatgaagcattttttgctctctacactggtgttgcaaccaaagaggatattgacacaggaatgaagctgggtactaaccatccaatgggtcctttagagcttgcagacttcattggattggatgtgtgcttgtcaataatgagagttcttcatgctggccttggtgacaacaaatatgcaccttgccctctacttgtgcagtatgttgatgctggaagacttggaagaaaacgaggtattggtgtgtatgaatatagtaaagatccaaggtctacaaaatcatcttcccgtcttaaaatgtttgtttcacttggaagaacaagttttcaacacccccattttaattaccttgtgtctgaccgtgggggtggtgcacacggctgaagttgaatacttgaatgtgtcttctatttcttttatgcatcccagcaaaaagaaaattgcaggaactaatagtagaacatgcatagttaaatcttcatg

SEQ ID NO: 226854 - DNA, 340 bp, Glycine max
ctcgagccgattcggctcgagctgatctgcgtttccagagccatgctgtgcttgcattgcaagaagctgctgaggcataccttgttggactctttgaggatactaatctgtgtgccattcacgctaagcgtgtaactattatgcccaaagatatccagctggcaagaaggattcgtggtgagcgtgcttgatgtggtggtggtggtggtggttgtgaagatgatgatgggtggctgccgatggtgttaatgcatacagacttgttttttattcaaagatctgattgatagggcgtagggattgctaagaaacggacaaaaactgcacactgttcatgact

SEQ ID NO: 226855 - DNA, 556 bp, Glycine max
  unsure (1)..(556): unsure at all n locations
gtctgtttgcccagaaaactctggagataactgaggatattctttcgacatacaaaaatcaaggtggttatgatttgcttgggcggacgaaagatcaaattaggaccacagaacaagttaatgctgcacttgctgcatgcaacaatttgaaacttgatggccttgtaatcatcggaggggtgacatcaaacacagatgctgcacagcttgctgaaacatttgctgtagcaaaatgccccacaaaggtggttggtgttcctgtcactctaaatggagatcttaaaaaccagtttgtagaaactaatgttgggtttgacacaatttgtaaggttaattctcagctcatcagcaatgtctgcaccgatgctctctctgcagagaagtattattatttcatccgtcttatgggacgcaaggcatcacatgttgctttggaatgcaccctccagtcccatccaaacatggtaattctgggtgaggagggttgctgcatcaaagcttaccctttctgaaaatngcaaacagattactgatgcagttcaggctagagcagagc

SEQ ID NO: 226856 - DNA, 446 bp, Glycine max
ctcgagcgaatcggctcgagcggctcgagcggctcgagaagaaagaaaaaaaaaatgagtttgagggaatacaatgaagagggaagggatctgaacaagccatttcttcacacgggaagttggtatcgtatgagtgggagacaatccagtgtgttcggttccacacaggccatacgtgattcctccatctctggctttgcttgtgatctaatcgttgctttgggtccaattcagtttggtttcactgctggttacacctcacctacacaatctgctatcatcaatgatctaggcctctcaggctctgagttttctttgtttggttctctagccaatgtgggtgccatggttggagcaattgctagtggtcacattgctcagtacatacggcgcagagggtctttgatgattgcatccattcctaatattattgggttggttggcta

SEQ ID NO: 226857 - DNA, 448 bp, Glycine max
  unsure (1)..(448): unsure at all n locations
cacacacacacggagcgcggaaccaaatgaaatgattgagaagagagagcgaagaaaaaaaagagagccaaaccaaacctttcccgaaacggttcgttttgcccttcttcggaaccctcccttctgcgccgctgctgctgctccggtcgccgtcggcgactctccggtaaccgaagaccactgccgatccgtcagaaacctcggatctcggatctgaacgagcgaaacgatgccgtctcacgcggatctggaccggcagatcgagcatctgatggagtgcaagcctctgccggaggccgaggtgaaggcgctgtgcgatcaggcgagggcgattctcgtcgaagagtggaacgttcagcccgtgaagtgccccgtcaccgtctgcggcgacattcacggccagttctancgatctcatcgagcttctttcggataggagggaaacgct

SEQ ID NO: 226858 - DNA, 552 bp, Glycine max
gaaaattaaggacaccgtttttacacaatgtcaactaattttcttaaataacggaaatttagttataatcgagacaacaatcaagcacgggggaagaactaaagtccttatgaaaagagaattaaagaaaataatagacttaaaaaagcacactgcatattcatcaaagcatcatcaaagcacactgcatcctaacagcacacgtacgtagaaaggtgaagttccaggttttgcacaacatacacaacacaccataatttattttatatacaatcttatggtgcccaagatgcagatgcatggactaattaaacaacaacgttagtctgataggcagggtccatagataaattgggtacccataaaatggccttgcttccaaggaaatggcaaacagggttagttccaggatcaactcccatgagttcatgaagcatgtgatgattcattccagacgtatctgagtggcaaacagcaagtgcctgagttttggttccatcaccagtcaccaatggaaccatgaaagctgttgttcacggactttatggcagt

SEQ ID NO: 226859 - DNA, 417 bp, Glycine max
  unsure (1)..(417): unsure at all n locations
cttattcaggaatttggagagtattgatatatcaaggtaggataaaccagtcgccaaggaagatatggagttttctatgattttcattgctagcaacattatgctgcttttcagttcagcatttgccaaaactgctagtcctccctctctgagcccaactccagcaccagccccggcaccagacttcgtgaacctcactgagttactcagtgttgctggtccgtttcacaccttccttggataccttgagtccactaaagtgattgacactttccaaaaccaagccaacaacactgaagaaggaattaccatctttgatcctaaggacagtgccttcaatgctataaagaatactaccttatccaacctcacctgtaaccagctaaagcangtgatcctctttcatgccttgccaca

SEQ ID NO: 226860 - DNA, 549 bp, Glycine max
agactattaagaaacgctttaatttatgctaatcttgaaagacctgcactcattacactgattcgaatagtgtaatttccgtgtccatgtacatttctataatctatttagaagaatacaaaaatttggaagaaggatataaaacataatattaataacaagcaaggggctgggagaacttcacgagactcagactaggagaggcttccctcacatctttgttcttattattatggtgttgccacattttcctttgcctgtggagcaatttcttctccatcacttccaggttcactgccaggaactcccaagcttagcagcacttcctcccactccttagcaggccccttccatgaaagatcttgagccatgcagttcttgataatttctgtaaaagctggagttccatagactgcaagggcccttttgacagtctttgatatagcatccacatcagccggatccacagcatcacattcaacattgaaggcacccatctgaaatccagtgaagccttctttgacagtgtcaactaatccacctgttgag

SEQ ID NO: 226861 - DNA, 431 bp, Glycine max
  unsure (1)..(431): unsure at all n locations
aatcatcttttgtttgttcttcagtactttagtgtgtgatttaattccaagattttgagaatgtctagctgtgggtgtggaagtagctgcaactgtggcagcaactgcggttgcaacaagtactcttttgacttgagctatgttgagaagacaaccacagagactcttgttttgggtgttgggtctgtgaaggcccaattggagggtgctgaaatgggtgttgcagctgagaacggtggctgcaactgtggatcaagctgcacctgcgacccatgcaactgcaagtgaggtcaagatttataaccttgaagcagagataactgtaatatatgtatcaacaaataataagaattacgtgttgtgtttaataaagtgatcatggctcgaatttgcnnnnnanaaannaannnnnnnnannaaaaaaagggcgg

SEQ ID NO: 226862 - DNA, 557 bp, Glycine max
gtcatggaaaattcaagtgaagattcatcaaaatctcatggaaaaacccgtcagacggctaattccaaaactcctcacaaaacaggtgatatgctagcaaatggacacaagcaactagtccaatcaccgccagagtgggttagaggaaatggccttgatgaggtggttgatttggctgacatgctgcaactgcggtcacgagattggtttttggtgtttgttgagagattcttggaccctgatggggacactagcttgtcaaataatggtcaaatagcaggtatgctcactcaactgaaaagtgtgaatgattggcttgatgagataggatcaagcaagaatgagggagaaccttgccagataccagcagagacaattgacaggctgaggaagaagatatatgaatatcttcttacacacgttgaatccgccgccgctgcactcactgggtggatcacaatcatcacctagaatccaaacagcagagatcaaagccaaaaagtgatgaataagtacatagcttagcttgaggatacattattttatgtggcatggga

SEQ ID NO: 226863 - DNA, 498 bp, Glycine max
aagagaaaatggcttgcttcttctcggtgggctgctgcagcgcaatttgctctcgctgttagtctcacctcatcccataatgacctacaacgtttggaagtggaagatgagaacagtattctgaagaagacaaaggatgctctgataactttgcagggggttttggaaaggaagtatgataaagaaatcgaggaatctttgaaccagcgccaagtatccccagagggatggtggtcatcgctttataaaatgattgaaggtcttgctatgatgagcagattggtcaagaacaggctccatcaatcagacttcggttttgaggacagatcaattaactttgatcaagttgatatgtagggaaaactgcactacttcagataactgccctgcctacacatgattgataacttcataagtttatagacccaaggttttgctaactatattttggcacatagctctacggctgcgctagcgccatgatattctaggagatgc

SEQ ID NO: 226864 - DNA, 507 bp, Glycine max
atctgcctgcgggtactggcttctcttatcccaaaacagaacgtgctgttcagcaaagtagctctaagcttgttcgccatgctcatcaatttattaggaagtggctaattgatcatccggaatttctctcaaatgaagtctacattgctggtgactcatactgcggcattcctgtcccagttattgttcaagaaatttcaaatggaaacgaaggtggtatgcaaccatggatatacatccagggatacctgctgggaaatcccataacaacatcaactgaaaaaaactatgaaataccatttaatcatggcatggcattaatttcagatgaactctacgagtcactgcaaaagaattgtagaggagagtatcgcaacatagacccaagaaacgcgttatgtctaagagacatgcaatcgtacgaggagtctatttcaggaattgaaactggccatgttttggcacccctttgcgacgagtccgatctgcgtaatgatatggaagtca

SEQ ID NO: 226865 - DNA, 499 bp, Glycine max
atctgtctgcggctactggcttctcttatcccaaaacagaacgtgctgttcagcaaagtagctctaagcttgatcgccatgctcatcaatttattaggaagtggctaattgatcatccggaatttctctcaaatgaagtctacattgctggtgactcatactgcggcattcctgtcccagatattgttcaagaaattacacatggaaacgaaggtggtatgcatccatggatatacatccagggatacctgctgggaaatcccataacaacatcaactgagaaaaactatgacataccatttaatcatggcatggcattaatttcagatgaactctacgagtcactgctagagaattgtagaggagagtatcgcaacatagactcaagaaacgcgttatgtctaagagacatgcaatcgtacgaggagtctatttcatgaattgaaactggccatgtattggcactcctatgcgactagagcgatctgcgtaatgatat

SEQ ID NO: 226866 - DNA, 348 bp, Glycine max
gttctgccgttatctcttctaccttgggaaaattcgcacaattcagctggagtacaccaatgcacaagacttgctcttgcaggctgctcgtaaagctcccagtgcagcacagggttttcagattcaatgtaacaagtgggctgtgatagtgcgtttgttattgggagaaatacctgagaggataatctttatgcagagaggaatggagaaatctttgaggccttactttgagcttactaatgctgaccggattggtgacttggagctatttaagaatgctacagagaagtttggtacgactttcagtcgagaccgaactcataatttgaatgttcggctacgtcataa

SEQ ID NO: 226867 - DNA, 458 bp, Glycine max
  unsure (1)..(458): unsure at all n locations
tctttcttctcataactctgccgccgcaacagccccaaatccaatggcttcagagaagaaactttcgaacccaatgagggagataaaggtgcagaagctcgtcctcaatatctccgttggcgagagtggagatcgtcttaccagagccgctaaggtgttggaacagcttagtggccaagcccctgtgttttccaaagcaaggtacacggttcgttcctttgggattagaagaaatgagaagattgcatgctatgtcactgtcagaggtgacaaggcaatgcaacttttggagagtggtttgaaggtgaaggaatatgaacttctcagaaggaacttcagtgatactggttgctttggctttggcattcaggagcatatcgattngggaatcaagtatgatccttcaactggtatttatggaatggacttctttgttgttctggagcgtactggctatc

SEQ ID NO: 226868 - DNA, 545 bp, Glycine max
  unsure (1)..(545): unsure at all n locations
aaaaacatcagtccattgtccaaactaggggaaacttttcagagtgcagatctgcagcacttacgctgctacagaaagggaaagaatcatgttcctatcagcattgtgacataggatcaactttcataccaaagcttcaggggaaatttttggccacggaaaatttcttttacacatcaaagtttttcggattgaggtcaagggcctatctgtccaagttgatgagtgttgggcaagaattctgtggagaggattggttaaggttgaagaaaaaatatgtctcccatgatgaggacgatttacttcgttattgtttctcttcagcatacattgttgctttgcttcacgacagtctgggaattgctttggatgatgagagggtcaaggttgctaatcaggtgngaagtattccgcttgattgggctttgggagcttttattctgcaaacagcagctgatgcagatataccgaaccataactggattggcaccattttcagcgatgaatcacataccctnctctcaatnattggaaaattttatata

SEQ ID NO: 226869 - DNA, 507 bp, Glycine max
cttattcaggaattcggagagtattgatatctcaaggcaggatataccagcagccgaggaagatatggaggcttctatgattatcattggtagcaacattatgctgcttttcagatcatcatttgccaataactgctagtccttcctatatgagcccaacttcagcaccgggctcggcaccagacttcgtgaacctcactgagttactcattgtagctggtccgtttcacaccttccttggataccttgagttcactatagtgattgtcactatccaaaaccaagtcaacaacactggagagggaattaccatctgtggttctacggacagtgccttcaatgctataaagaaaactaccctattcaacctgacctcttacgcagctaaggcaagtgatcctcttacatgccttgccacatttctattctctggctgagttcacaagccttagtgcaaccagctctactaccacattcaccggaggagattacactttgtatttcact

SEQ ID NO: 226870 - DNA, 571 bp, Glycine max
  unsure (1)..(571): unsure at all n locations
caaccgtcatgtgctgcatcgtgatataaaggggtcgaaccttcttattgacaatgatggaattctcaagattggtgattttggattagcttccttctttgatcctaatcacaagcaccctatgaccagtagagtggttactttatggtatcgacctccagaacttcttcttggggccactgaatatagtgtaggagtggatctctggagtgctggctgcattcttgctgaattgttggctggaaagcctattatgcctggtcgaacagaggtggagcagctacacaagatattcaaactatgtggttctccttctgatgaatattggaaaaagtcaaagttgcctcatgctaccatttttaagccccaacaatcatacaagcgatgcattgcagagacatataaagattttcctccatcatctctgccacttatggatacccttctcgcaatcaatccagatgaacgtttgactgccactgctgcattgcatagtgaattcttcacaacanaaccatatgcttgtgagccctctagccttccaaatatcctcccagcanggagatgatgc

SEQ ID NO: 226871 - DNA, 524 bp, Glycine max
gtgcattcttctctcgctctctgccttccatcacactcggcatttcctttcccaagatagtagaagatggcagacactgaggatattcaacctcttgtttgtgacaatggaacaggaatggttaaggctggatttgctggagatgatgccccacgtgctgtgtttcccagcattgtaggtcgtcctcgtcacactggtgtgatggttggcatgggccaaaaagatgcatatgttggtgatgaggcacaatctaagaggggtattttgactctcaagtaccccattgaacatggaattgtgagcaattgggatgatatggaaaagatttggcatcataccttctataatgagcttcgtgttgccccagaagagcatccagttctcttaactgaggcccctcttaaccccaaggctaatcgtgagaagatgacccaaatcatgtttgagaccttcaacacccctgctatgtacgtagccatccaagctgttctttcactgtatgcaagtggtcgtacaactggtat

SEQ ID NO: 226872 - DNA, 489 bp, Glycine max
gtttgccatggctgacgccagtcctagaactgatatttctacagatgttgacactgatgataagaatccacggtttgatagaagtcagtcccttgttgctgtggtttctgactccagtgacagatcaaaggataaatcagatcagaagactctccgaaggcttgctcagaatcgtgaggcagcaagaaaaagtcggttgagaaagaaagcttatgttcaacagcttgaaagtagtcgcttaaagttaacccaactggagcaagagcttcagcgagctaggcagcagggaatcattatatcaaactcaggtgatcaagcacattcaatgagtggaaatggggctatggcatttgatgtagagtatgcaagatggctggaagagcagaatcgacaagttaatgagctaagagcagctgtaaattcccatgcaggtgatacagaacttcgcatgattatcgatggtataatggcacattatgatgagatatt

SEQ ID NO: 226873 - DNA, 497 bp, Glycine max
ctcgagccgaatcggctcgagggctttaattccattggattctatcagatgacaaaacttgctatcataccattcactgtattattagaaactattttcctaaagaagcagttcagctcgaaaataaaattcgctttattcctattacttgtgggagttggcattgcttctatcacagaccttcagctcaattttgtgggaaccattctttcccttctagcaatcataacgacatgtgttggccaaattctgaccaacacaatacagaagaagcttaacgtctcttccacacagctactctaccagtctgctccattccaagcagcaattctttttgtttcaggccctgttgtggatcagatgctcaccaagcaaaatgtcttcgcctacaaatattctcctgtggtcttggcattcatcatcttgtcttgcttgatagctgtttctgtgaacttcagcacatttctggtcataggcaaaacatctcctgtaacata

SEQ ID NO: 226874 - DNA, 571 bp, Glycine max
  unsure (1)..(571): unsure at all n locations
atctcttcacaaatcatgacaactagcatgaccttacgtgaagatcattgcctgggagtgaaggtataggagttcgaggctaatgtatgttgaccatcaccagagacaacaacctgcatcacatcttggaatgatccaacacaccgcttggaggccccaaagaggcttgcctgaacgtgctgtctctgtccttcgtgcttggctttttgaacatttcttgcacccctatcctaaggactccgataaggttatgcttgcaaaacaaactgggcttactcggagccaggtatctaactggtttataaatgcccgagttcggctatggaagccaatggtagaagaaatgtacttggaagaagtaaaacaagagccaaacaatagctcccaggataacaacaacacannaggatcaaatgaatcaagcaaggagttatggtcagaagctaatgctgctgcacaagaatcangtgcaatgagattngatcagattaacattcctcaatcaaaggcagaangcttcaagaaacaccaaccacttncccacagagatctccaatccaactcactcatc

SEQ ID NO: 226875 - DNA, 554 bp, Glycine max
  unsure (1)..(554): unsure at all n locations
atctcttcacaaatcaagacaactagcatgaccttaggtgaagataattgcctgggagttaaggtagagggttcgaggctaatgtatgttgatcatcaacagagacaacaacgtgcattacagcttggaatgatccaacacaacgcttggaggccccaaagaggcttgcctgaacgtgctgtctctgtccttcgtgcttggctttttgaacatttcttgcacccctatcctaaggactccgataaggttatgcttgcaaaacaaactgggcttactcggagccaggtatctaactggtttataaatgcccgagttcggctatggaagccaatggtagaagaaatgtacttggaagaggtaaaacaagagccaaacaatagctcccaggataacaacaacacanaaggatcaaatgaatcaagcaaggagttatggtcagaagctaatgctgctgcacaagaatcangtgcaatgagattngatcagaataacattctccaatcaaaggcagaaagcttcaagaacaaccaaaccacttccccaacagagaatct

SEQ ID NO: 226876 - DNA, 570 bp, Glycine max
  unsure (1)..(570): unsure at all n locations
ggaagagagaaaccctagggtttggaagaagctgatcggagaagatggtgcagcgtctcacctaccgcaagcgccacagctatgccaccaaatccaaccagcacagagtcgtcaagactcccggtggcaagcttgtttatcagaccacgaagaagagggccagcggacccaagtgccctgtcactggaaagaggattcaagggattccacatttaaggccaacagaatataagagatcaaggttacccaaaaaccgaaggactgtgaaccgtgcatatggtggtgtgttgtctggcagtgctgttagagagagaatcattcgagctttcttggttgaagagcaaaagattgtgaaaaaggtattgaagatccaaaagacaaaggaaaagcaagctttgaagggctgagttttgagaaaagtgataaagatctttttggagggattttaggtttgggtgattaatgattatagtaatgcatgacatttgttagagctgtntctggtgtaattttgtgcttatttggctttttaaaactcattctagtgcaactgttaactttgttgacaac

SEQ ID NO: 226877 - DNA, 472 bp, Glycine max
tttattttttttttttttttttttttttttttttttttttttttttttttttatttttttgaattttattttttttttagtttttttaccaattgaacatttttagtccaaaaagaggaaaaaaataagaaacaccagagaacgcataaacccccacgaaattgtgaaaaaaaaggaaccccgaaaaaaaaaggagatttactaaaaaaaaaaaaaaaaacaaaaaggaaaagcataaagaaaaaaaaaaaagcgaggggataatgaagacggcaagaaaaaaaaaagcagccaaaccaccagaaattagtcataaaaaacaggcgaccccccagataaaaagagaccaaccaagaaaaaaaggcccgaaaatgacagccaagaatatggccagaaaaaacaaagtcctaagaaaaaaaaagccaaaaggaaaaaatcaatcgaccgggaccggataaagaatacccgaaaa

SEQ ID NO: 226878 - DNA, 557 bp, Glycine max
gtcgagacagaaagcattggatcaagcaaatgaagcaaaggtagaagggaataagctttttgtagaagggaagtatgaagaggcattattacagtatgaacttgctttacaagtagcatctgacatgccttcatctgtggaaatacggtcaatatgccattcaaaccgtggtgtgtgctttctgaaactggaaaaatatgacaacacaattaaagaatgcacaaaagcattagaactgaatcctgtgtacgttaaagctttggtaagaagaggagaagctcatgaaaagcttgagcattttgacaaggctattgatgatatgaaaaagatcttagaaattgatccctcaaatgatcaagctaggaaaaccattcggcggctagagacccttgctgcagaaaaaagggaaaagatgattgcacaagtgaaagacatgggcaattctttcctgcgctaccttgggcttgaggaaaacaactttaaagcagtcaaagatccaaacactgggttcctattctatctcattccaaccgttgattatgtaggagcaagtcata

SEQ ID NO: 226879 - DNA, 482 bp, Glycine max
tctctctctccttcatccttatatttccaacggaaccttctagaaccaccataacatcattctgcccttccctcgcgtttcaacaccgataacccgcaaaaatctccattgatctgcgcctcctgttccatggcaaagctgcctgtggaatacaacggcgactgcgccaccaccgcctcagcatccgcctccgcagccgcggagtctcagagatccattcccacgccgtttctcaccaaaacctttcaactcgtcgacgaccaatccatcgacgatgttatttcctggaacgacgacggatcaacgtttatcgtctggaaccctaccgtcttcgccagagacttgcttcctaaatatttcaaacacaacaatttctctagcttcgttcgccagctcaacacttacggattcagaaaagttgtacctgatcggtgggagttctcgaacgagtattttcgccgaggcgagaagcggcttctgtg

SEQ ID NO: 226880 - DNA, 392 bp, Glycine max
ccgatccgaaaccgaatggggattctgtacgcgctggttggtcgtggatcggtggtgctggcggagttcagcggcaccaccaccaacgccagcgcaatcgcgcgtcagatccttgaaaaaatccccggcaacaacgacacgcacgtttcttactctcaggatcgctacatcttccatgttaaacgcaccgatggactcaccgttctctgcatggccgacgacaccgccggaaggcgaattccttttgcgtttcttgaggatattcatcagaagttcgtgcggacttacggacgcgccgttcactccgctcagccttacgggatgaacgaggagttctctagggttttgagtcagcaaatggagtattactccaagtgatcctaacgccgata

SEQ ID NO: 226881 - DNA, 346 bp, Glycine max
gactcaagacactcattctaggttactatggaatgacttttgatagtttggaggcgatcacaatgcttctgatcgacaacattacgccatgtatgccactaaggggaacaatcacagcgattgggtgatcttgaacctttgacctgcattggtggtttgctaactggtacaccaaactacactgctgttggaccctatgatgagatgtctgactgccaaacaagccatggaataggccaacatccttgctgagttctttcaatggcaacctaaggaaggccttgtccttgtgcatggctctgctggtggttctggcttgggctatattgctctatatgaagccaac

SEQ ID NO: 226882 - DNA, 489 bp, Glycine max
  unsure (1)..(489): unsure at all n locations
ggtttgaggagttgaacaatgacttgttccggaagaccatgggtccagtgaagaaggctatggaagatgctggattacagaagagtcagattgatgagattgttcttgttggtggaagcacaaggattccaaaggtacaacagcttttgaaggactactttgatggaaaggagccaaacaagggggtcaaccctgatgaagcagttgcctatggtgctgcagtgcaaggaagcattttgagtggagagggtggtgaagaaaccaaagatatccttctcctggatgtggctcccctcactctcggaattgaaactgttggtggagtcatgacaaagttgattcccagaaacactgttatcccgaccaagaaatctcaagtgttcaccacctaccaggaccagcagactaccgtctccattcaggttttcgaaggtgagaggagtctcacaaaggatngtcgccttcttgggaaatttgatctgtctggaa

SEQ ID NO: 226883 - DNA, 466 bp, Glycine max
  unsure (1)..(466): unsure at all n locations
aacgtatcgaggttgggcggaagtggcctttcgctcaacgctttcgccaacgcaaaattcaagaacaatcactataacccagccatcataaagaagcaaagggagttctataaaaatgctaagaatgtgaataagtttaagaagttggtaaagcagcaaaaccagcagaatgaaccctctttggctcagagacatatagagaatgtaaatgaaactgaagagaacaaggacgatagtgagaggaggaagaggaagaatagtgcccttagtttggaagagttgtacaagaagcagcatgaagagaaggagaaagaaataatggagagagaggctgttctgagggtaaagaaggaagagagagaacacgctgaagctctgagaaaggctatgcgagaaataatgcttaagaagacacgaagagggcagcctgttatgaaatacagaantgagcatctcttggagacta

SEQ ID NO: 226884 - DNA, 456 bp, Glycine max
agctgttgctgatgctactgatgcagctcgcagtgcatctgatattgttctaacagaacctggacttagtgttattattagtgctgttttgacaagccgagcaatcttccagagaatgaaaaattatacaatttatgcagtatcaattacaatacgtattgtgcttggtttcatgttgctggctctcatttggaagtttgactttccaccctttatggtgcttattatcgctatcctaaatgatggtactattatgacaatttcaaaagatcgtgtaaaaccatctcctctgccagatagctggaagctagcagagatatttactactggagttgtgctaggaagttacctggcaatgatgacagttatattcttttgggcggcatacaaaactatactttttccgcgagtgtttggagtcccaactctttgaaaaactgctcatgatgattaccg

SEQ ID NO: 226885 - DNA, 477 bp, Glycine max
cacccttacactcatctttctaactctaagcatcatggccaacattcttgtctgtccttcttttcttctcaggtgcaggaagagatgttatgttgttgtagcggaaagtttaaggaagcaaatagaaggcacaacgatgaagtcaaagtcagcatccgataatgtcattaatattaaagaggaaaagttttggatgagagatcctaagagtggaaattggattcctgagaatcactttggacaggttgatgctgctgaactgagggagaagtttctgccaaccagacacacaaattcttccaatcaacttaagtaggatctttgtgaaacaaatttgatcgaaagtttgaaaggaacacaataatatatatatggaaaacctatgcttaaataaagatatatttatgacattaacatgtgtgttttctttacttgttcttcagttatataataaatatacgttcagtacgtttgttc

SEQ ID NO: 226886 - DNA, 477 bp, Glycine max
cacccttacactcatctttctaactctaagcatcatggccaacattcttgtctgtccttcttttcttctcaggtgcaggaagagatgttatgttgttgtagcggaaagtttaaggaagcaaatagaaggcacaacgatgaagtcaaagtcagcatccgataatgtcattaatattaaagaggaaaagttttggatgagagatcctaagagtggaaattggattcctgagaatcactttggacaggttgatgctgctgaactgagggagaagtttctgccaaccagacacacaaattcttccaatcaacttaagtaggatctttgtgaaacaaatttgatcgaaagtttgaaaggaacacaataatatatatatggaaaacctatgcttaaataaagatatatttatgacattaacatgtgtgttttctatacttgttcttcagttatataataaatatacgttcagtacgtttgttc

SEQ ID NO: 226887 - DNA, 516 bp, Glycine max
atctgtttataagtcgctccaccaacaaatcacatctggagaaaaatggtaccctctgaattttgtcatcgggtgttcattcttgattttccttttaattgcccgatttgttggcagaagaaacaaaaaacttttctggttgcctgctattgctcctcttctatcagttatattatcaactttaattgtgtatttatcaaaagctgataagaatggggttaacataataaagcatgtcaaaggaggcttgaatccaagttcagttcaacagttacaattccatggtccacaagttggtcaagcagcaaaaattggattgatctctgccgttattgctcttactgaagcaatagcagttggtcgatcttttgcttctattaaaggataccatcttgatggcaacaaggaaatgctagcaatgggatgtatgaacattgctggatcgctctcttcatgctatgtggcaactggttctttctcaggactgcagtaaaattcagtgctggatgtcaaaca

SEQ ID NO: 226888 - DNA, 539 bp, Glycine max
gaagtgaaacaaggctcattcatacagctgaagaagtttcgtcgtaaaactaagcaaaaaagtaaagtacaagtaatttcacaaagtatcttatcatcgccaccaaaaaagccagcgcaggggacttcttaattcccagctatcataaaaattttaacagactccgactaatctagagctcatcgtgagaatcgtcctcgtcttcttcgcctgatgcaccaccaccgcctggggctcctccagatctctgatacacagcactaatgattgggttgcaaacggcttcaacctccttcagcttctcttcataatcttctttctccatactctggttgtcatccagccattccagtgcttctttcacagcagtctcaattttctccttttcatcagactccaacttgtcagcgagcttgtccttgtcactgatctggttcttcatgttgtatacataggtttcaagactgttgcgagcatcgatcctctccttcaccttcttgtcttcctctgcaaactcctctgcttcgcgaaccattctc

SEQ ID NO: 226889 - DNA, 476 bp, Glycine max
atctgtttataagtcgctccaccaacaaatcacatctggagaaaaatggtaccctctgaattttgtcatcgggtgttcattcttgattttccttttaattgcccgatttgttggcagaagaaacaaaaaacttttctggttgcctgctattgctcctcttctatcagttatattatcaactttaattgtgtatttatcaaaagctgataagaatggggttaacataataaagcatgtcaaaggaggcttgaatccaagttcagttcaacagttacaattccatggtccacaagttggtcaagcagcaaaaattggattgatctctgccgttattgctcttactgaagcaatagcagttggtcgatcttttgcttctattaaaggataccatcttgatggcaacaaggaaatgctagcaatgggatgtatgaacattgctggatcgctctcttcatgctatgtggcaactggttctt

SEQ ID NO: 226890 - DNA, 371 bp, Glycine max
tgatatcacaaacaaatcctgttgatgttcagaagggtgagtgagcaattcactgcaatgtacaggcgcaaggccttcttgcactggtacaccggggaaggaatggacgaaatggagttcactgaggcagagagcaacatgaacgatttggtggcagagtaccagcaatatcaggatgctactgctgatgaggatgagtacgatgatgaggttgaggagggggagcatgctttcgaggacccgtaaattgttcatcactaccttgttttaattactaaatttgctgctagtagtcacgtatccaaggttttaaaacctgttgatatcacaaacaaatcctgttgatatggtcccaattgcgatcacaaact

SEQ ID NO: 226891 - DNA, 381 bp, Glycine max
tgatatcacaaacaaatcctgttgatgttcagaagggtgagtgagcaattcactgcaatgtacaggcgcaaggccttcttgcactggtacaccggggaaggaatggacgaaatggagttcactgaggcagagagcaacatgaacgatttggtggcagagtaccagcaatatcaggatgctactgctgatgaggatgagtacgatgatgaggttgaggagggggagcatgctttcgaggacccgtaaattgttcatcactaccttgttttaattactaaatttgctgctagtagtcacgtatccaggttttaaaacctgttgatatcacaaacaaatcctgttgatatggtcccaattgcgatcacaactgcgaaagttttt

SEQ ID NO: 226892 - DNA, 249 bp, Glycine max
ccttagtggacaagttcatgaactggctatccaaaactacgagaacgaggctaaaggctaaagtcgagacagctggactatggattatataatggacactagtgatgaggagagggtgcacggagagaccgttggtgcagcaagagcacattgagtgactgaatcgacagggttcactatttgggatgcacctggacacaaaagctgtgtatctaagcatgattagtggggcatcttaagctgatattg

SEQ ID NO: 226893 - DNA, 361 bp, Glycine max
ccttagtggtcaagttgatgagcggactatccaaaaatacgagaacgaggctaaggacaaaagtcgagaaagctggtctatggattatataatggacactaatgatgaggagagggtaaagggaaagacagttggagctgcaagagcacattgtgtgactgaaacaacagggtttactatttgggatgcacctggtcacaaaagctatgtatctaacatgattagtggtgcatctcaagctgatattggagtgttggttatttctgctcggaacggagagtttggaactggatactacagaggtggacaaactcgtgaacatgttcatcttgcaaaaacgctgcgtgtgtataagcttctt

SEQ ID NO: 226894 - DNA, 482 bp, Glycine max
gtcgagctgagaataccagttgctccagtagccggcactaaacaacatggcggacaaggcagtcaccatccgaaccaggaagtttatgacaaacaggcttctctccagaaagcagttcgtcgttgatgtccttcatccagggagggctaatgtttccaaggctgaactgaaggagaagctgggaagaatgtatgacgtgaaagacaccaacactgtatttgtcttcaagttccgaactcattttggtggtggcaagtccactgggtttggtttgatctatgattcagttgagaatgctaagaagtatgagcctaaatacaggcttatcaggaatggacttgataccaaagtagagaaatcaaggaagcaaatgaaggagagaaagaatagagctaagaagattcgtggagttaagaagaccaaggcatctgatgctgcaaggcgggaaaaagaaatgagttttcaacatcctggtctgattt

SEQ ID NO: 226895 - DNA, 404 bp, Glycine max
gtcgagctgagaataccagttgctccagtagccggcactaaacaacatggcggacaaggcagtcaccatccgaaccaggaagtttatgacaaacaggcttctctccagaaagcagttcgtcgttgatgtccttcatccagggagggctaatgtttccaaggctgaactgaaggagaagctgggaagaatgtatgacgtgaaagacaccaacactgtatttgtcttcaagttccgaactcattttggtggtggcaagtccactgggtttggtttgatctatgattcagttgagaatgctaagaagtatgagcctaaatacaggcttatcaggaatggacttgataccaaagtagagaaatcaaggaagcaaatgaaggagagaaagaatagagctaagaagattc

SEQ ID NO: 226896 - DNA, 466 bp, Glycine max
aagacaaccaatgtatattattttttttgagaaaaaaattcaatggacagttcacaagcaaacctacgacaaataatgtggctagtgatgagaaaatcaccggggactgttctgcaaatcacaaaactcctgtttcctatgagtaaatgtctgctggggattgctccaagctcatacccttgggttctggcaccgaaacatttataactaatatagccagtgcattaattgcagcataaaggatgaaggtaccatacgagcttcagctcatgaggaagttgaaagtataggaacataaccatgcaccaaaccaggtagttaatgtggccacactttctgctagccctttgacattgacaggagatatgttagacatcacaacccatggaattgctcccattcctattgtaaatgaacctatgtagaccagtatgcctgccacagcaagcgctgggactgtcttaac

SEQ ID NO: 226897 - DNA, 536 bp, Glycine max
tttgaatacttcttatgcaactatagtgaggctaagagattggtccataattaatcaaaatgttggctatattccacaaagcttttgctcatccacctgaagagctcaacagccctgcatcttacaaaggttccaagaagcctaaggttcccgaggaaactctcaaagatttcctttcccaccatcctcacaacacttgctctatgagctttggtgatgctgctgttctagcttatgtccgtcctgatcaatctttctctcgtcatcaaaggctgttttgtgggatcgatgacatatattgtctcttcttggggagcttgaacaacttgtccctactcaacaagcaatatggattgtcaaagagtactgatgaggccatgtttgttattgaagcttacaagacactccgtgaccggggtccataccctgcagatcaagttgtcaaggagcttgatggcagttttgcctttgttgtctatgacagcaaggttggcagtgtctttgcagcactgggttctgatggaggagtgaagctg

SEQ ID NO: 226898 - DNA, 569 bp, Glycine max
acattatccttatgctttatttttaagctaatgttggtcccattccatccaattggattgacttcccactcgaggaatgctgttgactctggcgaacttatcaactttgaagttggccccacacatggccccttcactgtccactcttggcattgccttcaacttgttcattggatgctcaaagctcatcagacctccttcactgtgaaacatacaccctgttggaaagggagcaaaggatttggcacaaccctcttttatgacttctagatcatcagagatcaccacagatccatcagctgcaataccccaatacagcttcactcctccatcagaacccagtgctgcaaagacactgccaaccttgctgtcatagacaacaaaggcaaaactgccatcaagctccttgacaacttgatctgcagggtatggaccccggtcacggagtgtcttgtaagcttcaataacaaacatggcctcatcagtactctttgacaatccatattgcttggtgagtagggacaagttgttcaagctccccaagaagagacaatatatgtcatcgatcc

SEQ ID NO: 226899 - DNA, 479 bp, Glycine max
attgatcttacaatgggaagtggacaagggcatcacaagcgtaagagccctggaattccttcagtctatgaggcaggcagtactagtagatactttaatgctgggagttcaactgatcttcctatatcttcagaattgtggcaggagaagccaaatattgattgtcaatatattccctgggatcattattgtactatgacacccacattgagaggtactggcctttcaataaagggtgagggttctttgcggaatgtgaggagccgatctacacttgatttggattccaatctggctaggacccattcatcaaataatcattcacacaattcctaccctactgtcccaccagatgaccattctagcacggtggatctttctggtcagacttctgttacattgacaagggattggagccaaatgaacatatctccacttatgggaggggtgttattatcagatacaggtgcttttggtct

SEQ ID NO: 226900 - DNA, 586 bp, Glycine max
  unsure (1)..(586): unsure at all n locations
aaggctcngcgttttgagatcttttgccggaaacaaattcattgacataaagcagtattcctgttacaacatttccaaaagcaatatgtttcctcaattttgagggatgttcaaatataaacacaaaatgagattaattttatactagagtagttatttatccttcgtatcctcaggcaaagcagatactttgcagataggacataatttcctcaaagataaccattttttaatgcagctcacatggtagtcatgcccacatgttttaagtgttccaacatcgtccatgttcttgtactcttccagacatattacgcagtttccttcgtcttgactttgctcagatgaacaatatattgtttccgtcaaacatttgttaagcgaatcctcagagattcctgtgttcacatagccaatcctctcaccaagtgcaagtagttcctcataactcatgttatctacgtccatcctcatgtctcgatgctgatctagcatgttcctggaaccatacactgatgcacgctcaacaaccatgaaaccctcagaggaaaaacgatcatgcagaccactctcagccaatgatcga

SEQ ID NO: 226901 - DNA, 523 bp, Glycine max
gcttctgtagttaatttgcttcccttttttcacactcactctcactaaatggcttcctctgttgctttagttttgggtctatgtctagcactcaacatggttctgccgacacgtgcagctacccacacagtgggagacacctcaggttgggcactcggtgctgattacagtacatgggccagtggcttgaaattgaaagtcggagatagtcttgttttcaattatggggctggtcacacagtggacgaagtgaaagaaagtgattacaagagctgcaccacaggcaattcactaagcacagacagcagtggcaccaccacaatcaccctcaagactgccggcactcactacttcatatgtgcttctcctggccattgtgatggtggtatgaagcttgctgttaaagtaaaggctaaaaaagcatctgctcctgctacagcaccttcaccagctgcaaaggactcacctctgattctgatgacaccaaagacacacccacttccacctcactaaccctaaaact

SEQ ID NO: 226902 - DNA, 529 bp, Glycine max
caaagaggctaaccttcgacgaaatccagagcaagacctacttggaagtgaaggggacaggaacagcaaaccagtgcccaacaattgatggtggattggactcatttgccttcaagccggggaaatacaatgccaagaagttgtgccttgagccaacttcattcacagtgaaggccgagggtgtggccaagaatgctccccttgagttccaaaacacaaagctcatgacacgtttgacctacactctggatgagattgagggaccctttgaggtgtcttctgatggcactgtcaagtttgaggagaaggatggcattgactacgccgccgtgacagttcagctaccgggaggcgaacgtgtgccctttctcttcaccatcaagcagttggtggcatcagggaagccagatagctttagtggggagtttctagtcccatcctaccgtggaagctctgtcttggaccccaagggaagaggtgcttccacaggttatgacaatgcagttgctttgcctgctggtggaagagg

SEQ ID NO: 226903 - DNA, 519 bp, Glycine max
gagctcgtaatactcacacacaccatcaatttaaaccttgaattttaaacattgtaattggaggtcgatataatatacaaccatgacagtactctcagtagtgctaggaaagttgggtcaagggataatgcagcaacaccatgcatgaagttactaacaaaatctgagccaacaaacaaaacagaaaacaaaacactctatgactcaagctgagcataccagatgccctggatcttgacatcctttggagcctttgctcccaaatcagtgtcagatggttgaacactctcgaacacaccgataacctcacccgtctcaggcttggtcttggtgacactcaaggtgattttgcccttggatgatgaggcacttttattgttttccttggcaagttcttcctcatctcctcttccaccagcaggcaaagcaactgcattgtcataacctgtggaagcacctcttcccttggggtccaagaaagagcttccacggtaggatgggactagaaactccccacta

SEQ ID NO: 226904 - DNA, 593 bp, Glycine max
caaccatccattctttcacacacagatctgagttaggttaggtttattttgaaaacaaaaaaaaatccccaatgtcgcagcaattagggttcgcgatcgagctatacctagaccctgcgttggagaatcaggttctgaaagcatggaacgttcttgcgagaagacaaatcagcacgcacctgatagaaatggagtctcggccacacataaccctattctcggcgccatttctagaaccttcgaagctcgaatctctcctgaaaggcttcgcatcgaagcacgatcctctccctctcaccttctcttccctcgccactttccccaacgaccccgacaacctcctcttcctcgccccaaccccttccctctcactcctccaccttcagtcacagctctgtgacgctatcagaaaagaaggcctcgaaatcggtgacgattacgctttcaattcctggatcccttattgctccgttgcacaccatgtccccaaaaacagaatgcctgaggctttctccctcttgagggaactcaagcttccggtttccggttacgccatggatatcgctctcgttcagttctcttcggttcgggaa

SEQ ID NO: 226905 - DNA, 512 bp, Glycine max
agaaaagcgtgaatcatgtcggacgaagagcatcacttcgattctcaggcggatgcgggagcgtccaagacgtatcctcagcaggctggtaccattcgcaagaatggctacatcgtcatcaaatccaggccttgcaaggttgtagaggtctctacgtcaaagacaggcaagcatggacatgcaaagtgtcactttgttgcaattgatatttttaatgggaaaaagcttgaagatattgttccatcatcccacaactgtgatgttccacatgtgaatcgcactgactatcagcttattgatatctctgaagacggctatgtgagtctgctgactgataatggaaataccaaggatgatctgaagcttcctactgatgaggcattgcttgctcagattaaagatggattttctgaaggaaaagatcttgcggtatctgatatgtctgcaatgggagaagaacagatctgttcactggaggacatcggtcccaaaaataatatgatgctatggct

SEQ ID NO: 226906 - DNA, 535 bp, Glycine max
cacctcatattatagttaaagccgtaaaattttaccatgggatcccaaattaagatggctaaattcatcatatcaaatctttgggcaatatccggttaaccacgtgtttcagaaattcagtacagtattattcagtgcagagaacaaatagggttatatattaaactcaacaaaaacaaataatatgagatgtttatgagaatttcatccacccaagaccgttgtgttccttaattaatggacaaaagctaaacttagctcaatttcttctatcccaagcatttgagtttcaagcacaggcaaatttccatcttatgaagtttattttgcacacatgtatcggagaatatactacctgttagcaacataagaagaaaaagcgtgctatcagctatagctacagccatagcatcatattaatttttgggaccgatgtccttcagtgaacagatctgttcttctcccattgcagacataacagaaaccacaagatcttttccttcagaaaatccatcttttaatctgagcaagcaat

SEQ ID NO: 226907 - DNA, 587 bp, Glycine max
ataaatcttaattcatttcaaactaatcaactttcattcttccaagcacagaatactcaatggatcacaaacgtcaaggaactagtggcattatgaagcacaattaatcaactgtataatatgcaaagaaacaagatgtcaactatatttcaaaacgaaaactctaaccattttcaaaacgaaaaatcacattctaaggctccactgtagtcacctgttgccattccccatctactgcttccttccacaatgtcacattgttgttcccatcagccacagccagtatgtttcctgtcaatgaccatgagaccctccaaacaggggtcttgaaatcattcaaaaccttgccttcccactgatctccctctttcgccacggtccatatgatcactttaccatcctgcgatgcactagcaatggtagatttaggaagccctaaattgggtgcccaagcaacatctcggacccaatccgtgtgcatctgaagagcagggaagcagtccatcttccagagtccattggttaacttccataccttcacagttttatcacaaccaccagagcacagcttctgtcaggatcaagca

SEQ ID NO: 226908 - DNA, 568 bp, Glycine max
gggagataaatataattcatgattcagagaaaatagtcaaaatacagtgaatcatacttgtacaaacgaaaacacaatttaatatttgcctctcatcaataaacaactgaaacagataaatagcttgactcaatcaaaagtacttactgcccaaattatatatataataaagaagtacaataaggcagaggcataggcacaacacccccttgaagctaacactaacaaacaccattcatcttgtcattggtcttcttcctctccaacacaaacttcttccaaatggcagtgatttccctctgagtctccataggattcttcttagcaaccactaccttgccattttcttctgcactgagtgtcacagtggtgctgctgatgacccttgcaggaagtgaatcaagctcatgcagcaccttctccacatgggacacgagacgctccgcgagggtccttgagaagtcctccctgatgacaacacgaagcactgtgacatgttgagcatctgggggcatggtgtatgctggcactatccacccaaagcgccttaaaaagtctgagatttgga

SEQ ID NO: 226909 - DNA, 476 bp, Glycine max
ccatgcctgtgtatctctatcatatcttccatttctagtgtgcctttgaatattaattatatatgaatatttatcatgttcagcagctactgttggtgctggtggttttgtcttgcatgaacaccatgagaaaaaggaagttaagaaagaagatgaggaagctcatggaaagaagcaccaccatctgtttggctgaacatgataaatattcatatataattaatattcaagctccaaagtatcaccatgcctgtgtatctctatcatatcttccatttctagtgtgcctttgaagcttgaatattaattatatatgaatatttatcatgttcagcagctactgttggtgctggtggttttgtcttgcatgaacaccatgagaaaaaggaagttaagatagaagatgaggaagctcatggaatgaagcaccaccatgtgtctggctgaacatgataaatattcatatataattaata

SEQ ID NO: 226910 - DNA, 477 bp, Glycine max
tggatttagagagttatcaaaagaagataaagttgggacctatggaaatactttagtacgtgattcttttgatgagccagactatgctctaattgatacactcttttcacttgcggaagcctacttgtttgctcaactggttgattttaaggattgcaatcctgacaagattcaggagggtgttgattatgctcgcatgtacaaagatgttcgagctgcagttgacttgtgccaccgtgatggaacattgaagcaaatggttgctatagaaccaaagcggtatattaatgaagactcctcaatagtgcccatgcttgaaatgctcagagactctggacaagcaacgtttttagtgacaaatagtttatgggactatacaaacattgtcatgaatttcctctgtggatccagtatggcagatgtcagtaacaatttcggctggcttcaatactttgatgttgttatcactggcagtgc

SEQ ID NO: 226911 - DNA, 560 bp, Glycine max
  unsure (1)..(560): unsure at all n locations
ctcatactgggggcccaaagctggctataatacatatcacatgcttctctcaatgactacatttattggtgctgcattttgttttggggccttcttattcagaagcatgtatggcttccttgctcttttctctattggtgaacttcttgtttttgccactcaggtagtttccttctattcaattaatatctctttatgtttaattgctatattgaagtactatcctttttacatgcttatcatctatgaatattttagcaactctgatattgtcaagttaaattcttgattaatgattatgtttctaagtaaaatcacttctatgtttgggaaattagatgaaaatttgctctctgagaactaagtcatcctagggttggtttgtcttttgaattttatgcttgtttcaggggacaatgctttttgttcttttttttccgtatctattagcatgcagagtatatccctgattctttatatcaatttgtcttaataattttatcatgaaacttngaagataatcatttaatggtagtatggtactagtaactagtaactac

SEQ ID NO: 226912 - DNA, 392 bp, Glycine max
gttacacacactctctttctttttttgcaccagcaacaacagagaatgaacagggctgaggaggggatgcaaggcataggcataggcataggctgtttccaaaacgacgtcgcagggcagctggagctgagtcccactatgagcaactcctcctcctcgctatccatggagctggacgagtccccggagagcataatccaacggttgatatcggagcacccggtcatcatcttcacccgatcctcctgctgcaggtgccacgttatgaagaagctcctctccaccatgggcgaacaccccaccgtcatcgaattggacgaccaggagatcgccgccctccccgacaccagagccccctcggactttataggcggaacctgcatcagcggcct

SEQ ID NO: 226913 - DNA, 516 bp, Glycine max
ttcattttctctttggaataacctgcagggttgcttccatttcaacatgtagagcgcgctctttgttgttttcatttctgacaagttctttttttttgttgcgttgcaaaatccttctcctcgaggcggcggcatggaaagcattgccgcgcagctgaagcgcggcatctcgcggcagttctcgtcggggtcgctgcggaggaacctctcgtggcagttcacgcgccaggcctcgctggatcctcgccggaacaaccagcgcttcagcttcggccgccagtcctcgctcgatccgattcgccgcagcccctgctccggcaacgccgagctcaccgtgccggagaacctggactccaccatgcagctcctcttcatggcctgccgcggcgacgtcaagggagttgaggatttgctcaacgaaggcatcgacgtcaacagcatcgacctcgacggccgcaccgccctccacgtcgccgcctgcgaaggccacgtcgaagtcgccaggctacttctcag

SEQ ID NO: 226914 - DNA, 514 bp, Glycine max
attcgcgaatagaaaaacatttttataagaaaatgtctgagatgttatatctcctttatgggacattgtacagagaggagctgttccagccctctagtagacaggaacataggacgaaccatgcaaattcattttcacgctcaaattaatccaagctcaagttaatattattcgaattccaaaattattaattgcaagggctattaacagtacaccaccatgaagctgacaaattggttttgaggatgcaaccctgaacttgatgtcttccttgccacgtagtatgtactttgttatttatttccaagggagtttaaaagtatctttccaccatccttgttttgagcaatttgcaacgattttgtccaaccgtgcaatgacctgagaaaatgttggcctcacaacaggtgttggatcccaacattcctcgatcaactctttcaactctggaggataatggtttgttctgatcttgaatgctggtcttttcccttccaagcacatcagtctaact

SEQ ID NO: 226915 - DNA, 468 bp, Glycine max
  unsure (1)..(468): unsure at all n locations
tgttgctgattttgggcttgcttatttcctgcaagattctgggacatctgaatgcatgtctgctattgctggttcatatggatacatagctccagagtatgcctacacattgaaagttgatgagaaaagcgatgtgtacagttttggtgtggttctcttacaacttataacaggcaggaaaccagttggagaatttggtgatggcgtggacatagtgcaatgggtgaggaaaatgacggattctaacaaggaaggagttcttaaagttcttgatcctagacttgcctcaggtccccttcacgaagtgatgcatgttttctatgtagccatgctgcgcgctgaagaacaggctgaagagagaccaactatgcgtgatgttgtgcaaatactgacagagcttccaaagccacctgactctatagaggngaacttaacaatcacggaatcatctttgacatcatcaaacgc

SEQ ID NO: 226916 - DNA, 552 bp, Glycine max
gaaatggcaacaagcgaagaagtggttgcggcggcgccggaggcagccgcgccggaggcagggttgaagcacaaactggagagaaaatggacgttttggtgcgacaaccaatccaaacccaagcaaggcgctgcttggggaacctctcttcgcaaggtctacaccttcgacaccgttgaagagttctggtgtttgtatgatcaggtattcaagcccagcaagttgcaaatcaatgccgattttcacttgttcaagactgggattgaccctaaatgggaagatccagagtgcgccaatggaggaaagtggtctattaccagcaacagcggcaggaaggctaaccttgataacatgtggcttgaaactatgatggctttgattggggaacaatatgaggatgctgaggacatatgtggtgtggttgctattgtgcgccagtggcaggacaaactttcgttgtggacaaagacagcagcaaatgaagcttgccagatgagcattggaaggaagtggaaagaaatcattgatgtaacgaccagataacatccactt

SEQ ID NO: 226917 - DNA, 566 bp, Glycine max
  unsure (1)..(566): unsure at all n locations
aaccctttagctacgtttcgttcngnangncttccggaaaatttcacgggaacaccagcgactaggcggcggccgcccttttttaaccctttggattaaaaactgttcatgaccaccccaaaaaagaggggagcatgagaggaattttacccaaaaggggggtgagcgaacaaaaaaaaaacgaaccccccaccaaagcagaagcaagggcatagcacaaaaggcacacgaaaaagagatcaaatattacagccttgccagcagcccatcacaagtgcaagaagatgcttctgcggtgtttatactgtgtaccgaccctttgttgctcctttgcttctagaatcatcatgaaagttgcatgttatcttgtcgttaacatcaatgatttgctttcacttccttccaatgctcatctgggcaacttcatttgctgctggctttgtccacaacgaaagtttgtcctgccactggcgcacacttgcaaccacacctacatatgtgctgagcatccttaaattgtttcccaatcaaagccatcattattttaagccacatgttttaaggtt

SEQ ID NO: 226918 - DNA, 509 bp, Glycine max
cagaagttgaaaattttggttgagtgagaggcttgtctttgttccgctaccatgtctcatgagacatgcccttctgtaaagaatgtccttcttttggattccgatgggaaacgtgttgcggtcaaatacttctctgaagactggccgacaaatagtgccaaggaaaattttgagaaagttgtattcaacaagactcagaaaaccaatgcccgcacggaagcagaaatagcaatgtttgagaataacattgttctttacaagtttgtccaagatcttcacttctttgttaccggtggtgattatgaaaatgagcttatcttagccacagttctgcaggcattttttgattctgtgggccttctgctcagaggcaatgtagacaagaaggaagcactagagaacttggatctcattctattgtgcattgatgaaattgttgatggcggtatcatacttgaaactgatccaaatgttatagctgggaaagttgctagtaatagtatagattc

SEQ ID NO: 226919 - DNA, 512 bp, Glycine max
atcttaaagaacacgtgattaagcctgtgattcctgagaagtaccttgatgagaagaccattttccatttgaacccttctggcaggtttgtcattggagggccgcatggcgatgctggtctcaccggccgcaagatcatcatcgacacctatggaggatggggtgcacatggtggtggtgccttctctgggaaggatcctaccaaggttgataggagtggtgcctacattgtgaggcaagctgcaaagagcattgttgcaaatggacttgctaggagggcaattgtgcaagtttcctatgccattggtgtgcctgagcccttgtctgtgtttgttgacacttatggcactgggaagatccctgacaaggaaatcctcagcattgtgaaggagagttttgacttcaggcctggcatgatctccatcaaccttgatctcaagaggggtggaaatggcaggttcttgaagactgctgcatatggacactttggcagagatgaccctgacttcaca

SEQ ID NO: 226920 - DNA, 502 bp, Glycine max
atatatatatggtctgaaagaacacatacagggacacataaaaaagggggaaattcataaaaaaatacagaaaaaaaaaaacagaattgagtaagagggaaggaaacatagagaaaattttagcaatcagataataagaagccagtggtagtgcaaaagtcccttgccaagagtggtggaaccccttttagttaagcagggaccttctcccccttgagtggtttcaccacttcccatgggaagacagggtcatctctgccaaagggtccatatgcagcagtcttcaagaacctgccatttccacccctcttgagatcaaggttgatggagatcatgccaggcctgaagtcaaaactctccttcacaatgctgaggattttcttgtcagggatcttcccagtgccataagtgtcaacaaacacagacaagggctcaagcacaccaatggcataggaaacttgcacaattgccctcctagcaagttcatttgcaacaatgcttt

SEQ ID NO: 226921 - DNA, 478 bp, Glycine max
gcgcgatcctgtgactactgtggccactccacagcacttctttactgcagagccgattcagcaaaactctgtttctcgtgcgatcgcgaggttcactccaccaaccagctcttctcgaaacacacgcgcacgctgctctgcgacgcatgcgatcattcccctgccaccatactctgttccaccgacacctctgttctgtgccagaactgcgactgggagaagcacaaccctgcgctctccgattcccttcacgaacgaaggcccctcgaaggcttcactgggtgcccttcagtctccgaactcttatccatcgtggggttttcggatttaagcaaaaaatctcttctttcttcgcctcagggaagtggcgctgatgggatcttcggtggagaaattgaaaggctttcggatctgtctgtgtgggattctccttttttcgtacgcttggatgattgatttctcttcttcctcttctcat

SEQ ID NO: 226922 - DNA, 600 bp, Glycine max
actctccatacacaatttttggccaaagaccccagtaaatgtgattctgatttacagaatactgcacatatttgtctacctcaggtgcagtcaattatgaagcaaaaaggatgataaaaacactactgtactgcaagaatatgtctgccttatatcctagctctgaatcctagaatacatcacttggaaaattttgttaagttcactatacaagggatatgctacatagtgcatgtgatttgagctgggaattatagttatgatgtcatagcagcctaccatgatttcaatgttcatgttccatcttggcaaatcgacccttgactcttaccctgctttctgcccgaacttttcgtgattcataccttatgtgtttgtcaaatctcctagttttcttcttctgcttgtaccgtaataatgcagaatctctttcttggcttgttaactcacatgctgcagctttgggagtagttgatagggtttcagatttaagagaaatggatggttttccttcattgtcaccgtaggtttgagtttccccaacagcagaagtagaatgtttaaatggaattttttctgataaagtctcattaatgggtc

SEQ ID NO: 226923 - DNA, 570 bp, Glycine max
  unsure (1)..(570): unsure at all n locations
gggaacattatggagcccagattcgtaatctccgcatcggaggccgaatcccaatcaatctccaaactcctcccttccctcgtttcctcttctcagtccctcgcccgtccttccatctccaactttcccgtcgccgccgtcggactcgccgcctccggccgcatcttcgtgggcgtgaacgtggagttccccggcctccccttccaccacaccatccacgccgaacagttcctcctcaccaacatggccaacaacgccgagacccgcctcgactccttcgccgtctccgccgccccctgcggccattgccgccagttccttcaagaactccgcgacgcccccgacatccaaatcctcatgacctcccacaaaaaccctcacttcagccctctctcccacttgctgtcccaccacttgggcccccacgaccttctgcccaaaaccgtccctctcctcttggagcctcgtcacaacgctctctctcttgcccaaaacgatcatttcaacgctcttgcgattgcggcgttggaggccgncaataactctgacgcgccctacagcgcgttcccc

SEQ ID NO: 226924 - DNA, 591 bp, Glycine max
gcgagagagacttgtcaatattttttattagatgtaacaatatacaaaaagaaaaagcttgtcttaaaatattagaaccacataggcataaataggaaggggattattatagaccatcaccatgtctatccgtgacaatcacattattacagggtgaggtcaggtaagggtgcatccaaatccactctcaaatagtatatatatattattaatttagggtagagagaaaaaaaaacaatgttcaagttgaaggagattgagaagcaagaaaattgttgaagtggcagcgtggcgctatggaatggagcagcaaccttgcagtgtgatcctgtttgatgaccgccccttccttcttcaccaacaccgccgcaacaatctcttcataatccccaccgccgccggcgatgaaggcgacgatggcggcctgaagcggtcccaagctggggttataagcagcggactcaatgtaagagcctttaaaaacattccccttggaatcgagaagcgcgacgccggagggggacgcgctgtaaggcgcgtgagagttattggcggcctccaacgccgcaatcgcaagagacgtgaaatgat

SEQ ID NO: 226925 - DNA, 524 bp, Glycine max
aatcatcttttgtttgttcttcagtactttagtgtgtgatttaattccaagattttgagaatgtctagctgtgggtgtggaagtagctgcaactgtggcagcaactgcggttgcaacaagtactcttttgacttgagctatgttgagaagacaaccacagagactcttgttttgggtgttgggtctgtgaaggcccaattggagggtgctgaaatgggtgttgcagctgagaacggtggctgcaactgtggatcaagctgcacctgcgacccatgcaactgcaagtgaggtcaagatttataaccttgaagcagagataactgtaatatatgtatcaacaaataataagaattacgtgttgtgtttaataaagtgatcatggctcgaatttgcaaattcaaatgttctaggatatttgttgcgagtgtttgaagtatggttgcttactgtttggttggtctatcataaatatgtaaatttgaatcatcaatctctgcttataaatggactacctttgggtgtat

SEQ ID NO: 226926 - DNA, 523 bp, Glycine max
ataacaccaaaatgagtccattttttagcagagattgatgattgaaatttacatatttatgatagaccaaccaaacactaagcaaccatacttcaaacactcgcaacaaatatcctagaacatttgaatttgcaaattcgagccatgatcactttattaaacacaacacgtaattcttattatttgttgatacatatattacagttatctctgcttcaagggtataaatcttgacctcacttgcagttgcatgggtcgcaggtgcagcttgatccacagttgcagccaccgttctcagctgcaacacccatttcagcaccctccaattgggccttcacagacccaacacccaaaacaagagtctctgtggttgtcttctcaacatagctcaagtcaaaagagtacttgttgcaaccgcagttgctgccacagttgcagctacttgcacacccacagctagacattttcaaaatcttggaattaaatcacacactaaagtactgaagaacacacaaaagatgat

SEQ ID NO: 226927 - DNA, 468 bp, Glycine max
gtctaaagctattattaatagtttgacgatgggtccaactattggtgatatatataggagctgtgaaatcaaatcaatagcctcatatggagtttttgtagagatagcacctggacgagagggactgtgtcatatcactgaactgagttcaggttggctacccaaggcagaagatgtttgcagagggggagatcgcattgatgtcaagcttatagagataaatgaaaagggacagctgcgccttaatcaccgagcactgctgtctgatacagaagcttcaccgaaggatggtctagtggaagaaaagactgaacagtctaaggataagtctagcactcccaatgtcacagcctcttctaaaaggagtgcagaggatgattctgtgcttccttctaaaaagtttgtcaggagattggtcagctcttccctggataagcctttcactaacagagacaggacaaagaagag

SEQ ID NO: 226928 - DNA, 342 bp, Glycine max
ctcattaattgcaagaatggcactttgttgcttggtgatgtccctttctgctctgttcactcttggtcttgcgagagaaagccatgccagagacgaagatttttggcatgctgtttggccaaacactcccattccaagttcattgggagatcttctaaagcctggccctgcgagtgttgagatcgatgatcaccctatgcagattgtagaaacacagtacccgaaaaccttgtgctatagagaagaccttcatgcaggcaaaacaatgaaagtacaagatagcaagcctccgtttcaacaaccatggggtgtcggtacatggctacaggaaattaaggacac

SEQ ID NO: 226929 - DNA, 524 bp, Glycine max
gtctcgagatatctacttcttaccatatatatatagagagagagaatacgaagcacactgatcacaggatgatgctctctttaagtagggaagcagatcttatcagtacacataggtaggttgaaattctagctctagcaatctagctagagaaggtggtgcttgcacaacacacagcacatgatgatttattttatacacaatctcattctcatggtgctcaagatgcatggactaattaagcaacaatgttggtctgataggcagtgtccacagataaattgggtacccataaaatggccttgcttccaaggaaatggcaaacagggttagttccaggatcaactcccataagttgatgaagcatttgatgattcattccagaaggatttgagtggcaaatagcaagtgcctgagttttggtttcatcaccagccaccaatggaaccatgaaagctgttgtttcacggacttcatggcagtaaaatactgcagttctgaaatttagcctatgacacatcact

SEQ ID NO: 226930 - DNA, 602 bp, Glycine max
  unsure (1)..(602): unsure at all n locations
aaacaaatgtgttcaccggaggcaagggtgacagagagcaaagaatctttctctggtttgatccaacaaaagcataccacagatactctgtgctgtggaacatgtatcaaattgtgttcctagtggataacatcccaataagggtgttcaaaaacctaaagggcttgggagtgaagttcccctttgaccaacccatgaaggtgtacaacagcttgtggaatgctgatgactgggccacaaggggtggtttggagaaaacagattggtccaaagcacccttcatagcagaatacaaagggttccacgttgatgggtgtgaagcttcagtgaatgcaaagttctgtgctacacaaggcaagaggtggtgggatcaagcacagtatcatgatcttgatgcttctcaatggagatggctcaggtgggtgcgcaggaaatacaccatctacaactactgcactgacagaagccgctaccctcagcttccacctgaatgtagaagaaaccgtgacatttaaattcacatgtagtactatgtttatggttgctaccataagtttcttattggattatngattcataatttaccatatactttattccta

SEQ ID NO: 226931 - DNA, 475 bp, Glycine max
tttttttttttttttattttttttctcttattccccttttttttttttttgttttttttggtttttttttatctttttttccccctctttttttttttttttttttttttttttccccccccccccaaaaaaaaaaaaagaaagcggcgccccctcccccacaacccccccccccaaaaaaccaaccaccaaaaaaaaaaaaaaaaaaaaaaaaaaaggaaaaaaaaaaaaaaaagaaaaaaaaaaaaaaaacaaaaaaaaaaaaacccccggccccccccccaaaaaaacacccacaaaaaaaaaaaaccgggccccccccccccccaaacaaacggaagagggcgggacctccccccacccgccccaaccaaaaacaaaatttttttcccccccccccccccccgtccactcccagaaaaaaaaacaaaaaataaaaaatgggcccccccccccccccccctggggggggggg

SEQ ID NO: 226932 - DNA, 544 bp, Glycine max
ctggttctcaagctgatttgtaccatattttgatctacatgttcctgagcccaacagatgatttgggtgagaaccaactctttgctggtcagaaaaatctgcagcttgtgcttttgcttctggctgttatctctgtgccctggatgctattgccaaaaccttttattttgaagaagcaacatgaagctaggcacggggttgaatcctatgcaccacttcaaagtacagatgagagcttgcaagtggagtcaaaccatgattcacatggtcatgaggaatttgagttcagcgaagtctttgtacatcaactcatacataccatagaatttgtacttggagcagtctctaatacagcttcttacctccgtctatgggcccttagtcttgctcattcagagttatcaagtgtattctatgagaaggttctgatgatggcatgggggtacaataatgttattatcctgatagtgggtctcattgtcttcatttttgctaccgtcggagtgttacttgtcatggaaactctcagtgcctttttgcatgc

SEQ ID NO: 226933 - DNA, 552 bp, Glycine max
gtaactactaaatctaataaagatatgaatattaagtttatctgggaagttataattattacacgcagacacgggtgcctagctcatacaaagttactcccctaattgagaatatttatttcctcaatggataaataaacaaaacggcaccacgtttgatgaaaaagctcccaggattccaccacatacaatgcccacatataccgatcactgactaggtacatcaaatgaaagaatcaatacaggtccaaagctatataactcctcgttcttattaatgtgattttagagcatatcattcctcatcatccagccacgagaacgagaaagggtggaacttgtacccatcgccctcataaaacttgttttgaaactccacccagtgaagacgtaacgcatgcaaaaaggcactgagagtttccatgacaagtaacactccgacggtagcaaaaatgaagacaatgagacccactatcaggataaaaacattattggacccccatgccatcatcagaaccttctcatagaatacacttgataactctgaatgag

SEQ ID NO: 226934 - DNA, 435 bp, Glycine max
aacaaaagggggaatttttggtttattaactattccactagagcctaattaaaacacgaccaaattcacacgaggacaaaaaagaccccgatttattctcactctcatgtattatgcatatcccaaccaactaaagggaccaaaattttctttttatgtgatacacaaaccccacaattaaggtggtaaacataatcaggttgcaagggtccatgggggaatatttttaagggggagatatacatgcccgggagtgactgaatcaaaggcttgaaattgatgtggggatggggaaaaaaaaaaaataattaagggcatttggccttgcccttggagttcttcatgtttctgtagcaagggcacttatgcttggtcccaaaagtcccaaagggcacacagttgcacttgtctgaacaaatcccgaaaaactttatg

SEQ ID NO: 226935 - DNA, 560 bp, Glycine max
attcaatgttcccctagcccacatgataattgctggagctgattttatattggttcctagcagatttgagccttgtggtctcattcagttacaagctatgcgctatggatctgtaccaattgttgcctcaacaggtggattagttgacactgtcaaagaaggtttcactggatttcagatgggtgccttcagtgttgaatgtgatgctgtggatccagctgatgtggatgctatagcaaagactgtcaaaagggcccttgcagtctatggaactccagcttttacagaaataataaagaactgcatggctcaagatctttcctggaaggggcctgctaagaagtgggaggaagtgctgctaagcctgggagttcctggcagtgaacctggaagtgatggagaagaaattgctccacaggcaaaggaaaatgtggcaacaccattataatgagaacaaagatgtgagggaatcttagtctcatgaagttcccccagctccttgcttcttattaatattatggtttatccctcttccaattttggtttcttctaatatatta

SEQ ID NO: 226936 - DNA, 573 bp, Glycine max
gtaaaattacggtttataaacgtttccttttggagccaaacatgcagatacaatgggcacaatgcagtacaagttggatatacagcacaactccttgtttgcccaacatagcctgtgtcatatctaggctattaagaaacgctttaatttatgctaatcttgaagacatgcactcactacactgatttgaatagtgtaatttccgtgtccatgtacatttctataatatatttagaagaaaacaaaaattggaagaaggataaaacataatattaataagaagcaaggagctgggggaacttcatgagactaagattccctcacatctttgttctcattattatggtgttgccacattttcctttgcctgtggagcaatttcttctccatcacttccaggttcactgccaggaactcccaggcttagcagcacttcctcccacttcttagcaggccccttccaagaaagatcttgagccatgcagttctttattatttctgtaaaagctggagttccatagactgcaagggcccttttgacagtctttgctatagcatccacatcagctggat

SEQ ID NO: 226937 - DNA, 483 bp, Glycine max
gtgagagggacggtagcagagattccgtgagttgcaaaaatgaaaacaattctttctgcagagaccatgaacatcccggacggcgtgagcgtcaaggttaatgccaaggtcatcgaagttgagggcccccgcggaaaattggtgcgagacttcaagcacttgaatctcgattttcagctcatcactgacgaaaacggtaaaaggaagctgaaggtggaggcctggttcggttctcggaaaacatacgccgccattcgcaccgccctgagccacgtggagaatctgatcaccggcgtcaccaagggctaccgctacaaaatgaggttcgtttatgcccattttcccatcaacgcaagcatgggcaacgacaacaagtctattgagatcagaaatttccttggcgaaaagaaggtgagaaaagtggaccttctaacggtgtttccgttgctcgatctgaaaaagttaaagatgaattgattttgg

SEQ ID NO: 226938 - DNA, 521 bp, Glycine max
agagaaaacaatctcagactattctaataaaaaatattcgcaaaaggaaaagtgggacaacacaaaattgtaaaatccaatctcaaacagttaacaaaaaagcaacccaaactaaacaatcaaggtgcttgttgttttcaacatctactcttccagtattgttcccttctcactaacataaatgccatcgagaaatttcctgatatccttctttttaacatggcatttctggttaatgagagcacaggacctagaaacaagttcaatgtcgttcccatccaaaatcaattcatctttaactttttcagatcgaacaacggaaacaccgttaagaaggtccacttttctcaccttcttttcgccaaggaaatttctgatctcaatagacttgttgtcgttgccgatgcttgcgttgatgggaaaatgggcataaacgaacctcattttgtagcggtagcccttggtgacgccggtgatcagattctccacgtggctcaaggcggtgcgaatggcggcggatg

SEQ ID NO: 226939 - DNA, 434 bp, Glycine max
tttttaatcttattattttttatgctcttataaccccacccattttttggggtttttttgggggttttttaagcttttatccccaaattaccctcaaattccattaatatttggggggaggccaaaacccccccccccccaaaaaaaaaaaggaaaaacccctcaaaaagggggaacccaaaaaagggggggggagggaaaaaaccccctgccccaaaaaaagaaaccccaaaaaccaaaaaaaaaaaaaaaacccccctaaaaaaaaagggccccccggtaaaaaaaatgaaaaaaacccaaaaaaaaaaaacccccaaaaccacaaaaaacccccccaaaaaaaaaaaaaaagggcccccaaaaaaaccaaaaaccccaaaaaaaaattcccgccggggggggaaaaaaaaccccccttacccggggttccc

SEQ ID NO: 226940 - DNA, 587 bp, Glycine max
  unsure (1)..(587): unsure at all n locations
ataactagaaacagtgtgatgaaaatgaaggtccttgttttcttcgttgctacaattttggtagcatggcaatgccatgcgtacgatatgttccctctccgaatgaacactggctatggtgcccgtactccggaggtgaaatgcgcaagttggaggcttgctgtggaagcacacaacatctttggctttgagaccattcctgaagagtgcgttgaagcaacaaaggaatacatccatggcgaacaatatagatcagactccaaaacagttaaccaacaagcttacttttatgccagagacctcgaagtccatcccaaggacacatttgtgttcagtatagatggcaccgtactctctaatattccatactacaaaaaacatggatatggggtggagaaatttaactcgaccttgtatgatgaatgggttaacaagggcaatgcaccggcactgcccgagactcttaagaattacaacangctggtgtctcttggcttcaagattatattcttgtcaggaagaacactggacaaacaggccgtaacagaagcaacttaaagagggctgctaccacacatgggaaaaat

SEQ ID NO: 226941 - DNA, 395 bp, Glycine max
agggaacaagggccccttttttttttaagcccccaaagagaaaaccaccttggggagtcttttacatgacttgggggcccacaggtggaacaacataaagggaagcttgggcccctttttggacccctttttttacatttagatagaaagggcccagctttattgttggggggggaaggaacttctgaatgtttttccggggatttggaagcttaaagggcctgctttcccctttggggccctccaggggaaccctccattgggctccaaagaacccaacaaggggggatccctgccttatcaggttttctttccctggtggtttggaagaaaccgcatttgggggggaaggatcttggggatccttgaaaaataatttttcccatggggggggg

SEQ ID NO: 226942 - DNA, 520 bp, Glycine max
gctcctgaggttatctctgggaaattgtatgctggacctgaagtggatgtctggagctgtggtgtaattttatatgcccttctttgtggcacccttccttttgatgatgaaaatattccaaatctcttcaagaaaataaagggtgggatttacactcttcccagtcatctatcacccggtgctagagatttgataccagggatgcttgtggttgaccctatgaggagaatgaccatacctgagatccgtcaacacccatggttccaagctcgacttccacgttatttagctgtgccaccaccagatacaatgcaacaggccaaaaagattgatgaggagatccttcaggaagtggagaaaaggatttgcacggaacaaatgggttgatctcttggggacaagatacaaaatgagggtactgtggcatactattttgtattggacaaccgatttcgtgtttccagcggctatcttggagctgagtttcaagagaccatggattgccgttttaatcaaatgc

SEQ ID NO: 226943 - DNA, 481 bp, Glycine max
ggcaaaagttagaagcgggctaaacatgccttccaatggcaacagtcgtttacagcatttggttgataaccatacatatatcactggcagttggggctaattcttttaagacattccccatataattcattacactgataaaattaaaatcaccaagagaaaggaaaacctagtcgagcaccattgttaacgaagcaaatcccatacttgggattggctcattataatgtttacccacagataaacgggtagaaaacagaggataagcttggaccgaaaagatacttgtatgtacaatgtaagcttattcacatgaaacacaaggcatatttatgtctctggtgagcctaagctcttcgctctagaggacacgaagctgtgcaaggaaagcagcacatagatccaagaaaagaaactgtggaccctgcaccctttgaagatcaagcagatacttttcttcccgggttgtggaaagctgcac

SEQ ID NO: 226944 - DNA, 588 bp, Glycine max
ctaaaacatctccagtgggttcttcttcttctattacaacaacgtcgtccaagaccatgaccatggccatggccacgatcctgctcctgttcacggtcttcgcggtttcatcggccctagacatgtcgataatctcgtacgacaacgcccacgccgccacgtcgcgcagcgacgaggagctgatgtccatgtacgagcagtggctagtaaagcacggcaaggtgtacaacgcgctcggagagaaggagaagaggttccagatcttcaaggacaacctgcgattcatcgacgaccacaactcccaagaggaccgaacctacaagctcggactgaaccggttcgcggatctcaccaacgaggagtacagggccaagtacttgggaaccaagatcgatcccaaccggaggctcggcaagaccccgagcaaccgatacgcgccacgtgtcggcgacaaactacctgaatcggttgattggaggaaggaaggtgctgttcctccagtcaaagaccaaggaggctgtgggaagctgtgggcattctcagcaatcggtgcagtggagggataaatagaaagtgcaggtgaactga

SEQ ID NO: 226945 - DNA, 496 bp, Glycine max
atccagaatatcgggcaaatccaaataatgctggattgtcacatagtctacataacctgggaaactaacagcaatcaaatatgttcgccatttggaattggaatttgaatacaaatacagggcatcaataatataaccctatgtacacagccaatatctgactgaaatttgatacagaatagtatcaatttgtatcataataaaatggcacagagaaatttatgtgaaggtaaaggggaagtgtatcagctggggttttaattcttcgtctttcatttacttcatcattggctccttcctgcacgttcacatttcctttatctgcttaagcactgctgaccttgttcttacgcccaaaggtccaatggggtttagccggagtacgcctcaatgccttcactccgaatgggttgttcttgctcttgagacaagttccagcataagtgttgcagatgggatagtcgttagggcagcaactgtagtggtcatcacagca

SEQ ID NO: 226946 - DNA, 520 bp, Glycine max
aatatattgaaattgatgattaaagacaagctttagatccaagaatacaaacaacaaattatttccttcctccaactcccaatacaaacttttatagcagacatgagattattccataaaataaaaatatgatacaaacttacaagtgtctatatggcttcatagtcatctgctgcaggggctgggggagcatcagctagagcagataacacaacaaaggcaccaaataagattgtgataatggcagtgaagttgacaagcaaagcctcagaaccatatttgtccaatcctgagttctcaaggaaagggagcttctccagaaacccaagagcagcagtgcccacagccaagacaaatacaaacagcccaaatagcgcgtgccaaggaagtgaggcgcgtctaatgtctggagtcccaccagggaagaaaaagatcacaaacccatatatccactgaatgccataaaggacaataaccccaattccaagccatgaatgcaagctgtagagaatggcaatcc

SEQ ID NO: 226947 - DNA, 500 bp, Glycine max
ggggactaatgatctgtgttaatagggatcatatttaataccataaacttgtacacaaacatattttacagtgtacttacactccagcaaatctaaaccaagagtctttgatatgtgcatggaagatattataagtagaaacgaaataaatcacaccagccacattttccataagttcaattgcatgtccaagaacataagttttgaactgataaattatataaattaataagataggtagaaattttgtagtggcagcagaaataggaacatctttgttgtgagtacccagttttaggctaaaccgggcactagttttcagcctttgcttcaatttttcattattttgacttgaaaggaatggccctgagcactatctgatggtataaagctgcaagtgctgccccaataaaaggccctacccagaagatccaatggttatcccaagcttggtccttgttgtatacaagggctgcacctaaacttctagcagggttgat

SEQ ID NO: 226948 - DNA, 521 bp, Glycine max
acggaaacatgttttcttatataccagatggacaaaaataaaaataaaaagcaagccaatttaagaacaaaccgataggtgccgcataacatgtacccaaaggtgccaaactgcactctcactaccatcaaagtattatcccgcaaaccgtacatacactattagtaattacaatcttcttcacgttggagtgcagagcaaacacacttacgcatcacatagcataagtaagacacaggcatcttcacattttagtctcttcacatatggtcggctgcttcaccatactgttcctgctcatcctagtactccccttcgtcctcagcagtggcgttctggtactgctggtactcagacacaaggtcattcatgttgctctctgcctccgcgaactacatctcgtgcatgccttcaccagtgtaccaatgcaagaaagccttcctgctaaacatggccgtgaactgctcgctcaccctcctgaacatgtactgaatcgaggtccagtttccaatgaatgtgga

SEQ ID NO: 226949 - DNA, 521 bp, Glycine max
cagatattgggcttgaagctgtaggaaagggttgtccaaatctgaaaattgcacacctccacaagtgtgcatttctgtcagacaatgggttgatgtcattcgccaaggctgcttcatcacttgaaagcctacgattggaagagtgccacagaattacccaacttgggttttttggtgtcctttttaactgtggtgcaaaattgaaggctatctctttggtgagctgctatgggatcaaagatctgaacttggtgttgccaacagtatctccatgtgaatcacttcggtcgttgtctatcagtaactgttctggatttggcaacgcctccctgtctgtattgggaaagctgtgccctcagcttcagcatgttgaattgagtggacttgagggagtgacagatgcagggcttcttccactccttgagagttccgaggctggtttggttaaagtgaaccttagtggttgcacaaacattaccgacaaagtagtttcatccttggccaatctgcatggttggact

SEQ ID NO: 226950 - DNA, 507 bp, Glycine max
gagactgataaattgatttatgttattacattccataacatacaggacaaagggggggtattaacatcattagacaatataggaggagcagttgccaagttcaaaaaaatgaagccttaaaaaactaggacttggtaaaaataacaacccttcccaaagggacaaaaaggttgtggttatggcagacctatatagcttgctgccacagccaagcccctaaaaacaagacttgataaacaccgaccttgacaactgcaaccaccctaataacagcacatgacactgaaacttctaacctgcccttcgagtaaaactgatacccaaacatcatgtgaagaacatagttcaaccacatgacacatttggtaaacaaagactgatacagaggtacaggtagctgtaaaaacttagaaaactaagacacacatggtggcaaaaccgatgcaaagccgagctaaaaacatcaggtgccaacaccagtaacaaagattcctaactccagaaccc

SEQ ID NO: 226951 - DNA, 471 bp, Glycine max
attggaggagatgactttaagagtggtcagaccaaaatgaaatctgtgttggtggatttccttgtgggggccggcatcaagccaacatctatagtgagttacaaccatctgggcaacaatgatggcatgaatctctcagcccctcaaaccttccgctctaaggaaatctccaagagcaatgttgttgacgatatggtcaacagcaacgccatcctctatgagcccggtgaacatccagaccatgtggttgtcattaagtacgtgccttatgtaggggacagcaagagggccatggatgagtacacttctgagatattcatgggtggaaagaacacaattgtgttgcacaacacatgtgaggattcactgttagctgctcctattatcttggacttggtccttcttgctgagctcagcactcgaatcgagtttaaagctgaaaatgaaggaaaattccactcattccaccca

SEQ ID NO: 226952 - DNA, 514 bp, Glycine max
aagcactaaagacgtggataacttgatattattttattacatacatgcatagatagcctgctctcaaataagtcggcaggaacaaagatagagagattcaacgatcttcaaatttcacatttgccagaaatatataacagaaaagaggggtatgggatatgagttaagttttgatcacattcaactacactatcccaaaccgttactcttaagactttgaacttcacttgtactctaggatcatgttgttctcaggagctaatccaacacaagccctcaggatgttttccagcatagctcgctgctttgacaacgcattcaccactggtgtacccggtggaaccagaggggccttggtcaggtaactaaggatggtcgcaactgggtggaatgagtggaattttccctcattttcagctttaaactcgattcgagtgctgagctcagcaagaaggaccaagtccaagataataggagcagctaacagtgaatcctcacatgtgttgtgcaacac

SEQ ID NO: 226953 - DNA, 548 bp, Glycine max
cgacgcacgcagcagcatcagcttctactcgtgtaatctctgcgtgggctacaatggattccggtgtccaaggttgcatcttagccactttaattctccacgacgaggaaatcccactcaccgctgagaagatcaacgctctgttgaaggcttctaatgtgtccgccgagtcttactggcccagcctcttggccaagctcgcccagaataagaacatcgaagacctcattttgaacgccggcggtggtggggccgccgctgcagttgccgctcccgccggcggtggtggtggtgccgctgctgcagccgaacccgccgccgaggaaaagaaggaagaagcgaaggaagaaagcgactatgacatgggtttcggcttgtttgattagatctcttttatatcgttgtagccagattgtgagtctttgaattgaaatcttgtctcgttctatataatcattagtggagggatatttagccaatctactatcataattgatggattttggtggcctgttaatatatttgtggcaactaacttcttatttaac

SEQ ID NO: 226954 - DNA, 544 bp, Glycine max
aaataagaattttgttgccatttatatattaaaaaaccaccaaaattcaacagggatgatagtagattggctaagaatcccttcaataaaaattatatagaacaaaacaagatttcaattcaaagactcaaaatctggctacaactatataaaaagatctaatcaaacaagccgaaacccatgtcatcgtcactttcttccttcacttcttccttcttttcctcggcggcgggtgcggctgcagcagcggcaccaccaccaccgccggcgggagcggcaactgcaacggcggccccaccaccgccggcgttcaaaatgaggtcttcgatgttcttattctgggcgagcttggcgaagaggctgggccagtaagactcggcggagacattagaagccttcaacagagcgttgatcttctcagcggtgactgggatttcctcgtcgtggagaattaaagtggctaagatgcaaccttggacaccggaatccattgtagcccacgcagagattacacgagtagaagctgatgctgctgcgtgcgtcg

SEQ ID NO: 226955 - DNA, 482 bp, Glycine max
ccccacactaaatgggaagagtatagcttgttaccctcagctcaaatactcttcaaaattgagcacactgatgttccacttacctactacactggaattcttggtatgccaggagtgactgcatatgcaggtctatttgaagtaggatctcttcagaaaggagaaaatgtttttgtttcggctgcctctggcgcagttggtcaactggttgggcaatttgctaaactgaatggttgctatgtagttggaagtgctggatctaaagagaaggtggatctgctgacaaataaatttggatatgatggaggttctaactacaaggaagagcctgaccttgatgcagctttgaaaaggcactttccagaaggcattgatgtttactttgagaatgttgggggcaagacacttgacgccgtactcctgaacatgagagtccgtggacgcatacccgtctgtggaatgatctcacagtataatcttac

SEQ ID NO: 226956 - DNA, 563 bp, Glycine max
agaaaatgtaaatgcttttattcaagagaaacaactgtgcattacattggatactgctctcaggactatcaagaacaaagagcatcatcatacagttgacgaaggtgactgcaaaggtgatgtcaagacagccaatttttcagcaaaaaaaccagaaataaaactgataacttcccattgaacacaagaaacaaatgctttttactcatgagaaacaacgagcacttgttttccaacattgcgaccgctaaaaaggccaaccaatgctgaaggtccattctcaagcccctcagctatgtcttccacatacacaaccttcccctctctgatatttggcaggagaaactccaagaacttgggatataggtgaacgaaatccatgaagttaaagccttgcaaacgaatccgcttatatatgatctgtgccaaatttgttacaccttcatgttgagtaagattatactgtgagatcattccacagacgggtatgcgaccacggactctcatgttcaggagtacggcgtcaagtgtcttgcccccacattctcaaagtaaacatcaat

SEQ ID NO: 226957 - DNA, 463 bp, Glycine max
gcctgttctgcaactgtgaatactttgaatgaagcaggtattcgcgctgagtcagatgctagagataattattctcctggatggaagtattctaattgggaaatgaaaggtgttcctctaagaattgaaattgggccaaaggatttagcacataagcaggttcgtgctgttcgacgtgataatggagcaaagatcgacattgctagtgctgatttggttgtggaaataaaacagttgcttgatactattcaacagaacctgtttgatgttgcaaaacaaagacgagatgaatgcattcagatcatacacactggggatgaatttgtgcaagctttgaaccaaagaaaaatgatctttgctccttggtgcgacgaggaggaggtggaggctgatgtcaaagccaggacaaagggtgagatgggagcacctaagactctttgcagcccctttgatcagccagaac

SEQ ID NO: 226958 - DNA, 496 bp, Glycine max
atatgaaacttatcttccaatttaatccaaaggaaatattgggccatattaaaatcaaagtaaaactatcagttgaaaaagattcccaagaaaagaaaactaatgtttgtgtgatccacaaattcgtacaaggcatcattaaataccaaattaaatccagaaaataccaaaatcaacagccagtagtctagtaacttctgccccagtatgtccactttgttgcgggctttcctgatgcaaagcacttggtgccttctgggagttctggctgatcaaaggggctgcaaagagtcttagctgctcccatctcaccctttgtcctggctttgacatcagcctccacctcctcctggtcacaccaaggagcaaagatcatttttctttggttcaaagcttgcacaaattcatcccaagtgtgtatgatctgaatgcattcatctcgtttttgttttgcaacatcaaacaagttctgttgaattgtatcaagcaacttttt

SEQ ID NO: 226959 - DNA, 343 bp, Glycine max
ggaccctagcatgtatattgactattgtccaaagcatcagtcttcagcttgagggggagatgaatattaatcatgttcagcagctactgttggtgctggtggttttgtcttgcatgaacaccatgagaaaaaggaagttaagaaagaagatgaggaagctcatggaaagaagcaccaccatctgtttggctgaacatgataaatattcatatataattaatattcaagctccaaagtatcaccatgcctgtgtatgtgttatatatcttccatttctagtgtgcctttgaagcttgaatattaattatatatgaatattgatcatgttcagcagctactgttg

SEQ ID NO: 226960 - DNA, 466 bp, Glycine max
gttacacacactctctttcttctgctgcaccagcaacaacagagaatgaacagtactgaggaggggatgcaaggcataggcataggcataggctgcttccaaaacgacgtcgtagggcagctggagctgagtcccactatgagcaactcctcctcctcgctatccatggagctggacgagtccccggagagcagaatccaacggttgatatcggagcacccggtcatcatcttcacccgatcctcctgctgcatgtgccacgtcatgaagaagctcctcgccaccatcggcgtccaccccaccgtcatcgaattggacgaccaggagatcgccgccctccccgacaccagcgccccctcggcctttataggcggcacctgcatcggcggcctcgaatccctggtcggccttcacgtcaccggccacctgatccccaaactggtccaagtcggcgctctctggtatg

SEQ ID NO: 226961 - DNA, 471 bp, Glycine max
ctggtcaaacttaattttagtcattacttatcatcattgctacacctaacatcatagatatgcccaaattaaaaaaaaaaattgaatatacccgacaaaactcgtaatataaacctcatagccattatctgggggattttattttaggggttatttaattggacaattttatattttatttcattcggggcatattatcctcaagccgctggtgattgggtaattgcacccaccatatccagtgctacgcagggctggtcagtaggtacaaaatgacccgctccaaggatccaatagaattgtaggtttttgtatgacttaaaaaaccctttgggcggtttggcacttccacagaagaggggggttgctgtctttctccaagaaattttgaagccctgtccactcgagtttttaaagccaagcttcagtccccttgggtgcacaaatgagatccacttgcccactgtgcac

SEQ ID NO: 226962 - DNA, 525 bp, Glycine max
atggaacatatttttgaattatgttatcaaattctgtacacaccccaatattatgggttcttatcttagaaataccatccaccttcatacacaaacaatatctatcctatatacaaacaaaaggacaccaagaaccaatgcatgggaaaaaaataaaaaataaaaatatctccagctgtgccagcccctttgccatgcccatctgaggtaggcaaaaatccaagaatctaaaaagctatggaggaaaaaaaaagctaccaatttataaatcccaccaacccaccgaattcttggggtcatgtctgttgttcaccctcttctttcttctcttgaatcctgaatctcactcctgtctgtgtcagaatattccttctgggactcaatttctccactaccctctcgatttcttcttcggtgtcttcggtcctctcttggtaaagggtattcctctgactccaacattcgtacaacttggcccatcttgggccttttctcagaatctggatctacacatcttacagcagt

SEQ ID NO: 226963 - DNA, 550 bp, Glycine max
cttatcatattaaccagcgagatcctgacactgtggatcagcttggttgccggcgaccaatggttgaggttggcaccatacaacagcttcagagtaataccacagtgagggacaaaactcatagcttcgatttcgatgagatatcagctaattcaccaccatgggccccagtgaacaatagagttgcgcaaaactatggggaggatgacaaagaaagtggttctggtgaatgggttgacaaggtcatggtcaacaagcaagatgtaaactaaactgagaacctgttggggttatggcaagcagcaaacaatgggaacttatctgaggccttttatcagaaatatatgaaagagtctgccaaaatgtactcggaacactcctatactatgttcatgggagccaaccagtttaacattgcgggttcaaatgacatcatggatgagctcgatgctgcaaccagtgattcctcacaacctgacttactttggcaatttaatcacttcagacttagcagcgtgaccaatggaattggatcaaagactatgtgatc

SEQ ID NO: 226964 - DNA, 575 bp, Glycine max
cagttcttctttcctcaaccttctttcttcttatatatcgaacatggctaagtatcattcaagtgggaaaagctcttccatgactgctatagccttcctgtttatccttctaatcacttatacaggcacaacagatgcacaatccggggtatgttatggaagacttggcaacaacttaccaacccctcaagaagttgtggccctctacaatcaagccaacattcgcaggatgcgaatctacggtccaagcccagaagtcctcgaagcactaagaggttccaacattgagcttttgctagacattccaaatgacaacctcagaaacctagcatctagccaagacaatgcacacaaatgggtgcaagacaacatcaaaaactatgccaacaatgtcagattcagatacgtttcagtgggaaatgaagtgaaacccgaacactcatttgcacaatttctagtgcctgcattggaaaacattcagagggccatttctaatgctggccttggaaaccaagtaaaagtttccactgccattgatactggtgccttggcagaatcattcccaccatcaaagg

SEQ ID NO: 226965 - DNA, 382 bp, Glycine max
ggggccattagggagagaacttttttttaaagctaattaacttagctcggaaaggggccatgccgacttcaaaaatgcagataaattaaaggtttatacctgccttttttaaaacaattattgaagtttcatttggactcggggcccttatttcacaccaaattatgcttttgctaaaaattaattgaaattaatcgagtttttgggctgcttaattataggaaaaaagagcccccaaaatttttcaaactctggctgcttctgattttcatcaaacatggcaaacacataagtttcaaggggggccccaggccttttaggggttccttggtttacattccgaaccaagtttggggtggaagttcttgcattatcaagggaa

SEQ ID NO: 226966 - DNA, 470 bp, Glycine max
gggttttgggctggtgtttttgtgaagcttgagatcaggaattaatttcagtggttcagagaatggcaacggattcttcaaatggtaatggacatcaccagacaacaacaaagcagcctcctttgccatctcccctgcgctgttccaaattttttcagtccaacatgagaatcttggttactggaggagctggattcattgggtctcacttagttgacagattgatggaaaatgaaaaaaatgaggtcattgatgctgacaactacttcactggatccaaggataacctcaaaaagtggattggtcatccaagatttgagcttatccgtcatgatgtcacggagcctttattgatcgaggctgatcagatctaccatcttgcatgccctgcctatcctattttctacaaatacaatccagtaaagacaataaagacaaatgtgattggcacactgaacatgcttgggctc

SEQ ID NO: 226967 - DNA, 489 bp, Glycine max
aaccgggaaaaaggaaagaatttcaattcaatcgtcttacaaacagcaaaatttggagggacatgctgcagttttttgcttaacaaaacaaccaatttagcaatctggttgctggagatgccaaatttgaggccccccaactttttcaggtttataatcggaacaataactttaatgaccaaaattttgaaaacgggcccaacccctcttacttattattttactttaacatggccccaaaggggcgaaaaacaagttaattttttttgccaactcccagcctcagacgggaatccttttcctttcgaggaagaccctcccgccacttggcctttggctcccaacccaacaattcctttgtttttgggaagtccgggtttctttggcggggggcatcaggaggggttcccaccctcttgatctcccaccctggattaataagctctttaactggcccaacaaggtccctcattggaaattcacccgggt

SEQ ID NO: 226968 - DNA, 378 bp, Glycine max
gggacttgtatggctcagatgcaccttcaccctacaaccctcttcagagcaagttcttcgagacatttgctgctccattcacaaagaggggattgttactcaagtttctgatattgggaggtggttccacccttgcatacttcagtgcaactgcctcaggtgacattctaccaatcaagaagggaccacaactcccaccaaagctcggtcctcgtggcaagatctaatttgatttgtatcagaactccatctattgagttcctttttaattattttttttctggtttgcataatgtgtaagtatacttacagactactattcaaagatgcttctttcccgtctaattgagtggcattgatttggttttcaattgaagc

SEQ ID NO: 226969 - DNA, 364 bp, Glycine max
ccaaatcaatgccactcaatgggacgggaaagaagcatctttgaatagtagtctgtaagtatacttacacattatgcaaaccagaaaaaaaataattaaaaaggaactcaatagatggagttctgatacaaatcaaattagatcttgccacgaggaccgagctttggtgggagttgtggtcccttcttgattggtagaatgtcacctgaggcagttgcactgaagtatgcaagggtggaaccacctcccaatatcagaaacttgagtaacaatcccctctttgtgaatggagcagcaaatgtctcgaagaacttgctctgaagagggttgtagggtgaaggtgcatctgagccatacaagtccc

SEQ ID NO: 226970 - DNA, 494 bp, Glycine max
ttcattcattcaggctaaatggggaggatcaaacctcaggctctgctacagcaaagcaaaaggaagaaggggccttctcgcataagtgccaccattggtacattctatgcattgattcttgtcatgcttgtgtttatcctgtttgttacatacagacattggtccaacaggacaagacttcaaccagagagctatatatcagtctctgaggatgaaaatacatctgtggaatccaaaaaatctgatctacctggatatgctgttgtaattacctctaaaggttctattatagtagaactttacaaggaaagtgctcctgaagttgttgatgaattcatagatttatgtcaaaaagggcacttcaaggggatgctttttcaccaagtaattaaacactatataattcaggcaggtcataacaaagggcctggagctactgaagattggaacctgttaggaaagaaatacgcaagtatgagacactaagcattcat

SEQ ID NO: 226971 - DNA, 441 bp, Glycine max
aaaacaagtcaaggttgttgaaccaaaaaaagataacgaggaggactctgatgatgattctgatgatgatgattttggatcttctgatgaagagatggaggatgctgatagtgacagtgatgatgagagtggtgatgaagatgatgatgaagagacccctcccaagaaggtggatctgggaaagaagagacccaatgagtctgcatcaaaaactccagtttcttccaagaaagccaaaaatgctactcctgaaaagactgatggtaagaaaggtggacatacagcaactgctcaccctgcaaagaaaggcggaaagactcccaacagcgaagccaaagccaagactcccaacagtgaagccaaagccaagactcctaagtctggtggactctcttgcaaacctgcagcagtctttcaccaatgaagtggtctgaacaacat

SEQ ID NO: 226972 - DNA, 538 bp, Glycine max
aagttcccattaaaatttcaaacaaaaacggatcaaacatgcattcaccttcaacactaccacaataccacggtttactgggccgaaaaacaaggacagatgcctaacgtccttaggaaactcactctattacataagccaaaaataatacatgaatgagtcataaccaacagcaaaaatatcactgaccaccatgctttgccttgttatgttgttgcagaccactttcattggtgaaagacttgctgcaggttttgcaagagagtccaccagacttaggagtcttggctttggcttcactgttgggagtcttggctttggcttcgctgttgggagtctttccgcctttctttgcagggtgaggagttgctgtatgtccacctttcttaccatcagtcttttcaggagtagcatttttggctttcttggaagaaactggagtttttgatgcagactcattgggtctcttctttcccagatccaccttcttgggaggggtcttttcatcatcatcttcatcaccactctcatcatcact

SEQ ID NO: 226973 - DNA, 532 bp, Glycine max
aaattataaagttttttttatttattcaaacctaaagaaacacaggaacacaccatcacaaactcatgtaaccctgccaataaaccatcacccctaaactccagcaccagcagcttgctcacttcaatacacaactcccagaatttctcatgtcaccacgtggcaagcacgctgatgtggagccaagtgttgtgcttacacgtaggtgtaccctccataatacaaccaaagacttaagcatcatataataatattaataaagtaaactaaagaaataaaaagaaaaaaaaaaaagaggcttttcaacatggcatgcaaaatggtagacctgatccccacaactaggaccatttttaaacttggttttctcactcacactgtccataggtctaagcttcagtcttctcaacaggaacctctactggggtttcaactgactcagctggtttgttctcttcctctgtggttgctggtggtgctgctgctgctgattctgtttagtagtttctttaggctcctctgcttcttcttt

SEQ ID NO: 226974 - DNA, 442 bp, Glycine max
ccaggaaaagaaatggttgtttcaaccaaaccaaatgggtaacaattcacattttttttacaacaaaacgggataaaaaaaaaggaattttacatatttggctagccttcatgcttttatctcaacctttcaaggaagggaaaccccaaaaccaagattcataaaaggaatggttaagggtaggaaaatgaaagttcctcaaccacttggggggttttttggggggttcgtataaatagtaatttccctgggccatctttcatactccattgggataactaaaaagcctttcctgtgtccgattgatgggccaaattcataatactttgccttcgcaatccacatttgttggaaggggctgagggaggccaaaatagagcctccaatccagacactgttcttcctgtttgggggggctaccaccttaattttcatgctaccc

SEQ ID NO: 226975 - DNA, 504 bp, Glycine max
  unsure (1)..(504): unsure at all n locations
gttggtggagactccacctcactcttgtccccatatcttcattttggagaattgagtgtgaggaaagtttttcaagtgacacgtatgaagcatatattatggacaaatgaaggcaacagtgctggtgaagagagtgtaaatctttttctcagggccattggacttagggagtactcacgctatctttgtttcaactttcctttcacccatgagaaagcacttctgggacacttaaagttttttccttggaatcctgatgctgatatctttaagaattggagacaaggtaggactggctttcctttggttgatgcaggaatgagagaactttgggcaactggctggattcacaacagaataagagtaatagtttccagttttgctgtgaaaatgttgcttctaccctggaaatggggaatgaaatatttctgggacacacttcttgatgctgaccttgaaagtgatatcttgggttggcagtatatctcangaggcttaccagat

SEQ ID NO: 226976 - DNA, 559 bp, Glycine max
  unsure (1)..(559): unsure at all n locations
cacacacttgcgagatctaattgttccagagaaccaacaatcaggggatggcggacgatgacaaagcggttggggaaggtgagatgaaagagacgacgggtggtaccagtccttctgggagtggaaagaagaagaacaaaggtttcttgttgcgtatttggaacgggatatttaggttacacggcgatgattttgagaagagactccagtacatttctaaagaggaagctcaagtcatgactagaatgaacaggagatcccgatcctggaggagaatttcccgcaatcttattgtattttctgtcatatttgaggtcgttgctgtagtttatgctattatgacaactagatcaatcgatctgaattggaaaatgagggcaatccgggtttcaccaatgtttcttttgcctgcactagcagctgctgcctatacaacatttgtcagcttcacaaggatgtgtgatcgcagggataagaaaattcttgaaaggctttgagctgaaaggcaagaaaaaattgatgagctcaaagaaaggacanattattacactacacaaca

SEQ ID NO: 226977 - DNA, 337 bp, Glycine max
gcagcacccatatcgtggtggccagcattgctgctgtcaggggggacgagctactgcagaactggaccatccagcttagacgcactggcactctatccgtgagaggcatgatgataccttgagtggatacaggaacgcagtgccgggccttctgacacgggtagaggccaagggggagggaatgctgcagcagcaccaaaggggtggagagaacgacaaaaggcctggcgagagcataaagaatctacctgagcggagagaacggagaacgatacgtgatccacacaggaagccatagggggcacaccattcggagcattggctgtgtgaccaaagc

SEQ ID NO: 226978 - DNA, 471 bp, Glycine max
gtatgtaagaagttatatctttaaattgaattgatggggtggaaaacccttatttaaagattttcaatcatacacaatattgcaacaacaaaaagaattttaaaaaaaaaagactttctttttttactttttttacccaaaacctaagcaaaatataaaaacaaacgacacttttttttagactctttatatccaaaagctgatcacaatcaaaatcaatggcgttatttatgaaaggttcataagacttcaaacgaccaaaagccggtttctccattggtggtctcttcaaacatgaatttactcttcaatagcaaggggcacagactcagccaatttgcggtacttgagagcatagaacatctctaggtaacgtttgctctcacggcgttcaagattggtcacgtgctttcagaagccatacacaccagtgagtgtcaagagcctgtccgagttaatttgccatgtgta

SEQ ID NO: 226979 - DNA, 527 bp, Glycine max
gaactatctcaagcctatgcaagtggagatgtctttgtgatgccgtcagagtcagagacacttggccttgttgttctggaggccatgtcatcaggaatccctgtggtgggagcgcgtgccggtggcgttccagacataattccagaagaccaagatggcaaaattggttacctctatacaccaggtgatcttgaagattgcctgagcaaactaaagccgcttttggatgacaaagagttgagagaaaccatgggagaagctgcacgtttggagatggagaagtatgattggagagcagccactcagaagattcgcaatgaaaactacaatgctgccatttggttctggcgcaagaaaagggctcaactcttgagaccctctcaatggttggctcaacgtattttccaatcttcagatccagaagccaacacatagcgtggtgattgatgctaagcaaatgcttcttttgagctttggatggctctttgaattgttcattgctttggctcttaggaagcctattatgg

SEQ ID NO: 226980 - DNA, 522 bp, Glycine max
caaacgttcattttattaagcacatacatgataaatgaacagaaactcacagtcacagcatctccaacatgaattacgagatgacttattctaatttcccatttcgtacataacgtacttgggagtggaaatacaaaggaacaattcacaagaactactgttaagattttccacaaagacaaatagattttaaacactgtttttattttgccacatgagatcatgaaactaaggggtgtttatcgaatttagcagcggctcttgcagccaacagcttcttcaacagtcagaaagactctgccaccgattttgccgacaaagttggacacctttagcttgtgtatcacttgccacctagggttcgcaatggctaactgttttccttgtgaagacaaactcttatgcagttcctctagagcagtaattccagaggtgtcaatgttcaccaaattggaggtgtcaagaattacgagttgaatggtgcttctagaatttcccttgtcatcttctgattcttcctca

SEQ ID NO: 226981 - DNA, 597 bp, Glycine max
aagggggaattctttctcatagagtttgagcaagcacaggggcaaggactagaaaatcataatggttctttttgaagtctgctggttattcaatcatatatccttttgacaaccttttgattgtcacagaagccctatcttatctatgatgattagtcagcagtccaactctgctcaacaatctcacgtactcttctgttgtattcacgcttgttttcactgaacatccgagcagcttcagaatttgctggtgaatttgggtttggatcacacagcaatgactggattgaggtaagaattgcagctacgtcataaatagggctccactgattctgtaaaatgtccaagcatatactgccatccgcataaatgttaggatgaaacattcgagaaacaaaacgcacagtaggtggtttattaggataatcctctgtaaactgaagtgtcaacttaaacgtacctccatcccaaggggtgtcatctggtccaaagataacagcattccaaagcataatattattgtcttggggagccccactgatgccagcaggaggatcttggggcaatctttaaaaaccctcataagctctttcttgc

SEQ ID NO: 226982 - DNA, 439 bp, Glycine max
gtggagaggctagtttaagacgacgagtcaaggaaactaacaatcacagtgacataaatggatgtccgatttcaattgctgcaatgcatttacaagctctttgttcccccattataaaactatacccggtttcttaaaataaaattgaagacaacattttgatttactatatagttgtaactgatcaacaagttttgaaggaaccatttaatttattaagcaaagcaacaaaaagggaatagaagtgacaaagcaacttgtatcgtatggtagttataggtcatcgggaacaacaagaaaagtaggtttgattttgcttagatgttgcatcaccattgttgacgaggctgaccctggtgacagataactttgccttgtatgtttcggagttgagaaccttcctgactacgttggtgtatatctctcgaattaccatctt

SEQ ID NO: 226983 - DNA, 535 bp, Glycine max
  unsure (1)..(535): unsure at all n locations
cacagatatcgcgaagacgctggacccttcaaaagtgaaagagaagagggtgagttatcacctaatggagactttgaagaggatgagtttgcagtttatggacatgctggtttggaggcagttcataaaggaaaaaatggtaccatttgtcgacaataccaaaatagacatggggaagaagttcgtggtgaagcaggaggagaaaatgatgctgatgatgaagttgaagaaagtccccatagatcaatggaggacagtgaaaatgcttctgaaaatggtgatgtttctggtacggagtctgctgatggtgaggagtgttctcgagaacatgaggaggatggagatcatgaacatgataacaaggctgagagtgaaggtgaagcagaaggaatggctgatgccaatgatgttgaaggagatggtgcctcattgccatattcagagtgctttcttgtcactgtaaagcctctggcanaacatgttcctcctgtgttgcatgacaaagaaaggactgctcgagtcttttatggaaatg

SEQ ID NO: 226984 - DNA, 554 bp, Glycine max
ggaagccataggcctagccgtggccaaagccatagacaaaggccttataaagagtagagatgaagttttcatcacttcaaagccttggaacacagatgcacaccgtgaccttattgtcccagctcttaagaccacattaaagaagctggggacggagtatgtggatctttatctgattcattggccagtgaggctgagacatgatcttgaaaatcctactgtttttaccaaggaagatgtgctgccctttgatatagaagggacatggaaagctatggaagagtgttacaagttgggaatagcaaagtccattggcatatgcaattatggtatcaaaaaactcactaaactcttggaaatagccaccattcctcctgcagtcaatcaggtggaaatgaacccatcttggcagcaagggaaactcagggagttctgcaagcagaaaggaattcatgttagtgctcggtcagctcttggtgcttataagatattttggggctctggagctgtcatggagaatccaatccttcaagacatagcaaagggcaaaggga

SEQ ID NO: 226985 - DNA, 526 bp, Glycine max
aaatactaaggtctgccaggttcttatatgaagttatagccaaccataatgataataataatacaagacatcttaataacatggaattcaaatcttgcttattttcatagtttatatcccaaaacatagttttatccttgaagaaatacttaaacgtctccatcccaaagttcttccaaggtcttgcaagacccattttcagatagccatatgtcccctgtgtattgcctgcgttgtggaacctgactgatcctctctaaatcctcttcactcagcacaaaatcaaatatgtccaggttctgcttcatcctctcgctgttggtgcttttagccatggcacttgacccttgttggtacacccatctaagtgcaacctgagctatggtcttcccttttgcctttgctatgtcttggaggattggattctccatgacagctccagagccccaaaatatcttataagcaccaagagctgaccaagcactaacatgaattcctttctgcttgcagaactccctgagtttcc

SEQ ID NO: 226986 - DNA, 299 bp, Glycine max
ccaaaaccaaaagaacccttgtaccctgaaactgaacacaagctttttgttgggaacctgtcatggtcagtaactaatgagatattgacgcaagcctttcaagaatatggaacagtggttggagctagggtcttgtatgatggagaaactggaagatcacgtggctatggtttcgtttgctattcaacaaaagctgagatggaagctgcccttgcagcattgaatgatgtggaactagaaggacgggctttgcgtgtaagcttggctaagggaaaacgtgcttaaaggtaaataaaaat

SEQ ID NO: 226987 - DNA, 544 bp, Glycine max
  unsure (1)..(544): unsure at all n locations
tattcctccggcacctcccttctcggctggggagacggttactacaagggcgaggaggacaaagacaaagtcaaaaccaaagcccccaaaacgaggtcgtccgcagagcaggaccatcgtaagaaggtcctccgcgaacttaattccttaatttccggcccttccgcttcagctgacgacattgacgaagaagtcaccgacaccgagtggttcttcctggtgtcgatgactcagtccttcgtcaacggtagcgggctgccgggccaggctttttttaactcgagcccggtctgggtcgccgggcccgaaagactttccgaatcggcctgcgaacgggcccgccaggggcagctcttcgggctccagactcttgtctgtataccgtccgcaaacggagtcgtcgagctcgcctccgcggaggtcatttttcagaaccccgatctgatgaacaaggtgcgtgatttgttcaacttcaacaacaacaacaacaacaacaaccctgaaacgtgttcctgggncgtgaattgcgttgccaccaccgatc

SEQ ID NO: 226988 - DNA, 507 bp, Glycine max
atcacaaattaaatccacttggacttcatcagagatattactatcccctggttgatcattcagcttcccaaatcaaattacctcaataaaattaatttagtccaagctaccaaaaaggactaaccaaaaataagaacactaatttacatagaaagctacagctactgctaccaataatagtacagaaggaactatcgtagttcatcgccaactttggatgatagtgccgacagaagctgttcctgcgtgtaaaacttgtttcccatgttcaccgtggcttgttggatcatcaaatcattcaccacagacacgctggcgtgatgcacttccaagtcaagatctttcaatgctgccatcaacctggctgcagggtggttcttcttgctgcattggattcttaccattgcatcccaaccaatgatcttcacctctaactccaaatcagcgagcttgcttgttgtcttctttggttctacgctattagatggaggcggtcctggtggtggt

SEQ ID NO: 226989 - DNA, 429 bp, Glycine max
aaaagcaccgttattttccgatacatatacttttccactgtgcagaaaaaaactcaacatatttatttgtttaataataccttagaagcagttggcaacaaaacattacttgagtatccttccagttctgccttctatacaaaggtgtgaccttttctccagaacaaaaggacaagaggctcttgagcaggtaggtggtggtggtagccaagtgtcacggacacatgcaacatgtcacttatcagcattgattccaaatatcctgaccttgtgcatgtgggggaactttgcaacaaccagcacaatcactgcaacagtgttgaagagcagcattggattctgatagtctgttgtgtgtgaggctatcaagtacagcaccaaaggaacaactgtgagaaacttcctgttacgagtaagctgcttttcatt

SEQ ID NO: 226990 - DNA, 381 bp, Glycine max
gacagcaaaaaataactctgatgttttaccataatcaagaaattcatacattgtatgttgcttgctcccaacgagtactcaaattaggagggtttaaaaaatggtgcgatcgacggcaatgaataaaaacggcactttgatttgtaataaccagttcagttacatctgaaacagaatgctctaatgacattataacttgtaaattgttaatatggatggtaatattctgctctacaattcaagggctgcaaaggttctttaaatcctcctccttagcataccaatttggtattattttggaaacatgaggattaagatccttgtaggagttcctaattgttccttttgcaacgcctgtggcatgtgatatatctctgaaag

SEQ ID NO: 226991 - DNA, 519 bp, Glycine max
cattcgaattcattttatttatatattaatattatattcaaatgaaataaaaagatattaaaagatactaattataagaatttgaaagtgaaattataaagttattaaatgattaatcaatttttttctacctgttcctgtagtaaaaagagttccatctgttcttgaatagcttccttcaaaaggacttctgcttccccagtgaatgtcttggtagaagatatgatttctttgaattgaggtttattcgtgtttaagtaagcacgtaactcaacaagaaatttccttacctgtccaatttctaatgaatcaagataaccattcgttccagtataaatagttattatctgttcttccacggtaagaggagctgattgggattgtttaagcaactcgcgcaatcgttgaccttttgctaattgattttgagtagctttatcgagatcagaagcgaattgggcaataagcttctaattctgcgaattgtgctaatttcaattttaatttaccagctacttg

SEQ ID NO: 226992 - DNA, 374 bp, Glycine max
ggggggctcacaaagcatagcccaatttgtttcatctttgggacatgggctacatgatatttttattacagggtggttaaaaaagaccccctaaattttttatcccaatttacataaaacccaatccatacccttttttgttttgaaggatccaaagcttatgcaaatcccttcctgatctgctatttggctacatcaactaactgatgggcgaggcaatcttttggcaatttcctgggaaaagcaacatttcaatgcttaagcctaatggaatggccaacaggggggataaaattcataatgatttttcaaaaaggggggatgttgagaatagatgaactcctctttgcttaagggcattcacaacaattaga

SEQ ID NO: 226993 - DNA, 528 bp, Glycine max
ggataacttgatattattttattacatacatgcatagatagcctgctctcaaataagtcggcaggaacaaagatagagagattcaacgatcttcaaatttcacatttgccagaaatatataacagaaaagaggggtatgggatatgagttaagttttgatcacattcaactacactatcccaaaccgttactcttaagactttgaacttcacttgtactctaggatcatgttgttctcaggagctaatccaacacaagccctcaggatgttttccagcatagctcgctgctttgacaacgcattcaccactggtgtacccggtggaaccagaggggccttggtcaggtaactaaggatggtcgcaactgggtggaatgagtggaattttccctcattttcagctttaaactcgattcgagtgctgagctcagcaagaaagaccaagtccaagataataggagcagcttacagtgaattctcacatgtgttgggcaacacattggggttctttccacccatgaatatct

SEQ ID NO: 226994 - DNA, 528 bp, Glycine max
atcaatcaatggaattagactccttttgatggtttggtgggtgttgtagttcctctttcacgaaccattacgggaaggccaaaactaaaagtggcagtgagccccggagagaagcgagggttcccaaaagacaagggtgccagcaactcgatgtggaacttcctcagtaacgaaactgccacactcttcatctccatcagagccactttcttccctacacacaccctcaaccccgtttgaaaaaccgggtactcgaacggattcatgggttgaaacaccccatccttcagccacctttgtggccgaaactccaaacaatcacaaccccatatcttctccaacctccccatcgggtaggggtggttagtaaccctagttccactctccacttttgtcccatcgggtaacccatcgtccttcaagcaaaactctgagtcaaactgaatcggtggaaaaagcctcatgctttcgtgtgtcgcaacttgcaaatagtgccattgcttaagctctttcaagcttgtgagatcc

SEQ ID NO: 226995 - DNA, 531 bp, Glycine max
ggaatacttatatgcattaaagggtcataatgctatctgcagttgtgtccatatcatatcaaggcactcaaattacattggcaaaaaaggtagatctgtagcacacatcctgttataaattacaaagcgagattgtcttcatcacgaaggtgaggtatagcaaacagatcttagcactctcatattccattaagagtgacaacaactcttcgtgaggtaggatgatcccgatgctcgcagagccatataccctgccatgtccccatgttaagcttgccatttgtaatcggtatcgtgagtgtacaaccaaacatcgatgatttaatatgagctggcatgtcatctggcccctctagagtatgcttccatggcgcagatgacccctcgggaactatccgattgaggaaggtttcggtatcctcgcgaacatctgagtcataattctcattgatggtaagagaagcactggtgtgctgcaagaagagatgagctatgccacaccttgaagccggagaggtcttgctcaatttc

SEQ ID NO: 226996 - DNA, 466 bp, Glycine max
aaaaatcaatatgaatttaattgcagtaaaattacacattacaaaaataaatacaaatctcatctgcatactttgtctagtcattccataagaaatgtgtcagaactaaaagcatttcgtatcacatagccatgcatctctttcccataatggagtactgttaaatttgcagaagcagagagagcataagataggctcacagaatcaaacttggctcctctcattcccatttgactaaaaagatcaatggccatttctggtttcccattctgtgagaagcttgaaatcattgagttccaacaaacactatctctttcgaacattcttctgacaaattcataagcaagatccagtcttccacattgtggatacatataagtgatggcagatccacattaactttactttcccaatccttttttagaatggcacaatgcaacttttccctaatttcagagcagcaaaa

SEQ ID NO: 226997 - DNA, 292 bp, Glycine max
atctggcaaatagaaagagggcacattagttatttattgaaacagggaaatgtcaggaacaaccttggatttctttgacatggaaaaatcctggatttcaacttacaagcatattcttttgaaacgaaattccatccggtaccactttaatggtaaaaaggttgggcacctaagtttcctttagaaaatatgagagggtcacacttcatcaaatttattttgaagcaaaaaggctttcatagtggcctttgaaaaaggcaaaaactgggtttttagggggaaagcccttttt

SEQ ID NO: 226998 - DNA, 498 bp, Glycine max
aatgcaatatttctaattaagattcctctccattatagtaatatatttactgcagaatacaaatgaccaaacacgttaacaccaacacacgcacattttcatacgtatactcaaccaaattcaccgaattataatagtaacactttaaaaatgttacataaataaaaccgacacttgctcacaaaggaaattaattaaaccaaacaaagccacatgatacaaattaactccaacaaccagatcataagcttatataattattattgcatgcatgcaagtggtttgaaggataatcattgagcaggatttgccaaaacgtagccctcaatggccttgaaaattccagcacccctggcctttgtttcatcacgcactgcatctgagagtggtgcatcgtctttggtgtggaatgtgagagtggccttggcgatagagccattaccatcagtgccaggaaccacctttgtttggaatgtaaccttctcaaactttcatgca

SEQ ID NO: 226999 - DNA, 573 bp, Glycine max
gaaaaaggtgcttatactacatcgatccatcaaaggtactataacgcaaagaaacctcacactctaagatacattttatgattaactcatttagctgaaaggcatagctagaaacattgtttttatctacttcctaggtcgaaccaaaaaaaaatcaaaactaaaaagggaaataacaaaggtttcataaaatcagatttcatctgttataggaacatcatctgttacccccaactacaccaagaggacaaagaacttcacaacaccaaccccaaaacaaccctaccccaccgaccactctttctcacttcctaccccctctcttggccgtagcctttttggccggagactttacactcttcggtttcacactcttcactggcgttttcttcgctgccaccgcaactttcttcgccgcgggcttagcagcaggagctgctttcttccctggtgaagtcctcgtcgacgtccttgaaaccttgacgggcttggctctgggctttgccgcgggcttggcaggaacagcctctgtttagcagcaggcttggacttgcagctggttaacggctttgg

SEQ ID NO: 227000 - DNA, 564 bp, Glycine max
gagagaaagctttttgctcattttctttcaaatacagattacatgaaaaataacaagtgaacgctacactgcataccttggacaataagtgaacttacctagcaaagaccagcacaaaacataaataaaaaaataagcgaagtaaaagtgaagtataaaacgctgacattccacgtttctggaaataagacaagaaaagaaactcagaaaaatttgacttcggcgataaacaagcggaagaatcacagaatctgagcagctgtgttcaatttttcagccaagctaagctgcgttcttgtgatactagataaatacagcaaaagcaagtgatcctgcaaactgtcattcacaagcttatcaaaaactgatggggacaatttgggaagggaacctacagcttctgatataaatcttccgattttgttgtctggtgccactcgttcttccacaacatggtcaacatatttgtagatgtcatcaatcaagactagcagatgttgcattgatgcttccatcccttctaaatctgagggatttttgtcaactgcagttgccttcagcata

SEQ ID NO: 227001 - DNA, 472 bp, Glycine max
agcaacaaaaactcacaaggcagaactgatcattcacaaatcaaaatgtttcagagtagcatgggatccgctcttgttatctgtacatattgactcacattttacagctagcgacaatcgatggttttttctacaaacttccttggttcccaaaggcacttcgggagaagttactgcttgcaaatgacatggagtcttctttcatgaggcgcttttgcttaatcctcaatatacccagcgaaacctcacctatggaggggcgtttcctaggtgatttgtgtaaacatttgtgtgcaattttagcaagctgcctcacttcttcaagattgcattttcccacaagttgtttgtcaagaattccatctacaccatcataatccattgcagcaaggtggatatattccatcaaattttgatgtgggtggatggcagtgatgagttcaaaaattattataccaaaactgttaatgtc

SEQ ID NO: 227002 - DNA, 417 bp, Glycine max
aaacacataatatatggaaattagcatataatggaaactaaatcacatcaatggtcaatgactgaaaagcactaaacataactatgcagtattatttatggtagttggaaatattagcatctcttctgacgtcttcaacctaaatgcgtgtggaaccatttctgcctagcaagacatcatgacatgatcaattgcttgtagtgcttggttggagaaaaatcgcacgtcaacatcaggatcctcactgagctcaaccagacatggacgaatagtctttttcacgaccgactgatcaacgatggggaagatggactctaatacctttgccacattgaactttatgttgggcactctgtctttagatgcagcaagaacaaccggtaacaagtttgaacaagagaattctaggcccatcac

SEQ ID NO: 227003 - DNA, 431 bp, Glycine max
aagcacaaaagacgagggtaacttgatattatggtattacatacatgcatagatagcctgctctaaaataagtcggcaggaacaaagattgagagattcaacgatcttcaaatttcacatttgccagaaatatataacagaaaagaggggtatgggatatgagttaagttctgatcacattcaactgcactgtcccaaaccgttactgttaagactttgaactgcacttgaactctaggatcatgttgttgttaggagctaatactacacatgcccttaggatgttttgcagcataggttgctgctttgacaacgcattcaccactggtgtacccggtggaaccagaggggccttggccatgtaactaaggatggtcgcaactgggtggaatgagaggaatttttccttgttttcagggataaactcgatt

SEQ ID NO: 227004 - DNA, 509 bp, Glycine max
agtaacaattgacaaattcttgttattgacaataacattggattttgaggatacatcattatgacaaatgacaacacaatagtattgaacccaagtgttgattactttctatctctctctcattctctctctctaattaacatcttattctgttggaaattatgaactggaaactggacatatgacgcacataactcttttgcttgcttaagtatatagaaacatgaaatggtagatgtatagagatctcactgagatgatcccttaagcttcttagcaatgccagcaaagtactttccttgatgaaaagcttgagccaattctaacttagttgggtgtctggaaccatccccggaattggtacctgcaccataaggggatccacccttgacattctacatcttaaacattccagcaccaaatgtgttaccaatgggcacaaaaattcatcccatggtgaacaagctgagtaatagatgtcaacggagtatttttttgtcaccttcttg

SEQ ID NO: 227005 - DNA, 449 bp, Glycine max
cttcatctctctaggtatcaactagagtaaaggtggcttttattaattttatttagaaaacaaagaaaattacaacaaattcattttgtatacaacttaaaatttgtttggataaattttttcataaataaaaaaaaattctataagttaaaaaaaattatacataagttaatttggtggagttctttcatatttggttctccaaatattaattttaacttatgcataacctaattttaacttagagaaatcttttatattttttcttcttattttttttcttctataaaagcttctatatccctaatatctattccatatctagcttttttggtttgatgactacaccttggatgacaagtccggtctttcacatgccaccttcatattcatacatagaaatttccatcttcgccgctttttttttagatgccacaaacttacctact

SEQ ID NO: 227006 - DNA, 411 bp, Glycine max
aggtcaaaattttcctcatgctggaatttccaattcattcatcaaactgatagtaacaccatactaatcaaataaaataaaaaaatccttataaactcaaaacatccaaatagtagtgatgacttgcagtacaaggaaacccaaaacatatgacctcctactttcccaaaatttatactcatttatgccaactattatgggaaagtgaaaaatggcaaccaagaaaattgttccaaaaaacaattgccagtagtaataaaattgaaccaaactgaataatgcctcaaaatccttgagatgaaatgtctttcttatgccacagctggcatgtccttgagccatggatccaatggcttgccaattgagtacacaatgaaaccaatcttacgtagcttttccacatccacaatg

SEQ ID NO: 227007 - DNA, 462 bp, Glycine max
  unsure (1)..(462): unsure at all n locations
aatattaaacaataattttggcatcataaattcttccggaataattatacaaaagtgaccagggaaaacccgatctgccagttgcccactgaataaaaacacacatcatattactatgtgttgtcatacatgcattgtaatgagtggatattccaaagcaattggtccctttatccctccttaatccttatgccgtaaatggcaccatcccttgtaaattgtaattgcttcttcagaaatagaattatacaaaggtagttgcaatatctatttgccaaactataaatgtaaagacccttcttcccaatcctagtagtgtcccaattgtatttacaaaggtgggacaagatatgtatatacaagtacaaccatggtacataatgtaacaataatcatactttggtctttactagngcacattacagggagttattatgcactgaaacccctttgcagagaact

SEQ ID NO: 227008 - DNA, 515 bp, Glycine max
agaggacttctggaattacatttcacaaatccatgcacgaactagaactgtatatacatcaggcactatttatcacatcacttgcaattctgcaattgaaaccagcttagaatcgtaaacaggaatatagttcttgaagactggcatacatgggttgagcagcctttggtctgtccaccattcccagtagaatatcagatgtggtgaggtaaggatcaccatagaagcgcaaattggcatccatcctggttgcaactatatttccttccaaagaaactcccacaaatgcacctttactgcaactgtaagtgtaacacatgccagagcctctgtcaccagcacgaatatctgcttcaagcactctcccaacaggccctgctgcagcactacaaccagcaccaagagaaaaatgcatatgactgcagaatgtttttacagctttcatatcacgaagaacaactataaaatccataagttcaccaccaatctgagcaccccatcctaaacccagggag

SEQ ID NO: 227009 - DNA, 496 bp, Glycine max
aataaagcaaaatgcacacatcccccaaacaaaacaagccttattcaacccaaattggtttcatatcacagaaaccaacaggatgccgccttcctccttactggtcccacccactcgaacaaaagttctacagaaataaaaatggctacaattcttctaccacaaatctgaaaagtctaacaccaaaaatcaaaaaaaggaaaattaaacaatcaaatccgattgataaaaccgatttttgtctttccctcactcacttttcagttgatcatctcaatcacttagtacctgtagtgagcaggcttgtatggaccctcaacaggcacactgatgtaatcagcctgggacttgctaagctgggtcagcttagctccaagtttgcccaggtgaagtgcagccaccttctcatcaaggtgcttgggcaaaacgtaaacctttttctcgtacttgccgggactcttcttctttcacaactcaagctgagcaatgacctggt

SEQ ID NO: 227010 - DNA, 489 bp, Glycine max
gcgttaaaaacaggatccattaatagaaaaataaagacaaaaaataattgtacaacttcaactactagctcaaacactcaagtctccaaaaacaggagaagatctacacccctgaagcaaataatcttttctttttcttaaaaaaaaagggaaaaaaggaaacgaatgaaaacagagtgcacctaaaatgaaactaaagcccaaaatttatctgtagctgtggtgatgatagttgacagggcgccatttaaaagattcaaccatttcaatcttctcgccttggcctccgacgcggagcattagatgcttcctctttctctttgttttcttcattctctgcaccaccttggttattggaagcttctgtgcgttctggtttcttctccacctttgcaggtttcttgccaccaaatatgagcctgatgaaaattgacacgaagacaaccacaaccgctacagaattccaatagtgagatttggctggttctc

SEQ ID NO: 227011 - DNA, 459 bp, Glycine max
gaattaaaaattttgatcgcatattaaattcccaagtcgtgttgaaatctcttatcaataaaaccatgaagccaaattaaaatatttctagttcacacccaaaaattcttcaaaagaaacttccgggaatctagcacgaccaaaatcataaattaatgaaattctaacccatcgataattaaatttgatgggaattatgatgtagcagtagcacacgtttcaccattaaaatcaaaataccaggtcaaagtttcaagtaacttaggacagaacgtaaaaaaaaactagataaaatgagtagatagctcggtacattaagtcacttaccacttgacctcctttaaggcatatgcaaagtacaggaatgttggatcagcagcgccgtccttgcagtaggcaaagaccaagcaagctttattacccatgcttttaccaacaaaaatatggaaaatctttaat

SEQ ID NO: 227012 - DNA, 487 bp, Glycine max
catgagaagtttttaaattctgtatagaaacactacattatggattatccaaatgaaataccggatccgacaaggagaaaaacctaatctaaagttgaggtattatatttccaactgaaatggacttctactaaaaggcacaggtaagctgaaataacattgtaatgatgggcagcacccatgaaactgactgagaatggcgattacaataataaaaaacagattgaggagtccaaactaaaagaactcaaagtccagatttttacccccagacttcatgttgtcagtacctgctatcctcttactagtgctgccaaccccaacaggatcaactggtcccacaaccttccctgctggtacttaattttccatcggtctcggttcttttggcggtgtggtgtacctaatcaatgcccagtttacaccttcaaagaagggatgctgcttgattcttagttgctacccttttaaaccccaagacgatgct

SEQ ID NO: 227013 - DNA, 470 bp, Glycine max
aaagcacacatatatcctctttctaattaaccaagagttgtggaagtaaatcacataagaaaaaagtcacttgcatatagaacgtttaattgtccacagttttccacacgagtaatagagaaaagtacagacacatatttttttttgaaagaaaagtattgattgcttttaaatgcattagcaggtgccactcaatgatgaccagtcatcactatagggtgtgcagaagaagcaacggtggtccacgattatgatgatcagaaatcacttgatccgacggcagatagtgattccatcaccaaccgggagcatgcaaatctcgatcctggggtccacagcgagggctttgttgagctccagcacgaagtccctgtagtacctaacatactttctaagaggagcatcagggggtgccaccacagatccgtttcatagggtgttggcgtgcccgatcacgcccccaactttta

SEQ ID NO: 227014 - DNA, 375 bp, Glycine max
acagttgataattatatatcagctccacaaattgataacaaacagtagtaacattaatgggacaatagagttcaacacaaaccaaacttattttcaaaggtcattacagacccattacacatcacatttgttcttaaaatgtttgggaaaatccaacatcgaacatcacacagaaatcagctccagcttaaaaccccccacgaagacgcaacaccaagtgcagagttgactccttctggatgttgtagtcagcgagggtccttccatcctttagctgtttgccagcaaaaataagcctttgttggtccggtgggattccttccttgtcctggatcttcgccttcacattgtcaatggtgtcggagctctccacct

SEQ ID NO: 227015 - DNA, 450 bp, Glycine max
actgaaaattaaattactttgatacaacagaaccaatggctcttttaaacaatacaaattatctcaagtccttataaaggaatgtttataaacaaatgcaagccatatactcactgctttgtgagtatttatatatatctctctctcttccctactcaatgtacaaaatgcttattgctttgttaacctctcaaggacttcaaagtagtcaggaaatgtcttcctggtgcaaccaggatccttgatggttactggaacatccccacaagcagcaagagagaatgccatggccattctgtggtcatcatatgtgtttatagctgtgacattcaatttctcaggtggagttatcacacagtcctcaggaccttcttcaactgttgctcctagcttcctgagctctgcgcagattgctttcatcctttcagcctcttttaactcttccaactt

SEQ ID NO: 227016 - DNA, 560 bp, Glycine max
cttgtcaaaatcaatggattcaaacagtgagaaggaaatacataatatgcacatccacttctacattgcaaaaatatctttacattgttatcccattaccagagaaaaaaaacatggccagggcttaccaaaactgattacagcacaacactactttaatttgactccaaacacatatacaagacagactaatcactaattatggcatgacatgtttggtaggggactaaaaatgaaagtgaaaaaaagtatcacttcagtttacccctacaccaaactggtcccaaaattgaatatttttctgtgggctaagactattagtgccatgaagtacattcagttttgtgaggcagaacatctcatccttgctggtgaaaacacagctgtgagtctagcatgatcagaaagagaataatcttctggccatagtcctttctccacttcacgcggatacagcattgcattcttcaccttaaaaccaatagcttcttgctcctgttctgtgttacaatcttccgtgcaaccattcagattttccacacatgctctggacatgtaga

SEQ ID NO: 227017 - DNA, 342 bp, Glycine max
ggttcaaatgctccctcaccatttcaaaacaagaagtaaaaacagactacttgaggttaatatcatacacattaacttgcctgaaagttgaaacaaaaaaaaaagttcactagaacatagtgcaatcatgtagaagcgaacaataaggaataaatccattgtaaacaagaattcttctcaactgtgtcatcccaatttagaacaaaatcttcctacacttcctctactattcaaatactctgagctctatggttgaatcacaaataggggagtgtcaacgcttacagacttggcatcttccgcaacgatttcaactatagttcctgactgaccagcttcaat

SEQ ID NO: 227018 - DNA, 514 bp, Glycine max
agttgtgtaataactttggctaattcaatgccttaggaatgttccatgaaagatgtagttttttttctagataagacattatgaacatgaacactcaggtagtgggaaaactacagccatgcgggattcttcaaagcagtgacaacagctttaacttgaaggtagcttctaaggctgtagattccccttactctcccttgaccactcatcttatatccaccaaaaggtattgctgcatcaaagacatcatagcagttgatccataccgttccagcttgcaatgctcgcatcaaggtgttggcagtgtccatatttttagtaaaaactccagcagccaggccataggaagttgcattggctcttcttatcacttcctctagatccttgaatttcaagatagattgtactggaccaaatatctcatcttttgctatcaacatgatgttctgaacatttgagaaaacagtgggttggatgtagtaacctttggagccaattttttggccaccagatt

SEQ ID NO: 227019 - DNA, 399 bp, Glycine max
gggggggcccgaaaaaataaaaaaatgcctttttttgactttggggttatttttgattttgccaattaaatttcccattcacagccgtccattacacatgagttgggccttttccaacttaaaagcaggggataacattggcccatgacccgacacatgccccccctaaaaatcataattttacatttttacattcaaaatacaaagacttttaatttttaaaagaagaaaagagattaaccgatccttttaatgaaatgaaacccaaacccccaaacattggcttgatttttggtgttggtggtggtcccaacttgattaaacatgaaccctttgattgaatcacttggacttgaagggaaaggcccttattaccacctggtggtaaagtgcttcaaa

SEQ ID NO: 227020 - DNA, 524 bp, Glycine max
aatggaaatttcagtgtcattaagaaaataggcagttcagaaacgcgtataaatggaaggacaaactaaaatagcccagtacatccacaattcataacgaagaacacgaatgcccaaaatctcagtaacattgagattagcattcaacaccttctccctttgaaaacattacagaagggaagttcaatgactaataagcagagagtatggtatgtttaattttgttccccgtcacctttgggtgcggcttctttaatttcatctgcaccatcgtcctgcatgtcagaggtccagagggtgaggttatcacgtagcagttgcatgatcaaagtgctatccttgtatgactcctctcccaatgtatccaattcagcaatagcctcatcaaaagcctgttttgcaaggctgcaagcccgatcaggagagttaagaatctcatagtaaaacacggagaagttcagagcaagacccaacctgatagggtgagttggaggcaactcggttttagcaatgtcctgagcggc

SEQ ID NO: 227021 - DNA, 577 bp, Glycine max
  unsure (1)..(577): unsure at all n locations
aaaacaacatagttcaatattgccattcagtttaggtacgtaacaggagcagcgaagcataaaagcaatgcatccaaattaaaaccacatcggtactggtacacatctgaacatcaaacacaacagaaaacagaccacaagaacaagaatctgaagtagattctagtagtcttcatcctcttcctggccctcaccagactcagcacccacttcttcataatccttctcaagggctgcaaggtcctcacgggcttcagaaaattcaccttcttccataccctcacccacgtaccagtggacaaaagcacgcttggcatacatgagatcaaacttgtgatcaatgcggccaaacacttcagccacactggtggagtttgaaatcatgcaaactgccctctgcaccttggcaaggtcgcctccaggaacaacggtaggtggctggtagttaataccacacttgaaaccagtagggcaccaatccacaaactgaatggtcctcttggtcttgatggtggcaacagcagncgttacatctttgggcacaacatcaccacggtacatcaggcaacacgccatg

SEQ ID NO: 227022 - DNA, 534 bp, Glycine max
caagcgacaagtaactaatacacagattgaataatttaatttctttatccacaaagtagttggtatatacacgccaacatgtcggttttcacgcataataaatgaacatgaactaaatctccaacatataaactaaaaacacacttgtattgatgagagttaataaccaaagatactcaataaaaattaaccatttttttttgtttcccacaatgcttaagatttaaagcattagaaacaaccaaggagtttttttggagctgttccagttgctctatactttgcagcttgctcctctgccttaagaagatcttcccctttctttgcctcaattattgctcttctttcttcagcttccttgtggattgtagcaattttgttttttattttctctgcagcttctgcctttttcttctccagttcttcttcaatctttttcaggtccgcctccactgcagctttcttactgttttcccatgcagaaactgatgaaagctttttgtgagccttgttttcagcttttgattttcactt

SEQ ID NO: 227023 - DNA, 402 bp, Glycine max
gccgccacctccctctccttcttcctccacgtccgcaatagccacccctacaaaaacctcccggcattcctcttcggcgagtccatgggaggactcgccacgctcctcatgtacttcaaatgggaaccggacacgtggacggacctgatgttctacgcgccactcttcgtgattcccgaggacatgaaacccagcaggggacatttgttcatgtacggtctcttgttcggactcgcccacacgtgggcggccatgccggataacaaaatggtcggaaaggccatcagggatcccgagaaggtgaaggtcatagcggagaacccgaggcgctacacgggcccacccagggtggggaccatgccggagctgctgaaggcgacacagtatgtacaggataatttc

SEQ ID NO: 227024 - DNA, 532 bp, Glycine max
  unsure (1)..(532): unsure at all n locations
agcattcaaatgcagagtatgtattcatcatgtaaatacaacacaataacaagtcatccataagcagcatataggatttcttgagaggtacatataaagccagaagaaaaatatataagatacttttcttccacagtgtctctagtaaaaggaccctaaaaaaataaaatatgacatcatagggttcctgaaaccccactacaacatatttgtcagaatctagtgcccacttcaatctttctttttatctttcagaggtcctctgggtatcttgctcaataccttcgcatcaaacactgcatattgcttcttaatctcggcaattgctttctcaccaaaagagtcgacatgatcttcatatttctcataaagcacaggcacagtgtgaagcaaaacaaaagctatgtagaacaaggtcaagaagttggcccaacaacccagaatagagaaaacccataatccagcaatcactgataagaacttcttgagatcccttccagaagcaatatctcctaacaccgcanaagcccga

SEQ ID NO: 227025 - DNA, 529 bp, Glycine max
aaaataatgagtttatgttttcttttattcacaaaattcagaatccatatgagacatttaatatatgtttttgttttcctctcttttgggagggagagatgaaaaagacaaaataaggggatgctaatctccccgggaggaaggtgtccagggtgtcatgtccatagggtaactccccaacactcgcaagaaagacgtgaattcctgcacctccgccaacgcgttctgtgccctaacctcagccatggaggcctcaaaatcaacgtagaacaagtactcgaagtgcttcgctgttcccacgttcgcgtcatccaccagcctaatcggacggttccgatgcggccgtgactcgatcttcgttagactgatgttacggaacgcgaacgcggaaagcactttgaagagcaccgaagttcccttgtcgtgtgcgaaaacaatgctcgttttgaaaggacggtccgtgcgcggaatgataggctttcttgccagcatcacgaaccgcgtgacgttgctcggatcgtcttggatt

SEQ ID NO: 227026 - DNA, 501 bp, Glycine max
atcaaaagccattttgaattatttcggtaaagcgcttcgacatgcatgcacttaattattttgtgcgagtaaaataccactacctttacaacataaaagttgtaaacaagtaaacaacacatacgcatgatgacgcatacccaatatatactaatcttatctattccatgttcttagtcttagctgaataataataatattaatacatcaagcaaagtcacttttatcattgatcaccaccatctttgcttttactttcccacaaacaaagtcaaggttgtaaaacacgggcaacattgcaatagagcacaagaaaaccagcactggcccaaagatccaaagcaaaagaggaagtgctgagtagaagatcctgttcccaacagtgttcaaaaaagatcctttctccaaaatctcggttaagtactctggggtcaccaatgacattgcatcttgtggtgcgcaaatgacgatggtcaattggttgaggaacctaattgagag

SEQ ID NO: 227027 - DNA, 483 bp, Glycine max
gctggatgaagcaggagggtccgatgaaagcagccagaagttcagagagtcaatgaacaagttcatgagaatggccgaggaggagattctaaaagtccaagcacaagaaagtgttgcactatcccttgggaaggaagatcacagagaatttccatggaaacttgtcaaaggaagaagctcatccatttagaatcttcatggtagtaagagacttcttaacagttcttgatagggtgtgcaaagaagttggtatgataaatgagagaaccatggttagttcagcacatagattccctgtcccagtgaaccctatgcttgcacaaccccttccaggacttgttggaaagagacaatacaattcctcagatgatgatgataggtcatctccttagctgtgtatcactcatgtcaggctgacatgttttggcttgatcttctggtaggaaacaacctggaaccaggcgattttgaagggtctggggg

SEQ ID NO: 227028 - DNA, 421 bp, Glycine max
cataacacaaggcagaaagcaagctcatcctagagttgtaaaaatggcagcagcctcctccatggctctctcttccccatccttggctggcaaggccgcgaagctgggcccatcagcccccgaagtcgggagggtcagcatgaggaagaccgccaccaagcaggcctcctccggaagcccatggtacggcccagaccgcgtcaagtacttgggcccattctctggcgagcccccggcctacctcactggcgagttcccaagtgactacagctgggacactgctgggctttcgggcgacccacaaaccttcgccagaaaccgtgagctcgaagtgatccactccaggtgggccatgctcagagccttgggctgcgactttcccgaactgtcgtcccacaacggggtcaagattggagaaact

SEQ ID NO: 227029 - DNA, 518 bp, Glycine max
gaggggaattttaatttattaacacaaatttaagtacatgtaacaaatgaaaactagaatagaataattaaagcgcccccaaaacgtatggggtagggaaaatatcacttttccaagagctccactccacacaacataattgagccttttatatggtacgcaatataaatacataaagtactatatatcccactgcaaacaccttcgggagataatatgagacacatttatggttgttgttccatcaggacttggaggataatatggggaatcttctgcatattcagttggcattgacatccaatgcagactaggtttccaatctacttctcttaacctttaatatttccttcaccactaccttgcttccctctgctgatagatgaactccatccgtgaagctaacgtctaaccaatcctctcttgtctgaattgcagaccacagattaatggccttgatattcatctcctcacaaagctccattaacccatctgcatactctccacaggattcattg

SEQ ID NO: 227030 - DNA, 412 bp, Glycine max
aaaatagattgataggggggatatttttgctaagctatcatatggagagagccagatgcttgacaaggcattctacgaggaggaggtgaaaaggctttgcttggcttttgagcaacagtttcattatgctgtgttcttcgcatatatgaggttaagggaacaggagatcaggaacttaatgtggatttcagaatgagttgctcagaatcagaagtccagagttcatgacagagctggcttcatattttacttggatggctcgttatagatagtatgttcgttgggacaagaagcctactttctgcattctccatctgaattggggattggcagacactacacagacactgtgcggtagattgagatagaattagttgatcttatgctgataagagcttctgtcatatgaaag

SEQ ID NO: 227031 - DNA, 534 bp, Glycine max
atagacaaaccaaatgcttaatatcaacacaaacacgtgtacagaaaagaaaccactcttcaagaaaacagaaaataagaaaaactaacatattggaagaggtgccccattccactccccaaggcattccaaaagtggatcaatgagcttcccttggcacaaagcagtgaacactttgtcacactcttcacccggtgagataaccctttcaccagttagcaatgctgtccccaactcctctctcacaaacttgtacaaggggtaagacctgcattccttgatcttgtttggaattgcacattggtcattctcatatgcaactcttgcaccttccacttccttaggcaaaagggtcttcaactcttcctcaaatgttgcaatcttttggaagattgatgtgtttgtgttcttctcgttctctccattggccaatgcatagtccacaagcacttgccttagcttttgcatcaaagggtatgttccactgcaggggtcatcaatgtatgcaaatgtgtactccctatcaacaacctt

SEQ ID NO: 227032 - DNA, 522 bp, Glycine max
ggccagggagcggacacaaatttaccataaagaaactactacatacggcacctaactagccaacgttccaaaatttcgaaaattcaaaaaacataaaacatagtaaaaagactgtttctccaatcattgtttctaaaaacgtaacaggcaattaagtcagatttaatcaacttcttccatcttgctaccctcagcatctgcatcagcgtcctaaagaggaggcatgtcagcatctgcttcaccagcatcttcatcaatgctcagtccaagcttcagcatcctgtgaatcctgttaccgaaagtgttgggatcatcaaggctgaacccagaagttagaagagcagtctcaaagagcaagagcacgagatccttcacagacttgtcattcttatcagcatgtgctcgctttctcagctcctccatgatggggttctcagggataatctccatcgacttcttgcttgacatgtatccagccatgctgctgtcccttaatgcctgtgctttcataatcctttccat

SEQ ID NO: 227033 - DNA, 558 bp, Glycine max
aaagtaaatatcatttattcaaacctaaagaaacacaataacacatcatcacaaactcatgtaaccctgccaataaaataaaccctcatccctaaactccagcaccagcagcagcttgctcacttcaatacacaactcctagaatttctcatgtcaccacgtggtaagcacgctgatgtggagccaagtgttgtgctcacacgtaggtataccctccataatacaaccaaagacttaaccatcatataataataatatattaataataaagtaaactaaagaaataaataaaaaaaaaagcttttcaacatgacatgcaaaatggtagacctaatgatccccacaactaggaccatttttaaacttgtttttctcactcacactgtccataagtctaagcttcagttttctcaacaggaacctctactggggcttccactgtctcagctggtttgttctcttcctctgagggtgctgctggtgctgattctgtttctgtttcagcagtttctttaggctcttctgcttcttctttcacttcttcagttttctcctctg

SEQ ID NO: 227034 - DNA, 505 bp, Glycine max
ccagtaatagtatttaatattataagcagagattcataattcagattagccgaactttatacagaagcgaccaattaccaaacattaaaaaaaaaaaaaaaagaagcaaccatgagcttaacacacccatcacaagtccaaaacacttgaacttgctgaaaggcaagacatgaccactttattctaaggatgtttgtttaacacaaaacaccagagtgcacgaaaaccatcacagacataatacataagtttttagctacacattaatagtttatcattattcctaattaagggctatctctgcttgaagcttgctctcccaacacctcacttgcaagtgcaggggttgcaggagcagtttggtccacatttgcagccatcgttctcagcgggcacacccatttcagcaccctcaaattgagccttaacaggtgccactcccatgaccaaggtctcggtggtggttgactcagtgtagcttaagtctgggtacatcttgcagcct

SEQ ID NO: 227035 - DNA, 507 bp, Glycine max
atgtcaatgatatatgttaattttattcagtctcatatctagctaaataattagacgagaactccatgtacgtttgacgtcaggtctatattgaggtgcttacaaataaacatctttttatacaatattccgatctgctaacacagttattttatttacataatatgtcctgatcagagttccctgcgatgagtattctgaggcaacacgtcaatttaatagctgatacattatcactcccagtccgtgtcgaagaaacccgcatctttcatttcagaataatacacattttccaaatggaaattttcctcctggaaaaagtctgctaggaatgttgtatacaaaaagggaagataaaatgcatggtaaaagacaacattgacacgatacaaccagaaagcaaacgcagcatgggtaccagcaaggccacaagcaagtgtcgcaatcgcattaaaaatgaacatgatagcaacatacttgtaaaaggcaatttttgcaggcaacgtt

SEQ ID NO: 227036 - DNA, 364 bp, Glycine max
aaatgaaaccaaaaaaattttgggaaaaaaagccaaagttgggaacgtccaaaattaaatttccccgcccttgccctaatcaagttttatcctcataccccaattttttttggaaggatgggtacttttccatagcattttctttaaacacttccacctttttctttaagggggtaatttttgttaagaggacctttgtttttttggggaaaaaaaagccttttggattgacataggtcccaggatttggtaaaagggggttcctgagaaattccttatggcccttgggtttcacacaaacataaacatttcttccacttcctagggcattaaatatcccagcccatattgtcttaacaacctt

SEQ ID NO: 227037 - DNA, 525 bp, Glycine max
aataataataattaaatacattcagcctttcaagattaaaacacgtcacgggtgtttgatacaaaaccatgagagcaacctagttacaagggagaaaaaggtccaaaatcataagacaagtagctgaaattaacgttttggcatccaaatagtgccactaaagatgaaaagcactaggttgtgcctttgtcatccttgcttcaccatagggctcatcgttatccatcttgcggttgtttctatatgctgcataagcaattatgtaaacaatcacaaggatgatcataacaacaatgttgatcactgagaccttcctccaactcttcttgagacttgccagcacaccagccttgcaagaatcacaggcatagcaaagctgctcttggtcattgctccaccttgtgcaatctgcgttggttcccatcaatcctgatcctgggatccacactgtctcattctgatacacatatccacaatctgttgggggcttgcagcaaccagactgaataagcgtgaggtgggtga

SEQ ID NO: 227038 - DNA, 455 bp, Glycine max
aatgcataagaagccagagttcacaacatctcacactccgcgcatcctgttcaagcaattctagaccttctcggaacttaggtgagtttcttgcaactcatcatcatcctcataaactcattcaagtctataaagccatccccatttttatccacccccatcaccattttcttacaagcactaaggctgcaactttcccctaggcttttgagaacttgtgacaattcctctgcactgattttcccatcgccattcaaatcaaacacttgaaaagcactcttgatctccgtctctttcaccctctcctccacgttgaacatgtccatgaactctttgaagtcaatgaagccatctccatcagagtccatcacctgaaaagactcatcagtctcagtgccttcgattcccaccccattgttctcactgctgctttgtactcttcgagggtaatcttg

SEQ ID NO: 227039 - DNA, 384 bp, Glycine max
  unsure (1)..(384): unsure at all n locations
agggggatagattcaactctacgaanaccancgaatgcacgcgttcctcacctacgaattctgctaaagcgttatgagattttttgggctcctatttctaacttttgtttcaaaaaggctaacttggcaatgaccctttcctgtatgaccatcgcccttgaggtgggaagccttttcgacatatcaacgtattgccatgagccaggacctatgtatgaattcccccggaataacatgaatttttactgatcagagaggacatcaaagacacacggatcctaaccgagttcctcatcctgaaggggttgacccttcaccttatacttcgcttccttggtggcatgctacatgcttggaaaactctaactggcaaaaacattaccc

SEQ ID NO: 227040 - DNA, 432 bp, Glycine max
aacttgaacactctttttttgatattgatattaagagacacattggttgggcatacatacaaacagagagtacatgtttttagttgatcacgtaaaaaaattcataagaacatacaaataacaaaatgggggggagaggagagaaacacacagagtaagagacgcggaaagttatggatattaaacatattataagggcaacgctcaaaaaactttcagcatacagcagcggtatgaattacttacgccttataccacttgaggggtttgaccacttaccatgggatgtaggggcttatatttctagcgtgcataggctgcatactttaaaaacctgttatttgcacccctctcgagatcaacgatgatggggactataccaggtctgaaatcaaagttatgattctcaatgtagagaatgtccttatcatg

SEQ ID NO: 227041 - DNA, 465 bp, Glycine max
gtgaagttcaacggatgaaggattataattatgcataccaagggtacaagcgtagtttgatataatccagctaactcatactcagaatgaaccagttaaaaacttatcagagtataagaaaagaactggaccattttaaaaaacaactcttctcactttgtgcaaataaatgatcactccaacaagagaataaaatgaaaggataacaaaagctagaatcaaagggttacaatctgcaatgcattgtttccagacaaatcgtgatgatagtagcctttcccttcaataaccctatctatcgaaacagcttagaagcactttgtgtgcacaattgatggaccagattcgtcatattctgcctttgcaatccacatctgctggaaggtgctaagatatgccaagatagaaccaccgatccagacactgtattttctctaggtggcgctacaaacttgatcttcatgc

SEQ ID NO: 227042 - DNA, 454 bp, Glycine max
aaaggaagcttaagtttacattcacacaataataagtacacaatctcatggttatgaacctaatgtcagagctacaagagtaactgtttcggtacacatacaaggcacacaggaaattgcagtaccatctgcaatacatttcttattcataatttatattctaatcacaattcatttattggcagctccagtcattcatagcttcattcatgcatccaacaacttcagcaagtccttctcaatgctcagaggagaagttgtgggtgcatagcgatcaaccacatttccctctttatgcaacaaggaacttggagaagttccatttgataccatccccaaagaggccacctttgcttgattttagatacttgtacaggggagcaggtttgtcaccattcacatcaaccttgccaaaaacgggaaactcagccttgaagcgagtacaaacaaactc

SEQ ID NO: 227043 - DNA, 523 bp, Glycine max
gaccaagaataacaataataacataacacatatacttgctagtaacaggggtatattttgattgaattacagatacaaattaaggcacattgccatttcttttgttacatagctgaaacaggtatacataccatagcattagcagcagcaataaatgatgatataaattatcagcaatacaagcaataaacccaaattgaattttgtatcagcacttaggtgtggccttcatgaaatcaagtagatgggaactttatggtagtggtaataaaaataggatatggaagcttatattaaattatatgtatggggacagaaagattactcatgagcaaagtcagtggataattgacaccaccaatatcttgatgagccaaattaaatgtctcggtctctggcgcactctggagagacttgagggtagcgtttgcggtcggagcagtaattgtagatggtgtatttttggcgaacccaggtgagtttttgccactgagcagcatcaaggtcacggaactctggttga

SEQ ID NO: 227044 - DNA, 549 bp, Glycine max
gaagaataaaaaacccactaatatacgccaattcactggattgagaacaaaattcaaacacaatatgccagcatacagttgataattatatatcagctccacaaattgataacaaacagtggtaacattaatgggacaatagagttcaacacaaaccaaacttattttcaaaggtcattacagacccattacacatgacatttcttcttaaaatgtttgggaaaattcaacatcgaacatcacacagaaatcagctccagcttaaaaccccccacgaagacgcaacaccaagtgcagagttgactccttctggatgttgaagtcagcgagggtccttccatcctctagctgtttgccagcaaaaataagcctttgctggtccggagggattccttccttgtcctggatcttcgccttcacattgtcaatggtgtcggaactctccacctcgagggtaatagtcttacccgtaagggtcttgacgaagatctgcataccaccacgaagacgcaacaccaagtggagagttgactccttctggatgttgta

SEQ ID NO: 227045 - DNA, 442 bp, Glycine max
  unsure (1)..(442): unsure at all n locations
agggacagagtcatgacgtctgctcgcgganaccggtacggaattgaggtcgggagctacatgctcactagtccgcggtcgtcctttttttttttttttagcttattcattagttctcattcattaatttccatggggggccgaaaacagaaaccaaaaattctggatgatgaaatgcttataaagcaaaaacaaatgggaatgtagtttaagtacaacaaacaaagtggggtggctacagatgctttgcaaatttttcaatgacttaaaattctgggggcttgtaggcgatgaacctgatgcactgcacttggtgaacgtttgtcaatccaatgatacggattaagccattggggtatgcaaacttagtctcttgaagcttttttaacacctgagaagcatccctgcagcctagcattggttgttttcacatgggccagtc

SEQ ID NO: 227046 - DNA, 549 bp, Glycine max
  unsure (1)..(549): unsure at all n locations
tggtngagatagcgaggtcagatngcgggaaccggtacggaataaggtcccggagcgacaagctcactaggccgcggtcgccctttttttttaaaacaacatattttattattgccatttagtttaggtacgtaacaggagcagcgaaacataattggaatgcattcaaactaaaaccacatgggaactggcacacatctgaacatttaacacaacagaaaacagaccacaggaacaggaatctgaagtagattctagaggtctttattctttttctggccctacaagacttatacccactttttcataatccttcttaagggctggggggtcctcacgggcttaagaaaagtcacctaatttcataccctaacccacgtaccagtggacaaaagcacgcttggcatacatgagatcaaacttgtgatcaatgcggccaaacacttcagccacactggtggagtttgaaatcatgcaaactgacctttggaccttggcaaggtcgcctacaggaacaacggatggtggctgggcgttaataccacactt

SEQ ID NO: 227047 - DNA, 314 bp, Glycine max
ggacaattaaagaatagagttccgtttcgttaagcaaagaaaaaagctcttgaattatctgaacaggcgggtacaaaaagagttctggtgcatactgcaggacctatggacggataagaaattgcacgcgtcgcacggatctgatatggtagagttactatacaaaccattcgagcgaagatagattattggtgctatacaatcacaactatttatggggtattagggatcaaagcctggatattttgtccatatagaataagatcccttgctgcatattaaacgtgctatagtcgatcgtaaatgcgctatat

SEQ ID NO: 227048 - DNA, 415 bp, Glycine max
gagaaaaacaaaagagtagtggcctttaggtggtgaagaacaagagctcaaatcaaatcgaatcgaaaaaagaaagaaagatcatattcatggcgatggcaagcctggctcgacggaagggttacgccgtcgttttgtcgtcgaggtcgtcgttttgtctgacaagctggaggggattcgcgtccggatctgacgaaaacgacgtcgtcgtcatcggcggcggtcccggcggctacgtggccgccatcaaagccgcgcagctcggtctgaaaaccacttgcatcgaaaagcgtggcactctcggcggtacctgcctgaacgtcggatgcatcccttccaaggcacttgtgcattcttgccacatggatcatgaggctaaacatgcatttgccaaccatggggtcaagttttcatc

SEQ ID NO: 227049 - DNA, 379 bp, Glycine max
gtgggcgaaaccatggctgaatttcatagatctccacgagcttaagcctgctggggatgcaccatcatggacctttggtgatcttcacgttgaaatagagggagaccatccatgatggccctctgggccaacacatgaccctgaagctcaggatgcgagacatgatgcgatcaagaccattcagcagcggtgtaattcactggtaccctatgaagctcatgaggtggctgattgccatggctgaggagagtgcttgagcttgctaagtatattcatgattctcacctcaagaggtgacagaaggaagacatgctacaagtggacgtccaccctactcaccgaggggggatacatctagactagttggaacatgatcctt

SEQ ID NO: 227050 - DNA, 527 bp, Glycine max
ggtaagaacatgtactaaaatttattgagtcaattataacatctttggttttgaggcaggaagaaaaaaatacaaagtgctactacataaagtcctgtttacaacttatatttattactagcaccattgataaaaaaaataggcccaaaataatatattttggcaaaaataaaataaggactataaaagtagaagccattccctttttccccccattgggtaggcttggttggactttgtagcatgtcaaaccttcttatatactttgtggtgtaattcatgtagataacccggctgcaaaggccactccggtggatggtaaccaggctgacccagatataaattgggctaccgtgaatcgattcgcctccatggtagacttaatgacccggtacccaggccattgaacccgttggcccactgctgcacccggtccataattcatgtactcaccataatacaatgtgttcaaagcaaagtcttcatttcactccaaccattcacgaggatgtatgtggtcacccatg

SEQ ID NO: 227051 - DNA, 149 bp, Glycine max
caataattagtttgagggattacccttattaaaaaaaaaaaaaaaaaaaaaaaaaaaaaaaacaaaaaaaaaaaaaaaaaaaaaaaaaaaaaaaaaaaaaaaaaaaaagggggcggccgcccactaggaagccactctacccggaaata

SEQ ID NO: 227052 - DNA, 426 bp, Glycine max
gaggtttgaagagtttttcatgaaagatcaaacgagctttattcgactcaaccactatcctccatgcccttaccctcaccttgctcttggtgttggccgacacaaggatggtggagccttaaccgttcttgcacaagatgaggtgggaggacttgaagcgaaacgcaaagcacatcaagagtggattatgatgcgctcttttgagctagcaacgtggatcactccgaggatggatacagggtacatcttcttctaaagcgctacacaggataggatgtcatttcctgaacaaagtgccagaatggattcttgagggcgagaagcatggtgccaacgcagtatagtgctgggatatgagtggcctatcatacatcacacggcgatgggatcaaaaagtctcatgacgagttgcactttgaattccta

SEQ ID NO: 227053 - DNA, 418 bp, Glycine max
gccaagaaattaattcagactatattaaaccagggaaacaaaaaaaaaaaaaggtttatgatacaccatcaactatatctaaaagcaacctttttcgagtccaacaaaataaaattactatacatagttaaaacgaggtcaggggcggtaagaataaaaatacataattcctgccttcctgtgagaattctaatagccaaatagcctttattttaatatgatcttcaaggaaccttgaatccccaacaaccaaatgataatctcatttgttagttaagattccatgtactgagagggtggagggcttgttttggtcttaaaaccactaagcccacggatcttcacttcttttcattcttgcacaagggcacagtcgccacacattaaatgagagaggaaatcattaataaatccccct

SEQ ID NO: 227054 - DNA, 397 bp, Glycine max
cgattgcgtgggaacacacacactctttttcaccagaatgtgggttctctctagccgggtaaacgtggatcttacttcacctcgttgtgccggtgccccgccgacgacatcagcatggtctgcttgaggcgaccagacgaggtctgctctttacgcggacattgcgaagcgcattcttatctgcgagaccatgcaggcggagcatcgcacgcagaatctgtcggtttggtcggatcctatcaaggtcactctccccgacggcaactgtaaggacgcgaagaagtggctctcgacgccgctcgacgtggcgcgcgaaatcttgaataatttggccaacagcgcgctcatcgagaaagacatggcgtgctctggtacatgacgcgccctatcgaggacg

SEQ ID NO: 227055 - DNA, 359 bp, Glycine max
aaacaccaaaacacatttattaaacaaaaataaagaccatatataaatcgattggtttatttatgcctgtcggcaaataaattttttatgtaaaaaaaaaaaaccccaattaaagatctaaaaaattgacactattatatacatcttaatatcaatcattacatatcaccctgatcggtttgatccaccggagttgttgtacggcccctccttcgagattgccgggggtgactgcccccaaattttaaccttccggtctccttaaacctttgttttttggagggtacaatgacacactcgggttggggtacagggtaccttaaagtttcatagcaatatgaatagtccatgtaacgctg

SEQ ID NO: 227056 - DNA, 110 bp, Glycine max
gttcaagactgataataaccattaaattattgtcattgtaacaatcggaaaacgagggaaaggaatagaagaaaacaatgaacaacccttgccttgttggttggtgcaac

SEQ ID NO: 227057 - DNA, 524 bp, Glycine max
cagctaatataatagtttcaatagctctttatgggaatcaagggtacgacattttccagtcaacacgagaagactgataatcagcagcgagacattgttttctgaatgaagagagaaaaaggaaaaaaaggaaaaagaaaatatttgacaaaaatagaaggaaaaataaaagggcgctatcacaaggatagtacaacactgaaccagtcactcaattattttgaaggaaatttgtggtgatttacagtgcaagacatcctccaggttgacgactttcctcttatgctgcttttgcttgtcgcttttcttcctccattctggctttgatgaacgagtagagtgccacaccagcaattgcaatggctgttccaataccagtttgggtgctaatcttgttaccgaagactataatagagaatccaatgacaaatacacgtttcagtacgttcccaactgcatgagtgagaggagccactctctccagtgtgttggtagccacctggttgtagagatggtaaaacata

SEQ ID NO: 227058 - DNA, 560 bp, Glycine max
attcgattaaaaagagatttatataggacctaatacaagtataagaatggagaaaatcaaatatcctttcaagtcttgcatattcaaaatgcaactataaggagttgacaaatttattcctgaaaacaaaagagactattttctctaactacaaaatccatcctcatcaaatatcaattgggtacccttaaattgacggataaaattcaagtaggacttagtcacggaactcatccatgaatttttcatggaactcagtcaagcgggtgacgatggccggaatcttttcttctggaggcaatatggtgcacctaaaatgccatgtgccaggaacctgtccaaaaccagaaccaggaacaacaacgactcctgtggcattaagcaagcgtttgcaatagaagttatcaggtgttgcatttgcagcctctgcagctttgatagccttttcggacaggcgaatttgggggaacaggtacattgccccttctgcttttgtgcatgttacaccctctaatttgttgaatgcatcttctagtgtctttgcacgcctggcaagggac

SEQ ID NO: 227059 - DNA, 299 bp, Glycine max
aacacacccatcacaagtccaaaacacttgaacttgctcaagggcaagaaatgaccactttattctaagggtgtttgtttagacacaaaacaccagagtgcaacataatacatactacataattttgaagttttgaaactacatatagtttttatcattatttctaagggccatttctgcttgaagctttagctctccaacacctcacttgcaagtgcaggggttgcaggtgcagttagctccacatttgcagccatcgttctcagcgggaacacccaattcgagagtgctgaaatggg

SEQ ID NO: 227060 - DNA, 497 bp, Glycine max
gggggaacacaaattaattttattcaggttacttgcaataactatcgataaccgtgggtaatatttgtagctagactagctagcatagagaattacagcataaaagcataaacatgggcttagcagtttcctcctccataacattatacatcatgtaaattatttacatacacactatactggtgcccctaccatgtttaggcatccatccttatatttaatggttagaaacatgtatagcagctacagttgagaccatcgagtccaccccacatacattgcgacctctgcagatcttgtaatatccttcttctccccagctctccccccatgaattctttatgatccagtaaggcttttccttaaaacgaattggagcataagcaccagatccatagcccaccaaaagaaccccatgatccaaatgcttgccgcagatgtatgggcatgagacgccaccaatatatgtttgcataaaaactgcattgataccaact

SEQ ID NO: 227061 - DNA, 382 bp, Glycine max
cccagttgaggaggctatggggaagtccttggttcacgatcttgtggttaaggagcctgaagaaactatgaacaagcttatttctcgtgctttaaaaggtgaagaagataacatatgttgagataaaaatgaggacgtttggcccagaacatcaaaataaggccgtagtgcttagtggtgaatgcttgctccagcaaggattttacaaataatggaaatggagggagctttgttggtcaggatgtaactggtcaaaaaattgtaatggacaaattcatcaacacactgggggactacaagggtattggacatagcccaaatccttagatccctcccatttttgcatcggacgatgacacatgtatgttacagtggcacactg

SEQ ID NO: 227062 - DNA, 535 bp, Glycine max
agaggactgatccaaaattcaatatgcggcccatggtctaattccatgactaaaactgtaaagctcaaatatactatcctcctaaaaggattagatgttgaaatacaagtaattccaatgaaagacaaactctctcgagtgatagttccttggtatcttagaaggagcattattcaaaattgaagctacacttctgtgggcaaaccatgggaacctactaacaaggacagtagccaagaaggagcgatggtctctaatttaggcatgagtaagccaatgccttctcctcagaaagctcttctgcggtcaagtccaacttcttccttgagaactcatcaatgggaagtccttgaactattgtccattccccattggcacaagtgacagggaatgaatagatcagtccagctggaacattgtaggaaccatcagaatatactcccattgacacccaggtgccctgaggagttccaagaacccaatctctaatatggtcacaagcagcactagcagctgatagtgcacttgaaagctt

SEQ ID NO: 227063 - DNA, 415 bp, Glycine max
gatatattgaaaaggtggacagaaacacataatttagtatttaataaagcaaaagcaaaatgcacacacattccccaaacaaaacatgcttattcaacccaaattggtttcatatcacagaaaccaacaggatgtcttcctccttacccgtcccacccactcgaacagaaattctacggaaattaaaaataaaaaaagctaaacttcttctacctcaaatctgaaaagtctaacaacaaaaattcaaaaaaaggaaaattaaacaatcaatccgattcataaaaccgattttgtctttccctcactttccgttgataatctcaattacttagtacctgtaatgagcaggcttgtatggaccctcaacaggcacactgatgtaatcagcctgggccgggctaagcttggtgagctt

SEQ ID NO: 227064 - DNA, 128 bp, Glycine max
gcctttctttcttttttttgaaggggggatatatatatcatttaacaaggatatgaacaacacaatcattcctcttattatgcaaacaagtaaacaaggggctaatttgcatttaaaaacctgaatct

SEQ ID NO: 227065 - DNA, 392 bp, Glycine max
cttgttcctccgctcaacaactataataacatctttctctctccgaacagatcacactatggccacctcaagcgccaaatcagtccatgatttcaccgttaaagatgccaagggaaatgatattaatcttggtgactacaaaggaaaggtccttatcattgtcaatgttgcctcacaatgtggcttgactaattcaaattacactgagctcagtcagttgtatgagaaatacaaacagaaaggtctggaaattctggcatttccatgcaatcagtttggggcacaggagcctggatctaatgaacagatacaagagtttgtttgtactcgcttaaggctgagtttcccgtttttgacaaggttgatgtgaatggtgacaaagctgctccact

SEQ ID NO: 227066 - DNA, 405 bp, Glycine max
tttcttttttttttttttttttttttttttttttttttttttttttttttttttttttttttttttttttttttaaaaaaaaaaccctaaaaactttttgcccagttgaacccgggtccttatgggcttgaggggagctttttttttttttgctgaccatgggagaaacattttccccacaacaacaaatgccggtgggatttttgggtggggaacaacttaacttttgttttttgacccctgcttaattttccccaaatggatgggacaggaaaaaaactttggttttggaggggaccgttatgaacattttgaaggttgggggacatcttatccttgtccccccttaaaaactatgaacgggtgttgtgtaaaaccggacaaaaggacgggtgttattttttt

SEQ ID NO: 227067 - DNA, 487 bp, Glycine max
gcaacaccttcctcatgcggctctacctcgtcgtcatgttcctggtcattgccgttctgatcgggttcatcatattcgcctacgttgtcaccgacaaggggtccggtcggagggtgatgaaccgcgcttacttggagtattatcttgaggactattcggggtggttggaggagcgcgtggcgagtgatagctactgggggaagattgtttcgtgtgttagggattctaaagcatgtgggaggatggggataaccattaatgggatgcccgagactcctgatatgttctacatcagacatctcacccctattcagtctggttgctgcaagcccccaacagattgtggctatgtctatcagaatgagacagtgtggatcccaggatcaggattgatgggagccaacccagattgcacaaggtggagcaatgatcaagagcagctttgctatgcatgtgattcttgcaagctggtgtgctggcaagtctc

SEQ ID NO: 227068 - DNA, 493 bp, Glycine max
tttcttttttttttttttttttttttttttttttttttttttttttttttttttggttttttttttttttttttatatttttttttttttgtttttttgttttttttttggacaaaaagggtttttttgggggcaaaaacccccgcaaaaaggaggaaccaaaaaatttgggggaaagcccgttctaaaaaaaaagatttaaaaaacccaaaagttttttttttttccccccaaagtaataaccccagacacaatgagggtgggaaaaatcccctccacacccttggggaagcgcttaagaaatatatatatatttttagggccacttggggaggggatttttccgcccctttgtttggggggggtgcaaattatgtgggggaattttctgggggccctggggacagccctgtgtggggagaggggcctaaaaaaaaacaggggcaaggagggtctctaaaaaaaaaaaatcgggggtgttggggtaatgggg

SEQ ID NO: 227069 - DNA, 334 bp, Glycine max
gggaaaaagcaagtaacattaagttggtttgggatacccaaaataattcacattttttgaaggacattggaataacattttctttaccaaacacaaattttaaaacttttaaaagtcccaaaggcatccttttttttcatgcccacttgccggggaccaatttgggggcgtaagcccaagcattgttgttgactgggtccccaaggggaatcaacaagggtcttcaatggacccttaccggggacaatgggctggaccaagaacccaaactttgagaacatggcccatctcccggttttgggttcctttcccttaagccaacaaaaacctttgg

SEQ ID NO: 227070 - DNA, 501 bp, Glycine max
aattataactcattatgtatggtaatcaattgacacagataccctcttgatgatttcattttcatccggaaaagggaaaactacattgcaatatgaaactctctctcactctcacactctctccttttgcatgatgatcaattgaaatgttgctgctccaaccaaggccaaaggccagattgatcatcaatgccacaaaacatgttgcttaagctctcttctttgaccatgtgatcaatcttttggcactgaatctctggccttggagtggtttggaaaagctgagccactcctgttggtctagcacaagatggaaagagggttctgctgttgctctgctgagtggatagaggactgtcaatagctggtgttcttgagatatccaacttgatctctgagctgttctcacttctattgctgctggatccctcagtttctttgttgaggttgatggattcatatgttctctgtttttagtgccaatatctcagtctgaagttt

SEQ ID NO: 227071 - DNA, 468 bp, Glycine max
gcgcttgagcttgatatatatcgcgagcggccgcccatttcattttttccaaaatggccaaagaccctagttcgtgttctcgtcactggagccgcagggcaaattggatatgctcttgtccctatgattgctaggggagtgatgctgggtcctgaccagcccgtgatcctccacatgcttgacattccttcaccagcatattcgttgaatggggttaaaatggaattggtggatgctgcattccctcttcttaaaggtgttgttgctacaaccgatgtggctgaggcatgcactggggtcaatattgcagagatgggaggcggattccctagaaaagaaggtatggagaggaaggatgtgatgactaagaacgtctgcattgacaagtcccaggcttctgcccttgaaaagcatgctgctgccaactgcaaggatcttgatgatgctaacccagcaaacaccaatgca

SEQ ID NO: 227072 - DNA, 423 bp, Glycine max
gtccttgccacgaagctcggtgccaagctcaccgaggtttggaagaacaggaacatgcccttggctgagacctgatggcaagacccaaggcactgttgagtactacaatgacaagaggtggccatggtatccatatgcgcgtccacactgtgctcatctacacacagcatgatgagactgccacaaatgatgagattgcagctgatcttaaagaacacgtgattaagcctgtgattcctgagaagtaccttgatgagaagaccattttccatttgaacccttctggcacatgtgtcattggagggccgaatggcgatgctggtctcaccggccgcatgatcatcatcgacacctatggaggatggggtgcacatggtgggtgcgacttctctgggaaggatcctaccaaggttgataggagtg

SEQ ID NO: 227073 - DNA, 445 bp, Glycine max
aaaggcattcgtggagcactactacagcaccttcgacaccaaccggaacggtttagcgaatctgtatcaggagggttccatgctgaccttcgaagggcagaagatccagggcgcttccagcatcgtcgctaagctcacttccctccctttccagcagtgccaccactccatctccaccgtggactgccagccctccggtgtcaacgctggcatgcttgtctttgtcagcggcaacctccagctcgctggcgaacagcacactctcaagttcagccagatgttccatttgataccaacgcctcagggaagctattatgtgttgaatgacatattccgtttgaactatgcatgaagatagaccatcatatgacctgaaaggccatagatgaaagtttgcctatagctagctgtttcagattgcacatttgaaattgaaaatgggttc

SEQ ID NO: 227074 - DNA, 388 bp, Glycine max
gcctgtctcccttttttttgtcgattcaaacaaataaaaacgatcatttgggagaaattaaacccgagtaatttctcattctgtggtgcctaaaaaaaaatattgctcatgcaagatcaaaatttagaacatttaagatgaagactaatatttctttctttcactagaaattgccgaactctgagccctagaaccccatacatagttcgaactgtctggaaccgtaggcgattttcgctcggttggcttggacaggaactggcgcctatgtgagtcatcaaagacccgcaacattttttaacagtggacacgctccggaatttgagcttgtactccttttgctcccgcctggcctgtgggtcaacaagatgggccaatgggtttacga

SEQ ID NO: 227075 - DNA, 545 bp, Glycine max
caaagaagaaaaaatgggttcctctttgtggacttgtctgattttgttatcacttgcttctgcttccttcgccgccaacccaagaacaccaattgatgtgccatttggcagaaactatgtgcctacttgggcctttgatcacatcaaatacctcaatggtggttctgagattcagcttcatcttgataagtacactggtactggcttccaatccaaaggatcctacctgtttggtcacttcagcatgtacataaaattggttcctggtgattcagctggcacagtcactgctttctatttatcatccacaaactcagaacatgatgaaatagactttgagttcttgggaaacagaaccgggcaaccttacattttgcaaactaatgtgttcactggtggcaagggtgacagagaacaaagaatctacctttggtttgaccctacaagagaataccacagatactcagtgctatggaacatgtaccagattgttttctatgtggatgactacccaataagggtattcaagaaccagcatgacttgg

SEQ ID NO: 227076 - DNA, 486 bp, Glycine max
aaaataaaaatggaaaacttcaataatggctatgccaaagttgagtagtataattagagtcaccagccaactaaaataaatggaaaaataaatcgtaacaaaacaaattacactcttatcctctgtttaagatcaaaaaattccacctgaataaaatctagatactcagataattgcttcactcaattggcctcaacgaacaaccaaaccttgggctgcctgggacccatcctccgttattttgttggcctgaatggtactgataacatttacaatatttcccctccatgtcactagctttgttctcagtgcttgccattggtgctgaccaaacacacgctcagtaggatgactgacaactacaacttgattcatttggtccatcttacagtcaattaacttagcagttaattctctaaccacccatagttccacctcatcatcgttgatctgaagtgtgtccctaataagttcatatggaatttg

SEQ ID NO: 227077 - DNA, 435 bp, Glycine max
atctcaactcgtaagtcatttattatttttcaacctttcaaggtggaacattctacacatgaaaggcgagattacatcacatagggattttttgacataaaacacaatttttcacttttcaaatgaacaacctagattatttaaatatccgatcacaagagcatttttctccttttaaattctcaagcgaaccgaccaagggattctttcacggtggggtagttgacatccgggtacaacttataagcctcaaccccgaaagatgggtcaatctcaaagttggggggggcaccctctacgaacactgagtggttgattgctaataccacattgattggaagaggggcctctttgatgtccttgagaaccttttcctctgggacataaattttttcgagggacttgccaaccttgttcttccacaaggccacaagt

SEQ ID NO: 227078 - DNA, 425 bp, Glycine max
gaacaaataaaacagtttcgattacttcaaccaaaggtctatcaaactacacgattataagcttaagacatgtaataaccaactaaaattcaagttttgcaaaactatgttttgttaatatagagcccttacattcggggaaacttcaaaaccactatttttcatccaaattattcaaagcaaaggggaagcaacatcattgcctcagatagttgtcgtcatcattatctgtatattaacctccaccgccagaaccgtatttctttccgaacaagatgagctgtagcttatcataaccagcaagcactccagcacctgcaacagcacgtaatatgtttgcaccagcacctttaaagagtgacttagtaccctcttttgcgacgattatcttgaatgcttccaaagagctcttgtattttacagct

SEQ ID NO: 227079 - DNA, 482 bp, Glycine max
acatgaaactagattgccagagcagtttattgctgagaactgtataacagaatacaagttgacataagacggagttcttaaaccaaagacattcacaaacagtacttactctcctattcctaaggcttaataatgcttctccacaccctgataagccagttgggaagctagctccaagttcttccaactgatttgctccatttaagtcctcttggaactaacgtattcttctggcaagtaaatctctccgccagcttcaccatgttgctccccgctgatagttttcttggcagcttgaaattcagcactcatagcatccatcccacgctgcaaagcttcatcagttccatagccatgttcctcagcatacttccttacattcttcgttatcttcatagagcagaatttagggccacacattgagcagaaatgagccactcttgcaccatctgctggcagggtttcgtatggaaggacatggc

SEQ ID NO: 227080 - DNA, 404 bp, Glycine max
agcaataatctgcagcattgaacatgcaaccaaacaaatatagaagaccgtctattgaaaactccatatgttgggaagaaaatggttctgaagaaggtgcccaaattgtttaacaaacaaactatcataaaaaagaaaaacatacctgaaaaacttgcaatcaaatataataaccctaacaacgttctctttaagccttatcagccttggcagcagttgcagcagcttgtcctctaagacgaccagtcctcctagcagcaatgagaccaaccttttgtccaggaggagcatcacgcctgacagtacttgcgtgaccaatatgctggtgattacctcctccgtggggatgctcaacagggttcattgcaacccctcgaaaccttgggccagcaaattccttttta

SEQ ID NO: 227081 - DNA, 368 bp, Glycine max
gcggcagaagtacatgatggaagcgacgaatgaccctgattcagattgggaactcgagctctacaccatatccaagactcttaaggaaggatcgagtgggaagaaatacactgaaacggctagaacagtgctctggggattctgagagaggaactcaataacgcgaacccctaggatatacaaagagtaccgagacttcattattgacaagtacagggacgagccctcgaggaggctcaccttcaccgaggtgcgcaagtagatgggaggcgacgggacgctcctgcacaaggcctttcttctgttggagcataggggtctgatcaactactgggacgagcaatgctttttcggtgccgacgcagggg

SEQ ID NO: 227082 - DNA, 559 bp, Glycine max
cagtattctagaaccgtatacttagtatcctacatgggtgaccacatacatcctcgtggatggttggagtggaatggagactttgctttgaacacattgtattatggtgagtacatgaattatggaccgggtgcagcagtgggccaacgggttcaatggcctgggtaccgggtcattaagtctaccatggaggcgaatcgattcacggtagcccaatttatatctgggtcagcctggttaccatccaccggagtggcctttgcagccgggttatctacatgaattacaccacaaagtatataagaaggtttgacatgctacaaagtccaaccaagcctacccaatggggggaaaaagggaatggcttctacttttatagtccttattttatttttgccaaaatatattattttgggcctattttttttatcaatggtgctagtaataaatataagttggtaacaggactctatgtagtagcactttgtatttttttcttcctgcctcaaaaccaaagatgttataattgactcaataaattttagtacatgttcttacc

SEQ ID NO: 227083 - DNA, 553 bp, Glycine max
cagctttccatggcattctctaatagaagagtccattataaaaagacatctcgtgttattcgttgttaccaaaccaacccctaaggccctagctagctattttctttctttcctcatcaccgggaaaagatgggagtggctttttatttggacaccattgtcgtccctttgagtcttttcatcacagtaggttaccatgcctatctttgccacaccatcaagaacaaaccttcacgtacaacttatggaatcagtaagcatagaaggacagattggagtctcaacttaaatcagggtgatgccagcaaagctatgttgacagtgcaaagcttgaggaacactcttatgtgcacaatactcacagctactataaccattcttgttaacttgggtttggcagctttgaccaataacacctacaatgctaggcatctttttagcagtgaatcttttgggtcaaagtcagataaaatctttgttttaaaagatggatcagcatcaatttgtttggtgatgagcttcatgttcagctccatggccataggatatctga

SEQ ID NO: 227084 - DNA, 412 bp, Glycine max
aaacgtaaaaaaaataattcgcattctttaggctacgttaaatacaaatggccaacatccgcattttttatgatactaaagtaatatttacgttacaaagttactaatgtaacatcaccggtagcttcccagttaataaagggatacacacattgtaaaactacttatttgccaaggcacaaagaaaggggtaagcactagacatagataagaacaatattgctagggcgaccaaacttcagatcagaattaggaatgatcttgttccatctgatttagatggaaccccccttgggtattcttgtgtacctataccttaaactttctcttccttctgtcccctcttgactctgagaagcatattaaacttagcaaaattattaatgaccttagcctttgcatcagcaaccct

SEQ ID NO: 227085 - DNA, 470 bp, Glycine max
ctaatccgtatccgccgtcacgctcctttccaccacactctccgctctctcttgccgattaaccgtttctcctcctcctcctcctcctccgcctccgccgccgccgccgccgccatggttgctcacgcgaaggacgaggcgtaccttagcgcggcgattccgaagcgcgtccgtctcttcgagaccatccaggcggagcagcgcacgcagcgcctctcgctttcgccggatcctatcaaggtcactctccccgacggcaacgtcaaggacgcgaagaagtggctctcgacgccgctcgacgtggcgcgcgaaatctcgaagaatttggccaacagcgcgctcatcgcgaaggtcaatggcgtgctctgggacatgacgcgccctctcgaggacgactgccagctccagatcttcaagttcgacgacgacgaaggccgcgacacctttctggcactccagcgctcacattc

SEQ ID NO: 227086 - DNA, 518 bp, Glycine max
  unsure (1)..(518): unsure at all n locations
agggagagaagaagttgttgggttgagttggattggatttctaatctaatctatacctttcttttttcctatgcttttaaggcacaaacccttctttcttccctcttctttcttcttcttattgttattccttgcctttaccctttagggaaggaagaaggaacaactatactactattatccttattattgttattattgtaattaatctttttattatagttattgttgttgttattattcctcaaatatggattcgttgtgcctctccaacgactcagttgtttctggattcaaagacaaggagtcaatggttgacccctttttggtcgaggctctccagaaccctcgtcaccgcctcaccattttgaggatggagctggacatccagaagttnttgaataatgctgatcagcagcattttgaagttcaacatttcccttcttcctacctccgactggcttgcacaccgtgttgctcaacactacaacatgcaaacaatggtttcaggatatggc

SEQ ID NO: 227087 - DNA, 544 bp, Glycine max
ccaagtaaaaatatatcttctattactctcagtaaattttctccttgtgtttatttttaattttgagacattctaagtacatttgtttcacatccctcagaaaatttccaaaccacgacggtggttttcctatgtctagtctctctagtaatttgaataattaaaaacagaactgtcaccaattatagcctaagttttagatacataggaccaaatttttttccatgagctaatcaatgttcttgtatgagcagaaaaatgtcctccttccatgattctttcagctgtaggtcccatttcttggatgaatttgacagattctgagagtcgattgagaaggttcgtcaatgcaattacctcattcctttgcagctgcagtgtatgacttgagttttcttgaccatcaacagagaagagaatctttaatgcagttccgagaccaagaacctgaagtttgccccataatcgacatttttcacatcctacacaatccattattgcactgatgttttctgaattgttgttgaattttctgttttagctc

SEQ ID NO: 227088 - DNA, 304 bp, Glycine max
gttcaaaaaaaaaatattagtctttaaaaagccccctggtttttcgttagggcttcttttaaggcccttgtgttctaaaagagccccttctgaaaaggggggaattcctggttttggcctaaattccccacccccctgatttttttttttttcccatttttgggggcccaaaagggaaaggcgggggctttttaaaaaacaacgtttgtttgatagggggggcccataaataaatggggggcccataaaaggggcttgcttccaagggaagggccaacaggggtggttccaggttccacccccc

SEQ ID NO: 227089 - DNA, 336 bp, Glycine max
gcaaattaaattacacaatcacagccgtacatcacacatgagttgggcctcttccaacttaaaagcagaggataacattggcccatgacgcgacacatgcaccacctaataatcataattttacatctttacatacaaaatacaaagactttaaattttaaaaagaagaaaagagataaacagatcatcttaatgaaatgaaaccaaaacccacaaacattggcttgatttttgttgttgttgttgttcccaacttgattaagcatgaaccgtttgattgaatcacttggacttgaagggaatggccctgattacgacccggtggtagagtgctgc

SEQ ID NO: 227090 - DNA, 557 bp, Glycine max
  unsure (1)..(557): unsure at all n locations
ggacagagaataaaatgttcatattattgcaacaactaagagattcaatcatagtaatacgagttcggcaacagaacatcatcaaacaaacaaagcaataaaaacatatagtgaatatcacacactcacagctgatcacacgacgtaggaacaaaagaaatggtctccttttcaagatcatgattcaccaaaatgttctgctgttgaacatttccgaatatagacattccactagaagcacccatggctaaacaagccacacccaaattggagtcaccaatcatgtagttctcagcaggaagctccaaatccccacccttgaaatggaaaacaatctttggaatctccacttgtgttgaccctgatggcagagagaagcaaagatccaaccctgttgagctagttttgtccaaaggaagnttggtttgagaaatgaactcttttttgagtgcctcaaaggccttttgttcaatgtaggtgattgtggtgccagagtctatgatcacaccaccattccatcattcccacttcaaaagtggacttctcaatggacaatc

SEQ ID NO: 227091 - DNA, 475 bp, Glycine max
cccctccgccgtccacggcgtcaccaggttctccgatctcactccgtctgagtttcgcggccagttcctcggcctgaagccgctccgccttccctccgacgctcagaaggctccgatccttccgaccagcgaccttcctaccgatttcgattggcgcgaccatggagctgttaccggcgtcaagaatcagggctcgtgcggatcgtgttggtcatttagcgccgttggagctttggaaggtgcccattttctttctaccggtgggctcgtgagcctcagtgagcagcaacttgtggattgcgatcatgagtgtgatccggaagagcgtggagcatgtgattcgggttgtaacggtgggttgatgaccactgcatttgagtacacactcaaggctggtggactaatgcgagaagaggattatccctacactggaagaggaccgggcccctgcaaatgtgacaagagcaaaatcgct

SEQ ID NO: 227092 - DNA, 507 bp, Glycine max
gattaaatgtcatttttgattgaaatccaaatatgatagaagaaggatactcttccgtcttcacataacaactttaataaagttttgatagacacaaaatatgcaatgtggaaccaaaataggaatttagtaatggtttgtttcactgggaatttttgttaggtccataccgtcgaaccctctcatcaatccactctctcatgtcccccaacacgagattcgcagactcatcgggctctccctgaatcaaagagtgatacattccatcgtagagcttcaacgtcttatcctcactggaacccttctcatacagcagcttggacgaggaagggcaggtaacgccgtcagaagttccgtgagcagtgaaaaacggcgtcgttaccttggagaaattatcctgtacatactgtgtcaccctaagcagctcccgcatggtccccaccctgggtgggcccgtgtagcgccttgggttcgacgctatgaccttaacttctcgggatccctgat

SEQ ID NO: 227093 - DNA, 496 bp, Glycine max
ggtgttttgccctaacctaaacctcaagcattggcaggcagtggaaatggagcagcggttagcaaacacatggagaatgcctcttaacgacaagaaattcatagaaactgctctcctttccgacctccgactcgacggccgtcgcccctccgactaccgcaagctcaccgtcaagctggccaagcaagacggctccgcggaggttcatttgggccaaacccacgttatgaccttcgtcaccgcccaactcgtgcgcccctaccgagaccgccccaacgagggctccctctccatcttcaccgagttctctcccatggccgacccctccttcgaccccggccgcccctccgacgccgtcgtcgagctcggccgtgtcgtggaccgtggcctccgcgaaagccgtgccatcgacactgaatcgctctgcgtcctctccggcaaactcgtctgggccattcgcgtcgatatccacatactcgacaatgccggaaatctc

SEQ ID NO: 227094 - DNA, 524 bp, Glycine max
  unsure (1)..(524): unsure at all n locations
aaagctccctcgcacaaagcaatgcctgccatcacctgaattctatgctccttttccctttatccgcattgctctcttctctttcaccgttttttgtctctgaatatccaagatcttcaaggacaatgttatctctgagaaacatttttctgaatagcgcttgatccggcgtgaaacattcaattgttgataatttactgcttcactttgggctgtgcgagtggagcagcctattttactattaaaggcatattctcttacaaggttgatttgcagagagcatggcgtcttgggatcaaatgggggaacttgcaaatgtggcacagttgactggtgtagacgctgtgcggctgattgggatgattgtgagagctgcaagcactgcacggatgcataagaaaaactgtaggcagtttgcacagcatctgaagttgattgggaacttgctggagcagctcaagatctcngagctgaagaagtaccccgaaactagggaacctctggagcagctcgaagatgctcta

SEQ ID NO: 227095 - DNA, 530 bp, Glycine max
agtccaaattcaaagaagtaacaacaggtattgtctccttcatcattcacatttttaaaaatttattctaaaattcaaatcataagcagagacaaaacagaaaagaaaaggtatataatttgaaacttaatttaagcatcaacaatttcctcagtgtccgcagaagccaaaataagctggggttcttcccttccaactccacacgttccatcaattgcattgttcctacccaaagccttcaacgccaaatgagccgccttctgccctgatatcatcatcgccccaaacgtcggacccattctcggggagccatcaatttctgcaacctccatgccagtgacaatcatgccaggcacaatctccctagtgagcctgacaatagcgtcctcagcagcattcatatccaaagccttcattccaggaacgctatcaatcatcccaatactcttcaacctcttaaccccagtggcgccaaagggtccatcgtgcccacaagagcttaccacaacctttggcttcattacgttggg

SEQ ID NO: 227096 - DNA, 492 bp, Glycine max
gagagagaaaaaaaaaaaaaaacagaacaacacagaaactcaaaaccaaaataaaattattatggatcacattcataggttacgttgttttgggacaatacccaaaattccttttctattgctactttccctgcttctcttcagtttcgttaacgcatccttcgacctcgctactatacccttcaacgacggctattctccgctcttcggagctagcaacgttgttcgctccgaggatggatacggcgtacaactccgcctcgatcgctacacaggttcgggtttcatttcctccagtatgtaccagtatggattcttcagcgcgagaatcaagttaccatcgaattatagtgctggtatttgcgtggccttttatacatcaaacggtgatgtgttcgagaagtcccatgatgagttggactttgaattcctaggtaacgttgccggaaaaccatggcggtttcagacgaacttgtacggcaacggcagcac

SEQ ID NO: 227097 - DNA, 505 bp, Glycine max
atcatgcttgatcatgtcagcagaatgatagctagaccaccttagccgattattaccaaaaagggatcaaattttcattcttcttcttagtttattccaccaacataaaattactttcaacataagacagccaaatatgtttcttctattcgttgctatacataatgcacactagtaactttttagcagcaaataatatcacagtcccacatatatatcagaaacattcttagatcaatctgctttacatgaataagctaatttcttatcctttaggttatcttataatgataaatctgaatgttttccacattctgtttcttgaaattgcttccctttctgtgaacaagaaacttgccccatttgtatggcctatattttgaaggattgtgttcatttgtcaactcctccaaaggcttgacttctatgtcatgtgcagggttgaagaaaaacggaatagaaaacctttctttttcagagttaaccatcactctgtgttccacac

SEQ ID NO: 227098 - DNA, 502 bp, Glycine max
agaggaaataatagtgttattaatgaattaaacttacagaaaataccaaatgttaaaagaactagaataaaacaaataaaagttataagagtaaataaaaaaacaaaaataaattaacgaaccaaaagattaatttggctctaaaaataaaggcatgaaataaattacatgaataatgatattccgttccattctgaaatcttagcatcttgacgagagcgaaattccattgtactctcctctccctccaaaaatttagtattagacaactatgcaatacacccgcaaagcttaaacaaagtaaatttcaatgtaaagaatttcatttagatgacagtatctaaaactaatctaactaggaggacgtttatttaacctacaacatgaaactattaccaaatctattatgtatctaatagaaaccggatgtcataatgaggtaatcgacacgggtgaacaagaatacccaatgataatgacctaaaatttctcccattttttt

SEQ ID NO: 227099 - DNA, 411 bp, Glycine max
ttttttttttttttttttttttttttttttttttttttttatttttttttttttttttttttgggctttttgggtttttttttttcctttttctttttttttttctcttttttttaacaacacccccgcgggatatttttccaaaaaaaaaaaaaccacagggtgggggtccacccacaccccccccaaaaaggggggcccgagtcccattttttccaaaaacgattgtggtataatagaaacctaccccccccgaagacccaaaaaaaaaaattttttagggagcttgtggtgttaaacaaattttcagaaaaaaaaagaattttttttaaaaaaacccccaggctcttttaaaaacccccaccaaaaccaaaattttaaaaaggcttacacctcgccggggccggtgtt

SEQ ID NO: 227100 - DNA, 487 bp, Glycine max
gttacacctttttttgtgtgtttaccacttttgagtgccacagagttctgagtttcataggagaaaaaaaatgacagaagaacaaaccaaaacggttgagtcagaatcagtaacaccaccacctgctgctgctgctccttcacaggttcctcctgctgctgaggctgaacatgttcctgaggctccaaaggatgtgactgaggagaaatctgtaattccagtgccttcttctgatgacaagcctgatgaatccaaggctcttgtcttggttgagaagactcaagaagttgctgaagtgaaaccaactgagggctctatcaaccgagatgcggtgcttgcaagagttgcaactgagaagaggttgtcattaatcaaagcatgggaagaaagtgaaaaatcaaaagctgaaaacaaggctcacaaaaagctttcatcagtttctgcatgggaaaacagtaagaaagctgcagtggaggcggacctgaaa

SEQ ID NO: 227101 - DNA, 509 bp, Glycine max
  unsure (1)..(509): unsure at all n locations
cttcttcgtctcaaacctcttcgttccttcgattcattccatttcttccaaaatggccaaagacccagttcgcgttctcgtcactggagccgcagggcaaattggatatgctcttgtccctatgattgctaggggagtgatgctgggtcctgaccagcccgtgatcctccacatgcttgacattcctccagcagcagagtcgttgaatggggttaaaatggaattggtggatgctgcattccctcttcttaaaggtgttgttgctacaaccgatgtggttgaggcatgcactggggtcaatattgcagtgatggttggtggattccctagaaaagaaggtatggagaggaaggatgtgatgactaagaacgtctccatttacaagtcccaggcttctgcccttgaaaagcatgctgctgccaactgcaaggttcttgttgttgctaacccagcaaacaccaatgcattgatcttgaaagaatntgctccatctattcccgagaaaacat

SEQ ID NO: 227102 - DNA, 487 bp, Glycine max
agaaagttttacgttttgcccaagcaccttgatgagaaggtggctgcacttcaccttggcaaacttggagctaagctcaccaagcttagcccggcccaggctgattacatcagtgtgcctgttgagggtccatacaagcctgctcattacaggtactaagtaattgagattatcaacggaaagtgagggaaagacaaaatcggttttatgaatcggattgattgtttaattttcctttttttgaatttttgttgttagacttttcagatttgaggtagaagaagtttagctttttttatttttaatttccgtagaatttctgttcgagtgggtgggacgggtaaggaggaagacatcctgttggtttctgtgatatgaaaccaatttgggttgaataagcatgttttgtttggggaatgtgtgtgcattttgcttttgctttattaaatactaaattatgtgtttctgtccaccttttcaatatatc

SEQ ID NO: 227103 - DNA, 372 bp, Glycine max
acgggataaataatccagcttttatttcagagtaggtagggatttacaggcaatgatggaaaaaaaagggggagagttggaaagcatccttgctaatggcaaatcttggtggagactaaaattttacaattattggcccacttgggaacgcctttggtctaagcagttactattaaaacattcaacagtgcaggagatggatgcggtttaatccaacttttgattggagttcactacagctgctgatgatgtaagcatttgcttgaaaatgttcacaggagactccacttggccataaacatgtgcgcatattggcgaaacttcatttaatcgactctgacccatttttattattaagatttaagggtacat

SEQ ID NO: 227104 - DNA, 451 bp, Glycine max
ggggggaataaagtttgaattaaaattcaaggttttttagcacacaacaattttgacagcatggaagggtcacatttttaacaagcccgactttttaggttaagtttattggtttttggccattacaaatgccccattgatcgggtccttaaaattaaaagttgaattttttttccaacaaaacaaaaaacaccggacacattcaaggttacaacactccgctccatagtctcggtgaagggcttcatatttatatatatattttttgggccactttgggacgggatttcatcgaacattgttttaggcccgcttcaacttctgcttttgcatttttccattgcttttggggcaagcccaatcgcttttgatccctttattattcgcagacgcttgggtgactcaacaaacatttcccatggggaatcacccacgagcattccatcaccat

SEQ ID NO: 227105 - DNA, 473 bp, Glycine max
gataaagagtgaaacgtgaatctttttcaaactttgccggagattacctacaattgcgctaatatgactatggcatgttgatgacaactttgacacaattgggttgttttagtagctcaaatgctttgtttatgcctgctaatgggacctcatgggcgaagagttcttgatgagggaattcctttttgtggcctttgtcagctaaaatggaaaggtctgaaatggccctgagtcctccaaaaacagaaccttttaaagttctaccaagcagaatggcaaaaagacccaatggcaaagtaatttcaattcctacacctattactattgctttatctgttccaacttttgtggcttccaaggattcatagagtatagtggaaactccagtatactcaaaagaatagtcggtacccattccaccacttagtttcttgaccaattctgtagcagatttattagaattacccgggttt

SEQ ID NO: 227106 - DNA, 155 bp, Glycine max
tttcttttttttttttttttttttttttttttctttttttttttttttttttttttttttttttttttttggggaaaaaaatttattgccattccggttggggctgtaacaaaagccgcgaagcttaaaaacaatgcctccaaaataaaaacccc

SEQ ID NO: 227107 - DNA, 384 bp, Glycine max
gctggatgaagcaggagggtccgatgaaagcagccagaagttcagagagtcaatgaacaagttcatgagaatggccgaggaggagattctaaaagtccaagcacaagaaagtgttgcactatcccttgtgaaggagatcacagagtatttgcatggaaacttgtcaaaggaagaagctcatccatttagaatcttcatggtagtaagagacttcttaacagttcttgatagggtgtgcaaagaagttggtatgataaatgagagaaccatggttagttcagcacatagattccctgtcccagtgaaccctatgctttcacaaccccttccaggacttgttggaaagagacaatacaattcctcagatgatgatgataggtcatc

SEQ ID NO: 227108 - DNA, 461 bp, Glycine max
ctcgagccgtgctatttggctcctccataattcaaatgagcttcgacaatggtggttggggtgctattctagctaacttgtacgctaggaaggatgcttatgtgcaaccatcattggtaattgtgtattttggtggcaatgattctattgatcctcacccatctggccttggtcctcatgtaccccttgaagaatatgttgaaaacatgaggaaaattgctaatcatcttaagagcctctcggaccatattcgcattatatttctcacttctcctccgatcaatgaagaactaatccgcaaaaagctcagtgcaacgcaatcaggaagaaccaatgaatcctgtggagagtatgcagatgggttaatggagctttgtgaggagatgaatatcaaggccattaatctgtggtctgcaattcaaacaagagaggattggttagacgttagcttcacggatgga

SEQ ID NO: 227109 - DNA, 427 bp, Glycine max
gtaaaaagcaagtaacattaagttggattgggatacacaagataattcacattatctgaagtacattgcaataacatatacttcaccaaacacaaatctaaaaactcttaaaagtccacaagtcatccttttctttcatgctcacttgccggggacgaagttggtggcgtatgcccaggcattgttgttgactgggtccgcaaggtgatcagcaaggttctccaatggacccttaccggtgacaatggcctgaacaaagaacccaaacatagagaacatggccaatctcccgttcttgagttccttcaccttaagctcagtaaaagcctctgggtcatcagcaaggcccaatgggtcaaagctgccaccagggtagattgggtcagtgacctcaccgaggggcccaccagcaatacgattacccctt

SEQ ID NO: 227110 - DNA, 434 bp, Glycine max
  unsure (1)..(434): unsure at all n locations
gcgggagaagtacatgatggaagtgacgaaagaccctaattcagatttcgaactcgaactctacaccatcccaagctcttcaagatggttcgcgtgggaagaaatccacgaaacggagagaacagcgttcaaggaatacttcgacggaaactcaataacgcgaacccctaagatatacaaagagtaccgagacttcatcatcaacaagtacagggaagagccctcgaggaggctcaccttcaccgaggtgcgcaagtcgctggtcggcgacgtcacgttcctgcacaaggccttcctcctcttggagcattggggtctgatcaactacggcaccgcgcaaccttttttcggtgcggacgcancggaggaggaggaggagcatcgcaaggttcgtctcgaggaaggcgcccctggtgggattcgtgtcgcggcga

SEQ ID NO: 227111 - DNA, 414 bp, Glycine max
ggaagttaaatccccataaccattcaccattcaaagattaacacttctcaaattatctacagcaagaaatagaattcaagagaatatgcaatcaacctagctacacaggttgggtttgcacactccaccttcagggttttgctgttctttccatatcctttctgttactcgtagcttcaactctttcctgtctccacctgataagaaaagtgccatgttgcggttaatgatgagaccatcatgactgtctttgaccttcgtatggctatctctaatgctccttggactcccctcaaaagttagcttacgtacattttctcccacctccaagctgtagctgttgtttcgcgcctctttttcatcccccatgaatcggaggtacgccatgttaaccggagccatgcctagctggat

SEQ ID NO: 227112 - DNA, 489 bp, Glycine max
cttaagagtaaagatatattcatcattaattaaattatagtacccatccaacggctacatacaacttcatcttcctttactttgtagtacgaagcatcattattaggtatccagattacgacagatgcacccactaattaaaatctcaaaatgccaaatcaaaacacattcagatacactgaaatgacaatgaagcataacaagaagttggaaagagggagcttttatttgcaaaatgatggcgttccatgccataaaaatctacatccacacaatttataatgaacaagaatggaatacttctttctttaaaccatgataacacagattgtccggagagattatggccttctacatggtggcaatggacacgggctctcggaggatcctctccatctgttgtgccctgggcttaattgacatgtcaaagaccttgtggctgaattcaagcacaagcccaccaagtatgcttggatcaatcttctgttc

SEQ ID NO: 227113 - DNA, 428 bp, Glycine max
ataaagtaaatatcatttattcaaacctaaagaaacacagggacacaccatctcaaactcatgttaccctgccaataaaccatcacccctaaacttcagcaccagcagcttgttcacttcaatacacaactaccagaatgtgtcatgtgaccacgtggcatgcacgctgatgtggagccaagtgttgtgcttacacgtaggtgtaccctccataatacaaccaaagacttaagcatcatattataatatttgtacagttaactagagaaattatacgaaaagaaaaaatgaggcttttcaacatggcttgcaaaatggtagacctgatccccacaactaggaccatatttaaacttgtttttctcactcacactcgggcatgggctaagcttcaggtctttgaacaggaacctttactggggtttcaa

SEQ ID NO: 227114 - DNA, 511 bp, Glycine max
attaaggatgaaaagagcagtaatggaattgaactcatcagttcaagaacttttcgtgtacaatgtaaggtaaagtcctgatacgtacatattttctgatggttccatctttaaaaataaactgtgcctcaacgtatcaaaccataaagtcaataagccatatccatacaacaagcatagttacgaatttctgtgaacattattttctttctctcttctttggctgaaaggattatgtttattgttgtactatatagacgcagccattacagatcagtgtttgatttttggcttcttcacgatcatcacagtgcagtgagcatgatgagcacaatagtcactgacactacctaaaaccgccctttttatagccccataaccatgactacccacaaccaacattgcagcacggtacttatctacagcatcacaaagaacatttctaggatcaccttccaccacttttgctgtcacatcatttacggatttgttgatgcaaagttgtttagcg

SEQ ID NO: 227115 - DNA, 429 bp, Glycine max
attgtttgttgttgtaactcgttcttcttcttttgttgttctgtgtttgtgtttgttttttctctcacctgaaaatgtcttgctgcggtggtaactgtggttgcggaagctcctgcaagtgcggcaacggctgcggaagctgcaagatgtacccagacttgagctacactgagtcaaccaccaccgagaccttggtcatgggagtggcacctgttaaggctcaatttgagggtgctgaaatgggtgtgcccgctgagaacgatggctgcaaatgtggaccaaactgctcctgcaacccctgcacttgcaagtgaggtgttgggagagcaagcttcaagcagagatagcccttaattaggaataatgataaactattaatgtgtagctaaaaacttatgtattatgtctgggatgggtttcgtgcactct

SEQ ID NO: 227116 - DNA, 516 bp, Glycine max
gataacaaacagtagtaacattaatgggacaatagagttcaacacaaaccaaacttattttcaaaggtcattacagacccattacacatcacatttctttttaaaatgtttgggaaaatccaacatcgaacatcacacagaaatcagctccagcttaaaaccccccacgaagacgcaacaccaagtgcagagttgtctccttctggatgttgtagtcagcgagggtccttccatcctctagctgtttgccagcaaaaattagcctctgctggtccggtgggattccttccttgtcctggatcttcgccttcacattgtcaatggtgtcggagctctccaccttgagggttatagttcttacccatatgggtcttgactaagatctgcattccaccacgatgacgcatcaccaagtggagaggtgactccttctggatgttgttttcagcaagggttctttccgcccttcaactgcttgcccgagaaaatcagccttttgttgttctggggggatac

SEQ ID NO: 227117 - DNA, 534 bp, Glycine max
aacctaacaaattaaagtggtacattctttcattgtcgaaaaaaaaaacaagcacagttcgttaaactaaacaacttcctgatagaaacaaagcgtatatcataaaataaggtaagacatcaattcatgttgacacgaaattgaccaaaaatacggcttactcaacttcaaaaagtatccaaaattttggacctagaaaataaacagcacatgtaaataaaatgattgactgaacgcaaaataagagagttttagttgtgcaacgatgacatggaatctgcaatgaactttcactcatcatcttcatcattatcagcagcagagttgatagccgccacacgagcaatcaacttagccttcctctcctcataagtgagtttcttcagattgtacctcttgtgttccttcgggggctgcttctcagatttcttgagagaaggatcagcacggatggcagcatgaacctttttgtacagtgcctcaataccatcagcttttattccacgcttgatgtattcactgaagtgtgactga

SEQ ID NO: 227118 - DNA, 446 bp, Glycine max
aagcacaaaatacttcgataactttatattattttacatgcatgcatagcatagatagcctgctctcaaattagtcagcaggaacaaagatagagagatccaacgatctttaaatttcacatttgccataaatatataacagaaaagagggtatgggatatgagttaagttttgatctcattcaactacagtatcccaaaccattactcttaagactttgaacttcacttgtactccaggatcatgttgttctcaggagctaatccaacacaagcccttaggatgttttccagcatagctcgctgctttgacagtgcattaaccactggcgtactcggtggaaccagaggggccttggtcaggtaactgaggatggtcgcaactgggtggaatgagtggaactttcccttattttcagctttaaactcgattcgagtgctaagctc

SEQ ID NO: 227119 - DNA, 348 bp, Glycine max
aaatgaattgaattgaattgaattgccactgccaaaagggcaatgactacaatctaaaagctaaaactagcgaataagggccaagtactatatatgtacaagaacaaattaatctcaaattactttaaaaaagaaagaagaaaaaaacactgaatattttttggatctatggatcattagtattgagggatttcaatcttgggtatggtaaaattgagacgggattttttggatggatgaggactggtaaccttgttattaacaaagaaccttgttgaaaagtccggaaaagccgggaggttcagatcgaaatcgcggcggcttcctgtgtgagtggaccccactttc

SEQ ID NO: 227120 - DNA, 348 bp, Glycine max
gagaagggataataaacatcacaattacagaccttcattatactgctaaagggggctggttcatattaaaagcattaagaatacatagatccatgacgcgacacatgctccacctaatacttataaggggacatttgacacacaaaatcaaaggatttggttttcaatgatgacatgacatgtctgtagatcttactggaatgacacccatacccactaacttaggctagatttatgtgagtcgagaagggacacacttgaataaacccgttccgtttgggtgcatcacttgaacatctacggattggccgagaaaacaaacggctggttcagtgctgccagatctct

SEQ ID NO: 227121 - DNA, 457 bp, Glycine max
acaaaacatataccatgtcgaatttgagtttccttcaatttcatagtagcaactcggtggggcactcctcttttcaacccaatagtccaaacccgaacaacaacataaaatcatcaaaacagacatcaaatgtagggtgcaatattcagccaaagtcagaggaaatgaaatgggtgttcgacaagtttgacaccaacaaagatggcaagattaccctcgaagagtacaaagcagcagtgagaacaatggggtggggaatcgaaggcactgagactgatgagtcttttcaggtgatggactctgatggagatggcttcattgacttcaaagagttcatggacatgttcaacgtggaggagagggtgaaagagacggagatcaagagtgcttttcaagtgtttgatttgaatggcgatgggaaaatcagtgcagaggaattgtcacaagttctcaaagc

SEQ ID NO: 227122 - DNA, 516 bp, Glycine max
cattaaacttgttttttgctagaagcaggaagagaagcgaaacaaacaaacaacaaaataatcaattgagccacttaccatcagatttagatctcccaacagagagtttctcaaaattgccaagtacccttttcaggatcaaggaagagaatcaagaaccaccaaaaggtgttgttctttgttgtagttgtttgtaactgtagcaacatgaagatggttagaaagttggttgtggtgaggcttgtgttggccatatctgtgttgagctctctccttctgacaacctcggcacagacagcatgcaggggccaggccttcaccgaaaacaaggttttctcctcatgccgtgatcttcctcacctatcctcgtacctccactggaactttaaccagagcacagggaagttggacatagcattcagacacacaggaatctctggaacagacaagtgggttgcatgggctatcaatcccagcaacaacctcaattcagctatgacgggagcacaagcactg

SEQ ID NO: 227123 - DNA, 549 bp, Glycine max
aaaacaaatgatatccgttgtataaaaaatccctcagtactcatttattacaataaaccaggtcaacaaataaggatttttagcgagctaaagacaataatatactttggcaattaagctctctctaccttggggtaaaacctgatcaaataaaagtaacatcaaagacaaaaacagcaacagaaaactaaactataagaatagcatgataatcatcatatataagaggaggatgggggcattctctctgaaagaccaacaacaaattcaacatccctaaaggaagctccagattgtgctttttccctttaagccactgcaggcatgtccttgagccatgaatctagaggtttgccaatggagtaaacaatgaaaccaatttccctcagcttgttaacattcacgacgttgcggccatcgaaaatgaatgcaggcttttgcatgctgtcataaaccttttggtaatcaaggtttcttatactcattccactcagtcataatgcagatgccatgtgcattcttgattgcctataggcatcccagactaca

SEQ ID NO: 227124 - DNA, 493 bp, Glycine max
gtttcatgtggtagcagcttgtgcagtgctgtgccttcttcaacatgcagtgatgggtgtgagtatgtttattcatacggtgactattcaatgacacaaggcgttttggccactgagactttcacttttgggaagtctaagaacaaagtttcggttcacaacattggttttggttgtggggaggacaatgaaggtgatggatttgaacaagcttcagggttggttggtcttggacgtggtcctttgtccttggtttctcaactcaaggaaccgagattttcttattgtttgaccccaatggatgacacaaaagaaagtattttgttgttggggtctttgggtaaagtgaaagatgcaaaagaagtggtgacaacacctcttctcaaaaaccctttgcaaccttctttttactatctttctcttgaaggcatttctgttggggacactcgattgtccattgagaagtccacttttgaaagtggggatgatggga

SEQ ID NO: 227125 - DNA, 393 bp, Glycine max
aaaagaactgtgcacagggaggcaagttttatacaataaatttgataaatgtatcaaattttacaggatgtttgacacaagatggtggctcgttaaccctcagaaacatcaattggggagcataataattagacaatcaagacatgaataatgaattatcaacatatctcgtttgaagctcctgaatgaactatgcttaaccaatgaacaaatgcaaccttgacagtaacttatctacgtttggcatccccctttgattgaggaggaggaaccgttccaaaaactttatcccacagtggtgatgtgatcccaaagccatagttctggagccgataatgatgattcaagtgatatttcttgagacttttgggcacatcagactttggttgacca

SEQ ID NO: 227126 - DNA, 375 bp, Glycine max
gaagtcctaagtccataaaaatttttatacatgcacaaactcaaaggtaaacgaatcaaaggtacagaagcaacttaaacattttggtttccttttgggtatggcactaccacatccataagaaccaacattgacaggggcacgtatattagtttaattatgcaataactgagacataatcaggggcaagtattcccctgttgcagtttgaaacaaccccaccccgccaatcttcatagagagttgcttatcttgcaccatttttaggaccacacatttccttggatttcccacttgtatatgtcaagcattcatacagaaatttcatactacataaacaacatggtcttagcagtttcctgatcctatacggag

SEQ ID NO: 227127 - DNA, 555 bp, Glycine max
  unsure (1)..(555): unsure at all n locations
attgtttgttgttgtaactcgttcttcttcttttgttgttctgtgtttgtgtttgttttttctctcacctgaaaatgtcttgctgcggtggtaactgtggttgcggaagctcctgcaagtgcggcaacggctgcggaggctgcaagatgtacccagacttgagctacactgagtcaaccaccaccgagaccttggtcatgggagtggcacctgttaaggctcaatttgagggtgctgaaatgggtgtgcccgctgagaacgatggctgcaaatgtggaccaaactgctcctgcaacccctgcacttgcaagtgaggtgttgggagagcaagcttcaagcagagatagcccttaattaggaataatgataaactattaatgtgtagctaaaaacttatgtattatgtctgtgatggttttcgtgcactctggtgttttgtgttaaacaaacatccttagaataaagtggtcatgtcttgcctttcagcangttcaagtgttttggacttgtgatgggtgtgttaagctcatgggtgcttcttttttttttttttta

SEQ ID NO: 227128 - DNA, 575 bp, Glycine max
aaagaattggggtaggacttttcttgtcaatccttaacatggttgtgtcagcacttgtggaggccaaaagggttggtgttgcaaaagagagtggcctaattgatgacccaaaagcagtgttaccaatcagcatttggtggctgcttcctcagtacatgatcactgggatctctgatgcattcacaattgtggggctacaagagttgttttatgaccaaatgcctgaggcacttaggagtttgggggctgcagcatacattagcattgtgggggttgggagctttgttggcaacattgttatagttgttgtggagggtgtgacatcaagggctggtgagaagtggctaggaaacaacctcaatagggcacaccttgattacttctattgggtcttggcagggttgagtgctgttaatatgtgtgtttatgtgtggcttgccattgtttatgtgtacaaaaaagttgatgagggtcatcaaactagtgaccaacagggttctagccacaagaaatacaaacctggagtgtgaggggaaaaaaaattactggttggcttctgatatatgcagcgaatg

SEQ ID NO: 227129 - DNA, 565 bp, Glycine max
gcttggaagcaccaagagcaccaacaacaataatgaacttaaatgcgctattgaccacattttggatgcccagagaaaaggcgagatcaacgaagacaacgtcctctacattgttgaaaacatcaacgttgctgcaattgaaacaactctatggtcgattgagtggggcattgctgagcttgtgaaccacccagagatccagcaaaagttaagggatgagattgacagagttcttggagcagggcaccaagtgactgagccagacatccaaaagctcccatacctccaagcagtggtcaaggaaactcttcgtcttagaatggcaatccctctccttgtaccacacatgaacctccacgacgcaaagcttgggggctatgatatcccagctgagagcaagatcttggtgaatgcatggtggctggccaacaaccctgcacactggaagaagccagaggagttccggcctgagaggttcttctaggaggagtcgcttgttgaagccaatggcaatgactataggtaccttccctttggtgttggcaagagaagctgccctggaata

SEQ ID NO: 227130 - DNA, 550 bp, Glycine max
aacccaacccaatcttcaccttcgcccacaacaaatcccattcctgcatctcctccttcagcatcgctgcaaactttactttccatttttgtccttcctccccgagaaaaaaatggcgaacgcagcatctggtatggccgtccatgatgactgcaagctaaagtttttggagctcaaggcgaagaggacgtaccggtttatcgtttttaagattgaggagaagcagaagcaagttattgtggagaagctgggtgagcctgcaaatggttatgatgatttcgctgccagtcttcctgccgacgagtgtcgatatgctgattatgattttgattttgtcactgaagagaattgccaaaagagcagaattttcttcattgcttggtcccctgatacatctagggttaggagcaagatgatttatgccagctccaaagatagattcaagagggagcttgatgggattcagaatgagctgcaagcaactgatcctactgagatgggtcttgatgtgttcaaacgccgtgccaaataaatgattctgattatgcat

SEQ ID NO: 227131 - DNA, 583 bp, Glycine max
cgcaaaacgttgaccgaaattgatcaggaaggaaaaattctgccagatggaacactttctgtggatggacaagcaatttcagttgtttacttccgggctggctacacgccaaaggactatccttcagaatcagaatggagagctaggctactgatggaacaatcttctgctatcaaatgccctacaatatcttatcatttggttggcaccaaaaagattcaacaggaacttgcaaagcctggtgttcttgagaggttcgttgaaaacaaagaccacattgccaaattgcgtgcatgctttgcagggttgtggagtttggaagactcagatattgttaaaaaagcaattgaaaatccagagctatttgtgatgaagcctcaaagagaaggaggaggaaacaatatttatggtgatgagttgagggaaaccctccttaaattacaggaagcaggttctcaagaagatgcagcatacatccttatgcagaggatatttcccgccacttctccagcaattttggtgcgtgatggtaaatgggataccggtcatgtcatttcagaagctggaatatttggtacttatt

SEQ ID NO: 227132 - DNA, 586 bp, Glycine max
  unsure (1)..(586): unsure at all n locations
atgcaggcctactattcaggccaggccaatggggttttcaagactgattttcctgccacccctttgaaccctttcaattacaccggaacgcctccgaacaacacaatggtcaccaatgacacaaagctggtggtgctcaaattcaacaccagtgtggaggtggtgctgcaggatactagtattcttggtgctgagagtcaccctttgcatcttcatggctacgacttctttattgttgggcaagggtttggaaactatgaccccaacaatgaccctgcaaagtttaacctgattgaccctgttgagaggaacactgttggtgttcctgctggtggctggattgcttttagattccttgcagacaacccaagggtgtggttcatgcactgtcacttggacctccacacaagttggggattgagaatggcatggctagtactagatgggcctgggcccaagcagaagcttcaaccacccncttctgatcttccaaaatgctgactttgactaaacggattcattggctatgcatcatttcttnctgagttactcttcaatgtttttagctccctttgttttcaacaac

SEQ ID NO: 227133 - DNA, 460 bp, Glycine max
ttcgtttaggaacacaaaaaatggcagatattcctcgggtgaagcttggaagccaaggcctggaggtttccaagttaggatttggttgtatgggcctaagtggagtgtacaacgatcctgttcccgaagaggttggcatctctttgatcaaacacgcattcaccaaaggggtcactttctttgattctgcagatttttatggagcacgtgccaatgaagttttggtcggaaaggctctcagggactttcctcgagatcaatttcagattgccacaaagtttgggattgtcaaaatggaaaatggtaatgtgatagtgaacggttcccctgaatatgttcggtcctgttgcgagggtagcctccaacgccttggtgtcagctacattgatctctattatcagcaccgtgttgacacaactgtacccattgaagacaccatgggagagcttaaaaggctggt

SEQ ID NO: 227134 - DNA, 377 bp, Glycine max
  unsure (1)..(377): unsure at all n locations
acgaacttcgtactgatcgnagacacctatgatggtgttgggcgacaacccacgttggtaatctgctccagaagaatcccaccacataaacacctttcttttccgttaccgtcccctcgtccgaatggggttgggggtcttttaaaattacagagcgcatctctatccacattggtcaggctgttatccaggtcttcaatgcttgctgggagctctactgcctctagcacggcatctgtcccgacgggcaaatgccatcagacaatactattggcggtggtgatgatgctttcaatactttcttcatcgagactggtgcttgaaagcacctgccatttgcagagtttgtatatcatgaacccactgttattgatgag

SEQ ID NO: 227135 - DNA, 534 bp, Glycine max
ggaagatgagtttgagggcatcagagatagcgaagaagttgaatctgcaacctcacccagaaggtgggttttacgtggagacattccgagaccattccgtccagctttcgacctctcagctcccccccgaatacaaagtggatcgccctgtatcgacctccatctattttctcgttccttctgggagtgtgtctcgcctccatcgcataccctgcgccgaaacctggcatcattacatcggcgaccctctcaccgtagtggaattgaatgagaaagatgggagcgtaaaattcacttgccttggatcagatctgactcagaatcaggtgccgcagtacacggtgcctcccaacgtctggtttggctcttttcctaccaaggactttacctactctgcggacggggtattcggaagtgctgaagctgaagctgaagctgaagctagagatagtgagaggaactacactcttgtaggatgcacttgtgcccctgcgtttcagtaccaggacttcgagctcgctaagccttcttatc

SEQ ID NO: 227136 - DNA, 515 bp, Glycine max
catgacttgagttctcattttccgttccccgcgacactcgacacactaaataaataacataacataaaatactatacacccctttcttggtgttcgtttctcatcacttcgtaaccaagatcatggaggaaaggaagcaatcgcgttacgtgaagctgactaaggacaatgtttctatggaagatatcacgcctggtgaactcaatcagccaattgaggttcctcagttggctgttcacaagtgcatggaatgtgggcagccattacctgaaagctatacacctcctgctgatgaaccttggatgactgggatctttggatgcactgaagatagggaaaattgcttgacagggctgttatgtccttgtgtattatttgggcgcaatgtagaaaccttgcatgaagaaactccttggactggaccatgcatttgtcatgccatttttgtagagggtggcatagctctggcaactgcaactgcaatctttaatggtttcattgtcccagggacatca

SEQ ID NO: 227137 - DNA, 524 bp, Glycine max
aaacaaatgtgttcaccggaggcaagggtgacagagagcaaagaatctttctctggtttgatgcaacaaaagcataccacagatactctgtgctgtggaacatgtatcaaattgtgttcctagtggataacatcccaataagggtgttcaaaaacctaaagggcttgggagtgaagttcccctttgaccaacccatgaaggtgtacaacagcttgtggaatgctgatgactgggccacaaggggtggtttggagaaaacagattggtccaaagcaccctttatagcagaatacaaagggttccacgttgatgggtgtgaagctttagtgaatgcaaagttctgtgctacacaaggcaagaggtggtgggatcaagcacagtatcatgaacttgatgcttctcaatggagatggcttatgtgggtgcgcaagaaatacaccatctacactactgcactgacagaagccgctaccctcagcttccacctgaatggtgaagaaaccgtgacatttaagattcacatg

SEQ ID NO: 227138 - DNA, 470 bp, Glycine max
ctcattaattgcaagaatggcacttcgttgcttggtgatgtccctttctgttctcttcactcttggtcttgcgagagaaagccatgccagagacgaagatttttggcatgctgtttggccaaacactcccattccaagttcattgcgagatcttctaaagcctggccctgcaagtgttgaaatcgatgatcaccctatgcaaattgaagaaacacagtacccgaaaaccttcttctataaagaagaccttcatccaggcaaaacaatgaaagtacaattcagcaagcctgcctttcaacaaccatggggtgttggtacatggttaaaggaaattaaagacactactaaagaaggatatagttatgaagagctatgcatcaagaaagaagccattgagggagaagagaagtgttgtgcaaaatccttgggaacagtaattggatttgccatttcaagctgggaaagaacat

SEQ ID NO: 227139 - DNA, 585 bp, Glycine max
gtttagggtttcggtttttgacccaacctttgacgtatcgaaaccttaagttcggatcaggtctgagcaatctggttggtagaacctttggtcttagagagtcaagttttatgtctgaattagacgatcaaattcctactgccttcgatccttttgctgatgcaaatgctgatgactcgggtgctgggtcaaaggagtatgtgcatattcgcgtacagcagcgaaatggaaggaaaagcctgacaaccgttcagggattgaaaaaagaattcagctataacaagatacttaaagatgttaagaaagagttctgttgcaatggaacagttgttcaggacccagaactaggacaggttattcaacttcaaggtgatcagaggaagaatgtttctaccttcctggtccaggctggtatcgtgaagaaggagcatatcaagattcatggtttctgagcggttggagtctcaagtgtcaagtcttacgtgcctgcctatgtgttgggcatatataatctgagttgtgtatgtgaatgtggcatatctgatgtgttcttatgttttaccatgtgatgtgggattatggatt

SEQ ID NO: 227140 - DNA, 580 bp, Glycine max
atctgcagatcagagaacaagattaatggtgtcaactgagaggttgaataagaccagtgatagagttaaggatagtaggagaacaatgttggaaacggaagagcttggtgtctcaattcttcaagatttgcattcacaacgacaatctctattgcatgcacataacacgctccatggagtggatgataacataggcaagagcaagaaaattttgaccaacatgtcaagaaggatgaacaagaacaaatgggttattggtggcattgttttggtcctggttatagctatcatcgtgatcctgtacttcaagttttctaaatagcctatgactgtcatttccttgtaatggccataaaggtcgctaagatacgaggatttactattgtttcccattgttccccccttctcttctgattatgatttgtgagtgttcggacaaagatggtgctgtgcagtgctgccagatgatttcatactgttgttggcttctttcaatgtatgtatctgatgatgggtttggcatgtatggaatattggttttgatttctttatggccagttatcgcatgaatgttatcatg

SEQ ID NO: 227141 - DNA, 624 bp, Glycine max
aagctcttgagtatgaaaattttgacaaatttgatagagttcgttacccaaaaatccgctatgctggaatgcttgaatatgatggtgaattgaaacttccaagtcattaccttgtttctccaccagagattgacaggacttctggtgaatatttagtgtataatggtattcggacttttgcttgcagtgagactgttaaatttggccacgtcacattcttctggaatggaaaccgctctgggtattttaatgcagaattggaggaatatgtggaaattcctagtgattctgggattacattcaatgaacaaccattaatgaaagcattgcagattgctgaaaaggctagggatgctattcttagcgggaaatttgatcaggtacgcgtcaaccttccaaatggtgacatggtggggcatacaggtgacattgaagcaacagttgtggcatgcaaggcagctgatgctgctgtgaagatgattcttgatgcaatagagcaagtgggtggaatctatgttgtcacagctgacccacggaatgctgaggatatggtcaagagggataaatctggaaaaccacttctaggcaggggatggaaaatccagattcttactttccatactc

SEQ ID NO: 227142 - DNA, 577 bp, Glycine max
  unsure (1)..(577): unsure at all n locations
tgttgttgttgttgttgttgttgttgctgctgctgctgcaatgaagggtggtggtgggaagagaaaggcttctacctcggaggctccgaacgatgttgttgttgttgttgctgctgcttctgctccttctgatgatgctgatttgggtgttggagatgtcggnggtgtgaaagttcaaaactttgagggaaacgagggtacccagttgcggaatactgaagaacaggaagaagaaccccaccacgtggagggtgatgaaggaggagaagacgaagaagattatgccgagggagaggaagaatatgaagaagaaaatggtggtgctgttgctgggggacaacaaggttttcctgctcttggtgaaaatttctttgaagttgaagccatacgtcgtaagaggttgcgcaagggtgaggtgcaatacttaatcaaatggaatgggtggcccgagacagccaacacttgggagcctctggaaaatctagagtctgctcctgatgtngttgaagcttttgaggagagctttgagtccggaaaacatcgtaagcgcaaacgcaagcatgtagtgcatcatact

SEQ ID NO: 227143 - DNA, 502 bp, Glycine max
ctccacagttcaggttgttttgcaggatactggggtcattgctcctgagagccacccggttcatcttcatgggttcaacttctttgttgttggctctggtgtaggaaattatgatcccaaaacggatcaaaataactttaatcttgcggatcctgttgagaggaacacaattggagtgcctactggagggtgggttgctttcagattcagagcagataacccaggagtgtggttcttgcactgccatttcgaggtgcatacaacatgggggttgaagatggcattcttggtggacaatggtaaaggtcctaatgaatcactgctacccccaccaaaagatcttccaaaatgttagacttttcagtcatcgattgaacaacacacagacaagggaaggatacagagaagctaggaaaaacaagagaataaaggggatggtggttatttaataagcaggatgtcccacttgcctttttgagctaatgggagcatttttcacagt

SEQ ID NO: 227144 - DNA, 567 bp, Glycine max
  unsure (1)..(567): unsure at all n locations
aaaataaaaacgcgtatcantgtagctcatatcaaaatanaggggaaaaacccangcgcgggcgcggaatttcgggccaccactcctccactaacccagcattttattcttttacaacaatgactaccacccttggggagggggttaaatatataatacccgtacagactctatatgccttggaatgtacgtagaaacaatacctttgcgtcagatactcgaatggtttttcatctctgagacaaagatcatcaatgaacatctggataagattaacacaaaaggcttcctcaccatcaatagccagccagctgtcaatggggaaaagtcacacactcctactgtaggctgaactggacctggtggctctgtactatcataaggcatatgtcaagtttatctgctctaatgaaaagctggaagcactcgttgataaatgcaaggatccaacatctgtaacttatatggctgagactaatccatggaacaggaaatttaatgtgggtcaaactgaccgtaatgctgagacatggggtgacatcacagctaggagataattcaaccaac

SEQ ID NO: 227145 - DNA, 491 bp, Glycine max
  unsure (1)..(491): unsure at all n locations
aacaagtggacctcttgctgattttattggacgtaaaggggcaatgagagtgtcaagtgctttctgtgtcgcagggtggcttgttatttatttttctgagggtccagtgcctttggacattgggaggttagcaacaggatatggaatgggagttttttcatatgtggatcctgtctttgtagcagaaattgcaccaaaagaactccgaggggcactgactaccttaaatcagttcatgatagttactgctgtgtctgtgtcattcataattggaaatgtactttcatggagggctttagctataattggtctcgttcccactgctgtgttgcttttgggtctgtttttcattccggagtctcctagatggctggcaaagagaggacataaaaaagattntgtggcagcactgcanatacttcgtggcanagatgctgatatatctgaggaggcagaggaaattcangattatataactagtttggagcagc

SEQ ID NO: 227146 - DNA, 521 bp, Glycine max
tcgatttatcgctcttttatgtggttggcttcctttcgctctcttctctgcaaatgcttcattccaagatggttaggactctgtaggctgataaagacaacactcataccgttggaaagaaggatgctgctggccatgttgcttaatttagttcttgcttcctttgtcttcttgagttttatcagagacgggagtgcagggatcactagctctttcattcggtcagagtggccggcagttgacatcccccttgatcatgaagcatttgcagttccaaagggttataatgcacctcaacaagtgcacatcacgcaaggtgactatgatggaaaagcagtaatcatctcatgggtgaccacagaagagccagggcacagccatatacagtatggcacatcagagaataaatttcaaactagtgaagaaggcacagttacaaactatactttccacaaatacaagtctggctacattcatcactgtcttattgaaggccttgagtatgagactaaatactacta

SEQ ID NO: 227147 - DNA, 491 bp, Glycine max
gaaaaagaagggaattcgtgtggcaggaatagggcacaggatcaagaatagggacaacaaagataagagagttgagctgctacagaagtttgcacgaacacattttccttccgtgaaatacatggaatatgctgttcaagttgagacctacacactcacaaaggcaaataatttagttcttaacgtagatggtgcaattggatctcttttcttggatcttcttgctggtagtggaatgttcaccaaacaagagattgatgaaattgtggagattggctatctgaatggcctctttgtgctggcacgctccattggtctgattggacacacctttgaccaaaagcgattgaagcaaccactttaccgtcacccatgggaggatgttctctacacaaagtgaggaagttttgtgcgactgtaagaacttttacatgcttcaaattagcaatcttttgggaaatcatgcatctgatataagctggagtgatttt

SEQ ID NO: 227148 - DNA, 428 bp, Glycine max
ccttcaccccttccttttttgcgtacattttgttttcatagtgaccaacttctgaagaaatggggaaggatcctttgacacactctcactctttacacgagagggttgatgaaactcttactggtcacaggagctaagatttggcccttctgtcaaggcttgaagccaagggcaagggaatcctgcaacatcaccaagtggttgtagagtttgaagaaatccctgtggagggcacagagaaactccaagatggtgtctttggagaagttttgagatccacacaggaagccatagtgctggcaccatttgtagctgttgctgttctaccaaggcctggggtatgggaataactgcgtgtgaatgagcacatgcttgttggagaggagcttccgcctgctgagaatctgcgatataaggaggagcttgtt

SEQ ID NO: 227149 - DNA, 594 bp, Glycine max
gcttctgtagttaatttgcttcccttttttcacactcactctcactaaatggcttcctctgttgctttagttttgggtctatgtctagcactcaacatggttctgccgacacgtgcagctacccacacagtgggagacacctcaggttgggcactcggtgctgattacagtacatgggccagtggcttgaaattgaaagtcggagatagtcttgttttcaattatggggctggtcacacagtggacgaagtgaaagaaagtgattacaagagctgcaccacaggcaattcactaagcacagacagcagtggcaccaccacaatcaccctcaagactgccggcactcactacttcatatgtgcttctcctggccattgtgatggtggtatgaagcttgctgttaaagtaaaggctaaaaaagcatctgctcctgctacagcaccttcaccagctgcaaaggactcaccttctgattctgatgacaccaaagacacacccacttgcacctccactaaccctaaaacttcaacctccactaccccttcaactgaaacctgcaccactaccacatcttcttatacatcatctgcaact

SEQ ID NO: 227150 - DNA, 582 bp, Glycine max
  unsure (1)..(582): unsure at all n locations
caaccatccattctttcacacacagatctgagttaggttaggtttattttgaaaacaaaaaaaaatccccaatgtcgcagcaattagggttcgcgatcgagctatacctagaccctgcgttggagaatcaggttctgaaagcatggaacgttcttgcgagaagacaaatcagcacgcacctgatagaaatggagtctcggccacacataaccctattctcggcgccatttctagaaccttcgaagctcgaatctctcctgaaaggcttcgcatcgaagcacgatcctctccctctcaccttctcttccctcgccactttccccaacgaccccgacaacctcctcttgctcgccccaaccccttccctctcactcctccaccttcagtcacagctctgtgacgctatcagaaaagaaggcctcgaaatcggtgacgattacgctttcaattcctggatcccttattgctccgttgcacaccatgtccncaaaaacagaatgcctgaggctttctccctcttgagggaactcaagcttncggtttccggttacgccatggatatcgctctcgtcagttctctcg

SEQ ID NO: 227151 - DNA, 544 bp, Glycine max
cggctcgaggtggagatggaggctagcatcatggatggtccaaaacgacgatgcggcgccgtttcgggtcttaccaccgttaagaacccgatctcgcttgctcgtttggttatggacaaatccccgcattcctacctcgccttctccggcgccgaagaatttgctaggcaacagggtgtggaggttgtggacaacgagtactttatcacacctgacaacgttggcatgctcaagctggcaaaggaagcaaacacaatcctgtttgattaccgaatcccaacatcggggtacgagacgtgcggatccggtgtggagagtccactgcaaatgaatggactcccaatagcgtgtacgcgcccgaaaccgttgggtgcgtggtggttgaccgggagggccggtgcgcggcagcaacatccacgggagggctgatgaacaaaatgaccgggcgcatcggtgattcgccgctgataggcgccgggacctacgcgtgcgacgtgtgcggcgtatcgtgcacgggtgaaggcgaggccatcatacgtggcac

SEQ ID NO: 227152 - DNA, 423 bp, Glycine max
atcactctcaactttactcctcttcaatcagttgcatattctttgctattccaatggccactgttgaggttgtgtcagccaaggttgccctcccagaggacacaaaagaggcatcattgaaggttgacgaggagaagaacacagaagaagttgttgagactccaacaccagaaactgtggtcactgagcaaaccaaggaggaaagtactgaggccccacgacctgcagcttcagaagacaagccctcggttgaagttcagactaaagaggtggcagaggaagttgtgtctgagaccatcacacaagagccaacagttgagaagcaagaagctgctgagggaacaaaagaaaatgccgatcctgctgagattaagacaccagaagctgcagaagatgttaatattaaggaagagaaagaagctg

SEQ ID NO: 227153 - DNA, 505 bp, Glycine max
ggacatggaccggatcaagggcccgtggagcccggaggaggacgaggcccttcagaagcttgtggagcggcacgggcccagaaactggtcgctcatcagcaggtccattccgggccggtctgggaagtcatgcaggcttcggtggtgcaaccagctgtcgccccaggtcgagcaccgggccttcacaccggaagaggacgagaccattattcgggcccatgcccggtttggtaacaagtgggccaccattgcgcgcctcctctcgggccgcaccgataacgccatcaagaatcactggaactcaaccctaaaacgcaagtgcgcgttcttcatgatggcgggtgatgaagccgtcgccgtgagtccgaggccgctcaagcgatccttcagcgccggcgcggcggtgcctcctaccggaagcccctccggatccgatttcagcgagtccagcgctcccggcgtggtctcggtctctccttcgcacgtgtttcgccccgtgccggtt

SEQ ID NO: 227154 - DNA, 522 bp, Glycine max
gtgattatagactatctttatataataatataaataagaataaaaaaataaaaaaaaaaaaagagaatctatataaatataaaaataatatatataaggtacaaatagtaaatcgaggtacccattttatgataaactttccttccatttttgttcctctagtaggcctagtatttccggcaattgcaatggcttctttatttctttatgttcaaaaaaacaagattttttagatacagaaaacaaagtaaaattctggggttttttattccccaattataatactaaattcaaaaaaaggagagtaatgagtataatctttcgctcagacgatgtactgatatattctatggcggaggttcgaagaacaagcaatttattttgggccgttttcactttgataggatcattggggttattgttcgttgcaatttccagttatcttggtatggatttgttctttatttctgagaaaattagtgatttttcttttattccggactttatttattttccatttat

SEQ ID NO: 227155 - DNA, 556 bp, Glycine max
  unsure (1)..(556): unsure at all n locations
aagaaggcgtcttcataaacgcctttcttctccgtttccgtttcctcgttcgaattcgctttttgatctgcgaaaatgagagagtgcatctcgatccacattggtcaggctggtatccaggtcggaaatgcttgctgggagctctactgcctcgagcacggcatcgggcccgatgggcaaatgccaagtgacaagacagttggcggtggtgatgatgctttcaatactttcttcagcgagactggtgctggaaagcacgtgccacgtgcagtgtttgtagatcttgagcccactgttattgatgaggtgagaaccggaacttaccgccagcttttccacccagagcagctcatcagcggcaaagaagatgccgccaacaactttgcccgtggccattataccattgggaaagagattgttgatctgtgcttggaccgcatcagaaagcttgctgacaatngcactggactccaagggtttttggtcttaatgccgttggtggaggaactggatctggactagttttccttctttggagcgtctctcacgtgatatg

SEQ ID NO: 227156 - DNA, 546 bp, Glycine max
cgacgcacgcagcagcatcagcttctactcgtgtaatctctgcgtgggctacaatggattccggtgtccaaggttgcatcttagccactttaattctccacgacgaggaaatcccagtcaccgctgagaagatcaacgctctgttgaaggcttctaatgtctccgccgagtcttactggcccagcctcttcgccaagctcgcccagaataagaacatcgaagacctcattttgaacgccggcggtggtggggccgccgttgcagttgccgctcccgccggcggtggtggtggtgccgctgctgcagccgcacccgccgccgaggaaaagaaggaagaagtgaaggaagaaagtgacgatgacatgggtttcggcttgtttgattagatctttttatatagttgtagccagattttgagtctttgaattgaaatcttgttttgttctatataaatcttaatggaaggggatcttagccaatctactatcataattggttgaaatttggtggatatttaatatatttgtggccactaaatcttatttt

SEQ ID NO: 227157 - DNA, 508 bp, Glycine max
  unsure (1)..(508): unsure at all n locations
catgcggccacgtgcacgggacaagaagcttgttgaagaatgggcagttcccttgaaaagcgttgaagatatatatgagaggtttagactgtattgccttggaaagttgagaagcaatccttggtcagaacttgatggtcttcagcctgagacaaagatcataaatgagcagctggagaagattaacacaaagggcttcctcaccatcaatagccagccagctgtcaatggggaaaagtcagattctcctactgtaggctggggtggacctggtgggtatgtttatcagaaggcatatgtagagttcttctgctctaaggaaaagctggatgcacttgttgataaatgcaaggatcgaacatctttaacttatatggctgtgaataaagatgggagctggaaatctaatgtgggtcaaactgacgttaatgctgtgacatggngtgtcttcccagctaaggagataattcaaccaaccattgtagatcctgtcagcttcaatgtatgg

SEQ ID NO: 227158 - DNA, 552 bp, Glycine max
ctttgtcgcaaagagaagagatctgcctcctctttatcaaatctatctcttcttcaagaatagttgaaaatggggctgtctttcaccaagttgttcagccgactgtttgccaagaaagagatgcgtatactgatggtgggtctcgatgctgcgggtaagaccaccattctgtacaagctcaagcttggagagattgtcaccaccattcccaccattgggtttaatgtggaaactgtggaatataagaacatcagcttcactgtctgggatgttggaggtcaggacaagatccgtcctttgtggagacattacttccaaaatacacaaggacttatttttgtggttgatagcaatgacagggaccgagttgttgaagctagagatgagttgcatagaatgttgaatgaggatgagttgagagatgctgtgcttctagtttttgccaacaagcaagatctttcaaatgctatgaatgctgctgagataactgataagcttggtcttcattcgctccggcagcgtcactggtatattcagagcacatgtgccaca

SEQ ID NO: 227159 - DNA, 341 bp, Glycine max
ctgagcttccattgtgctcactcatctcttacaacgaaaccctcttcatcttgttctatctgggacgagcatcatggcctcaagagcagtgttattgttggctatgtgtgtgcttacggcgatggatgtggccattcgcccagcaaagaaccatttttgcgtgaagggtcgtgtctactgtgacccttgccgtgctggttttgagacctcagctaccacctacattgctggtgctgagattatgttgcaatgcaagagcacggttagcaacgaggttgtgtacacgaagaaggggtacaccgactcaaccggagcatacacaatgtacgtggatgaggatc

SEQ ID NO: 227160 - DNA, 570 bp, Glycine max
gctcgtgcctctagggttatcatatctccatttccatttcctctctctcagtttccaagaatcttaagctatgggaaagtcttacccaaccgtgagcgctgattaccagaaggccgttgagaaggcgaagaagaagctcagaggcttcatcgctgagaagagatgcgctcctctaatgctccgtttggcatggcactctgctggaacttacgacgtgagctcgaagaccggtggtcccttcggaaccataaagcacccctccgaactcgctcacggcgctaacaacggtcttgacatcgctgttaggcttttggagccactcaaagcggagtttcctattttgagctacgccgatttctaccagttggctggcgttgttgccgttgaggtcaccggtggacctgaagttcccttccatcctggaagagaggacaaacctgagccaccaccagagggtcgcttgcccgatgccactaagggttctgaccatttgagagatgtgtttggcacagctatggggcttagtgaccgagatatcgttgctctgtctggggtcacactattggagct

SEQ ID NO: 227161 - DNA, 286 bp, Glycine max
tatcagaccaacattgggtacccataaaatggccttgcttccaaggaaatggcaaacagggttagttccaggatcaactcccataagttgatgaagcatttgatgattcattccagaagtattggagtggcaaatagcaagagcctgagatgtggtttcatcaccagccaccactggaaccatgagagctgtagcttgacggacttcatggcagtgaaatactgcagttctgaaatttagcctatgacgcatcacggcagcgtctcccagaatgtgaacttcatga

SEQ ID NO: 227162 - DNA, 636 bp, Glycine max
  unsure (1)..(636): unsure at all n locations
ttcatggattgcgtgaattgtctgatcaggtttgccaacaataaaacttcacatcgtattagcttgaaggctattgcactcctgcggatctgtgaggaccgtctggcagagggtcttattcctggaggtactttaatgcctattgatgctactgtggatgcaactttcgatgtaacggagcattattggttcccaatgctggctggtttatctgatctaacatcagatcaaaggcaagaggtcagaagttgtgcacttgaagtcttgtttgatttactgaatgaaagaggtagcaagttctccacagcattttgggagagtatattccatcgcgttctgtttccaatttttgatcatgtgagacatgctgggaaagagggctttatttctcctgatgatgattggtttcgtgaaacaagcatacattcacttcagcttctatgcaaccttttcaacacattctataaggaggtttgttttatgttgcctccactactgggtctgttgttagattgtgccaaaaagacagatcaaacagtggtctcaatatctcttgggtgcttggtgcatctcattgaagtnggtggacacccattcagtgaaagtgactgggacacactacttaaagcataagag

SEQ ID NO: 227163 - DNA, 383 bp, Glycine max
  unsure (1)..(383): unsure at all n locations
gagaatcttgaatagggatttggatccggggttcttcgtaaaccactttgttaaggatttggggatttgcttgaaggagtgtcagaatatggggattgctttgcctggcttggctctggcgcaacagctttatgtgtcgcttaaggctcatggngaaggtaatttgggtactcaggctcttattttggtcctagagcgactcaacaatgttacacttcctccctccaatacctgaagaaaattttaaacatgctttgtattgtatccatcatcgtctactttactttacttccctgccattgctatgcagtctacagaatcgtatcgcataacaaaaactttcaatcccgaagctgattattgcaatgagcagtgtctttttt

SEQ ID NO: 227164 - DNA, 554 bp, Glycine max
ccattcctaagctcactctttctaagtttcttctatcctctctccgccatggttctctccaaaaccgcctccgaatccgacgtctctgtccactcaaccttcgcttctcgctatgtcagaacttcgcttcccaggttcaagatggcggaggagtcgataccgaaggaggcagcataccagatcataaacgacgagttgatgttggatgggaacccaaggttgaatttggcatcatttgtgacgacttggatggagccagagtgtgataaactcatcatggctgccattaataagaactatgttgacatggacgagtaccctgtcaccactgagctacagaatcgatgtgttaacatgatagctcatcttttcaatgcaccactagaagagactgaggcagcagttggtgttggcacggttggctcatcagaggccattatgttggctggattggcattcaaaagaaagtggcaaaacagaaggaaacaagagggaaagccttatgacaaacccaaacatgtcactggagccaacgttcaggtttgctgggagaa

SEQ ID NO: 227165 - DNA, 561 bp, Glycine max
tagcttaaaagagcctctgcttaacatggatgctgttgttgataactacctagtggcctcagctggggatggactaaatgtgctcctcacaagaggtacagggcgaatgccgagtatgatgcacttaatccctatatttgcaatccaagaaggagggaacgcccctactactttgaagcttaccaccaattatcttaatgatcatgcgtctaccaccaccgagcatgcatttaccaccacaccagactcaaaaggaaagaaaccagaagttgttgagtttgactcaactggcactgccaatactccagaatcaatccagcgggcaagggaaccattggttttgaaaaacaaagctcctagatggcacgaacaactgcaatgttggtgcttgaatttcaagggaagggttacagtggcctctgtgaagaacttccagcttgtatcagtttgtgaaccatgccaaaatgttttagctgcagaacaagaaaaagtgatactacaattttgaaaaaattgtgaaggacatatttaccatggattaccgaatccccctcttagctt

SEQ ID NO: 227166 - DNA, 538 bp, Glycine max
  unsure (1)..(538): unsure at all n locations
agaaaagcgtgaatcatgtcggacgaagagcatcacttcgattctcaggcggatgcgggagcgtccaagacgtatcctcagcaggctggtaccattcgcaagaatggctacatcgtcatcaaatccaggccttgcaaggttgtagaggtctctacgtcaaagacaggcaagcatggacatgcaaagtgtcactttgttgcaattgatatttttaatgggaaaaagcttgaagatattgttccatcatcccacaactgtgatgttccacatgtgaatcgcactgactatcagcttattgatatctctgaagacggctttgtgagtctgttgactgataatggaaataccaaggatgatctgaagcttcctactgatgaggcattgcttgctcagattaaagatggattttctgaaggaaaagatcttgtggtttctgttatgactgcaatgggagacgaacagatctgttcactgaaggacatcngtcccaaaattaatatgatgctatggctgtagctatagctgatagcacgctttt

SEQ ID NO: 227167 - DNA, 583 bp, Glycine max
aatccgattgtgtgtcgatgcacactcctacttcttctcatgttgcactgcgtttgactgtgtatctcgggtcacgggaaaatgtcttgctgccgagggaactgtggttgccgaagctcctgcaagtgcggcacccgctgccgaggctgtatgatgtacccacacttgagctacactgagtcaaccaccaccgagaccttggtcatgggagtggcacctgttaaggctcaatatgagggtgctgaaatgggtgtgcccgctgagaaccatggctgcaatatgtggaccaaactgctcctgcaacccctgcacttgcaagtgaggtgttgggagagcaagcttcaagcagagatagcccttaattaggaataatgataaactattaatgtgtagctaaaaacttaagtattatgtctgtgatggttttcgtgcactctggtgttttgtgttaaacaacatccttagaataaagtggtcatgtcttgcctttcagcaaggtcaagggctttggacttttgaatgggtgtctctaacctcaaagggtgctctctcttttttttttttttaaagggtggggaaaatg

SEQ ID NO: 227168 - DNA, 617 bp, Glycine max
  unsure (1)..(617): unsure at all n locations
tgagaagtacagcactagggtgaaggatgaagaggggtgccctgctttctctttgatcaacaaggccactggtgaagccttgaagcactccatcggtgccactcatcctgttcggctgataccttacaagcccgactatcttgatgagtctattctatggactgaaagccgtgacttaggagatggccacagagctataaggatggtcaacaatgttcatcttaatgtggatgcttttcacggtgacaagaattctggaggtgttcgtgatggcactacaatagtcctctgggactggaacaaaggtgataaccagcagtggaagatcttaccttactgatttcaattgacgaaattatcaatggctttgaagatgcatcaagttaagaggatagttggcccttgtatttgagtggtttggtgttgcctagagtatggaatggtgtgtagtgcatttgcttgtaccaagcaatcggcttttttcaatagattaagtgcgttatatgtaatatttatggcatacatgtgacactggttaatgtgccgatggccatatatatatnggtataccagtcatgtatgtccttatatcttaatatgattcagtgtgaacaact

SEQ ID NO: 227169 - DNA, 525 bp, Glycine max
aatcatcttttgtttgttcttcagtactttagtgtgtgatttaattccaagattttgagaatgtctagctgtgggtgtggaagtagctgcaactgtggcagcaactgcggttgcaacaagtactcttttgacttgagctatgttgagaagacaaccacagagactcttgttttgggtgttgggtctgtgaaggcccaattggagggtgctgaaatgggtgttgcagctgagaacggtggctgcaactgtggatcaagctgcacctgcgacccatgcaactgcaagtgaggtcaagatttataaccttgaagcagagataactgtaatatatgtatcaacaaataataagaattacgtgttgtgtttaataaagtgatcatggctcgaatttgcaaattcaaatgttctaggatatttgttgcgagtgtttgaagtatggttgcttagtgtttgcttggtctatcataaatatgtaaaatgtgaatcatcaatctctgcttataaatggactactgttggtgttat

SEQ ID NO: 227170 - DNA, 385 bp, Glycine max
agtactgtcaagccacacctgtcatgaggcagccatacctataccttcttgatgcatatttacgtcgcgaccctctgcggtatgaccatcacgctggaagtggaaaggtctgacaccatctacaacgggaaggccaagatccaggagaaggaaagacagcccccggaccaacaacgtcttatgtttgtcaggaagcaacttgaggacagtcggaccgttgctgactacaacattcagaaggagagtcctcttcacctaggactacggatacgaggtggcatgcagagcttaaataagacactctcgcggaagaccataaccctagaggttgaaagctacgacaccatcgatgacggcaaggccaagatccaggacaaggagggta

SEQ ID NO: 227171 - DNA, 568 bp, Glycine max
  unsure (1)..(568): unsure at all n locations
tgcaaagccgaagcagagtttcaattcaattcaatagcgatttagagtttccgaaaagaaattgatttcacgcatttttagtcagtatcagatggatcactttgcagcacatgaagagcaacttgcttcacagagaatgaggcagaaacttgaagaagtaaatgtggctgctcaaactaatcttgcccctgtccaagactatgtcaattacacgctccagaaagcatattttaagtgtgcatatgagtgctttgatagaagcaaaaggcaggaagaaataagcagttgtgtcgaaaattgcagcattcctctttctaatgtgcaacatacatttgatcatgagatggcacagtttcaggagaggttgaatagatctctgatggtgtgtcaagataagtacgaggcggctaggctacagaagaaaaatgatgctatgaatgatttggtttcctgtgctgaccagtcaatccaggaaagcatcaagacgctgccacatcttgccaacaagttgaaagcttcctttggaatcagtgacaatggctcctagtagcacgttnttctagtggga

SEQ ID NO: 227172 - DNA, 550 bp, Glycine max
cagaatcgtcatcctcaaaatttatgattatattttctttctctacttcgtcactacctctttctcatgagagagtatgttactgcgcaaagaacaacaaactaattaggtactgaccatttccgtctatatataaggccaataacccaacacgttctataaacatatagtgactaacctcccactgaagagtaattggtggattccagcaatggccgtggttcatggcagttgggtcaagcttgatcaaagaggagaagggcaaggagcgagaagctcacatgctatagccatagtagcacagaaggtgtatgcatttggtggcgaattcgtgccacgtgtccccgttgataacaaacttcacgtgttcgacctagagactttgacttggtccgtggctgatgcatcaggggatgccccaccgccacgtgtcggtgtcacaatggccgtagtgggagaaaccatatatgtctttggtggaagagatggtgaacacaaagagctcaatgagctctattcttttgacacaagggccaacaaatgggccttg

SEQ ID NO: 227173 - DNA, 532 bp, Glycine max
cgacgtggaaaaactcaagtccgggttagatttcattggagtaaaccactacaccagtgcctttgccaaagactgcatcttctctgcgtgtgaacaaggacgagggtcttcaaggactgaaggttttactctaagatcgccacaaatgaatggtatcagcattggagaaccgactgcacttgactggttgtatgtccacccacaaggcatggagaagatactgacttacttaaagcacaggtacaacaacataccaatgttcattaccgaaaatggaattgggatgagggagaattccaaccatgccactaaagaaatcatcaatgatgtcgaaagagtggaatacttgcgtggttacttggattccttggcaacagcaataaggaaaggagcagacgtgagagggtactatgtgtggtccttgcttgacaactttgagtggactgatggatactctataaggtttggacttcatcatgtggactatgcaactctcaacagaaccccaagaatgtctgcattttggtacaaa

SEQ ID NO: 227174 - DNA, 484 bp, Glycine max
agcactactagatcgcgagcggccacccatactggttttattgcacctgagagccaccctgttgggtttggggggtttaactattatgatgtcggctctggtgtaagaaattatgattccaaaacgcatcctaataacatacatcttgcgtttcccctagttaggcacacatttgtactgccaactggtgggtgtggttcttttagatgcttaccttataacccaagagtgtggttcttgcactgccatttcgaggtgcatacaacatgggggttgaagatggcattcttggtggacaatggtaaaggtcctaaatgaatcactggtacccccaccaaaagatctttcaaaatgttagactcttcagatatctattgaacaacaccccgacaagggaacgattcttccaatctaggaaaaacaataaaataaaggggatggtggttatttaattaccccgatgtaccacttgcctttttgagct

SEQ ID NO: 227175 - DNA, 551 bp, Glycine max
catgcggccacgtgcacgggacaagaagcttgttgaagaatgggcagttcccttgaaaagcgttgaagatatatatgagaggtttagactgtattgccttggaaagttgagaagcaatccttggtcagaacttgatggtcttcagcctgagacaaagatcataaatgagcagctggagaagattaacacaaagggcttcctcaccatcaatagccagccagctgtcaatggggaaaagtcagattctcctactgtaggctggggtggacctggtgggtatgtttatcagaaggcatatgtagagttcttctgctctaaggaaaagctggatgcacttgttgataaatgcaaggatcgaacatctttaacttatatggctgtgaataaagatgggagctggaaatctaatgtgggtcaaactgacgttaatgctgtgacatgggggtgtcttcccagctaaggagataattcaaccaaccattgtagatcctgtcagcttcaatgtatggaaagatgaggcatttgaaattttggtcaagaggatgggcaag

SEQ ID NO: 227176 - DNA, 546 bp, Glycine max
cctcagtggagcagcttggcttggctcggaaaattaccatctccaaggattctaccactatcattgctgatgctgcaacaaaggatgagctgcaagccagggttgctcagttaaagaaggagctgtcacagacagactcagtatatgatactgagaaactggctgagaggatagctaaactgtctggtggagttgcagtcatcaaggttggtgctgccacagagaccgagcttgaggatcgtaagctccgaattgaggatgccaagaatgcaacttttgctgccattgaggaaggtattgtacctggtggaggtactgcactggttcatctctccactcatgtcccagcactcaaggacaagcttgatgatgcagatgagaggctaggagccgacattgtgcaaaaggcactgatagctcctgcagcattgattgctcaaaatgctggaatagaaggtgaagttgttgtggagaaaataaagaagtgtgaatgggaggtcggttacaatgctatggtagacaggtatgagaatttagtggaggctg

SEQ ID NO: 227177 - DNA, 534 bp, Glycine max
cctcagtggagcagcttggcttggctcggaaaattaccatctccaaggattctaccactatcattgctgatgctgcaacaaaggatgagctgcaagccagggttgctcagttaaagaaggagctgtcacagacagactcagtatatgatactgagaaactggctgagaggatagctaaactgtctggtggagttgcagtcatcaaggttggtgctgccacagagaccgagcttgaggatcgtaagctccgaattgaggatgccaagaatgcaacttttgctgccattgaggaaggtattgtacctggtggaggtactgcactggttcatctctccactcatgtcccagcactcaaggacaagcttgatgatgcagatgagaagctaggagccgacattgtgcaaaaggcactgatagctcctgcagcattgattgctcaaaatgctggaatagaaggtgaagttgttgtggagaaaataaaagtggtgaatgggaggtcggttacaatgctatggtagacaggtatgagaattt

SEQ ID NO: 227178 - DNA, 582 bp, Glycine max
cacaacacaacccatggccaccacctccgcattcctcctccttcccctcctcctgctgctccacctcgccatcgccgctcacggcatcggcatcaactacggcacgctcggcgacaaccttccaccgcccgcggcggtggcgaacttcctgaagacgaagacgaccatcgaccgcgtgaagatctacgacgtgaacccggacatcctgcgggccttcgccggcagcggcatctccgtgacggtgaccgcccccaacggcgacatcgccgccttaaccaaaatcgactcggcgaggcagtgggtggcgacgcacatcaaaccctttcaccctcagaccaaaattaattacatcctcgtcggcagcgaggttctccactggggcgacaccaacatgatccgcggcctcgtccctgccatgagaacccttcactcagccctcctagccgagggcataaccgacattaaggtaaccactgctcactctctggcgataatgcggtcatcgataccaccaagtatgggcaggttcaggcccgggtacgcaaagcacgatgtgggcccaatgctgaagttctgagggag

SEQ ID NO: 227179 - DNA, 567 bp, Glycine max
cagaattgatgccattgagtcatgttcttgcaactaaactcggtgctcgtctcaccgaggttcgcaagaacggaacctgcccatggttgaggcctgatgggaagacccaagtgactgttgagtattacaatgacaacggtgccatggttccagttcgtgtccacactgtgcttatctccacccaacatgatgagactgtgaccaacgacgaaattgcagctgacctcaaggagcatgtgatcaagccggtgatcccggagaagtaccttgatgagaagaccattttccacttgaacccctctggccgttttgtcattggaggtcctcacggtgatgctggtctcaccggccgcaagatcatcatcgatacttacggaggatggggtgctcatggtggtggtgccttctccgggaaggatcccaccaaggttgataggagtggtgcttacattgtgagacaggctgctaagagcattgtggcaagtggactaaccagaaggtgcattgtgcaagtgtcttatgccattggtgtgcccgagcctttgtctgtctctgttgacacctatg

SEQ ID NO: 227180 - DNA, 560 bp, Glycine max
  unsure (1)..(560): unsure at all n locations
aaacaaatgtgttcaccggaggcaagggtgacagagagcaaagaatctttctctggtttgatccaacaaaagcataccacagatactctgtgctgtggaacatgtatcaaattgtgttcctagtggataacatcccaataagggtgttcaaaaacctaaagggcttgggagtgaagttcccctttgaccaacccatgaaggtgtacaacagcttgtggaatgctgatgactgggccacaaggggtggtttggagaaaacagattggtccaaagcacccttcatagcagaatacaaagggttccacgttgatgggtgtgaagcttcagtgaatgcaaagttctgtgctacacaaggcaagaggtggtgggatcaagcacagtatcatgatcttgatgcttctcaatggagatggctcaagtgggtgcgcangaaatacaccatctacaactactgcactgacagaagccgctaccctcagcttccacctgaatgtagaagaaaccgtgacatttaaattcacatgtagtactatgtttatggttgctaccataagtttctt

SEQ ID NO: 227181 - DNA, 503 bp, Glycine max
gcgaagaaatcgaaggaggatttgaaggaggtgacccacaaggtttactttgatgttgagattaatggaaaagaagcaggtcgtattgtaatgggtctttatgggaaggctgttccaaaaactgcagaaaacttccgagcactttgcacaggggaaaagggaactggtaaaagtggaaagcctctccattacaaaggtagctcattccatagaattattcctagctttatgcttcaaggaggtgattttacacaaggaaatggaatgggtggagaatcaatttacggagagaagtttgctgatgagaacttcaagttaaagcatactggaccaggacttctatcaatggcaaatgctggtcctaataccaatggttcacaatttttcattacaactgtgacaactagctggttggacggaaggcatgttgtttttggtaaagttctttctggaatggatgttgtttacaagattgaagcttgaaggaacacaaaagtggcact

SEQ ID NO: 227182 - DNA, 480 bp, Glycine max
aattgagattgctaatggatgccaccagctagagaagcttgacctttgcaagtgccctgcaattactgataaggctttggttgcaattgcaaagaactgccagaatctgactgagttgtcatttgaatcttgccctaacattggtaatgaaggtctacgagctattgggaagttatgctccaatctgaagtccatatccatcaaggactgcactggtgttagtgatcacggaattgctggattgctttcttcaacttctttggttctatcaaaggtgaagctccaggcattgactgtttcagatctctctctagctgttattggtcattatggcaagtcagttactgatcttgtccttaattgcctcccaaatgtcagcgagagggggttctgggtcatgggtaatggtaatggattgcagaagctaaaatcacttacagttgcatcttgcaaggagtacagatattggcttgaactgta

SEQ ID NO: 227183 - DNA, 612 bp, Glycine max
attggaggagatgactttaagagtggtcagaccaaaatgaaatctgtgttggtggatttccttgtgggggccggcatcaagccaacatctatagtgagttacaaccatctgggcaacaatgatggcatgaatctctcagcccctcaaaccttccgctctaaggaaatctccaagagcaatgttgttgacgatatggtcaacagcaacgccatcctctatgagcccggtgaacatccagaccatgtggttgtcattaagtacgtgccttatgtaggggacagcaagagggccatggatgagtacacttctgagatattcatgggtggaaagaacacaattgtgttgcacaacacatgtgaggattcactgatagctgctcctattatcttggacttggtccttcttgctgagctcagcactcgaatcgagtttaaagctgaaaatgagggaaaattccactcattccacccagttgcgaccatccttagttacctgaccaagggccctctggttccaccgggtacaccagtggtgaatgcgttgtcaaagcaacgagctatgctggaaaacattctgagggctttgtgtggatagctcctgagaacacatgat

SEQ ID NO: 227184 - DNA, 517 bp, Glycine max
acaaactcagggtagggcagagagagagagagagagagagagagagagagagaatgggagggtgggctatcgcggtgcatggtggcgctggtgtcgaccctaatctcccactcgagcgccaagaagaagcgaaacaacttctcacgcgctgtctcaatcttggaatctctgctctaaattctaatcttcccgccatagatgtcgtcgaacttgtggtgagggaattggaaacggatccgctgttcaattcgggccgtggatctgccctgacagaaaaaggaacggtggagatggaggctagcatcatggatggtccaaaacgacgatgcggcgccgtttcgggtcttaccaccgttaagaacccgatctcgcttgctcgtttggttatggacaaatccccgcattcctacctcgccttctccggcgccgaagaatttgctaggcaacagggtgtggaagttgtggacaacgagtactttatcacacctgacaacgatggcatgctcaagctggcaaa

SEQ ID NO: 227185 - DNA, 583 bp, Glycine max
  unsure (1)..(583): unsure at all n locations
gaagtttctgtcacttgcagaagagcttgcttggacatgttataacttctaccaatcaactccaacaaaattggctggggagaactatttctttcattctgggcaggacatgagtgtgggtacatcatggaacatactgaggccagagacagttgagtccctcttttacctttggcgtctaactggcaacaaaacgtaccaagaatggggttggaatatatttcaagcttttgagaagaactcccggatagagtcaggctatgttggactgaaggatgttaatagtggagtcaaagacaacatgatgcaaagcttctttcttgcggagaccctgaagtatttttatcttctcttctcaccttcttctgtcatcccattagatgaatgggtattcaacacagaagcccaccctctgaggattgtgaccagacacgaagagggacttgttaagaatttaaatgagaagcaaaaacctttttctagaataggtggcaggaaagaaggaaggtcanngtagatatccattcttctctaccatggctgatcgaaccccttttacccaaataaaagaagagcagtttgg

SEQ ID NO: 227186 - DNA, 521 bp, Glycine max
ccccacactaaatgggaagagtatagcttgttaccctcagctcaaatactcttcaaaattgagcacactgatgttccacttacctactacactggaattcttggtatgccaggagtgactgcatatgcaggtctatttgaagtaggatctcttcagaaaggagaaaatgtttttgtttcggctgcctctggcgcagttggtcaacttgttgggcaatttgctaaactgaatggttgttatgtagttggaagtgctggatctaaagagaaggtggatctgctgacaaataaatttggatttgatggaggttttaactacaaggaagagcctgaccttgatgcagctttgaaaaggcactttccagaaggcattgatgtttactttgagaatgttgggggcaagacacttgacgccgtactcctgaacatgagagtccgtggtcgcatacccgtctgtggaatgatctcacagtataatcttactcaacatgaaggtgtaacaaatttggcacagatcatata

SEQ ID NO: 227187 - DNA, 443 bp, Glycine max
ttcagagcacctgtgcaacctctggggagggcctttacgaaggtctggactggctttccaacaacattgccaataaggcttaatgcctttgggagtcttgcggattggtaattctggatgcaggggtgaacattatctagcttttatttcttggtcctcttccaagacaactcgaatttgtgctcatgtaatgcggtttaggacatctcgaatttgtgctcatgtaatgcggtttaggacatctcggtgctaaattgtagtaggattttacttcttgggatgcgtaatactctgatctttctattgggtttggatgcaatgtccataactgtaatggagatactaattcaatgcgccaccgggttctgtctgatttatagttttattttggtcatgtatcattcatatattgagtatgaaatggagattttgtttattgttta

SEQ ID NO: 227188 - DNA, 374 bp, Glycine max
  unsure (1)..(374): unsure at all n locations
cgcttctaacgtcaccgactcagttgttgtcagcgagtgagtgagtcgtttctctgcagcaacaaggtttagccactccaaacagacgagaaatgggtcgtggggtcagtgctggtggtggtcagagttccttaggttatctctttggcagtggggtgcctgccagcagtgcaaacagtcagcctgcaaatggtgctcgcactcaaaatgctagtgctccttcaccaccagtcgataagcaaagtccagcaccagcaccagcaccagcaccagcacctgcatcatcaccaattgataagcaaattccagctggaattcctggaagtctcanaaacaattaccatcgtgctgatgggcaaaactgtggcaacttt

SEQ ID NO: 227189 - DNA, 517 bp, Glycine max
gtcttattagagtttttactaatcaattatggcttacgagataaccgagataaagaagattggtataggcctaattggtttcggcttatttttcacatttcttggcataattcttttctttgaccgtggtttgcttgctctgggaaatattttttccttggcaggggttggcattttgcttggttggcgttccacgtgggcacttttcactaatagagccaactttaagggttctgcatcatttcttctaggtctctttttcatctttgtgaggtggccaattgttggtataatacttgaaatatacggttgtgtttttctcttcagtggattttggtcatctatcaaagtgttcctctaccatatccctgttgttggatggattatacagtttatctctcctccttgattgtcacagaagggatttaacggatagcctcttagtatatggctaatcatgggtttcgattgtcttggtaatttttccaatgacttgtgtatgaatgcaatgtctttg

SEQ ID NO: 227190 - DNA, 485 bp, Glycine max
ccttcaccccttccttttttgcgttcattctgttttcatagtgacgaacttctgaagaaatggcaaatcatcctttgacacactctcactctttccgcgagaggtttgatgaaactctcactggtcacaggaacgaaattttggcccttctgtcaaggcttgaagccaagggcaagggaatcctgcaacatcaccaagtggttgcagagtttgaagaaatccctgaggagagcagaaagaaactccaagatggtgtctttggagaagttttgagatccacacaggaagccatagtgctgccaccatttgtagctcttgctgttcgaccaaggcctggtgtatgggaatatctgcgtgtgaatgtgcacatgcttgttgttgatgagcttcgtcctgctgagtatctgcgtttcaaggaggagcttgttgagggaagttcaaacggcaactttgtgcttgagttggactttgaaccgtttaatgca

SEQ ID NO: 227191 - DNA, 412 bp, Glycine max
ccattcctaccctactctatctacaactttaatttttctatcccgcatgggaccatacaaggccgggggggaatacaagctatatcaacactcacactttgctttacattgtgtaaaacattaactttgcagcatcaagatggcggatgagtccataccgaaggaggctgcataccatatcatacacgacaagtagatgttggatgggaacccatggtagaatcaggcatcatttgtgacgactcggatggagccagagtgtgataaactcattatggctgccattaataagaaccaaggaaacttttactattacaatggcaatacttctctttgtaccacacatgaacctacgcgacgcaaagcttgtagggtaccacatgcaaactctgagcgagatcttggtgaatgc

SEQ ID NO: 227192 - DNA, 568 bp, Glycine max
  unsure (1)..(568): unsure at all n locations
cttagctttcctttccagttcatacttcatcctattattactttccctctttgcattccaaatggccactgttgaggttgcacagcaaacaccaacaactgtgacagagaatgaaacaacgactgaggtaaccaagattgaggaaactaccccagaacagccagccaccgaggttactgccccagaaacagtcaacgaagaagcaaaagaggaagcagcagttgagactaatgaggcaacagaagttacagaggaagggaaggctgagaaaacagaagaagaagaagaagtgaaagaggagactaaagaaaccgaatcagcaccagtggaggaagagaagcaggaggagaacaaaccagctgaaaccgtagaggaacccaaaacagaacaagtttctgtcgagaagactgaagtttaagcccattgatatatgttattgtgagtgggaaaaaagaggttcttgcatttttattntatatattattaatgttgttattgtaatggtaagtctttgggtatggctttacgatttatgaaggatatatataagcaccactcagtatgcatg

SEQ ID NO: 227193 - DNA, 551 bp, Glycine max
  unsure (1)..(551): unsure at all n locations
gcaggtacttcctaacaaggttgctgctgctgctaactacaaagtggccacagtatcttatgaactcaatgtcctccgaacaagaggtccaaggcgaatgcggtgtatgatgcacttaatccccatatttgcaatccaagaaggagggaacgcccctactcctttgaagtttaccaccaattatcttaatgatcatgcgtctaccaccaccgagcatgcatctaccaccacaccagactcaaaaggaaagaaaccagaagttgttgagtttgactcaactggcactgccaatactccagaatcaatccagcgggcaagggaaccattggttttgaaaaacaaagctcctagatggcacgaacaactgcaatgttggtgcttgaatttcaagggaagggttacagtggcctctgtgaagaacttccagcttgtagcagctgctgaaccatgccaaaatgtttcagctgcagaacaaganaaagtgatactacaatttggaaaanatgggaaggacatattcaccatggattaccgatacccctctcagcttt

SEQ ID NO: 227194 - DNA, 552 bp, Glycine max
  unsure (1)..(552): unsure at all n locations
cgggcgtaatgatcnctctgatgagctatgtgggcaatcacccacgcggacttaggctggagttcagatcgagggccaatacttcttattgtttccacgcattgtggtgtgcaccatgtgtgtctgggcttctttggggacaagctctctatgatgatatggcaaggtacacatgttgtgctggctacatgccttgcaatggtaggtgtggagaaaataaatgtcctgtatttggactgcgcacagaggttagtctctggttcggatattcaatacccctcaacttcgctttctattgcaagaggaatctaacattccaactacgcagtgtgacaattgcattattggttccatgttttgccttcaacaaattgcatgtatattctctattgctgccatgattgtgggaagcgatgaaattcaagaggcttctcacttgctgtcttgattggctgactttgtgtactgcacggtctgtgcatgcatgcagactcaactcaagaatgataatggacaagcgagacgggaaattttggaccccaacccagcaat

SEQ ID NO: 227195 - DNA, 443 bp, Glycine max
cagggccgatactccttattgtttcctcgcgttgtggtgtgcaccatgtgtgtctggccttcttcgggaactagctctctatgatgatatgtcaaggcacacatgttgtgctggctacatgccatgcagaggtaggtgtggagaaagtcaatgtcctgaattttgcctttgcactgaggttttcctctgctctggaaattcaatcgcctcaactcgctttctattgcaagatgaatttaacattcaaactacgcaatgtgataattgcattattggattcatgttttgccttcaacaaatcgcatgtatattctctatagctgccatgattgtgggaagcgaagaaattcaagaggctttctaaatgctgtcttgtatggcagacttagggtactgcacgggctgtgcatgcatgcagactcagcacaagaatgagatggaca

SEQ ID NO: 227196 - DNA, 573 bp, Glycine max
agcacctttgctggtttgtactttgttgctctcttctcctcaatcattgcaactggtattcttgagttgaaatggagtggagtgagcattgaggaatggtggagaaatgagcagttttgggtcattggtggtgtatcagctcacctctttgctgtgatacaaggtctgctaaaggttctggctggaattgacactaactttactgttacatccaaggcaacagatgatgaagagtttggagaattgtatacctttaagtggactactctcttgattcctccaaccactatcttgatcattaacattgttggtgttgttgctggaatctcagatgccataaacaatgggtatcaatcctggggaccactgtttggaaagcttttcttttccttctgggtgattgtccatctctatccattccttaaaggtttgatgggtcgacaaaaccgcacacccaccattgtagtgatttggtcagtcctattggcctctattttctccttactatgggtaagaattgatccatttgtccttaagaataagggacctgataccaactgtgtggaatcaact

SEQ ID NO: 227197 - DNA, 580 bp, Glycine max
  unsure (1)..(580): unsure at all n locations
caaagaagagagagaagcacagtgggcaactgcacagaggactcttcatggtcttcagccacctgaaacaaccaaccttttcaatgacaagaacagttacagggagctgtcagagattgctgagcaagctaagagacgtgccgaggttgcaaggctcagggagcttcatactctgaaaggacatgttgagtcagtggtgaagctgaagggacttgacattgatacaatccaacaacattatacagtttaaggagtttagataattcatgcagaacccgctttggtgcttgtccaagaacaagaacaacaaatataatgaagaccgaagttaatccgtctataaattaggatgaaggtccttttgtcaaaatctgaatggtttactcttctattccatctatgccagtagctggaggagatgctatgctctttaggtaccaaataacgtggttgataggatttacttgcatcttattttgggaatgttaatgataccaaggtcactaaagctctatatatttttttggctgatgaacaaaactcaatatattntcaatcttggataatgtngctcaatana

SEQ ID NO: 227198 - DNA, 444 bp, Glycine max
ggcagtttcaattaggaagcatcttgagaggaacaggaaggacaaggactccaagttcaggttgattcttgttgagagcagaatccaccgacttgctcgctattacaagaagactaagaagctcccaccagtctggaagtacgaatcaacaactgctagcactctggttgcttagagaatgtatcaactttcatgggttttgctaccgtgcagtcgccgttgagctagcaatttgcgatatcattttgatgtttatttgaaggctggataggttatgtggcttaattttgttaagaacctatggtttgactgggaaagataatttaactagttaagtcaatttatcaatgtggtgttctttttcttttagccgttggaggttgtcttttaaagagatgactatggtttttggctttattttcaagtaatatatatgcttagaag

SEQ ID NO: 227199 - DNA, 421 bp, Glycine max
ggaccctagcatgtatattgtctattgtccaaagcatcagtcttcagcttgtggaccctagcgtgtatgttgagaatggtacaacgcatcttgcggatagaaacatcgctcataccgatggtaagcagggggcggctggccatgttgcttaatttagatgttgcttccataggcttcttgaggtttatcagagacgggagggcagggatcactagctctttcattcggtcagagtgggcggcagttgacatcccccttgatcatgaagcatttgcagttccaaagggttattatgcacctcaacaagtgcacattacgcaaggtgactatgatggaaaagcagtaatcatcttatgggtgaccacagaagaacccgggcccagccatatacagtttgggacatcggagaataaatttcaac

SEQ ID NO: 227200 - DNA, 549 bp, Glycine max
gaaattcaagtggggatgggtccttgtggggagctgagatatccatcttatccagaaagcaatggaacatggaggtttcctggaattggagaatttcagtgctatgacaagtatatgagagcttccttggaagcatcaactgaggccattgggaagaaagagtggggaaaaaatggaccacatgactcaggccaatacaaccaatttcctgaggacactggttttttccagagggaaggaacatggaacacagaatatggacgattcttccttgactggtactccaccaaacttcttgaacacggtgagaagatccttgtatcagccaaaggcattttcaactcatgcggggtgaaactatctgccaaagtagctggaattcattggcactacaaggcaaggtcacacgcggctgaactaactgcaggctactacaacacgcggtttcgcgatggatacctaccaatagcacaaatgctggcaaaacatggagttgtgctcaatttcacctgcatggaaatgagggacagagagcaacctgagcattgt

SEQ ID NO: 227201 - DNA, 470 bp, Glycine max
  unsure (1)..(470): unsure at all n locations
tattattgtcctttgacttgtttcttcaattatagccaaaaatgagaacccattttcactctctcccattatttttttggttcactctatcccttatattgggtcaaacccgacccgaccctgacccacttcaagattattgtgttgcagatagcaaaagtaattttttcattaatggggtaccttgcattaacccagataaagtttcctcatcccattttgtcacatctgctttatcaaaaactggcaacactagtaaccaatttggcttcagtgtcacagccaccaccactgctaatcttcctgggcttaacaccttgggcctggtactggtccgggtcgatatagcgggcaacgggatagtgccacctcactcgcatccgaaggcctcggaagttaccacttgcctaaagggcctgctatttgtgggctttngtgacacaagtagactgtgtctttacccagaactt

SEQ ID NO: 227202 - DNA, 592 bp, Glycine max
  unsure (1)..(592): unsure at all n locations
tttcaccaccccctttatccttatctcctctcttcttcatttgttctgctcttcccctctatttaaagctcacacaaagggatcatataccttggttgcactttggtaaggtgagagaataggaaaaagggaaatatggcatttgcaggaacaactcagaagtgcatggcttgtgacaaaacagtttatctggttgataagttgacagcagataaccgagtgtaccataaggcttgcttcagatgccaccactgcaaaggaacactcaagcttagcaactataactcttttgagggggttctttactgcaggccacacttcgaccaactgttcaaaagaactggtagtcttgacaaaagcttcgaagggacaccaaaaattgctaaaccagaaaaaaccggtgaagagaaacctgcagcaaccaaagtctcaagtatgtttggtggaactagagataaatgtgccggttgtcaaaaaacagtgtatcccactgaaaggttactgtgaatggaactcttatccangagttgtttaaatgcactatgagggtgtgtatagtcttncactacatgacacagggcaacttactgag

SEQ ID NO: 227203 - DNA, 554 bp, Glycine max
atccacacaaactcagggtagggcagagagagagagagagagagagagagagagagagaatgggagggtgggctatcgcggtgcatggtggcgctggtgtcgaccctaatctcccactcgagcgccaagaagaagcgaaacaacttctcacgcgctgtctcaatcttggaatctctgctctaaattctaatcttcccgccatagatgtcgtcgaacttgtggtgagggaattggaaacggatccgctgttcaattcgggccgtggatctgccctgacagaaaaaggaacggtggagatggaggctagcatcatggatggtccaaaacgacgatgcggcgccgtttcgggtcttaccaccgttaagaacccgatctcgcttgctcgtttggttatggacaaatccccgcattcctacctcgccttctccggcgccgaagaatttgctaggcaacagggtgtggaggttgtggacaacgagtactttatcacacctgacaacgttggcatgctcaagctggcaaaggaagcaaacacaatcctgtttgattaccga

SEQ ID NO: 227204 - DNA, 536 bp, Glycine max
agcggctcgtgatgatttgggtaaaggtgctattgacaaagaagtggtggagaaggtgtgggaccgaattgctcctggtttaacttcccaatttgactcaccttattcagttccaactatcgcaccacgtcctttgcttattgttaatggtaagacccttgtatatattgtacattaaacattttcaaaatgaatcaggctatcttattcatatacaacggcatatattgacaattcaggtaaccactctgctgcaacataagctttttgcttctttaggatatatcaataaatcgtagacccctgtattagtcaatttagttatcccgttcatttagattttgtggattttttttaagctaacttggaattgaagcatttgcttgggttttgggaactctaggtgcggaagatcctcggtgtcccgttgcaggcttggaaattccaagggcacaagcaagccaggcatatggacagtttgactgtttagataatgtctagattattacagaacctggagttggacaccaattaac

SEQ ID NO: 227205 - DNA, 556 bp, Glycine max
gtccgttttgagataggaatgaggaacataaacgaaaatcagaggaatgagtgagactgggaaccccgttttgtttcactttcctcatccccaactccttataacactcaaaaacacgcacgcagacttagactcactcctttccatttccaacgcaatggacccatggctcgacgatcttaccgacgaccttcagagtcttagcttcgcctccaccgccaccgcggacatcaagcggagcaccagcttcggctccgaaaccaccaccctaacggcctgctgctccgcccacctccccgccaacagcaagccccacgcgccctcctccgacccccgctgggccgccatccaccggatccgatcggactcccccagccgccgcatcctcccctccgacctcctcttctcccgccgccttggctccggcgacatcagctccgtctacctcgccgaactcaacgacggctccctctccgtcatgttcgccgccaaggtcatggacaagaaggagctcgccagccgcagcaaggagggaagagccaagaccgagcgagaa

SEQ ID NO: 227206 - DNA, 467 bp, Glycine max
gtcacgaacgttatactattgacctcccaagtaacatcagcgagataaggcctggccaagatgtcactgtaacaaccaatactggaaaatctttcacctgcacagttcgcttcgatactgaggtggaacttgcttactttaacaatgggggcattcttccgtatgtcatcaggaacctcattaagcagtgaagtcatggctgatgggaaatgttaaactatgttgccactgcgtgtacacgttttgagtggtggtaataaaatgtgagagaaatgagaataaattcaataaataggaaagatcccttcttaagaaggcaattttttgacatttccaggtgtttatattaggcctgtaaacatggagtgcattgattctagatttctcatgtctgcgttgtgtacccattgaacaatggggacaattgtatttttccatgccgatggcagtgaatattcttttcattt

SEQ ID NO: 227207 - DNA, 573 bp, Glycine max
  unsure (1)..(573): unsure at all n locations
ttcattttccctcactttctcgctccccaaacgcccctctctctcctccaatggccgaccagctcaccgacgaccagatcgccgagttcaaggaggccttcagcctcttcgacaaggacggcgatggttgcattactaccaaggaacttgggactgttatgaggtcacttggtcaaaacccaactgaggcagaactgcaggatatgataaacgaggttgatgctgatggcaacggaaccatcgatttcccagagttcctcaacctgatggctcgcaagatgaaagacaccgactcagaggaggagcttaaggaggctttccgtgtgtttgacaaggatcagaatggtttcatctctgcagctgagctccgccatgtcatgacaaatcttggggagaagctgacggacgangaggtggatgagatgatccgtgaggccgatgttgacggtgatggacagatcaactatgaggagtttgtcaaagtcatgatggccaagtgaggaccattccaaccataacctannattgaaagcatataagagaagagggacagggcagnatagtttgatgaga

SEQ ID NO: 227208 - DNA, 549 bp, Glycine max
  unsure (1)..(549): unsure at all n locations
ctccttttcttctctccacacaatttctctctcctctctctctctacaaatccttctgtctttcttctcttcgctgctcactgtagccatggctttcagagtaggaggagcgggagggggaaatgcctcttctggcatgggtgttgctgagcatagtgtaaacaccttcctggaattgcagaggaagaaagttcatcgctatgtgatttttaaaattgatgagaaaaagaaagaggttatcgttgaaaaaactggaggccctgctgagagctatgatgatttcactgcatccttgcctgaaaatgattgccgatacgctgtctttgactttgattttgtgacatctgagaactgccaaaagagcaaaatcttttttattgcatggtcntcttcagtggcccgcattcgcccgaagatgctatatgcaacatccaaggacaggttcagaagggagctgcagggcatccattatgagattcaggcaacagacccaacagagatggatcttgaagtcctcagagacgtgcaaactgagcagtcacctacaca

SEQ ID NO: 227209 - DNA, 582 bp, Glycine max
  unsure (1)..(582): unsure at all n locations
caatcctagtcttcaattgggttgctctctattcattccattttcagaggccttcaagaacagtgctagaacctccatggctgcaaagcccttcaacattatcttcctcctcctccctttactctctttggtggtggtggggcatgaaactgtgaaatcggaacagtacccattggttgtgagcacgtggccctttatcgaggctgttagggctgcatggagggctgttgatgctggctcttcagctgtggattctgtggttgaaggatgctcagcttgtgaggaactcagatgtgatgggacagttggtccgggtggaagtccagatgagaatggagaaactacaattgatgctctgataatggatgggtggatgcataggtgacaatggaagtaggagctgttgcagccatgagatatgtaaaggatggaattaaagctgccaggttagtgatgcaacatactgaacacactntgctggtaggagagaaagcatcagaatttgctatttcaatgggtcttccagggcccacgaacttgagttcaccaggatctatggagaagtgggccaaatggaaagat

SEQ ID NO: 227210 - DNA, 507 bp, Glycine max
  unsure (1)..(507): unsure at all n locations
gcaagccggcgcacctcttcctggacgagctcggcgtggcgtacgacgagcaagaggactacgttgtgataaagcacgcggctttgttcacgtccaccatcatgagcaggcttctagcgaggcccaacgtgaagctcttcaacgcggtggcggcggaggacttgatcgtgaaggaagggagggttgcaggggttgtgaccaactgggctctggtttcgatgaaccatgacacgcagtcttgcatggaccccaacgtgatggaggctaaggttgttgtgagctcttgtgggcacgatggaccttttggcgccaccggggttaagaggttgaagagtattggcatgattgatagcgttcctggaatgaaggctttggatatgaatgctgcagaggatgctattgtgaggctcacgagggagattgtgcccggcatgattgtcaccggcatggaggtggcagaaattgatggctccccaaggatgggtncgacgtttggggcgatgatga

SEQ ID NO: 227211 - DNA, 433 bp, Glycine max
  unsure (1)..(433): unsure at all n locations
agcaattcgtttggtggtcgcggtatggtgatatggtcggtggttgtggcggttgacagtgggtgtggtgatatggtcgccaacatgtgtggttaacgaccacgaggatacacattgcaagaactggatggtttgcagcagccttggtgccaacaccaattgcattcattttgctggccatatctggcagtggagcagcattacacataggcactgccttgatagggctaagttcaggctttgtgttttctgcagcagtatctattacttcagagctttttggcccaaacagtgttggtgtgaaccacaacatgctcatcactaacattcccttaggttcgtgtctctacggccttcttgcaccttagtttatgattccaatgcanggaaaccaaggcatacaatttggctgcacaaaatgtccatgtgcatg

SEQ ID NO: 227212 - DNA, 528 bp, Glycine max
  unsure (1)..(528): unsure at all n locations
cttcggtgttgaatcatggatcagaaagtcgatttcagtgctccgcattccatgggaaccactatcatcggcgttacttacaacggcggtgtcgttctcggagccgactctcgaaccagcactggagtgtatgttgtcaaccgagcatcggacaaaatcacacagctcactgataatgtttacgtgtgtcgctctggatcggctgctgattctcagattgtctctgactatgtgcgctacttccttcaccaacacacgatacaacttggacaacctgcgacagttaaagttgctgcaaaccttgtccggcttctcgcatataacaataagaatttcttacagaccgggttaattgttggtggttgggataaatatgaaggtggacaaatttatggagttcctctgggtggaacaatagtacagcaaccttttgctatcggaggatctgggtnccagtacttggatggtttctttgaccaagcctggnaatgagggatgaccaaggatgaagccgaggatttagtaaaa

SEQ ID NO: 227213 - DNA, 512 bp, Glycine max
  unsure (1)..(512): unsure at all n locations
ggagaaaagaaaaaaaaaaagaactggactccttcaattagtgcattgtttcttttcttcaaatggtagcaagaagacattgttaatttgagagatggcgagttacgaggctattaagaactttgatgatgatgatgatgatgatgatgatgtggagatggcactcccccatagccagatctctgaatcaagatctgccactgtttcttcccccattggccaaactaccccgcttcacattcacaacattattgaggaacaacgcattatctccaggcaccaacctcaacccaaatctccgcgtctggtttctcttgatgtttttcgtggtctcaccgtcgcgctgatgatacttgttgatgatgctggcggactcattcctgcgctcaaccattccccatggaatggtttaacactagctgattatgtcatgccatttttcctatttatggntggtgtttcgcttgcactctcatacangaaactgtcttgtggagttgatgcatctagaa

SEQ ID NO: 227214 - DNA, 538 bp, Glycine max
  unsure (1)..(538): unsure at all n locations
aaaagaataagaaaataaaaaaaaaaataagaaaaatataaagaagaaaaaaggaataaaataaaaaaaataaaaaataaacaaaatgaaataaatgaaataaaagaataaaaatataataaaaaagaaaaagagggatacaattgcgaatnncaataaaaaatattggaagaaataacaagataactaggaaactagcaggagaggaaaaagaaatggtaaaaaaaaaagagaggaataaaaaggaaaaaaaacaaaggggcactgataaaagaaaaaagaaaaaaaaaacggaaagaaaaaaaaaaaatggaaaaaacgaaaaactaaagaaaagaaaaaggaataaaaaagaaagacagaaaacagaaaaggagaagatgataaagaaaaaaaaagaaagataacgaaatgaataaaagaaaagaaagaaaaataataaaaaggccaaaactaatagaaaaaaaggaaaaaaaaagattagggagataaagaaaaaagagaaaaaccaagaaaagaaaagagtaaaaagcaaaaa

SEQ ID NO: 227215 - DNA, 463 bp, Glycine max
gcttgaagactaccgaatcggcgagctcaccaccacctgctacaactctgattcttcatggtcaaacccctccgtgcatggcagctccgacaccatccctttgacccccatcaaggaagggattacaccaatgcgaagcgaggctcttaacccacgcgagaaaatcccatgcaagctcatctgcaaaaccttcatctctcacgacgttgggctttttcgctttgccctcccctccgacgacctactcatgggttgtgccaggtgggaagcacatattcctatgtgccaccgttgacgagaaactatgcatgcgagcctacactccaacaagcagagtttacgaagtgggatacttcgacctcgtcgttaaggtttacttcaaaggggtgcaccctaagttccccaacggtgggatcatgtgtcaacacttggactctcttcccattggatctgtcttggacgt

SEQ ID NO: 227216 - DNA, 556 bp, Glycine max
ctgtccagcagtgaataccacttgctcctatggccggcgctcaacaacatggcggacaaggcagtcaccattcgaaccacaaagttcatgacgaacatgcttttctccagaaagcaattcatcgctgatgtgcttcatccagggagggctaatgtttccaaggctgaactgaaggagaaattgggcagaatgtatgacttgaaagacactaacactgtatttgtcttcaagtttcgaactcattttggtggtggcaagatcactgggtttgggttgatctatgattcagttgagaatgccatgaagttcgagcccaagttcaggcttatcaagaatggacttgatactaaagtaaagaaatgaaggaagcaaatgatggagagaaagagataagctaagaagattcgtggtgttaataagacataggcttcctgtgctgtcaaggctgggaaaaagaaatgagtgttcaaacattctgtcttgattttaaggttcttttgctcttggtattctctaatggatattttactttctattagcttcctagaatgagata

SEQ ID NO: 227217 - DNA, 525 bp, Glycine max
gggccataccaaatcaagcaacactggaattcattatcacaatagtaaatatttgaaaacaaagcattcaactgaattctcaaaattgatcgggccagtactagatctcaagttatataactactgaacatcaattaatgtaacacttacagcaaaatatctcattctaggaagctaatagaaagtaaaataaccattagaaaataccaatagcaaaagaaccttaaaatcaagacaggatgtttgaaaactcatttcttttttccagccttggcagcatcggaagcctttgtcttcttaactccacgaatcttcttagctctattctttctctccttcatttgcttccttgatttctctactttagtatcaagtccattcctgataagcctgtacttgggctcgtacttcttggcattctcaactggatcatagatcaaaccaaacccagtggacttgccaccaccaaaatgagttcgaaacttgaagacaaatacagggttagtgtgttttacgttatacatt

SEQ ID NO: 227218 - DNA, 546 bp, Glycine max
  unsure (1)..(546): unsure at all n locations
tatattctctcactctcttactctttcactctacttctctctcctattgcggctagggtttaggtttttctttcaccgtctccgttccttcaatcttcttattctctttcatctctgatggagacgttgcgggtttagttctaaggggtggttctggccttgggtttttggaacgtacggtgtcgttttggggttgggaaaacaaattctgagagatggcaaccacgaacccttttgatttgttgggtgacgacgctgaggacccttctcagctcatcgccgccgagcaactcaaggcggcggctgcggcctcggcggccaccgcggctcccaagaaggcgccggctcagcagaacaagccggctcagctccctaccaagccgcctnctccggctcaggctgtgagggatgccagaaacgagccagttcgtggaggccgtggaggtggacgaggtgggggacgtggatttggacgtggtcgtgggtttagtcgtgactcctcgaatgatgagaactcattccctaccagcagagctccttataatc

SEQ ID NO: 227219 - DNA, 440 bp, Glycine max
gttgtccactaagaatgtcaagacaggagatcaagatctgaagccttgttgaagaggctgcttctttggatctgaacaatgcctctggctctggatctttgccgcgccttcaaacattgaaaaagacttccatttcttctcgaaggtctggtactgccactttccctagtcctggtacactcaattatcgcgttgcaatgcacaagggatggagctccgagcgagttcccttgcatgcaggtgctacccggaagcacgttttgccgttcaacaatgggaaaacattgccgtcaaagtgggaagatgctgagaggtggattctcagccctgtttcggcagatggcactgggagggcctcgcttaatgcaccccaaaggaggccaaagtccaagagcggtcctcttggaccccctggtgttgcgtatcattctatgtactcg

SEQ ID NO: 227220 - DNA, 540 bp, Glycine max
cacactctctctgagtcggtcgagttgaatcggtgtgagtcagtgaccgagtcgaaccatgtcggacgaagaacaccatttcgaatccaaggccgatgctggagcctccaagacctatcctcaacaagccggaaccatccgcaaaaacggttacatcgtcatcaagggtcgtccctgcaaggttgttgaagtttctacttccaagactggtaagcacggtcatgccaagtgtcactttgttgggattgatattttcactgccaagaagcttgaagatatcgtgccctcttctcacaactgtgatgttccccatgtgaatcgtactgattaccagttgattgacattgctgaggatggatttcttagcttgcttactgaaaatgggaacaccaaggatgacctgaagcttcctactgatgagagtttgcttactcagataaaggatgggtttgctgagggtaaggaccttgatgcgtcagttatgtctgcaatgggtgaggagcagatttgtgccctgaatgatattgggccatagaacta

SEQ ID NO: 227221 - DNA, 526 bp, Glycine max
cttcatcaagctccgctccaacacaggggaaaatgagggagatccttcacgtgcagggagggcaatgcgggaaccagatcggttccaagttctgggaagtggtgtgcgacgagcacggcatagatccgacggggaagtacgtcggaaactcagatctgcaactcgagcgcgtgaacgtctactacaatgaagcctcgtgcgggcgcttcgtgccacgcgcggtgctgatggacctggagcccggaaccatggacagcgtgcggaccgggccgtacgggcagatcttccgccccgacaacttcgtgttcgggcagtccggcgccggcaacaactgggctaaggggcactacaccgagggcgccgagctcatcgactccgtctcgacgtcgtgcgtaaggaggccgagaactgcgactgcctcaagggttccaggtctgccactcgctcggcggcggacgggctccgggatggggacgcttcttattttccagatcagagaggagtatcctgacaggatgatgcttac

SEQ ID NO: 227222 - DNA, 458 bp, Glycine max
gcataagaacaacaacatattacggaaacatgagatccaatataccagatggacaaaaataaaaataaaaagcaagccaatataagaacaaaccgataggtgccgcataacatgtacccaaaggtcccaaactccactctcactaccatcaaagtattatcccgcaaaccgtacatacactattagtaattacaatcttcttcacgttggagtgcagagcaaacacacttacgcattacatagcataagtaagacacaggcattttcacattttagtctctttacaaatgggcggttggtttaacaatccttttcttcttaatcttggacctccctttggtcctaacaaggggggtccgggaccggttggtactcagacacaagggcattcatgttgctctttgcctccgtgaactccatctggtccatgccttcaccagtgtaccaatgcaagaaag

SEQ ID NO: 227223 - DNA, 495 bp, Glycine max
gagaaggcagagctagttgttgatgttcttataaagaacccgaatccggtgccaattcccctaattgacataaactacttggtctagagtgatgggaggaaactagtttcgggattgataccaaattcgggcacaattcatgcacatggagaggagacagtcaagattcctcttactttgatttttgatgacataaggaatacctatgatgatattaaaccaggaagcatcattccttatagggtgaaggttgatctcattgtggatgttcctgtctttggaaggctcactctacctttggagaaaactggagaaatccccattccatacaagcctgatattgatctcgataaaattcagtttgagaggttttcttttgaagagacagttgctattcttatttgaagttggacaacaagaatgactttgaccttggcctcaatgctcttgattattaagtctggcttggtgattgtagcattggaggagcagaac

SEQ ID NO: 227224 - DNA, 580 bp, Glycine max
  unsure (1)..(580): unsure at all n locations
gaaagaaactgcaacttcctctgttttgctcccctgtttaggccttttcataagcttagaatgacacacaaggaattttccattgctctagtgactctcattgctgttctctttgtcaacatgaacatccaaggtgccactgctgactatggtagttggcagagtgctcatgccactttttatggcgggggtgatgcttctggcacaatgggtggagcatgtgggtatggaaatttgtatagccagggctatggaactgacactgtggctctaagcactgctttgttcaacaatggcttaagctgtggatcttgctatgaaatgagatgtgatgatgacccaagatggtgcaaacctggctccattactgtaactgccactaacttctgccccccaaacccttctttgcctaacaacaatgggggttggtgcaacccttctttgcaacactttgatatggctgaacctgccttcttgcaaattgctgaatatagagctggaaatgtgcctgttgcctttangagggttcctcgtgtgaaaaaggggggaataagggtcacaatcaatggccactcatact

SEQ ID NO: 227225 - DNA, 451 bp, Glycine max
  unsure (1)..(451): unsure at all n locations
ctcgagccgaatcggctcgagcaaactgaaaaattccatctttctctttcaacgttcctcaaatcaatagcgcattctaagcttcgcgagcaataatttcgattgctttcccaacatgaccgcttccaacaagaaaaaccacaaagagaaaccaattcgccgcaaggaagaaaaaccggaagaaccggaagtgccgaaatacagagatcgagctaaagagcgtagagaggatcagaatcctgattatgaacaaactgagcttggatttcatgcagttgctccacctggtactgtggatattcggtcatctgatgcgcacaagttatctattgagaagagcanataccctggaggtgatgtggaacacacacatttggtcaaaggtttggattatgcattgctgacanagtangaagtgagatagataagaagccagagactggggatgatg

SEQ ID NO: 227226 - DNA, 482 bp, Glycine max
atactaggagatccgtgtctaacattcctgtactggtactcttctactggcttgaatcgtgcacgaggcagcctcagccgacgactcagatcgtctagttcaaggagtgccttgagcctcttcgacaaggacggcgatggtgtgcattactaccaaggaacttgggactgttatgaggtcacttggtcaaaacccaactgaggcagaactgcaggatatgataaacgaggctgatgctgatggcaacggaaccatcgatttcccagagttcctcaacctgatggctcgcaagatgaaagacaccgactcataggaggagcttaaggaggctttccgtgtgtatgacatggatcagaatggtttcatctctgcagctgaacttcgtcatgtcatgacaaatcttggggagaagctgacggactaagaggtggatgagatgatccgtgaggccgatgttgacggtgatggacagatcaactatg

SEQ ID NO: 227227 - DNA, 422 bp, Glycine max
aattaactctcatatactattaattccagatagtcaataatagtatagccggatattattattattatgtatatacgtagtagctataggtatattattcatagcttagactcatcaatctctggtgaattaatttatttccgcacccagagagtaacgctaaagcgcaagaatcccagttgaaaatatctgttcccttgcatatggcgagcttgacatttccacagaccttgaagcttctgacctacaccgttccttccgttcgtccatcattatttgactcgaacgacactctgggctacaaaacgctttctctcctctgtacatgtatatgtctttgccgtggagtttctttccgcataagtgacatgaactgagaaaattcgatgtggggtacaatgattcggcctcaacaatcaaag

SEQ ID NO: 227228 - DNA, 495 bp, Glycine max
ttttctgatccttcttattagcatttcatgaagcatctacaaacgccctatgaccactgggctccggtatattatcaattattcaacgtggcaataacttattggtcatttcatgaaagagataacatattgcatggtcataccaccatgtccttttcttttgtgatttacgttccatatattcatcctttggtccattctttggttcagtattcagattacattgcaaaaatggcatcattcaccatgacagcttccatccttggcggtccagccgtcaccaaccggttggcagtagcaacgcataggagatcactcgtagtgaatgctgccaaagctgctgaagcggtaaaggtcagttatgacaatgacatggatggtagcaatggaaggaggaacttgatgttcgtcgatgcggctgctgctgctgtttgctctgttgctgggatgcattgtcagatgaaccaaaaccaggaaccccagcagccagaaaaa

SEQ ID NO: 227229 - DNA, 589 bp, Glycine max
  unsure (1)..(589): unsure at all n locations
agtcaattcgtgaaagcgataaaggtgtgtaacgatttcaagtcgaagtatcctgatattgaagtggtgtcggaggaagagttttttcgcggcgcgccgcaggatatgaaggattccgttttgtccaatcacagtgagcataatctcgtgcttaagaggctcaatttcgagctctttcagcgcaaagagctttgcaaacttcatgacaaactggaacagaaaaggaaaacccttctggatacaattgcaaaccgaaagaagttcttatctagcctcccttcacatctcaagtctcttaagaaagcatcgttgccggtgcaaaatcaactaggagttcagcatactaagaaactaaagcggcatcatacagcagagttgcttccaccacctctttatgtgatttactcacaggttgttggctcanaagggaggcgtttggagaatctattgatgtggagattatggaaagtgtcaaagatgctcaagctntttccaccatctaactcacaaggacactggcatttcaccactgtggagagtcctaaatgggaaacattgacctgatgaagatgtcagagcagagtaaagg

SEQ ID NO: 227230 - DNA, 577 bp, Glycine max
  unsure (1)..(577): unsure at all n locations
ctcgagccgaatcggctcgagattctgtgcttgctcttgcagctggttacacaacatctaagtgcgagatgacaggagttgtagtcgatgttggagatggggctgctcatgttgtacccgttgcggacggctatgttattggtagtagcatcaaatcaattcctatttctggaaaggatattactctttttgtacagcagcttatgcgggaaagaggagagaatgtaccactagaggactcttttgaagtggcacggaaagtgaaggaaatgtattgctacacctgctctgacattgtgaaggaatttaataagcatgacaaagaaccagccaagtatatcaagcattggagaggcattaaaccaaggacaggggcaccatattcctgtgatattggctatgaacgatttctaggccctgaggtttggtctatggctgctccttatattttctctattatggatacctgaatcccncttaggngggctctggattntagatatttgtgtctacttgttttatacctaattttagtatgatttttcccttgtgaatacctgaacctatctcatgaact

SEQ ID NO: 227231 - DNA, 518 bp, Glycine max
aagaaatttaagtgaggagctagagaatgatgatgaagtctgctatgtgtgcagtggtggttgtagcacttcttcttctggcggaggtggggcccatggctgaagctgtgacatgcaccccaacagagttgagtccgtgtcttccagcaatcacttccggtgctaaaccttccaatgcttgttgcacgaagctgaagcagcaaaaaccatgcttatgtggctacctcaaaaacgctagcttgaagcagtatgttaactctcctaatgcccgaaaaaccgttgcttcttgtgggattccctttccaactggttaattaattaagccttcttataattaaagtgtgggatatatatatatatatagataaacagcttaatttatacacactttgatcctacaaagcatcttgacacaagcattcaataggatttcaccactttatcgcaacattttaacatgatgcggtaataaagtaaattctagttgaatatttggataacgatgttatatactcata

SEQ ID NO: 227232 - DNA, 380 bp, Glycine max
cagcattcttctgcaatttaaatcatattttcaaaccatggcttcctccggcaacgctgtttctcccaccggcaacggcctcattgtgagcttcggcgagatgctcattgatttcgttcccaccgtcttcggcgtgtcccttgcggaggcttcgggcttcctcaaggcccccggcggcgcccccgccaacgtcgtcattgccgttgcgaggctcggcggaaaggcggcgttcgtcggaaagctcggcgaccacaagtttgggcacatgctggctggaatcctgaaagagaacgacgtgcgatccgacgggatcaacttttaccagggcgcgcgcaccgcgctggcgttcgtgacccctcgcgcccgcagagagcgtgagt

SEQ ID NO: 227233 - DNA, 430 bp, Glycine max
ttatcaactctttcaaaagggagaagaaaaggaaaggaaacaaaacgcacaaaggattattatagcaatggcagaacaaaaccaaaaccagacaactgaagctggaaggcaccaagaggttggccacaagagccttctccagagtgatgctctttaccagtatattctggagaccagtgtctacccaagagaacctgaatccatgaaagaactgagagagttgacagcaaaacacccatggaacatcatgacaacctctgcagacgaagggcaattcttgaacatgctccttaagctcatcaatgccaagaacaccatggaaattggtgtctacactggatattcacttcttgccaccgctctcgctcttcctgaagatggagaagatcttggccatggatattaacagggagaattatgaattgggttt

SEQ ID NO: 227234 - DNA, 429 bp, Glycine max
ataagaaaaaaagtcatttgcatataattaattgtccaccggtttccacatgaataatagagaaaagaaaagtacaaacacaaatattttgaagaaaaaaaaataaaaggaaaatatcgattgcttttaaatgcattagcaggtgccactcaatgatgaccaatcatcactagggtgcagaagaagcaacggtggtcttggtccacgattgtgtgattatcagaaaatcagaatcacttgatccgacggcatatagtgattccatcaccaaccgggagcatgcaaatctcgatcctggggtccacagcgagtgccttgttgagctcgagcacgaagtccctgtggtatctaacgtacttcctgagaggagcatctgggggtgccaccacagagccggtccatagggtgttgtggtacccgataattccc

SEQ ID NO: 227235 - DNA, 455 bp, Glycine max
gattgctgtgactcgttcttcttcgtcgctatcttcttcttttgttgggggagtgtgggctttttctctcacctgaaaatgtcttgctgcggtggtaactgtgggtgcggaagcgcctgcaagtgcggcgactgctgcagaggctgcacgatgtacccagacttgagctacaccgagtcaaccaacaccgacaccttggtcatgggagtggcaccagttaaggctcaattcgagagtgctgaaatgggtgttcccgctgagaacgatggctgcaaatgtggagctgactgcacctgcaacccctgcacttgcaagtgaagtgttggagagctaaagcttcaagcagaaatggcccttagaaataatgataaaaactatatgtagtttcaaaacttcaaaattatgtagtatgtattatgttggactctggcgttttgtgtctaaacaaacaccct

SEQ ID NO: 227236 - DNA, 504 bp, Glycine max
tttcttctttttttttacagataataagcaaacatttgtctattattataaaatgggttacaaatgagtttatctgaaatttctcaagatccaaaatcaatcgagtacagctctttttttcatacttaagaaaaacagcaaacttttgaatgacttttaccatgtgtatgttgtcaaaaataaattctgacccagttataggtcacggtctttctggacaagagatagtgccttggttaataaatgcatcaccttgaacttggttagccatccgtgaaggatggacactgtcccaaaacacatactgtgtggcattaaaacaagttgctggagattgtgaattacacaacacggatgtcgtctctacagtcccggcaccacatgaacctgtggttgccttcacaaaaccagatcttggaggggagtggacacggccattgagaggcttgtaaatggggaaatttgtagtgccaataccatgaacttggttttgaagacttgctg

SEQ ID NO: 227237 - DNA, 536 bp, Glycine max
atcgttaaatacctaattgcaacaaattcctactcaaaccagaaagaagattggattatactagtattagaaatctgaaacaattcaaattaattggataatattacaatttacattttttatcattttagattcttgatttttttcaactttttggttgagtggtttctgtaggcggaatacattgctacacttaatcatgaagaaacaagactagcagttgtctgtgagagggcctttcttcagactttggatgggtcttgccgcactcctattgcagggtatgcttgcagaaacgaggatggcaattgtttgtttagaggattagttgcttaccctgatggaacccgggtgctagagacatccagggttggtccatatgcagttgaagatatgattgaaatgggtgttcagtagttagcaccagattaaagtgcgatcgggtgcacaccggtttcatggtcagctttcggctattgctttctgagttaattcattctttgaccttttgtaactttagagtagattaaatgttc

SEQ ID NO: 227238 - DNA, 565 bp, Glycine max
cagttgggttgtgtcttggctcgctccctctcggatcagatctgcgctctccgttttcagatcgcgttttgtttcaattcgacactttcctcgcttcaaagattaagcgaacaatatggttgtccttgctgcatccattgtgagcaaatctggcaaagtgctagtttctagacagtttgtggatatgactcgcataagaattgagggtcttctagcagcatttcccaagttggtagggactggaaaacagcacacgtatgttgaaactgagaatgtgcgctatgtttaccagccaatagaagcactgtacctgcttcttgtaacaaacaaaaacagcaacatactggaagatttggaaactctgagacttctctctaaacttgtacctgaatattcttactcccttgatgaagagggtatttgcaaacatgcctttgagttgatttttgcatttgatgaagtcatctctcttgggcacaaggaaaatgtgactgttgcacaagttaagcaatactgcgagatggagagtcatgaagagaagcttgcacaagttggtttgcagagc

SEQ ID NO: 227239 - DNA, 409 bp, Glycine max
gatgaattggagactgtttccaaggagtggggaattgaggctatgccaaccttcctgttcttgaaagaaggcaagctggtggacaaggttgtgggtgccaagaaagaggagctgcaattgacaatagccaaacatgccgcaattgctgctgcttgaagtgccatatgaatatgttaagaataatagactattgtcttcgagtcagtttgcttttattactattaatctgttattgggtctgtttgcatgatttcagaacggatttagagttagtaaaacatggatgggttatgtgtaaatgaaattgttgcactatcgtgattgaaacatttctgctgatgaaactagccaaaagattagccggtacgttatgtttatcattgctgtgacaatggatgtgtttcatcat

SEQ ID NO: 227240 - DNA, 386 bp, Glycine max
gctcgagctgctggagaattctaaagaaactactccatgaaaatgtgatcaagctgaaggaaatggggactgatgcacgtactgatagagatgaacacgggaagccagatggggcaaagtatatggatcacgttcatcaggaataagcgtacatggaccacgattcaacaggtgtagctgacacacctggaatgagatgtacagttatacagattaagtgctacatgacacagataggagctgagttctgcttatgaacatgctgatcagggctttaatgcagatatctacacgctgaaactgtggttatttacaatgtctgatgctcacaagctagctattttggaactcggatgcccatgatctgatgaccaacacgcacattt

SEQ ID NO: 227241 - DNA, 308 bp, Glycine max
gtcactatccctaagtctgtgactccccaaacgccgttctctctattacaattgccggggatctaagctgctaccagatcactggattcattgacgcctgcacacttttcgctgatgacggtgttggtcgtgtttcttccatacgaacttgggactgttatgaggttacttggtaaactcctaactgaggcactacttcacgatatgataaactaggtctatgctgccggtaacggtacactatatgagtcatagtatctcaacctgatagatctgaagatgaatgacaccaactggaatgatgatct

SEQ ID NO: 227242 - DNA, 566 bp, Glycine max
  unsure (1)..(566): unsure at all n locations
gaagatatggcttgtagactcaaagggtttaattgttagttcacgaaagaattcacttcaacacttcaagaagccttgggctcatgaacatgagcctgttaacagtctcctagaggcagtcaaggtgatcaagccaacagttttgattggatcatcaggagtgggaagaacatttacaaaggaagtagttgaggctatgacttcaaacaatgataaacctctcattctggctctctccaatcctacctcacagtctgagtgtacagctgaagaggcttaccagtggagtgagggtcgtgcaatttttgctagtgggagtccatttgatcctgttgaatacaagggcaaagtttatgcttctggccaggccaacaatgcttacattttccctggctttggtttgggtttagtaatctcaggagcaattcgagtacatgacgatatgcttctagcagcttcggaatccctggggctaacagtgagtgaggagaactacanaaatggctnggattacccaccattctctaatatcagaagaaattcggctaatatagctgcaaatgttg

SEQ ID NO: 227243 - DNA, 454 bp, Glycine max
agagaatggctcccaagggtttaacctttctggctgtgttaatatgcgtttcagcactgtcactgagtccttctgttgcgggggaagggcaaaataatggccttgtatatgaacttctacaaggaatcatgccctcaggctgaagacatcatcacagaacaagtcaagcttctctacaagcgccacaagaacactgctttctcctggctcaagaacatcttgcatgactgtgctgttcagagttgtgatgcttcactgttgctggactccacaagaaggagcttgtctgagaaggaaacaaatagaagctttgggttgagaaatttcaggtacattgagaccatcaaagaagctttggaaagagaatgccctggagttggttcatgtgctgatatcctcggtctctctgccagagatggcattgtttcgctaggaggtccccatatacctctta

SEQ ID NO: 227244 - DNA, 474 bp, Glycine max
atgattttgcgtgaggttcttagattataccctacaagagttggtgttcctccaaagggtatcaaggatgtgaaacttggaaacctatcatttcctgatggactggatattgacatatcaacaatcttggcccaccatgatagtgagctctgcggtgatgatgcttaagagtttaatcctgagagattttctgaaggagttctgaacgccacgaatggtagattttaataaccaccctatggaggatgtcctagactatgcatcgcacaaaattttgctttgttggaagcatagattgctctgtcgatgattttacaatgtcgctcgttagaactttctccaacctatactcatgctccaactatggtgatgactatgcaaccccaatatggcgctcctgtcattctacattaggcggacaattatgaattattatcgttatctcttattatggcatttgtattatactcatac

SEQ ID NO: 227245 - DNA, 536 bp, Glycine max
  unsure (1)..(536): unsure at all n locations
gaaattcaacgtgggtggcagggtgatggaaacaacatccacaaccctcgccaatgctgggcgcaattcaatgttcggcgcaatgttcgacgacaattggaacctaataccaaacaacgacgacaacaacaacaacgaaagattcatcgatcgcaacccggattgcttcgcgattctcctcgatctgctccgaaccggcgagctctacgtcccacccgatatcccggagaagctcctctacagggaggccctctactacggcctattggaccacgtgcgcgccgncaagtggggcccattcgacggcaacaggttaaggttgtcgcggtctctgcagggccaggcaccgggcgacggaaccgccattcgggcgggcccggatggcggctgctgcgttgcgcatggcagcatggttcatgtctatgattggatgttggatgaacacccacctcttaaccttgattaccagagggtcaacgatgttggttgggttgacttcgacacatcgtcatcggagtcagcgagcgccttgggcg

SEQ ID NO: 227246 - DNA, 592 bp, Glycine max
gttttgctctggactctcaccgttccttcagagtggaaccctagttgtctctatccttaaggttccgccaccgcaccaagtctcagcacccaaccaggtcttctttcattcatggcggaggaacttatttctcaattaaacaatatgctagaagaaaatggaacaccaagtcatgtagaaagggctgctgatgctgatgctgatgctgagctttctccaccatcacaaaaaggagatgacactaaaggaaaaagaaagaactcttgcaacagactgatccaccatcaatttctgttattgaccttttcccatctggagattttcctgaaggtgaaattcagcagtacaaagacgataacctatggagaactacatcagaggagaagagagaactggagcgcctgcagaagccattatataattcagttcgtcgagcggcagaagttcatcgtcaggttcgcaaatatattaaaggcattttaaagcctggaatgctgatgactgacatatgtgaaacattggagaaacactgtcgtaagctaatatcagaggatggccttcaagcaggcatttgcattcccacaagatgctc

SEQ ID NO: 227247 - DNA, 211 bp, Glycine max
cttcggtgttgaatcatggatcagaaagtcgatttcagtgctccgcattccatggggggcactatcatcggcgttacttacaacggcggagtcgttctctgagccgactcttgaaccagcactggagtgtatgttgtcaaccgagcatcggacaaaatcacacagctcactgataatgttcacgtgtgtagctctggaatcggtgctgatt

SEQ ID NO: 227248 - DNA, 625 bp, Glycine max
ctggtcgatcatctgagcaagagagactgactgtagagttctggcgggaagctgacattctttccaagcttcatcatccaaatgtggttgcattttatggtgtggtacagcatgggccaggaggaacaatggccactgtggcagaatatatggtggatggttctcttaggcatgtattacttcgcaaggataggtatcttgatcgtcgcaagaggctgataattgcaatggatgcagcttttggaatggaatatttgcactcaaaaaacattgtgcattttgacttaaaatgtgacaatttgctagtaaacttgaaagatcctttacgtccaatatgcaaggttggtgattttggcttatcaaaaattaaacgcaataccttggttactggtggtgtgcgtgggactctaccttggatggcaccagagctgctgaatggaagcagcaacaaggtctctgaataggttgatgtgttctcctttggcatagtataatgggaaattctgacgggtgaggagccatatgctaatatgcactatggtgcaattataggtgggattgtaaataacacattatggccaatcattccaagcaactgtgatcatgaatggagagcactaatgga

SEQ ID NO: 227249 - DNA, 573 bp, Glycine max
ctcgcacacaccctttctttccgttctcaaactcactcacactctctctactgctagattcgacgattcccgaagtgccttcctcctcctcctccttcttcccctctaatcggatccaaatccaaatccaaatccagttcaaagaagatgcaatacaagaacctggggcgatctggcctgaaggtgagccagctctcctacggcgcgtgggtgagcttcgggaaccagctggacgcgaaggaggcgaaggccctcctacagtgctgccgcgaccacggcgtcaacttcttcgacaacgccgaggtctacgccaacggccgcgccgaggaaatcatgggccaggccatccgggagctcggctggaagcgctccgacatcgtcggctccaccaagatcttctggggcgggcagggccccaacgacaagggcctttcgcgcaagcacgtcgttgaggggaccaaggccttactgaaacgcctcgaatgggatatgtcgaagttcttactgccaccggcggataccttacttcgtccgggaaaccgtgaggcccatgaatatgtattgatagggctg

SEQ ID NO: 227250 - DNA, 448 bp, Glycine max
cttaaaagagcctttgctttttctttaggcctttccgaattaagtacttgtttcattttctctcgaagcaagaaaaatgttcattgagagtttcaaggttgatagtcctaacgtgaagtgcacatatactgagatgcagtccgtgtgcaactatgaaaccactgaacttgttcacgagaacaagaatggctcttatcagtgggttgtctagcccaaaactgtgcaatatgaacttaaaaccaactcccatgtccctaaactaggggttatgcttgtggggtggggtggaaacaatggcttaacccttaccggtggtgttatagctaaccgagagggctttttatgggctacaaaggacaagatttaacaagccaattactttgggtcgctgacccaggcattaactattacagctgggtctttccaaggggaggaaatatatgcccga

SEQ ID NO: 227251 - DNA, 480 bp, Glycine max
tttcgtctttttttttttttttttttttttaagcacaaaagacggggataacttggggttatttgattacatacatgcattgattgcctgctctcaaataagtcggcaggaacaaagattgagagattcaacgatcttcaaatttcacatttgccagaaatatttaacagaaaagaggggtatgggatatgagttaagttttgatcacattcaactacactatcccaaaccggtactcttaagactttgaacttcacttggcctctaggatcatgtggttgtgaggagctaatccaacacaagccctcaggatggtttccagcatagctcgctggtttgacaacgcattcaccactggtgtacccgggggaaccagaggggccttggtcaggtaactaaagagggtcccaaccgggtggaatgagaggaattttcccccattttcagctttaaactcgattcgagtgctgagctcagcaa

SEQ ID NO: 227252 - DNA, 479 bp, Glycine max
atatatatatatatatatatataatcgggcaatttttcattttggaagtccaaatttacagaaaaataaaaaacataaaagcatttcaataagaatatattaactatgctccctgctttatttctttttctgcactcttttcttaatagattttttcttcttctcttattcacaccaatgaacaatgagaatttttctccctttgcactaggcaatctataaacaacttgggtgttgtccaattattccttggcagggctgtttctttgccctgatgatgccattagcacagcaacagccactataaacataaacaacatactccctagcagtatatatgttcttcttgatgatttcctgtactctccaaacagaatcacgccccaaaaagtgcttacaagtggaagtgcctggactgcatttgctgctgcatatcccgctgcttgaccacccataaattgaagaccattcccaaaccc

SEQ ID NO: 227253 - DNA, 449 bp, Glycine max
cacttacaaacgcacactgaattcaaaaacatcgtaagagagaggcatggtcgagcaaaccttcatgatgatcaagccagatggcgttcaaagaggccttattggcgagattattagcacatttgagaggaagggtttttacttgaaagggatgaaacttgttactgacggaccgtccttttgctgacaagcactatgctgattcggctgctgggcctttttttggcgggccggtggattacattgattttggccctgttgttgccatgatctgggagggtgataatgttgttacaactggccgaacgattatcggagccacacacccagctgaatctgagcctgctactattggtggtgactattgctgttgacattgcaagggctgttatgcatggaagtgattcacatgggagtgctgacaaagaaatggcattgtgggttcctga

SEQ ID NO: 227254 - DNA, 534 bp, Glycine max
tttctttcttttttttttttttttttttttacttttttctttttttttttttttttttttttttttttttgaaaaaacaaaacttgggggggatttattttatcaaaccgggggcctggttcacccaaaatggcctaaatcggctcttcctgcaaaccccggggcccaacttttaagaaaagcccagcccttggacaaaaacaaaaaacatgttaataatccggatccacccaaggcccattttaagaacaacttggggcctttgtttttctcttacatcccaaaggggggggggctttgcccattggcggggcccctaggggaccccaatgcaatttccttggtggcccttttacctgatccccttccctggataacattcccccccatgggcatagcaaaggcccccccaattgttcccccctcaatttgagctgggtttggggctccttatctttttcgggcggtggtaccacattttttcccccccaatacatgggaccaaccggggccgagccattgttttcccccccc

SEQ ID NO: 227255 - DNA, 592 bp, Glycine max
  unsure (1)..(592): unsure at all n locations
tcagtcttccttttgtggtaccgttgggagcccagtgtctgctaacaaaccaaacgtgagagataatcaagtaaaaggggtcgccaccactacaagtggttcctcacgtgagccatctgatgaggatgatgaagcaggtccttgtgaacaaagcacaaacgctattgatatgaagcgccttagaaggaaggtttctaatagagagtctgcaaggaggtccaggagaagaaaacaagcccatttggctgacctggagtggcaagttgaacggctgagactggaaaatgcaaacctatttaagcagcttacagatgccagccaacaatttcgtgacgctgatacgaataaccgagtcctaaaatcagatgtcgaagctttgagagctaaggtgaaattagctgaggatatggtcactcgtggcacactcacccctatcaacaaccagattcttcaaaatcagagttcactaaacaccccacctcaactcaacacanataatctacaccgcatgacacatgtttcgccaaccatcaccgtccgtgggaatgatgatgcttcatatggaggtggaattacagntagtggacaaaat

SEQ ID NO: 227256 - DNA, 564 bp, Glycine max
gttccaccatagcttgcggagcctgcactcggaatcaattgtgctagggatggcatgaaccgcagggactggctttctctggttgctgtgcacagtgattcgtggttgctctctgtggccttctatcttggagctcgtcttaaccgcaacgaaaggaaacgtttatttagcttgatcaatgatcttcctactgtttttgaagttgtgacagagaggaagccagtaaaggacaagcccactgcagatagtggaagcaagtctaggggcagcaccaagagatcaagtgatgggcaagttaaaagcaacccaaaattcgcagatgaaggttatgaagaggaggatgagcacagtgaaaccctttgtggtagctgcggcggaaactacaatgccgatgaattttggattggctgtgatatatgtgagaggtggttccatgggaaatgtgtgaagattactcctgcaaaagctgaaagcataaagcaatacaaatgtccttcgtgcagctagaggcggagcaggccctaaagccgaggcaagatgtgaagtgaataatgctgtttcatg

SEQ ID NO: 227257 - DNA, 417 bp, Glycine max
gaaagaaacacaaatcacaatcgctatggctaggtacgaccgagcaatcaccgtgttctcccctgacggccatctcttccaggtcgagtacgccctcgaagccgtccgcaagggcaacgccgccgtcggcgtccgcggcaccgacaatgttgtcctcggcgtcgagaagaaatccaccgccaaactccaagactccaggtcggtgaggaagatagtgaatctggacgaccacattgcgctggcctgcgcggggctgaaggccgacgcacgcgtgctcataaacagggcacgtgtggagtgccagagtcacaggctcaccgtggaggatcccgtcacggttgagtacataacgcggtacattgcggggcttcagcagatgtacacgcagagcgggcgcgtgaggccctttgggctttc

SEQ ID NO: 227258 - DNA, 341 bp, Glycine max
tagcaatcagagactgaagacgagcttccccttgcgccgaagggccaccgatggttgaaaccgagatggatgcagaaactgttgcaaatgtggttccaccaaaggagactccaaatagtgtttccatttctcatcattcctcacaccctccccttaatgagaggattatttcatccatgaccaggagatctgttgctgcacacccatggcatgaccttgagataggacctggtgctccaattatcttcaattgtgtgattgagattgggaaagggagcaaggtgaaatatgaactggacaaaaagtcggggcttatcaagatcgaccgcgtgctttactca

SEQ ID NO: 227259 - DNA, 433 bp, Glycine max
agatgtcgttggtttcaagcatgttcgggtgtggagtggtgatggcggcgtcgcaagcaatgggaattggaaggagaagcgatggtggattgacgatagtgtgttcgtctaggccgcagaagaaagcgacggcgcatcacatgaagactcggcctcggaagacgcaggcatgggatagaaaccgcaagcccaccgtctacgatccactccctcctcttcctcctgattggaccctcgttattcccgctgacgcttcttctgctcccgttacgcctccgcctccaactccctctgcctagtcactctctcggtactctctctcgttttcatgtagtcttatctttaattccagcagcttttctttcatgttttcatctcaaatcaaaccttcatcatttggtttggatcaataaatgtttctgaattctctctc

SEQ ID NO: 227260 - DNA, 581 bp, Glycine max
agcttttcagctggatccagcgaaatggggagtcaatgtgcaatcattatctggatccccttctaacttccaagtttacactgctttattgaaacctcatgagagaattatggcacttgatcttccccatggtgggcatctatcgcatggttatcagactgacaccaagaagatatcggctgtctctatattctctgaaacaatgccatacagattgaatgagagcactggttatatcgattatgaccagttggagaaaagtgcagcactttttaggccaaaattaatagttgctggtgctagtgcttatgctcgcctttatgattatgcaccgtgttcgcaaggtctgtgataagcagaaggcaggtctgttggctgatatggcacatatcaatggattggttgctgccggagatattccttctccttttgattatgcagatgttgtacaacccacgacacattagtactttctggaccacgtggggctatgattttttcaggagggtgtgaagagataacaaacatggaggaaggttgttgactataagacaaataacccggttgtttttctggactta

SEQ ID NO: 227261 - DNA, 564 bp, Glycine max
atacgaggagaaccgagttcaacatcctgtctggtacctccatggcttgccctcacgtgagcggcgccgcggctttgctcaaatcggctcaccctgattggagccccgccgccataaggtccgccatgatgaccaccgccaccgtcctcgacaaccgtaacaaaaccatgaccgacgaagccaccgggaacagttccacgccttacgatttcggcgctggccatcttaacctaggaagagccatggatcctggtttggtgtatgatatcacaaacaatgattatgttaatttcctttgcggtattggctacgggcctaaggtgattcaggtgatcactcgcgcgccagcgagttgtccggtgagaaggccggcgccggagaatctgaattacccttcctttgttgctttggttcctgtttcgtcgaagagggtggcttccaagacgttcatacggaccgtgagcaatgtggggcccgcgaactctgtttaccgcgtaagcgtggaggcgcccgcaagtggggtgaccgtgaaggtgaagccgtcgcggctcgtgttctcggagg

SEQ ID NO: 227262 - DNA, 521 bp, Glycine max
cttctatctctgcaattcaaacacaaaaaccatggcttccactaatgctcttcctcccaccggcaacggcctcatcgtgagcttcggcgagatgctcatcgacttcgttcccaccgtctccggcgtgtccctcgcggaggctccgggattcctcaaggcccccggcggcgcccccgccaacgttgccatcgccgtcgcgagactcggcggcaaagcggcgttcgtcgggaagctcggcgacgacgagttcgggcacatgctggccggaatcctgaaggagaacgacgtgcgatccgacgggatcaacttcgaaaagggcgcgcgcaccgcgctggcgttcgtgaccctacgcgccgacggggagcgtgagttcatgttctacagaaaccccagtgccgacatgctcctcacgcccgaagatctcaatctcgaactcatcagatccgcaaaagtattccattatggatcgataagcttgatcgtggagccatgcagatcagcacacttgaagggcatggaag

SEQ ID NO: 227263 - DNA, 531 bp, Glycine max
gctcccttacgcgtgggtggggaactccggaaaacagtgccccgaggtttgcgcttatcccttcgccgtccccgggtacatgggcggcggcggacccggccacctcacgccgccgaacggagacgtcggtgtggacggcatggtgagcgtgatcgggcacgagctggcggagctctcgtcgaacccgctcgtgaacgcatggtacgccggcgaggaccccaccgcgcccaccgagatcggagatttgtgcgagggcttgtacggaacgggtggtggcggcggctatattggttccgttatgaaagacggcgaagggagaacgtttaatcttaacggtagaaatggacggaagtttctggtgcagtggatttggagccccgttttgaaggcctgtgctggtcccaatgctttggattgagttccttcatactctttgttttatgtatttctatttaccctatgtatcatacctaatgatgctgtatcatcgttatttttttaatttctactaacgaaattattttatttaag

SEQ ID NO: 227264 - DNA, 358 bp, Glycine max
attggttatcgccattttgattgtgctgctgactacaaaaacgaagcagaagttggagatgcgcttaaggaggcttttgatagtggccttgtgaagagagaggatctcttcattaccaccaagcttttggaattctgatcaaggccacgttcttgaggcgtgtaaagacagtctcaagaagcttcagttaacgtatctagatttatatcttgttcactttcctgttgccgtaaggcatactggggttggtaatacttctagtcctttgggtgatgatggggttccttgacatagatcccaccatattcttgaaaacaacctgccttgcattggaagatcttgtttcatcgggcttggt

SEQ ID NO: 227265 - DNA, 509 bp, Glycine max
agtgtcgttgatgcaagatcagctatgacgatgtatgccctcgtacgcacgcttacatatgctgctaaaggaaattgagcgtgagtagcatggtgatggaaacaacatccacaacccttgccaatgcggggcgcaggtcaatgttcggcgcaatgatcgacgacaattggaacctaataccaaacaacgacgacaacaacaacaaccaaagattcatcgatcgcaacccggattgcttcgcgattctcctcgatctgctccgaaccggcgagctctacgtcccacccgatatcccggagaagctcctctacagggaggccctctactacggcctattggaccacgtgcgcgccgacaagtggggcccattcgacggcaacaggttaaggttgtcgtggtctctgcagggccaggcaccgggcgacggaaccgtcattcgggccggcccggatggcggctgctgcgttgcgcatggcaacatggttcatgtctatgattggaagttggat

SEQ ID NO: 227266 - DNA, 565 bp, Glycine max
ctcgagccgattcggctcgaggcaccaagaccaacatggtcatggtctttggagagatcacaaccaaggccaacgtagactatgagaagattgtccgtgacacatgccgcgaaattggattcatctctgatgatgttggtcttgatgctgacaaatgcaaggtgttggtcaacattgagcagcagagccctgatatcgcccagggtgtgcacggtcacttcaccaagcgcccagaggaggttggtgctggtgaccagggtcacatgtttggctatgccactgatgaaacccctgagtacatgcccctcagccatgtccttgcaaccaaactcggtgctcgcctcaccgaggttaggaaaaatggtacctgtgcttggctgaggccagatggcaagacacaagtaactgttgagtactacaatgacaatggtgccatggttccagttcgtgtccacactgtcctaatttccacccaacatgatgagactgtgagcaatgaccaaattgctgctgaccttaaagagcatgttatcaagcctgtcattcctgagaagtacctggatga

SEQ ID NO: 227267 - DNA, 401 bp, Glycine max
aataaatgggctaggcttgatattgaccccaattctatcacatggaggagagtaatggacatgaatgaccgattcttgagaaaaactactattggccagggacctgtcgagaaaggaatggagagagaaacatgctttgatatttcaggtgctagagagaaaatggctgttgtggcactgtcatcatccttagattatatgcgagagaggcttgggaaaatggttattgggaatagcaggagtggtgaccctgtaactgctgatcatctaggtgttggaggtgcttcaacaggattaatgaaggatggcattcaccctaccgttatacatactctgtagggaacttgcgtgtcttgatcatgcacgtgcatgtgcttatattgctcatgggaattcttcta

SEQ ID NO: 227268 - DNA, 526 bp, Glycine max
agagagagaacttcaagtgagggtgagagtgacacaaatctagagagagcactagtactctaaaagtctattatattcttcaaaatatgaccatgcatcgcgagtcttgggcttttgtcttcggcgttatgggcaacatcatctcctttggagtgttccttgctccattgccaaccttttaccacatctacaagaagaaatccactgaaggttgccagtcacttccttatgttgttgcactgttcagtgcaatgctttggatttactatgctctcgtgaaaagggaaactgccctccttctcattaccattaacacatttggaattgttgtggagtcaatttacctttgtatcttcctaatttatgccccaaggaagcctaggcttacaaccatcaagcttcttgtcttactgaatgtgttcggattcggggccatgcttctatcaactctctacctgtcaaagggagcaaagcgtcttgctatcataggatggagttgccttagttgtcacatcagagtctttgc

SEQ ID NO: 227269 - DNA, 522 bp, Glycine max
acagtggccattgtgtccaatggcaacaaaagggcatcggaaatggctgtttatgagcagtttcgaagcgaggggcagaatcagattcacacaaatggctttgtgccgacccttacagatgaaaggccgcagaagtctttgcttccaccctttgaatctgcggaaatgcgagctttagcagagagcttaagtagggatatcattcgtggaagtccagatgtgaagtgggaaagcatcaaggggttagagaatgccaaacgtttactgaaagaggctgttgtgatgccgattaagtatcccaagtacttcactggtctgttatcaccatggaagggtatcctcctttttggcccaccggggacaggaaagacaatgcttgcaaaggcagttgcgacagagtgcaatacaactttttttaatatttcagcctcatctgtagtcagcaaatggcgaggtgattcagagaagttagtgaaagtgttattcgaactttgcaggcatcatgcaccctcaacaatattt

SEQ ID NO: 227270 - DNA, 548 bp, Glycine max
aaagaatatacaagaagccaattaacatgttttcttttaattacctattcaccaccattttcttagtgctaacattctttctttatccatcaaatgctcaactgagttcaaccttctactccagcacatgccccaacgtgtcttccattgtgcgcagtgttgttcagcaggctctgcaatctgatcctcgaattgctgcgagcctaactcgtcttcattttcatgattgctttgttaatggatgtgatggatccattttgttagacgtaggtggcaacataacactgagcgagaaaactgcaggtcccaacaataattcggctcgtggctttgatgtggtcgacaacataaagacatctattgaaaattcatgccccggtgttgtatcttgtgctgatattcttgcccttgctgctgaagtttcggtgtctttgggaggaggtccttcatggaacgtactactaggaagaagggacggtttgattgcaaaccaatctggtgcgaacacatccattcccaatccaacagaaagccttgccaatgtcact

SEQ ID NO: 227271 - DNA, 511 bp, Glycine max
gaataatcaaatttctcagatctatccgacgtcgtcgcagatccaccaaccgttatggctgccttcagcggtgatgaaacggctccgtttttcggcttccttggagccgcagctgccctcgtcttctcctgtatgggagctgcctatggcacagcaaagagtggtgtgggcgtggcttccatgggtgtgatgagacctgagctggtgatgaagtctattgtccctgttgtcatggctggagttttgggtatttatggccttattattgctgttattatcagtaccggtattaatccaaaggccaaatcttattacctctttgatggttatgcacatctctcctctggtcttgcctgtggcttggctggcctttctgctggcatggctattggtattgtcggtgatgctggtgttagagccaatgcacagcagccaaaactttttgttggaatgattctcatcctcatttttgctgaagctcttgccctttatggtctaatcgttggtatta

SEQ ID NO: 227272 - DNA, 508 bp, Glycine max
gtcgtggccgtgtcgcagcaaaaccaaaccacatattaacttgtttgctctaagtgatgggtctgatcttgcacgcaaccaaagcaaacaagaatgctgtcaagactctgattgcggcaaagtacagtggcgtccaagtggaattggcccctaatgacgagatgggtgtctctaatagaactcctgaattccttaatatgaatcccataggaaaggttcctgtcttggaaacgcccgatggtccagtctttgagagcaatgccattgctcgttacgttgctggactcaagggagacaacgctttgttctcatcttctgccattgataatgcccacattgaccagtggattgacttttcatccttggagatcgatgcttatattatgaaattatacctaccaagacttggatttgccccataccttcctccagatgaggagggtgcaaattctgcattgaagagagcatttgagggcctgaacactcatattgcttccaatacatacct

SEQ ID NO: 227273 - DNA, 540 bp, Glycine max
gttcttgacaatactgcactaaatagaattgctgtggaacggcttcatttatcaaatccatcatttgctcaaacaaattccttagtttctacagttatgtctgccagcacaacaactcttcgttatccagggtacatgaataatgacttggttggtcttcttgcctctctgattccaacaccaagatgccattttctaatgacaggctatacacctttgactgtggaacgccaggctaatttaattcggaagactactgtacttgatgttatgagaagacttctgcacgcaaagaatattatggtctcttcttatgctcggacaaaagatgctagccaagcaaaatatatatcaattctgaatatcatccaaggagaggttgatccaactcaggttcatgaaagtttgcagaggattcgtgaaagaaaactagataactttattgagtggggtgctgcagtattcaggttgctctatcaaggaagtctccttatgttcaaactgcgcatagggtcagtggacctatgctggcagtgatac

SEQ ID NO: 227274 - DNA, 513 bp, Glycine max
acaaaaggctggcttcaaagctgtaattgtctatgacaatgaagagggtggcatcttggttgcgatggcaggaaattctgctggtataagaatacacgctgtatttgtatctaaagcttcgggtgaaatactaaagaaatatgctgggttgactaatgtggaaatatggctcattccaacttttgaaaactcagcatggtctatcatggcaatttcatttatttccctgctagctatgtctgctgtcctggccacttgtttcttcgtccgcaagcatcgcataagaagagaaaggcctcgagcttctcttgttcgtgaatttcatggtatgagtagtcgcctagtgaaagcaatgccgagtttggtatttacttctgttttggaagataactgtacatcaagaacatgtgctatatgccttgaagactattgtgttggtgagaagctcaggattctgccctgctgtcacaagtttcatgctgcctgtgtggattcgtggcttacttcatggag

SEQ ID NO: 227275 - DNA, 566 bp, Glycine max
  unsure (1)..(566): unsure at all n locations
cctctctgtattcttcaaacccggtcaagttttcactgatgtagtcggcagcccatactatgttgctcctgaggttctcctcaagcattatgggcctgaagcagatgtgtggacagctggtgtcatactgtacatattgcttagtggcgtgccgccattttgggcagagacccagcagggtatatttgatgcagtattgaagggacatatagattttgactcagatccttggcctctaatatctgacagtggaaaagatctgattagaaagatgctgtgttctcagccttcagaacggttgactgctcatcaagtgttatgtcatccttggatatgtgagaatggagttgcccctgacagatcactggaccctgctgttctttctcgtctcaaacagttttctgcaatgaataagctaaagacgatggctctgcgagtgattgctgaaagtctatctgaagaggagattgctggtttgagagacatgtttcaggctatggatacntgatacagtggtgcaatcactttcgatgaactcaaagctggtctaagaagatatgggtcta

SEQ ID NO: 227276 - DNA, 530 bp, Glycine max
gtcaatgagcagaggcagggagatagagcgcaaaattctacgtctccttcacggcggcaaaacccgcagccacctcaccgaaatccatggtcacttcctccgccatggcctccagcaatccaatcaaatcctcgcccacttcgtctccgtttgcgcctccctccgcagagtcccttacgccacgcgcctcttcgcccacacccacaaccccaacatcctcctcttcaacgccatcatcaaagcccattctctacacccacccttccacgcttccttctcctttttctccctcatgaaaacccgcgccatctcccccgacgagtacactctcgcgcctctcttcaagtccgcctccaacctccgctactacgttctcggcggatgcgtccacgcgcacgttgttcgactcgggttcacgcgccacgcctccgtccgcgtcgccgcgttggaggtctacgcgagttgcgagaggatgggcgatgccagcaaggtcttcgacgaaatgcgtgacccagacgtcgtcgtttgga

SEQ ID NO: 227277 - DNA, 527 bp, Glycine max
aaagaatatacatgatgccaattatcatgttttcttttaattacctattcaccaccatttgcttagtgctaacattctttctttatccatcaaatgctcaactgagttcaaccttctactccagcacatgccctaacgagtcttccattgtgcacagtgatgttcagcaggctctgctatctgatcctcgaattgatgcgagcctaactcgtcttcattttcatgattgctttgttaatggatgtgatggatccattttgttagacgtgggtggcaacataacactgagcgagaaaactggaggtcccaacaataattctgctcgtggctgtgatgtggtccacaacataaagacatctattgaaaattcatgccccggtgatggatcttgggctgatactcttgcccttgctgctgaagctacggagtctttgggaggaggtccttcatggaacgtactactctgaagaagggacgagctgattgctaccaatctggtgcgaacacatacattcccaatccaacag

SEQ ID NO: 227278 - DNA, 548 bp, Glycine max
  unsure (1)..(548): unsure at all n locations
ggattttggagaaggatttgccagcttcaatatttgtcagagtttatgaatcaaggatggatcttttaagggctgtgattattggagcagaagggactccttatcatgatggccttttcttttttgatgttttctttcccagtgcctatcccaatgtaccgccgaaagtccactaccactctggaggtcttcggctcaacccaaatttgtatgcttgtggcaaagtatgccttagtctacttaacacctggtccggcagcaaaaatgagaagtgggttccaggcatgtcaacaattctccaggttctggtatctatacaaggtctaatcctgaatactaagccttactttaatgaacctggatatgcacacatgagtggttcagcaaatggtgaaaagatgtcttttcagtataatgaggacacattcattctatcattgaggacaatgatgtatatgatacgaaagcctncaaagaatttcgaggaccttgttaaggggcatttctgcaaccgagctagcgatattcttgtggcatgtaaggcatac

SEQ ID NO: 227279 - DNA, 504 bp, Glycine max
caagaagggcttcgtttccaaatccccttcatacaattctatggtaataataaagagtcctccatgaaagaccctgttgaagtgataagaaaggcacttacaaaaactctagtattttactacccctttgcgggtaggcttagggaaggtcctggccgcaaactcatggtggattgcaatggtgaaggcgttcttttcatcgaggcagacgctgacgtcacgctgcaccaattcggtcccagttatcttcttcatccaccgtttccttgcttggaggagcttctgcacgatgttcccggttcacgtggagttaccaactgtcccctcctcctaatccaggtaacgcggctcaagtgtggcggtttcattttcgccctccgattgaatcacagcatgagcgacggattcggcatagcgaaattcatgaaagccttagccgaaatcgcctgtggcgcaacggaaccttccctcactccagtgtggtgcagggagctcttgaatgca

SEQ ID NO: 227280 - DNA, 491 bp, Glycine max
caaaaagttgcaagagttaaagcaaaaaccaaagtgagagagaaaatgatgaagccatcgatgctcagatctcttcactctgccgccacccgcggcgcctcccacctctcccgccgtggctacgcctccgagccggtgccggagcgcaaggtggccgctctaggtgccgccggcgggatcgggcaacccctctcccttctgatgaagctcaaccccctcgtttccagcctctccctctacgatatcgccggaactcccggtgtcgccgccgatgtcagccacatcaacaccggatctgaggtagtggggtaccaaggcgacgaagagctcggaaaagctgtggagggtgcagatgttgttataattcctgctggtgtgcccagaaagcctggaatgactcgtgatgatctttttaacatcaacgctggcattgataagacactgtgtactgctattgctaagtactgacctcatgcccttgttaacatgat

SEQ ID NO: 227281 - DNA, 501 bp, Glycine max
ctcatccttataataaataaataatttctcgaagaaggagaaagaggttttcattgttgtggttgttgtagaagaagaagaagctgaagaagaatggagtccacagaatcttcatacgtgtcttctcccgagggaccgaggaagcacgctgcatcgcctcctccgaaatcgccttcgctagattctgaggagaagccaacatacattaggtttctagtatcaaactctgcggctggttcagttattggaaagggcggttcaactatcactgattttcagtcacaatctggagcacgaatccagttgtcacgtaatcatgaattctttcctggaactactgataggattatcatggtatctggcgcaataaatgaaatacagagggctgtagaacttatcctttctaagttgctcagtgagcttcatagtgaggatgacaatgatgctgagccaaagacaaaagtgagactcgttgttcctaatggttcatgtggtggaata

SEQ ID NO: 227282 - DNA, 489 bp, Glycine max
ctttctagatgctactggaggcttatggagagcacaacagcttgcaggcaagcctgctggcctcttctacagcaccggttcacaaggtggtggacaagagactacagcactcactgctatcactcaactggttcatcatggaatgatattcgttccaatcggttacacattcggtgccggcatgtttgagatggagaaagtgaaaggtggaagtccatatggtgctggaacttacgccggtgatggctcaagacagccaagtgagcttgagttacaacaagcattccaccaagggaagtacattgctggcatcacaaagaagctcaagcaagctgcataatgttgccttgccttcatattagatcatactattattattaaaccataccacaatattgcttgaaaatcattgtccaatttttagacttgaaatatattgagtttttttttcctgtgcttgcaagtattttttttttctttctaatcttg

SEQ ID NO: 227283 - DNA, 498 bp, Glycine max
gtcttgtagcgtgggaaaccggtggttccatcccccaccaccgtttatcaacaatgccttcctcactctccctctcactcacacccctctctgtgttccctccccgcagagtccccactccttctccaaaaccctatcgcctctccgtcaaatcctccatcaacaaaccccctgacgccggcaccaccaagcccagctcctggctcagccccgactggctcacttccctctcccgctccctcaccgccggcaacgacgtctccggcatccccgtcgcctccgccaagctcgacgacgtctccgatctcctcggcggcgccctcttcctcccgctcttcaagtggatgcaggactacggccccatctaccgcctggccgccggcccccgaaacttcgttgtggttagcgaccctgccattgccaagcacgtgctcaggaactacggtaaatatgctaaaggtctcgttgctgaggtctcggagttcctgttcgggtccg

SEQ ID NO: 227284 - DNA, 510 bp, Glycine max
caagaagggcttcgtttccaaatccccttcatacaattctatggtaataataaagagtcctccatgaaagaccctgttgaagtgataagaaaggcacttacaaaaactctagtattttactacccctttgcgggtaggcttagggaaggtcctggccgcaaactcatggtggattgcaatggtgaaggcgttcttttcatcgaggcagacgctgacgtcacgctgcaccaattcggtcccagttatcttcttcatccaccgtttccttgcttggaggagcttctgcacgatgttcccggttcacgtggagttaccaactgtcccctcctcctaatccaggtaacgcggctcaagtgtggcggtttcattttcgccctccgattgaatcacagcatgagcgacggattcggcatagcgaaattcatgaaagccttagccgaaatcgcctgtggcgcaacggaaccttccctcactccagtgtggtgcagggagctcttgaatgcaagaaac

SEQ ID NO: 227285 - DNA, 436 bp, Glycine max
ccatggatgatctgaagcttcctactgatgaggcattgcttgctcagactaaagatggattttctgaaggaaaagatcttgtggcttctgttatgtctgcaatgggagaagatcacatcctttcactgaaggacatcggtcccaacaattaatctgatgctccggctgtagctatagctgatagcacgctgcttcttcttatgttgctaacaggtactatattctccgatactgtgtgcaaaatacacttcataagatgagaaatctgcctgtgcttgaaactcaaatgcttgggatagaagaaattgagctaagtttagcttttgttcattaattaaggaacacaacggtcttgggtggatgaaattctcactaacatctcatattatttgtttgtggagagctaatatataaccctatctggtctctgcactcg

SEQ ID NO: 227286 - DNA, 560 bp, Glycine max
ggaatcagcaactatgaatatgatgcggaggttgaagagcattgcttctgggaggacttccatttcttcagatcctggaggggattctaactcaaaaagggccaagtttgaaccagaaactgaagggaaggccgatgagaaaacaaataccattgaaacaatctgcacagatcaggaacaacctatagacacatcaaaagaaacttccaatgtaggcacatccgatgtatctacagtagctagaactgagaagtcaggtttcgatgagcttcctaaagaattaaatgaaatgaaaattagagatgagaaaagcaaaaacaacaatgaaaaggatatagaagctactgtagtgagtggtaatggaacagaaacaggacaaataattacaactgccattggtggtcgagatggacaaccaaagcagacaatctcttacatggctgaacgtgtggttgggactggttcttttggtgttgtttttcaggctaagtgccttgaaactggtgaatctgttgccataaagaggtgttgcaagacaggagatataagaatagggaact

SEQ ID NO: 227287 - DNA, 514 bp, Glycine max
ctcaaacgaatacgttttctctttctcttcaatttcacccttattagcatagcatattcatttccctttcttgaatcgttcttaactgcgagaggggatatcagagaagttgattggcctcccattaataacagatctgaatgatctgatggagtctaaaggtgggaagaagaagtcgtctagtagtaagtcctttttgtacgaagctcctctcgattacatcattgaagacgttcgaccacacggtggaatcaagaagttcagatctgctgcttactccaactgcatccgcaagccatcctgagattccctaggtcgtgtgaggacgtagcccccttagtcctgcatctgctatatttttctagtctcttctcttctcctttttcttgatttcttccttgcccttttgttctctctacctacacagcaagactctgtttctttctgagtcaagatggctcgctcagctattggtttcgaaggctatgaaaaaagacttgagatatcatttttt

SEQ ID NO: 227288 - DNA, 528 bp, Glycine max
  unsure (1)..(528): unsure at all n locations
ggtaggtctcgatgctgctggtaagacaaccatcttgtacaagctcaagcttggagaaatcgtcaccaccatccccaccatcggatttaatgttgagactgtggagtacaagaacatcagcttcactgtgtgggatgttggtggtcaggacaagatccgtcctctgtggaggcattatttccagaacactcagggtctcatttttgtggttgatagcaatgatagggatcgagtggttgaggcaagggatgagttgcacaggatgttgaatgaggatgaacttagagatgctgttttgcttgtttttgccaacaagcaagatcttcctaatgcaatgaatgctgcagaaataactgacaagcttggacttcattcactccgtcaacgccactggtatatccaaagcacttgtgcaacttctggagagggtctctatgagggtttggactggctntctaacaacattgccagcaaggcatgagacacttngaaatttttggtcttgtctggtgatttcctgctgagtat

SEQ ID NO: 227289 - DNA, 533 bp, Glycine max
aataaaatctatctgcaatattatttttctgagtttgtgtctagttagtgtctgggtcctggtcctgccaattgtgtcaattaattgtattgaatcataaaagatggcttcctcaagtggaacatcttcagggtcatctctgcttcagaactctggttctgaggaggatttgcaggcggtgatggatcagagaaagaggaagagaatgatatcaaaccgcgaatctgcacggcgatctcgcatgaggaagcagaagcacttggacgatcttgtttcccaagtggctcagctcagaaaagagaaccaacaaatactcacaagcgtcaacatcaccacgcaacagtacctgagcgttgaggctgataactcggtgcttatggctcacgtgggtgagcttagtcacaggttagagcctctgaatgagatcgtcgacgtgtcgaatgccaccactgtggcgggttttggagcagcagcaacatcgagcaccttcgttgagccaattaataataatagcttcttcaacccgttgatat

SEQ ID NO: 227290 - DNA, 535 bp, Glycine max
cttaattgttctgcctaccttgcagctcactgaatgcagtagccaatgatggaggatggatatatcttggaactaacaaaactatggcaaaatcaagtagcactggctacagtcagtggtccctctcaaaggatcatcttcaggtgggtgatacagtgcgctctagaaagctttccaattcatgcaatcctcaaaacatggaggtcccagaaggaaatgttgttggtttagaacgcaatgtagatcatggatttgttctagtgaggctccatggtgttcatgaccctgtaaggattcgtgcatcgactcttgaacgtgtcaccaatggtttgggagctggggattgggtacgcttgaaagaagaagatgacaagcactcgccagtgggtattcttcattctatcaatcgtgatggcagagtgactgttgggtttattggtctgcaaactctctggaacggtaactgttcagatcttgaaatggcagaaccttactgcgtgggccagtttataggctgaaagccaatgttttgagt

SEQ ID NO: 227291 - DNA, 484 bp, Glycine max
aatgaaacaaccgaggtaagcaagacccaggaaacaaccccagtcactgaggctcctgcaacagaacaaccagcagctgaggttcctgcaacagaacaaccagccgctgaggctcctgccccagaatcaaccaccgaagcaccaaaggaagaaaccaccgaggcaccaacagaaacagtagaaaaaacaactacagaagtagccccagaggagcctaaagaagttccagttgagaccgaggaggtggtggcaaaggagacagaggaagagaagccagcagaagagaaatcagaggagaaaactgaagaagtgaaagaagaagcagaggagcctaaagaaactactgaaacagaatcagcagcagcagcaccaccagcaaccacagaggaagagaacaaaccagctgagtcagttgaaaccccagtagaggttcctgttgagaagactgaagcttagacctatggacagtgtgagtgagaaaaac

SEQ ID NO: 227292 - DNA, 481 bp, Glycine max
ctttcactattattgccacacaaatcaattaactgaatgcttatagagagaaagaggagaaggagtagtgatcaggtgatcatagagcatattataagacagtgaaaactaatggaagttggcctcaataatgataacatggtgtttgaagaaactgcttaacgcttgactgcctgtaaacggaggcactgaagaactgctcatcatgaagaggggtctctctgacactgaaactggtcatgaagatgacctctgccaccactggggacctgatgcttaatctttcttctaacgaggccgcaaccactggtgctgctgatgcagatccaactgatatgcacaagactttgcctaacgtgaagacccttctgccagcatatactgctaagcctacagccaagacgcatgtggtgagtatggcacctgttcggtccttacggatgaacatgttggctgcgcaaaatagcgttgcataagatag

SEQ ID NO: 227293 - DNA, 501 bp, Glycine max
ctcgagccgaatcggctcgaggtgtgcatggccttgagttggcattggatgagatctcttatgatttggctatatcaagtggaaggatgactaaacctgatcctcatggtaacacatgttgcatgctacctggagcagaatttttgagctccaaattatggaggaaaacacatgggcgggattcaatcacccgattctctagatcaggtggcaccccatcacttgctgccatgaactaccaagccaacatggatgctgaaaccaagttggcaaaccacagattcaggcctgagggaggcttcatcactaatccgctggcagagattcatacaaactcgaggaattttgcaacatcggagatagcttaaaagaagcagatgtgctgcacaatctataatgcaaatttgatcatttgattctcatatcagctgtgatggaaggacccccactgatgggttttgcgattcaatcagaattccatttattcatgttccaagtgaa

SEQ ID NO: 227294 - DNA, 556 bp, Glycine max
ataagttttataaccagtttatgaataaagttctatatgcaagagaaggtgctaaaagtattatggataggacatttgcagatttaccttggcagattcgagttgaggttgatggagttgaaattgaggtccctgaggatgcggaaggtgtgcttgttgcaaatattggaagctacatgggaggtgtagatttgtggcaaaatgaggatgaaaattatgataattttgatcaacaatccatgcatgataagatacttgaagttgtgagcatatctggaacatggcacctcgggaaacttcaggtcgggctttctcgagctcgaagacttgcacaaggacagtcaattaagatacaattgtttgccatgtttcctgttcaaattgatggagagccttggtttcagcaaccctgcacaattaacataacccatcatggccaggctttcatgttgaagagggtggctgaggaaccccttggccctgcatctgcaataattgctgaagtgcttgagaatgctgaaacacatatatgtattaatgcttcacaaaagcgagc

SEQ ID NO: 227295 - DNA, 464 bp, Glycine max
  unsure (1)..(464): unsure at all n locations
aagacgagaagaccggcacgtgctaccgcgccgatcacctgctcaaggacttctgcaacgacaagctccagcgtgaccttgcgttgtcttctgataaggttgcggagcttaagcacgtgcttgccatgctggatgatttctctgctgaagagcttggtgccaagattaaggactatgggattgtttctcctgagactaagaactctctctctgatccctaccctttcaatttgatgtttcagacttccattggtccctccggcttcagccctggctttatgagacccgagactgcccagggcattttcgtcaattttaaggatttgtattattacaatggcaacaagcttcctttcgctgctgcgcagattggccaagcgtttaggaatgaggtgggttcatgattttcgtggcaattaaaacttatttttttatancttctaaatagatatagtcnttgcatg

SEQ ID NO: 227296 - DNA, 502 bp, Glycine max
ggtaggtctcgatgctgctggtaagacaaccatcttgtacaagctcaagcttggagaaatcgtcaccaccatccccaccatcggatttaatgttgagactgtggagtacaagaacatcagcttcactgtgtgggatgttggtggtcaggacaagatccgtcctctgtggaggcattatttccagaacactcagggtctcatttttgtggttgatagcaatgatagggatcgagtggttgaggcaagggatgagttgcacaggatgttgaatgaggatgaacttagagatgctgttttgcttgtttttgccaacaagcaagatcttcctaatgcaatgaatgctgcagaaataactgacaagcttggacttcattcactccgtcaacgccactggtatatccaaagcacttgtgcaacttctggagagggtctctatgagggtttggactggctatctaacaacattgccagcaaggcatgagacatttgaaaatttttggtc

SEQ ID NO: 227297 - DNA, 551 bp, Glycine max
  unsure (1)..(551): unsure at all n locations
tgagagtaaaaagatgtttctgcgtgcggtggcgcggccgttgatggcgaaggtgaaggcttcgacggggatcgtggggctggacgtggtgccgaacgcgagggaggtgctgattgggctgtacagcaagacgctgaaagagatccagaaggttcccgaagatgaagggtaccgcaaggccgtggagagcttcaccaagcacaggctcggcgtgtgcaaggaggaggaggactgggagaacatctagaaacgcctcggctgcggccaggtcgaggagctcatcgaagaggctcaggacgagctcaagctcatttcctacatgatcgagtgggatccttggggtgttccagatgattatgaatgtgaggtgattgagaatgatgcaccagttcccaagcatgttcctctccaccgacctcctcctctcccaacagaatttcacaagacgctagaggcacttacagggaaagatactccggctgccagctctagtgaatcaccctcnaaggcatgactngcatccacattagagctttggtttctcaatgagt

SEQ ID NO: 227298 - DNA, 495 bp, Glycine max
  unsure (1)..(495): unsure at all n locations
ggcaaatttgagcacgggaataggagcagataatcagaaaacaatggccgtagcaataggaagaagcttctccattcagcccggctctttattcaacaacaagagcttggatagaggttcaccagctggaagattatcgtggcttggggatggtgctgctgccactccacgttataggcaaacttgtgttggggcgcaacagcgacctacatggctcccaggacttgatcccccacctcatcttgatggaactcttgctggagattttgggttcgacccacttggacttgcagaggatccggcaagcttaaggtggtatgtgcaggcagagctggttcattgtcgctttgcaatgcttggggtcttcggaattctagtgacagatctacttcgcgtcacaggaattagtaagataccggtttggtttgaagctggtgcggtaaaatacgactntgccaatacaaagacactcttccttgntcaactagttctgat

SEQ ID NO: 227299 - DNA, 524 bp, Glycine max
gataataataaagctaaatcatagtcgtgaggagtgactagtacaaacagaatccaaagctttttttttcttcttcttgttgttctttctaacgccatgtctgggagccaccaagagcatccactgttagagaactcgttcatagaagatgacgagccgcaagaaacagcttatgattcgtcagagaagatagtggtggtcggagtcgaccagtccgatgacgaggagaattgggggagagtgccccgattctcgaggaagaagctatggctgttcaccgggccgggctttctgatgagcatatcgtttctggaccctggaaacttagagggggaccttgaggcgggtgccattgcacggtactcattggtgaggatcttgatgtgggccacagcaatgggcctactgatccacctcctctcgtgacagctcggcgtggccacagggaagcacctcgccgagctctgccgagaggagtatgctgcgtgggcccggatagtgctgtggatcatggcggtactcac

SEQ ID NO: 227300 - DNA, 440 bp, Glycine max
gaggcgcgggtgagaaaatctctctacaccgtaatcgctatttggcatcgctgcaacaatctgcgatactctttcctctctccgcttcaaatttctatttacactctctgcctcgccgtgaacagggactcactgaacaactttgcgaagcattgagtagtagtgattgggtggtaacacagagagagagagagagaaaaggatgaaccagaacccgcaatcgagtgaaggaaggaacgatgacgattctgccctttctgatttcctcgcttgcttactggattatactcccactatacctgatgaattggtggagcattacttggccaagagcggcctccaatgtcccgatgttcgattgactagattggtagctgttgccactcagaagtatgttgctgaagttgcaggacatgcacttcagcactgctaagcaagac

SEQ ID NO: 227301 - DNA, 547 bp, Glycine max
catgagcaatttgagatgacaggtttggaccctgagtataatagattgttcaatgagggcatggtgtgcactgctagggttgtgtccaaggctgtgatcactgggtacaaagatgggttcaaccagattaagtccttggttgatgttggaggtggcattggagggtctctttctgagattgttagggcttatcctcacatcaatgccatcaactttgacttgcctcatgtggttgccactgctcctaagtatgatggaatcacccatgttggaggtgacatgttcgtgtccattccagatgctgatgctatttacatgaagtggattctgcatgactggagcgacgagcactgcgtcaagatcttgaagaactgcaggaaggcaataccagagaaaacagggaaagtgatcatcgttgatcacgtgctgcggcccgaaggcaacgaactcttcaccgacgttggcattgcatttgacatgatgcttctcgctcacaacgccggcggcatagagaggacggaagagaactggaagtggctgttcaaag

SEQ ID NO: 227302 - DNA, 461 bp, Glycine max
gcagcattagggtttatcatctgcttcaatggggaagggaacagggagcttcggtaagaggaggaacaagacccacactctctgtgtgaggtgtggccgccgcagcttccacctccagaagagtcgctgcgccgcttgtgctttccccgctgcacgcacgcggaaatataactggagcgtcaaggcaattcgcagaaagaccaccggaactggcaggatgagatacttgcgtaacgtgcctcgccgtttcaagagtggcttcagagaaggtaccgaagctgcaccaaggaagaagggagcagctaccactgcatagacctttcaaagatcgttctcgttgggtacggatttacaggaatagattgctttttgtgcttttggcaagtattttggaacacttatttttagagtctcattgcttctttatcccccatttaatttgtagttgctttatattcaac

SEQ ID NO: 227303 - DNA, 482 bp, Glycine max
aaacaaaacagagcaaagagagagtgtgtgaaaagtgaaacaaaaaacagaacaacaatggcgacacttaaggttcctcagcctcttccccccgttgcagatgattgtgagcagctccgaaaagccttctcaggttggggaactaacgaggagctgattgtatcgatcttggctcataggaatgctgctcagaggaagcttatcagagaaacttatgcccagacctatggagaagatctcctcaaggccttggacaaagaactcacgagtgattttgagaggctggttcatctttggacacttgattctgctgaacgtgatgcatttttggcaaacgaggcgactaaaaaatggacttcaagcaatcaggttctggtggaaatagcctgcactaagtcctctgaacacttgtttgctgcgaggaaggcttaccatgttctttataagaagtctcttgaggaggatgttgctcatcacacaac

SEQ ID NO: 227304 - DNA, 474 bp, Glycine max
gtgggaacatggcatcaattcttgaggttgacgactgcaaaggacacacattcattcagtttgagccagctccaaggaggggagagccagatgtaaccaggagaacacctgattacttcctatgatactattttggttgagttgctgttaccagcacagcaactaatgccctgcagtaatgtgcaagctcatctccttgtccaaatcagagccatgaatcatattgatacttatattttcgaagttaggcttcggtggatgtgttgtttacttgaattataactgaatctttccaagtggaagctgagcagcaggcgatgctattgtgggcatgtgtatcattccagcttgcaatgtatcagtcttaatgttttttcccctctgtcttccttggctattgatgtgcaactctgttgactattcttttcttaacttaagattattgttaagggggtgggtttctgtagattgata

SEQ ID NO: 227305 - DNA, 503 bp, Glycine max
cccatcttctctctcgtaccaatcaaatcacacttttgtgttgtgttgggaaaccctaaaccccgttttcggtgagatcgagatcgatcgaacatggatgaggagtacgatgtgatcgtgttgggcacgggtctcaaggagtgcattctcagcggtcttctctccgtcgatggcctcaaggttctgcatatggataggaacgactattacggaggagaatccacttcgctcaatcttattcagctttggaagagattcaggggagatgacaagcctcctccacatttgggcgctagcagggactacaacatcgatatgaaccccaagtttattatggctaatggcaatttggtgcgggttctcatacataccgatgttacaaagtatctctatttcaaagctgtggatgggagctatgtgtttaataaaggaaaggttcataaggtgcctgcaaacgacatggaggccttgaagtccccacttatggtgctatttgaaaaacg

SEQ ID NO: 227306 - DNA, 525 bp, Glycine max
  unsure (1)..(525): unsure at all n locations
aaagaaaatcctcacccattttcttcgtagccaaacactctgaaattctcagttatgtcgtggcaagcgtatgtggatgatcacctactgtgtgaaatcgaaggtaaccacctcactcacgccgctatcatcggccaagacggaagcgtttgggctcagagcaccaacttccctcagttcaaacctgaggaaataactgccatcaataatgactttaatgagcctggatcacttgctccaactggattgtatatcggtggcaccaaatacatggtcatccagggtgagcctggtgctgtcattcgagggaagaagggtcctggtggtgttactgtgaagaagaccggtgcggccttgatcattggcatttatgatgaaccaatgactccaggtcaatgcaacatggtagttgaaaggcttggcgattatctcattgatcanggtctctaatctttgctctatgtcctggtatcgggcatatttcattggcttctgtacaagttttgcatcgacctggactggaat

SEQ ID NO: 227307 - DNA, 559 bp, Glycine max
ggttgaagagtattggcatgattgatagcgttcctggaatgaaggctttggatatgaatgctgcagaggatgctattgtgaggctcacgagggagattgtgcccggcatgattgtcaccggcatggaggtggcagaaattgatggctccccaaggatgggtccgacgtttggggcgatgatgatatcagggcagaaggcggctcatttggcgttgaaggcgttggggaggaacaatgcaattgatggaacgtgtggagtcggaagggaagaaccccaacttattttcgcttctgcagacactgaggaaattgttgatgcttaaacttactttcaaattagctagatatatagcttttcttttcttttctttctgttaggtccctacttaattatgattttaattttggaataaatgaacaacatgtgaattatgaaggagacaatacttgttgttacattgtatttggacagcacgtgccacgtatagcggaggaaaccatatattatcaaggatgggagagatagacgccacttaaatttttcatctatctcaatcga

SEQ ID NO: 227308 - DNA, 521 bp, Glycine max
ctttttctttattcccccggcgcacgatagcgccatcgctttcgtttcgcggttggtaaccgtctctctttcatcaccgtatttatttccattcacagaaccaacaaactctctctctctctctgattcttcttcactgttctctctctgagcaaaaccgaggatccctcatagtattggcaggtcaaatattggctaatgtggatggggcattcatctatgtacaagcgcactccttcgagagataattcaaacatggaggacgtggaagaaaactcagatcttttagacatcggcctggacaagggaacctcaaatccttcattgatgctttctttaccgcatgtacttgtggcgaccatttcttcattcctttttggataccatcttggagttgttaatgaaccacttgagagcatttctgtggatcttggtttccgtggaaatacattggcagaaggtctggtggtgagcatatgtcttggtggtgccctgattggatgtctactaagtggttggga

SEQ ID NO: 227309 - DNA, 544 bp, Glycine max
tgatgatactggaaaggataacatgcctgtggctaaaaagaagggttggttttcctcgatgttccagagtattgcaggaaaggctaatttggagaagtcagacctggaaccagctttgaaagctctgaaggacaggctcatgaccaagaatgtggccgaggaaatagctgagaaactatgtgagtcagtggcagcaagtcttgaaggcaaaaagctagcttcgtttacaaggatatcttcaacagtgcatacagcaatggaagaagcacttgttcgtattttaacccctaggcgttccattgacatattgagggatgttcatgctgccaaggagcaaaggaagccatatgttgttgtgtttgttggagttaatggagttggaaaatctactaatctagctaaggttgcttactggcttctgcaacacaacgtcagtgtcatgatggctgcttgtgatacatttcgatctggagctgttgagcagctgcggacccatgcacgcagacttcagattcctatatttgagaagggttatgaaaaagat

SEQ ID NO: 227310 - DNA, 533 bp, Glycine max
  unsure (1)..(533): unsure at all n locations
atttgcgaattgaacctcaaaatcagtctctaatatttttctcactgtcttgtctctccagagaactgtatagagagagatggcagctgcaacatctggtgctgtgttaaatgggttgggatcttccttcttgagtggaggaaacaggagccaaacccttctggccactgctattggaggcaaagttggtgctgctgctgttactgttagtcctagaagactcattgtggtagctgctgctgcaccaaagaagtcatggctccctggtgtcagaggtggtggcaacctcgtcgacccagaatggcttgatggatcgctaccaggtgactatggctttgacccactaggccttgggaaggacccagcattcctcaaatggtacagagaagctgagctgattcatgggagatgggcaatggctgcagttctaggaatctttgtgggccaggcatggagtggagttccatggtttgaagctggagctgacccnattgcatgctcctttctctttggactctctgggacccagtgat

SEQ ID NO: 227311 - DNA, 451 bp, Glycine max
aggcatttgagttccctctcactgttccggagttggccttgcttcgcgtagaagttcacgagtatgacatgtctgagaaagatgactttggtggacaaacatgcctacctatctgggagcttagaagtggcattcgagcaattccactgcatagccaaaagggagataaatacaacactgtaaagcttctcatgcgctttgagtttattaataattgattctgtgcaatgtgcatccttctgctccccattattattattattattatgtacagtcattaagatgtgttagtagcaagagtttgtatgtagtagctggatgatatcgtgaattatgtgccccgttaaatgatgtaagaaacaaaatgtgttgtgtattttgttttcttgaggagacttgttggtcttgtaaggcttgtcaatatatactacttatatatatatatatatat

SEQ ID NO: 227312 - DNA, 569 bp, Glycine max
  unsure (1)..(569): unsure at all n locations
caacttttgaaggacatgttcagtgttaatggtaacaaggagctttgcaaaagcatcaaccctgatgaggccgtggcgtatggtgcggcggttcaggcggcgattttgagtggcgaaggagacaagaaggtggaggatttgttgctgctggatgtgatgccgcttagtcttggaattgagactgatggtggtgagatgtcagtgttgattcccaagaacaccatgatccccaccaagagggagagtgttttctccacgttttctgataatcaaacaagcgttttgatcaaagttttcgaaggggagcgagcgaagacagaggataacttccttcttgggaagtttgagctttctggtttcactccatcgccaaggggagttccacagatcaatgttgggtttgatgttgatgttgatggcattgtggaagtcactgctagagataggagcacggngctgaagaagaagatcacgatcagcaacaagcatgggaggttgagtcctgaagagatgaggagaatggtgagagatgcaatgaggtatatggcagangatgagaggtgaggaac

SEQ ID NO: 227313 - DNA, 492 bp, Glycine max
aagaaggcgtcttcataaacgcctttattctccgtttccgtttccttcccggaattcgatttttcatctctgaaaatgagagagtgcatctcgatccacattggtcaggccggtatccaggtcggaaatgcttgctgggagctctactgtcttgagcacggcatcgggcccgatgggcaaatgccaagtgacaaaacagttggcggaggtgatgatgctttcaacactttcttcagtgagactggtgctggaaagcacgtgccacgtgccgtctttgtagatcttgagcccactgttattgatgaagtgaggaccggaacttaccgccagcttttccacccagagcagctcatcagcggcaaagaagatgccgccaacaactttgcccgtggtcattataccattgggaaagagatcgttgatctgtgcttggaccgcatcagaaagcttgctgacaactgcactggactccaagggttcttagtattcaat

SEQ ID NO: 227314 - DNA, 517 bp, Glycine max
ccaatatagcccaagccctatacaaccaaaccctaacacacacccatttgattcagtttccatggctagcctcaaggttgcatttttggctgcagtgctctgcatggttgtggtgagtgcacccatggcacatgcagctatcacgtgcgggcaggtgacgaatagcctgatcaattgcatcggttacctccagaacggaggaacgccgccgtcgggatgctgcaacggagtgaagagcctcaatgccgccgccaagaccaccgccgaccgccagacggcgtgcaactgcctcaagtcggccgccagccaaatctccggcttcaaagccaacaacgccgcctcgctccccggcaaatgcggagtctccatcccctacaagatcagcacctccaccaactgcgctaccatcaaggtttgaagagaaagtcatggacgcaggaaaccggaaactactcactagtatatgagtagcattattaatattaagaaatagatcgaaggtgatgagggcttcact

SEQ ID NO: 227315 - DNA, 512 bp, Glycine max
acatggccgaacgtggaggcggtgaccgtgccggtttcggtcgcggctttggcggtcgtggacgcggcggctacaggggacgagggcggcgcagggcaggagggcgccgcgacgaggaggagaagtgggtcccagtgacgaagctggggcgcctggtgaaggaggggaaaattcggagcctggagcagatctacctacactcgctcccaatcaaggagcaccatatcattgacaccctcgtggggcccaccctgaaggacgaggtgatgaagatcatgcccgtccagaatcagacccgcgccggtcagcgaacccgcttcaaggccttcgtggtggtcggcgacaacaacggccacgtcggtctcggagtgaagtgcagcaaggaagtcgccaccgccatacgcggtgccatcattctcgcaaagctctctgttattcctgtgaggagaggctattggggtaacaagatcggaaagccccacaccgttccctggcaggttaccggaaagtgt

SEQ ID NO: 227316 - DNA, 569 bp, Glycine max
aatatatttacaccaagaaggtggtccaactggatctagtagacgtgggtctctcatttcacttccaggtggtgatggtgatggcgagattgtccaggttgccgctctagtgagtcagtcagccctttacaacaaggagcttatgcatcagcagccagttggaccagccatgatttatccatcccaaacatctgcataagggccaagttggagtgacctttttgagcctggagtgaagcatgcactgattgtgggggtggggattcaaattcttcaacagttctctggtataaatggggtgctctactatacacctcaaattcttgagccagcatgtgttgtgtatcttctttcaaacctgagcctcggttctacttctgcatcttttgttattagcagcgcgacaaccttgttgatgttaccctgtatagctgtggccatgagactcatggatatatctggcagaagaaccttgctgctgactacaatccccgtgttgatagtatcacttctcatactagtcatagggagtcttgtggtattggacagtgctataaatgcctttatct

SEQ ID NO: 227317 - DNA, 511 bp, Glycine max
aattcgcaagaagattgggtactcgatgcagctgaatgcttctcggatcaaagttcttcaagctcaagatgacgtgatcagttccatgaaagaagctgcatccaaggaactgttgaatgtgagtcatcatcatcatttgaatctactgagtcatcatcatcatgagtacagaaaccttctgaaagatctcattgttcagtgtttgcttagactgaaagaaccttctgtcttattgagatgtcggaaagatgacctgcatttggtagagcatgagctggattcagctgcccaggagtatgctgagaaagcaaatgttgatcccccagagatcattgttgacaaccaagtctatcttccacctggacccactcatcacaattctcatgatctctactgctctggtggggtggtgttggcttctcgtgatggaaagattgtgtgtgaaaatactctcgatgcacgacttgatgtagtgttccgtaaaaagcttccagagatccgaaggcagctc

SEQ ID NO: 227318 - DNA, 549 bp, Glycine max
tggataccttcctgttcacttctgagtcggtgaacgagggtcatcccgacaagctgtgtgatcagatatctgatgcagtgctcgatgcctgcctggagcaagaccctgaaagcaaggttgcctgtgagacatgcaccaagaccaacttggtcatggtatttggagagatcaccacaaaagccaatatagactatgagaagattgtgcgcgatacgtgccgttctataggatttgtgtctggtgatgttggccttgatgctgacaagtgcaaggtattggtgtaccttgagcagcaaagtcctgacatagcacaaggagtccatggccacctcaccaagcgaccagaagacataggagctggcgatcagggtcacatgtttggctacgccacagatgaaacacctgagcttatgcctctcagccatgtccttgcaaccaagcttggcatgcagctcactgaagtgcgcaagaatgagatctgtccttggttaagacctgatggacaaactcaagtcactggtgagtatgctaatgatcatgggtgcatgg

SEQ ID NO: 227319 - DNA, 533 bp, Glycine max
  unsure (1)..(533): unsure at all n locations
gcaccgactgtgatggggttggcattttgggcatcgcttgggcctttggtggcatgatcttcatccttgtttactgcaccgccggtatttcaggaggacacataaacccggcggtgacattcgggttgttcctaggacgcaaggtgtcgttgataagggcgttgttgtacatggtggcacagtgtgccggtgctatctgtggtactggattggccaaggggttccaaaaagcatactacaacaggtatggaggtggtgccaactctgttgctgatggctacaacaatggtactgctttgggtgctgagattattggtaccttcgttcttgtctacactgtcttctctgccactgaccctaagaggaacgctagggattcccatgttcctgtactggcgccacttcctattggatttgccgtgttcatggttcacttggctacaatcccaattactggtactggcattaacccagncaggagtttcggagcagctgtaatctacaacgaagacaaaatctgggatgatcagtgg

SEQ ID NO: 227320 - DNA, 516 bp, Glycine max
  unsure (1)..(516): unsure at all n locations
gtgatttcagtgagtgatcggtgttcacttgatctcatcataatcgtcagcgtcaattgaagaagatgccgatcagaaacatcgccgtcggaaggcctgaagaggcgactcaccccgacacgttgaaggcggctttggctgagttcatctcaaccttcatcttcgtgttcgccggctcaggctccggcatcgcctacaacaagctcaccgacaacggcgctgccacccctgccggcctcatctccgcctccatcgcccatgcattcgccctcttcgtcgccgtctccgtcggcgccaacatctccggcggccacgtcaaccccgccgtcaccttcggcgccttcgtcggcggcaacatcaccttcctccgcggcatcgtctacgtcatcgcccagctcctcggctccatcgtcgcctccctcctcctggccttcgtcaccgcctccactgttccagcattcggactctccgctggangtggagttggcaacgccctggtgttggagatcgtgatga

SEQ ID NO: 227321 - DNA, 477 bp, Glycine max
tctgaaactaaaaaccctaacttctgtacctttcaccgcatactcaccgattccctatctccactaagtgaatgaatagatgctgagtagacgctcgagcagagctgtctacgcagggaatctacctctgtgctatccgcgaaagagaagttgaagatttgtttctgaagtactgacacataacacacatggacctaaaggatcccccaagaccacctggttatgcatctgtacagttgggagatgctcaagctgctgaggatgcaattccaggacctgacggctatgattgggctggccaccggatactggtggagcctgcccatggcgggcgtggccattcatcctcaagagatcggcacagtcttcacagcgctggcccttgtggacgtggggtatctacgcgctctgaatatcgagctctagacactggattgccctcttctgcatcctggcgggatcttaaggatcacattc

SEQ ID NO: 227322 - DNA, 425 bp, Glycine max
gcaatggtagcatttgtcttgatatccttaaggagcagtggagccctgcactcaccatctctaaggtactgctttctatctgctcattgctgactgatccaaatcctgatgatccacttgttccggaaatcgctcacatgtacaaaactgaccgggccaagtatgaggccactgcacgcagctggacccagaagtatgccatgggctgatttgcgtttagataatgtatattgaaatggatggcatctatgaaaactttcgtgggtgtgctttgctctgcctgtacttctggggtaagaatatgtttgttatgaggggatagggaagggcggtgccttaattcgataaaaataactatgttgaacaaccatctgtatgattgtaaagtgaggcgaacgcatgaacacgatgttatttgtgtcatg

SEQ ID NO: 227323 - DNA, 620 bp, Glycine max
  unsure (1)..(620): unsure at all n locations
gaaattttggaggcaatcacaaagcttctgaacaacaacattaccccatgtttgccacttaggggagcaatcacagcatctggtgaccttgttcctttgtcctacattgctggtttgctaactggtagaccaaactccaaggctgttggaccctctggtgaaattctgaatgccaaagaagcctttgaattggccaacattagtgctgagttctttgagttgcaacctaaggaaggccttgcccttgtgaatggcactgctgttggttctggcttggcttcaattgttctttttgaagccaacatcattgctgtcttgtctgaggttatttcagcaatttttgctgaagtgatgcaagggaagccagagttcactgaccatttgactcataaactaaagcaccaccctggacagattgaagctgctgctatcatggaacacattttggaaggaagctcttacatcaaagctgctaagaagttgcatgagattgatcctttgcaaagcctaaacaagaccgctatgcacttaggacttcaccacaatggcttggtcctcanattgaagtgattagattctctaccaagtcaattgagagggagataaactcagtcaatgac

SEQ ID NO: 227324 - DNA, 542 bp, Glycine max
tgcaattgaagttgaagtcttgcccttctctcttcaactccaaacacaagacatcatcatccatggctgcctccgtctccactgtcggagctgtcaacagagctcttttgaacctgaatgggtctggacctggggtttcagctcccagttcatccttctttgggagcagcttgaagaaggttattggctcaagggtccccaacacaaagatttcctctggaagcttcaagattgttgctgtagaagagaagaaagagattgaagagacccagcagaccgacaaggacagatggaagggtcttgcctatgatatctcagacgaccaacaggacatcacaagaggaaagggtttggttgactcccttttccaagctccacaggatgctggaactcactatgctgtcatgagctcctacgagtaccttagcactggacttcgccagtacttggacaacaacatggatggattttacattgctccagcttttatggacaaacttgttgttcacattaccaagaacttcatgaccctgcccaacatc

SEQ ID NO: 227325 - DNA, 531 bp, Glycine max
cctttcacttcacttgtggttcctcactctctctctctccacaccacactgaggagggagacagtggaaggaaggaacactcaaatcactgaaccagccatggctaccttctccaaggaacgcgagaactttgtatacgttgccaagttagctgaacaagctgaacgctatgatgaaatggtggaggccatgaagaaggtggcgaagctggacgttgagttgagtgtggaagagaggaacctgttctctgttgggtacaagaatgtggtggggtcacggagagcttcatggagaatcttgtcatcgatagagcagaaagaggattccaaagggaatgagttgcatgttaagcatatcagggattacaggaacaaggtggagttggagctgtccaacatttgcagtgacattatgataattttagatgagcatcttattccatccactaatattgcggagtccacagtgttttattataagatgaaaggagactattaccggtattttgcagaatctaaagctggcaatgaa

SEQ ID NO: 227326 - DNA, 476 bp, Glycine max
ttctcctttggcgccgacggggcagaaacagaggggtctcaaacaaggaacgatcataggaatcgtggtcggagacataatcggcgtgggaatcttggccatgctgtgtgtctacgtgtaccgtttgaagaaaaagaaggatgcggagagcacaaagaagaagaacgaagcggttataacaagaagcataagcgagagttcctcgtcaacaacctcagaatccataggcttcacgaggtggtcgtgtttgaggaagagaacggaagaggaagattctttcgagacaacaagctcttccgaaagtgaagtggagggagccacggcggcgacacatgatgataataataataacaacacggggactctagttactgtggacggtgaacgacaactggaggtcgaaacgctgctgaaagctgtcgcgtacatattgggtgccacggggtccagcataatgtacaaggcagttctggaag

SEQ ID NO: 227327 - DNA, 537 bp, Glycine max
aaacattgtttgttgtaggaagaggaatcttgagaaatggcaggggacagcaagagcaagattctgttcatcggagggactggttacatcggaaaattcatcgtggaagccagcgccaaagctggccacccaactttccttttggtgagggagtccactctctccaaccccgcaaaatcacccctcatcgacaatttcaaaggcctcggtgtcaatcttgttttaggagatctatacgatcaccaaagtttggtgagtgctataaagcaggtcgatgtggtaatttctactgtaggacacctgcagctagctgatcaagataagatcatttctgcaattaaagaagcaggaaatgttaagaagttctatctatctgagtttggaaatgatgtggaccggactcatgcagttgaaccagccaagtctgcatttgcaacataggccaaagttcgccgagctattgaggctgaaggaattcccttcacttatgtgtcaagcaacttctttgctggttacttcctgcccaacttgtcacag

SEQ ID NO: 227328 - DNA, 577 bp, Glycine max
  unsure (1)..(577): unsure at all n locations
cttcttccttattttcttccctagtcaaggagattcatctctgcaggttgttttagaaaagaaaaaatggtgaagatttgctgcattggtgctggatatgtggggggtccaacaatggcagtcattgctctgaagtgcccctccattgaagtggctgttgttgacatctccaaatccccgattgcagcatggaacagtgaccagcttcctatctatgagccaggccttgatggtgtggtgaagcaatgtcgtggcaagaaccttttcttcagcactgatgttgagaaacatgtctatgaggcagacatagtgtttgtctctgtcaacaccccgacaaaaactcgcggtcttggagccggtaaggccgcggatttaacgtactgggagagtgcagcacgcatgattgctgatgtatccaagagtgacaagattgtggtggagaaatccactgtccctgtgaaaactgctgaggccatagagaaaattttgactcacaatggcaagggaatcaagttccaaatcctttcanaccctgaattccttgctgagggaactngcatccaagatcttttcaatc

SEQ ID NO: 227329 - DNA, 526 bp, Glycine max
  unsure (1)..(526): unsure at all n locations
agcgaatagggaatcaactaattctggtgctgctggtgatggtggagatggttcaagtggtggaggagaaaacagtgcagggaaacaagtggttgaactcagcaccgctcagaggcaagagcttcagatgaagaagtccaagcttgtgaccatgctcgatgaggtagaacaaaggtacagacaatatcaccaccaaatgcaaattgtggtatcgtcatttgagcaggcagcaggttatggggcggcaaaatcttacactgcccttgccctaaagactatctcaaagcaattcaggtgccttaaagatgcaatctctgcacaaatcaaagccacgagcaagacattgggtgaagatgattgtttaggagttaaagtagaagggtcgaggcttaggtttgttgaccaccatctcaggcaacaaagggcacttcagcagctaggaatgattcaacccaatgcatggaggccccaaagaggcttgcctgaacgagctgtttccattcttcgggcttgctttntgagcatt

SEQ ID NO: 227330 - DNA, 577 bp, Glycine max
  unsure (1)..(577): unsure at all n locations
agctacctccttggttggacgggatgtgcttggcagaatatcttccaaatctagaagaatatcttgggaaacaggtcttagaggctgtttcattaattgaagttagaaggcacttcattgaagcattatccagtccgttaggaaggccagttgaagctgatgctgtcttttgcaggaaggcaacttttcttgctgcatctggtgttttctcattcctggtacacctcctaattccaactcaatttccaaagcaacagccggctattatgcttcaaagttcacagcattttaattcgcaaatggcacctatgaagtcacgtgttatgtctgattatccatggagtccgagatgggaaccatcaatgatggctgagcgtatttgtgattttctggcagatgaggccttgaacttcaagagacaatgcagtgagggccaagttcagtagtaacaaggccatggcatgttcagctcaatcccaatgtcgtggcaatctctagacctgttcattggaaatgtcnttttgcttctctttgtcaacgcattattttggatccagttaatgaattgcatgggaat

SEQ ID NO: 227331 - DNA, 449 bp, Glycine max
gaagggctgcttgctcttgggcatcaacagtttgagcaagcaggactctgctggtcttatttgattgcgaacaataaggattcggacaccctgccttccgatgaggatctgcagttctataacagagctggggatatcatggacaaaggcatgttgatgagcgaggagatagaggagcaacgtttgaatggactgtgcaaatcggataactataaagagcagctagagaaaaaggggttgcatggtcttttcagggatgttccttatgatgaagctgatgaccaggctgcaaagatgaagctgcaaggatatcttttatggggaaccttgcagtatgagcgtactgtcgtggagtataagctaggcctgccaacatgggaggaatgtttagaggttgcatgtgaaaaatgtgaactggctggagcttctcaactgacattggagtcatg

SEQ ID NO: 227332 - DNA, 552 bp, Glycine max
  unsure (1)..(552): unsure at all n locations
tggggtttgaggaaactgagctaaggcttggactgcctggaaacgtaggaggcactggcactgaagaagtgctcatcaggaagagaggtttctctgagactgaaactgaaactgaggaggatgagtctgctaccactgtggatttgatgcttaatctttcttctaaggaagctgctgctgctgcagatccaactgataagcacaagactttgcctaaggagaagactcttctgcctgcagatcctgctaagcctccagccaaggcacaggtggtaggttggccacctgtgcggtccttccggaagaacatgttagctgtacaaaagagcgtcggagaagagaacgagaagaacagcagcagccctaatgcaagctttgtcaaagttagcatggatggagcaccttacctccgcaaagtggacttgaagatgtacaagagttaccgagagctctctgattctttaggcaaaatgttcagctccttcaccatanngcattgtgaatcccaaggaatgaaggatttcatgaatgagagcaagctgaatgatcttt

SEQ ID NO: 227333 - DNA, 471 bp, Glycine max
cgcgaaacacctgattcccctccccagacgccgcagagtcagagagagagattcactgaaacagagcgcagaagaaaatacataaactaatccagaaaatgagcagcggcgctggaaaggtggtgtgtgtcaccggcgcttccggttacattgcttcctggatagtcaaattcctcctcaatcgcggctacaccgttaaggccaccgttcgcgacacaagtgatccgaaaaaaataaaccacttggttggcctcgacggtgctaaggagaggctgcacctctacaaggcgaatcttcttgaagaaggttcctttaactctgtcgttcaaggttgccatgctgtgtttcacactgcttctcccttttatcacaatgtcaaggaccccccagctgaattgttagacccagctttgaaggggactctcaatgttctgaaatcgtgtgtaaacttgccgacgctggaacgcgttg

SEQ ID NO: 227334 - DNA, 209 bp, Glycine max
gtgatttcagcgagtgatcggttttcacttgttttcatcataatcgtcatcgtctagggaagaggatgcctgttaaaaacatcgtgcgccgaaggcctcaagaggcgactcaccccgacacgttgaccgacgatttggctgattacattgcaaccttcatcgacatgatcgccggctcaggctccaggatcgtctacaacaaggctcac

SEQ ID NO: 227335 - DNA, 537 bp, Glycine max
gtaactcgttcttcttcttttgttgttctgtgtttgtgtttgttttttctctcacctgaaaatgtcttgctgcggtggtaactgtggttgcggaagctcctgcaagtgcggcaacggctgcggaggctgcaagatgtacccagacttgagctacactgagtcaaccaccaccgagaccttggtcatgggagtggcacctgttaaggctcaatttgagggtgctgaaatgggtgtgcccgctgagaacgatggctgcaaatgtggaccaaactgctcctgcaacccctgcacttgcaagtgaggtgttgggagagcaagcttcaagcagagatagcccttaattaggaataatgatcaactattaatgtgtagctaaaaacttatgtattatgtctgcgatggctttcgtgcactctggagttttgcgttaaacaaacatccttagaataaagtggtcatgtcttgcctttcagcaagttcaagtgttttggacttgtgatgggtgtgttaagctcatggttgcttcttttttttttt

SEQ ID NO: 227336 - DNA, 410 bp, Glycine max
gataatcggttcaagggctgtaattttgttactgaattcattttatgattatttttcatgatgcttttgatgactgaaaatgaaaaacagcgtggcaatgtaatgaggccgtcagtttcccatcctacagctccaagcgcgctgaaatcgccgaccaagtgacaaactcattccgaaatcaccgttgcagcggcggattcggaatccgcagcgtgctcaagagagcgtcactgaacaacatgatgtggtcggtgtttgggcgggggccaaccttgacgagataaacaccgcaatggactagctatccatgttggtggaacaaggctattacttgttgggcacccttaattggggagaccatataccttgcctgaaagactttgacctacagaaaattcgggtcacctgct

SEQ ID NO: 227337 - DNA, 569 bp, Glycine max
  unsure (1)..(569): unsure at all n locations
cacttccacagtcacaatttaaaaccatgatttaatgttaaattaacaaatagattgcaaaaaaaaaatagaaaaatcaaaattactggtgataaacataagaataatactgatgttatagaaatagaaatcaaaaaaaaaaaaaaaaaagttatatgcaattactagttctaattgaagggatgtgtgccacgtcagcaagcggagcagagtaatggaaatggcgttgaagggaatgggaatggaatagaagaataataccttttgcttggcgcgattggtgccggactgagacaaagcgaccaaaggaggaatcgcaccttcgcgagcgaccatggtgcgatacgtcacgctgtcctcgcaaacctgtaaaagaataaccaccgcgatttccttctgcctctgcgtcccaacctcgacgatctccaccagcaccggcacgcctccttctttcaccagcgccaccctcgccttcggcanccgaaccagcacgctcaccacgtacgccgacttgtccaccatgttcgactcgaagtccgccatcaactccaccagcaccttcatgatcc

SEQ ID NO: 227338 - DNA, 436 bp, Glycine max
agggaatgaagagctgccaaagacaaacctaaatgggcatgatgaagaagcaaaattcggattttttcatcataaaccaatattcaagaaacatattccaattccagtatataaacctgtaccaaagccatttccagtgtataaacctataccaaagccagttccagttccagtgtacaagcctattccaaagccagtgtataagcctattccaaagccagttccagtgtacaagcctataccaaagccagttccagttccagtgtataagcctattccaaagccagtgtacaagcctattccgaagccagtgtataagcctattccaaagccagttccagtgtacaagcctataccaaagccagttccagttccagtgtataagcctattccaaagccagtgtacaagcctattccgaagccagtgtataagcct

SEQ ID NO: 227339 - DNA, 472 bp, Glycine max
  unsure (1)..(472): unsure at all n locations
ctcgagccgctcgagccgattcggctcgagagcaggtccacacaaacatgatgactccaaacttgaacttggaaatcgaaaatcattcagaaggcagcagccaagtggcttcaaatgtatccttgcatgaagcatctcatgatcttacaaagggcagcaccaccacttcctcctgtctcacaaaggatgaaactgatccaggtttcattacccttgacttgacactcaacttcaataattccggtgatggcgagttgaaagtctcgagtgatgctagcagtgaagttggagctgaagctcctgcttcagcatcagcaactccaagggtttctctcgtaactactgcaggaagaaggtcctatagctctcaggcattanggggtcatcaaaatgcacacaaaagggagaggacgatggctaagcgcgcattgcgaatggggatgttcactgataggtttacaagcttggcatc

SEQ ID NO: 227340 - DNA, 477 bp, Glycine max
  unsure (1)..(477): unsure at all n locations
gcgatctgtacaatttactaactttttagtcacgcagttaaactcttgagcaagcaaagatcccctttatattcttcattcctctggggtgctgcacaacgaaactcacagaagaaagaagaaaaagaagcgcaactaaagtcagcattcgaaaaagatgagtagcatcggtgcaggttacgatctatcggtcaccactttctcccctgatggccgcgttctccagatcgagtatgccgctaaagccggcgacaacagcgggactgttattgggatcaagtgcaaagatggggttgtgttgggcgttgagaagcttattccgtcgaaaatgatgcttccgggttccaatagaagaatacactccgttcatcgccactctgggatggctgtagcaagattagcagctgatggcagacaaattgttgccagngctaagtctgaagctactaactatgacagcgtatatggcgaaccaat

SEQ ID NO: 227341 - DNA, 546 bp, Glycine max
aattgaagttgtcttgtctgcgttctcaaacgttgttgcttgctgctgctgcatagttgatcgaaagcatgacaacatcattgtccagcatccttttcaagggaattgcagctcgttctttcaccgcccctctaactaggtcctgttatcatggaatgagatactttgctactgtatcaaatgatcctgacacacatgatgacttcaagccagctaataaacttgagaattccaacatttctttggctgatgttattgagcaggatgtcaaggataatcctgttatgatttacatgaaaggtgtgcctgattttccacagtgtggatttagttctcttgcagttagagtgttacaacaatatgatgttcctttaagtgctagaaacattttggaggatcctgaactgaaaaatgctgtaaaagctttcagtaactggccaacatttccacaagttttcattaagggagagtttatcggtggatcagatattgttcttaatatgcatcagacgggtgatttgaaggaaaagcttaaagatattacgt

SEQ ID NO: 227342 - DNA, 367 bp, Glycine max
gacgggtcagaatgtgaccgagtgcattggtgggtcaaggacggtcacatttgatgacttgagctcacgttaccacacacactgtgacccaaggctcaatgcttcacaatctcttgagcttgctttcatcatcgccgagcgtttgagaaagagcaggatcagatcgcagcaacctcttgcccctctaggagtgtaaaagtgccttcaaaaccaacaagagaaagatatttttgttcttttttttttttgtcctacatatttattattaatcgatggttgtcactttgattttgtgttgtgtttgtatgtgtatactacctagtaatgcgtttggactggcaaggacaagagtacttctatggataat

SEQ ID NO: 227343 - DNA, 476 bp, Glycine max
agcggtgttacggtgacagagtgagagtgagagtgagaaatgggtctgctttctaacagagtggagagacatgagatcaagcctggtgatcacatctacacttacagagccgttttcacctattcccatcatggcatttttgttgggggaagcaaggttgtacatttcagacctgaaaggaacttaaagtcaatgactgagacatcatcaaactgggatgatccaacatcaaacccatgtccaacctttcctgattgtggattcagacagccaaactgtggtgtagtcctttcctgcttagactgtttccttcgaaatgggtctctttactgttttgagtatgaggtttcaccatctgttttcctcagcagaataaggggtggcacatgcactactgcatcagctgacccaccagagactgttattcatcgagcaatgtatcttcttcaaaacggctttggtaaattatatgtttt

SEQ ID NO: 227344 - DNA, 278 bp, Glycine max
atatattatgcaccggaagccctcttcgccggcggcctctactggttcgtgtgcgttcggggccccgccgagcagaagggcaaacgcgccaccgatctttacggggggtgcatctccgccgagaaagttcaagaccactacaaacagtactggcccttcttccgccgcccaaaggagatcgatatcggcgacaaagtccccgacttcgtcgacaccttctacaatctagtcacagacataatacgagtggcggtggagccagtccttacactactgcc

SEQ ID NO: 227345 - DNA, 536 bp, Glycine max
aaacaacaatggacctctgtgaatcgataagcaaccaaaccgacgtggccctgagcatctcaaagctcctgttgtcgaaagaagctcgggacaagaacctcgtgtattcgccgctgtcgttgcacgttgttctgagcatcatcgccgctggctccaagggccccacactcgatcagcttctctccttcctccgatccaaatccaccgatcatctcaactccttcgcctctcagctcttcgccgtcgtgctctccgacgcctctcccgccggcgggcctcgcctctccttcgccgacggcgtgtgggttgagcaatccctctcgcttctcccttccttcaaacaacttgtcagtgctgattacaaggccactttggcttcagttgatttccagaccaaggctgttgaagtggccaatgaagttaattcatgggctgaaaaggagacaaatggacttgttaaagaccttcttcctcctggatcagttgacagttcaaccagactcatctttgcaaatgcactgtacttcaaaggagca

SEQ ID NO: 227346 - DNA, 494 bp, Glycine max
cagcttacagcctcatgttcaaccgcgccatcggcttcgccccttacggcgtctactggcgtaccctccgccgcatcgccgccacgcacctcttctgccccaaacaaatcaaagcctccgagctccagcgcgctgaaatcgccgcccaaatgacaaactcattccgaaatcaccggtgcagcggcggtttcggaatccgcagcgtgctcaagagagcgtcactgaacaacatgatgtggtcggtgtttggacaaaagtacaaccttgacgagataaacaccgcaatggacgagctatccatgttggtggaacaaggctatgacttgttgggcacccttaattggggagaccatatccctttcctgaaagactttgacctacagaaaatccggttcacctgctccaaattagtccctcaagtgaaccggttcgctggttcaatcatcgccgaccaccaggccgacacaacccaaaccaaccgcgatttcgttcat

SEQ ID NO: 227347 - DNA, 604 bp, Glycine max
  unsure (1)..(604): unsure at all n locations
cctctccaacctttcactttcagctttatttgaatccctctctctcctttccaaatggccagcgttgaggttgcacatcaaacaccaacaacagttccagaaaatgaaacaaccgaggtaatcaagacccaggaaacaaccccggaaccagtaccagccactgaggctcctgcaacagaacaagcagcagctgaggttcctgctcaagaagaacaacaagcaactgaggttcctgccccagaatcaaccaccgaagcaccaaaggaagaaaccaccgaagcaccaacaacagaaacagtagaaacaacaactacagaagaagccaagccagaggagcctaaagaagttgcaattgagaccgaggaggtggtgacataggagacagaggaagagaagccagcagcagaagagaaatcataggagaaaactgaagaagtgaaagaagaagcagaagagcctaaagaaactactgaaacagaaacagaatcagcaccagcagcaaccacagaggaagagaacaaaccagctgagacagtggaagccccagtagagggttctgtngagaaaactgaagcttagacttatggacagtgtgagtgagaaa

SEQ ID NO: 227348 - DNA, 566 bp, Glycine max
agcctattccaaagccagttcccgtgtataagcctataccaaagccagttcccatttataagccaattcccatttttaagccaataccgaaaccagttcccatttataagccaattcccatttttaagccaataccgaaaccagttcccatttataagccaattcccatttttaagccagtaccgaaaccagttcccatttataagccaattccaatttttaagccagtaccaacaccaattcctttttttaagcctataccaaagcctgttcctattgttaaacctattcctattccagtttttaaacccatacctaaaccatttccaattgttaaacctatcccttaagccaaagtcattttttaagccagagactttcttcagaaaacctattcctaaacttcacccaaatctgataaagcacggtcttctacattttccaattcacaatacaattcctacaatttcaactccataagatgatttggccgtgtcctataaaattattgtacttagaacgttatcccattctatttccaatatagctacgtttgttctaaaaca

SEQ ID NO: 227349 - DNA, 439 bp, Glycine max
ggcagggccaatggggccgaaaacactctgcaatgcttgtggcgtgcgctacaagtcaggccggcttttccccgaatatcgccctgcagcgagtccaacgttttgtgcggccatgcactccaactcccataagaaggtccttgaaatgaggaacaagacaggcaccaaatctggctttgcaactgtttctgctgcctcaccagaactcattccaaacactaacagcagccttacccttgaatatatgtgaaagggggaaaggaaggattctagttggagaattctctaattctctttcaagtcttctcttgagtcatgtcttatacaaggttttgaattgcattctacaaactgcaatgttaaaggttttagaagtgtctgcaactgcgttgtggttgcggttgtgactgcatcagccatatttgtccacaattttgat

SEQ ID NO: 227350 - DNA, 488 bp, Glycine max
agagtcgatgctggctaattctgaaaccaagggtagtcttaatgatggggaagatattgtctttggaaatgaagtttttgaaatgtggaagatggggaaagataggcttgcattgccactgttaattgatctttgtgagaaggctggggtggatcttccgccttgttttatgcggctaccgatggagcttaagctcttgattttggagcgtcttccgggtgttgatttggccaaagtggcttgtacttgttcggagctgcgatacttgtccaccagcaacgagttgtggaagaaaaagtatgaagaggaatttggaaaagagggagatagaaaagggtggcttttcaaggatttgtttgctttgtcctgggaaacaaagaagaggcgtcaagcggttccttttcgacgacaggggatttcaagaaacattattttctcgcccaaccattttggaatgcctccaagttggggtggagaatatggtgtgc

SEQ ID NO: 227351 - DNA, 494 bp, Glycine max
ggcgcaagtgaggaacaagcaagtgcttctaaaggactatgttaccggttttcccaaagaatccgacatgaatattgtcgaaagtaccataacattgaagcttccacaaggttccaatgatgtcttgctcaaaaatctgtacttgtcttgtgatccgtatatgaggaatctcatgaacaagcccgaaggccctcccaatagtcgtgcttacactcctggctctccattaataggatatggagtgtttaaagtgctggaatctgtgcacccagattataaggaatgtgatttagtgtggggctttaccaaatgggaagagtatagcttgttaccctcagctcatatactcttctaaattgagcacactgatgttacacttacctactacactggaattcttggcatgccaggagtgactgcatatgcaagtctatttgaagtatgatcatttcataaaggagaaaatgtcaatgtttcggctgtctctggcgcag

SEQ ID NO: 227352 - DNA, 492 bp, Glycine max
gtgatttcagcgcgtgatcggtgtttacttgatctcaacactcgtcgagtcaggtcagtgagatgaagatggcccatcagaaacatcgacgtccgtaggcctgaagaggcgactcaccccgacacttggaaggcggctttggctgagttcatctcaaccttcatgttcgtgtgtcgccggctcaggctccggcatcgcctacaacaagctcaccgacaacggcgctgccacccctgccggcctcatctccgcctccatcgcccatgcattcgccctcttcgtcgccgtctccgtcggcgccaacatctccggcggccacgtcaaccccgccgtcaccttcggcgccttcgtcggcggcaacatcaccttcctccgcggcatcgtctacgtcatcgcccagctcctcggatccatcgacgcctccctgctccgtgccttcgacagcgcctacactgttccagcattcggactctcccgtggagttggagttgg

SEQ ID NO: 227353 - DNA, 567 bp, Glycine max
ttttatttaggttcttctcagtcgtttgaggttgttcctcagtcctggttatccctatgaagaaattgtaagcacatttcacaatcagaccggcatagtcatgtgctcctacctcccaatgttcaccagctttaatagaacaaggggtggcttgattcaattgaaccatggcaggcctcagcctctccaatatgttgacaatgcagcctttttggctgctctttacagtgattatatcgatgctgctgatacacctggatggtattgtggacccaatttcttctcgactgatgtccttcgagactttgcaaagacccagattgattacattcttgggaagaaccctcggaaaatgagctatattgtaggttttggtaatcattatccaaaacatgttcaccatagaggtgcgtctataccgaagaacaaggttaagtacaactgtaaaggaggatggaaatggagggactcatccaagccaaacccacatacaattgttggtgctatggttgctggtcctgacaagcacgatcattttcatgatgtccgaccaactacaactacact

SEQ ID NO: 227354 - DNA, 496 bp, Glycine max
ctttctgttctcttcactcttggtcttgcgagagaaagccatgccagagacgaagatttttggcatgctgtttggccaaacactcccattccaagttcattgcgagatcttctaaagcctggccctgcaagtgttgaaatcgatgatcaccctatgcaaattgaagaaacacagtacccgaaaaccttcttctataaagaagaccttcattcaggcaaaacaatgaaagtacaattcagcaagcctccctttcaacaaccatggggtgttggtacatggttaaaggaaattaaagacactactaaagaaggatatagttttgaagagctatgcatcaagaaagaagccattgtgggagaagagaagttttgtgcagaatccttgggaacagtaattggttttgccatttcaaagctgggaaagaacattcaagtactttcaagttcctttgtcaataagcaagaccaatacactgtggaaggagtgcagaatcttg

SEQ ID NO: 227355 - DNA, 479 bp, Glycine max
ggcttgggcctgggccctcctgttgcctctctgtatgtgacagaggtttctcctgcttttgtgcggggcacctttggagctttcatccagattgccacatgccttggtctaatgggagctttatttattggaatccctgtcaaagaaatatctggatggtggcgggtttgtttttgggtatctaccattccagctgctatacttgccacagctatggtcttctgcgcagagagtccacattggttatacaagcaaggaagaactgctgaagcagaagctgagtttgagaggcttcttggtgtatcagaagcaaaatttgcaatgtcagagttatccaaggcagatagaggagacgatagtgatagtgtgaagctgtcggaattgcttcatggtcgtcattctaaagttgtttttattggatcaaccctatttgctttacaacagctatcttgtataaatgctgtgttttatttctcttc

SEQ ID NO: 227356 - DNA, 545 bp, Glycine max
tgagttagtaattggccatttaccattttgtccggtgagcgttgctgaagaaaacgttgggttgacgcagagtgttattcttcttcccttcgtctgaaaaccctaaaacattgaatcttagatggacttgacatggttgagtgccatcctggtgggggctggttaccttgctttgggttacttcattggttctcagtatccccctcgtttcctcttctcacataaattatcgactaaacataaagaagatgcttcacttctcaatgacaacgacaataagaagaggaatactaagtccaaactcaaagaccccctggagattgaacaactcgctgaaatcctcgatgattttaagatgatactcgttgtcaggaatgatcttaaaatgggtaaagggaagattgctgctcaatgcagtcatgcaacgttaggtctctataaaaagatccttcgtcgagcaccaaaggctttgaataggtgggagatgtctgcacagcctaaggtggttgtcaaaattgaaagcgaagaagatatgctggctttgc

SEQ ID NO: 227357 - DNA, 316 bp, Glycine max
cttcattgacaagactgggaggaaaaagcttgctctaatcagtttgtgtggtgttgtgttctcccttgctctcctaaccgccgcttttcgcgaaagcgaaatccactcaccaatggttagtgccattcaatcctctcaattcaacaacaacaacacctgccctgattacaaaacagctttgaactctgctgaatggacttgcatgacatgcctaaaggcttcaccatcttgtggttattgtgctgctgatgacaagcttttaccccgggcatgtttgatagccaatgttgacacaaagaagatgtgtgggcatgac

SEQ ID NO: 227358 - DNA, 463 bp, Glycine max
gtgatttattagataatcgaaaacagaaaatcttgcgaactattccaaactcataagaattacgggaaggggccattgaacagctggaaaaagcccaggcccgcttaaggaaagactaaacggaagcagatcgttttcgggtgaatggctattctgagatcgaacgacaagaattggatttaattaattcaatttatacgactctggaacaattagaaaattacacaaacgaagccattccttttgaacaacaaacagtgattaatcaagtccgacaacgggttttacaacaagccttacagggagctctaggaactctaaagagttgcttgaacaacgagttacatttacgtactgtcagtgctaatattggcatgtctgggacgatgaaagaaaaaataactgattagtctttctattataaaatagagtataggcattatgtttttcttctagaaaataa

SEQ ID NO: 227359 - DNA, 524 bp, Glycine max
ctctcctctcactttcatttctacatccctggctctgttccgtcgatgacgatggcgtttagggtgcgaaaccctgacctccgctttctcattcttctctctctcttgtccatcacttccgccaaggtcttcttcgaggagcgtttcgatgacggatggggaaatcgttgggttaaatcagattggaaaaaagatgagaacctggctggggagtggaaccacacctctggccaatggaatggagacgctaacgacaaaggtattcaaaccagtgaggattacagattctacgctatttcagctcagtaccctgaattcagcaacaaggataagacactagtcttccaattttctgtcaagcatgaacagaagcttgactgcggtggtggctacatgaagttgctcagtggtgatgttgatcagaagacatttggtggggatactccttacagtattatgtttggcccagatatctgtggttacagtacatagaaagtacacgctattcttacctacaatgacac

SEQ ID NO: 227360 - DNA, 499 bp, Glycine max
gaaatatcaatcaatcatttttcttataaaaatttgcaattaattagattttcaggaagcgtcataatgggaaactcaattgatcgaaacataaaaagatcaacccaagagagacatctttgcctgttctaatcagtgaaatagtcaaatgtgatcgaagcaaaagctccagcttttactagcagttttccacggtctgcttatctagggaaaacaaaaaacactacgactgaaatataactatccggaatataacttccgctcactctttatccgttttgcaaacttcctagagttcatcatgtacaccctcttccttggtgtcttccccagcttccgtctttgattcagcatcggagtcattgccagcttcatcagcatcttcctcttcctcatcagcatcagagtcaactgggtcatcctttgattcctcctcttccctcttcttctcagcctcttcaaatgctgtcttctcaacatccttgtgcttgccccatgt

SEQ ID NO: 227361 - DNA, 497 bp, Glycine max
aaacaactgcaaaaccagaaggaacaagacctacaaacaagactggcttccttggacttgttggtaaaaaggtggataccatagagtattgcaataagaagattaatgaactcgaggccagattggaatctgagcaaaaggtcactctcagagagaagcagcaagatgctgctgtagtatttttctcaagtagggtggttgcagcatctgcatctcagagtttgcatgctcaaatggttgacacttggtcagtctttgatgctccggaacccaatcaactaatatggcctaatttgaaaatcaagtactttcagagagagctgaggcaatacttggtgtatttcattgtggcactgactatattcttctacatgattccaattacatttatatctgcatttactactttggataatttggtgaaatatctcccattcataaagccaattgttaatataaaggctttgagaacaagtgtggaagcttacctccctcaa

SEQ ID NO: 227362 - DNA, 563 bp, Glycine max
gttctagatcgcgatctagaactagtcataaaacttcaaagttcacacacagaagaatcagagtggctttcaatcaagagttagaagctgtaacccaagctttctcagggcatggagtggatgagaaatcattggtaacattactgggaaaatgggatcctctggagagagaatctttcaggaagaagacaccacatttgttcagtgaggatcatgaacgccattttcagaggtgggatgaccaatatgttcgtcttctcaagcatgaattcgtgcgttttaagaatgctgtggtgctttggaccatgcacccttgggaaagagatgctcgtttagtaaaagaggccctaaagaagggtccaaatgaatatggagtgctgattgaggttgcatgcactagatcctcacaagagctattgggagctaggaaggcttaccattccctctgtgaccactccattgaagaagatgttgcctctcacatccatggtattgaaagaaagctattggttgccctactgagtgcctatagatacgaaggaacaaaggttaaagatgacact

SEQ ID NO: 227363 - DNA, 511 bp, Glycine max
  unsure (1)..(511): unsure at all n locations
gttcatttccttcaaagaaaggcaaaccttcttccttgccatccagatgtcatccctgatcttgaactctacccatatgatccttgggaacttcatggtagagctttggcagagggaaagcaatggtactactacagcagaaggacacaaaatagggtcactggcaatggttattggattcaatgggaatggaagagccagtggtttcaagctcaagcaataagagagttggcatgaagaaatattatgtgttccatttgggagaagcccctgatggtaacacaaccaattggataatgcaagagtatcgtctattagattctgattcctctagcagatcatctaaaagaagatcacaacctaaaccggaccataataaatgggtgatatgtcaagtttatgaacaggataacgatgatgatggtgatggtacagaactctcttggttggatgaagttttcttgtcattggatgatctngaagaaataagttngccaaaatagatgattat

SEQ ID NO: 227364 - DNA, 251 bp, Glycine max
attaaccctggccattggaccgaggacatgagggatgatgcccttgaacccgctgatctcaatgacaggaacatgattgtcgtcgatgtcggcggcggcaccgggttcaccactcttggtattgtcaagcatgtggatgccaagaatgtcaccattcttgaccagtcaccccaccagcttggtaaggccaagcagaaggaaccactcaagggatgcaaaataatcgaaggggatgccgaggatcttccctt

SEQ ID NO: 227365 - DNA, 366 bp, Glycine max
ctcttgcggagtggggcgattctcgattctgttttctgcaactatgcctagccctaaggcattctttgacatgaccatcggcggccaagctgccggccgcatcgtgagggagctatgcgccgacgtgactgcgagcaccgccgagagcttccgagcgctatgaaccggcgagaagggcgcccgacggagcggcaagcccttccagtacaaaggcttgtacttccagcgggtgatccctaacttcatgtgccatggcggggactctaccggcggagacgggaccagaggcgaggtgatctacggtgctcaagctcaccgccagaacttcgtgaagaggcacactggtccctgcatcctctacatggc

SEQ ID NO: 227366 - DNA, 545 bp, Glycine max
tttctccattgttgggatgaatgtgagtttaatgtggaactctgttggtttctatcagattgctaagctgagcatgattccagtatcttgcttcctggaggttgtcttggacaatgtacgatattcaagggacacaaagcttagtattgttttggttttgctcggtgttgctgtctgtacggtcactgatgtcagtgtcaatgcaaagggtttcatagctgccgtaatagcagtctggagcacagccctgcaacagtattacgtgcattttcttcagaggaagtattctattgggtcatttaacttgttgggtcacactgcaccagcacaggcagcaagtttgcttctagtaggcccctttatggactactggttgacgggcaaacgagttgatgcctacggctatggtttgacatccacattgttcatcattctgtcttgcactatcgcagtagggacaaacctcagccagttcatctgcattggtaggttcacggctgtaacgttccaagtccttggtcacatgaagactattctgggtctga

SEQ ID NO: 227367 - DNA, 513 bp, Glycine max
gtagattggtttaaggcaatggtagcaagtcgtcgcagtgaggagctagttgatcctttaattgagattcctccccctccaagatctttgaagagagttttattgatttgtctgcgctgtatagacatggatgtcgtaaagcgaccaaagatgggtcaaattattcatatgcttgagacagatgatttcccctttcgttctgagctacgttcagttagagagaaagatcctgtgccttctcatgcggacgtttccattaaagttccttatccaccaccaaagcatgcagaaaccgtagaaaaatcaagatggagataattgtttgtaatgttggtcatgcaactttggggatcaatctatttgtataaggattttcgtgatgttatgaacgagttttgagtctctgtgcatatcttatacgttgtagctgtttgcttcaggtttcaacaccattctgttgtattgcattatcttggaaccgagaagagcatggcttgtaaatacgcacctcac

SEQ ID NO: 227368 - DNA, 351 bp, Glycine max
caagtttacaatctacgatagaaaaagttgttccactgagctggtggtgaattcaaaacttatatttaatgtgaaaaagttgttccactgagctatttttggcaaccaagttggttgtttcaccacaaaatggacatgctggactgcaagaggatgaagtcattctccaatttggaaaaattgggaaggacttgtttacaatggattaccagtaccctatctcatcatttcaagcatttgcaatctgcctcaacagcttcgctaccacggttgcttgcgaatgatgcatgtttgaacatgtcacatcatcgtacgaaaacattcttcatcatatggagaacatatcaattg

SEQ ID NO: 227369 - DNA, 503 bp, Glycine max
cgctgcgtctcttcctcttctctttcgattcatccctcattcataatcttccaatccaacaacctcagcctcacactcacacatacacacatctgaacgcgtatcgtccctcccatggcttcaaagcgcatcctcaaggagctcaaggacttgcagaaagacccaccaacttcttgcagcgctggtccagtagctgaggacatgttccattggcaagcaacgattatgggtcctgctgatagtccttatgctggaggtgtattcctagtcactattcactttcctccggattatcctttcaaacctcccaaggttgcctttaggactaaggtgtttcatccgaacatcaacagcaatggtagcatttgtcttgatatccttaaggagcagtggagccctgcactcaccatctctaaggtactgctttctatctgctcattgctgactgatccaaatcctgatgatccacttggttccgaaatcgctcacatgtacaaaactga

SEQ ID NO: 227370 - DNA, 467 bp, Glycine max
ggctgcacatcatacaccaacaacagttccagaaaatgaaacatccgaggtaatcaagacccagtaaacaaccccggaaccagtaccagcctctgaggctcttgcaacagaacaagcggcagctggggcttctgctcaggacgaacagcatgcaactgaggctcctgccccagaatcaaccatcgtagcaccaaaggaggaaaccaccgtagcaccgacaacagaatcagtccaaacgacagctacagaagaagccgagcctgaggagcctatagaagttgcagttgagaccgaggaggtggtgacaaaggagacagatgaagagatgccggctgcagtagagacatcataggagataactgaagaagtgaaagaagactcagaggagcctatagaaactactgttacaaaaacagaatcagcgccagcagtatgcacagaggaagagaacacaccagctgagacag

SEQ ID NO: 227371 - DNA, 467 bp, Glycine max
aaagtaaatatcagttattcaaacctaaagaaacacgctaacacatcatgacaaactcatgtaaccctgccaataaaataaacccttatacctaaactccagcaccagcagcagcttgctcacttcagtacacaactcctagaatttctcatgtgaccacgtggaaagcacgctgatgtggagccaagtgttgcgctcacacgtaggtataccctccataatacaaccaaagacttgaccatcatatggtaataatatattcattataaagttaactgaagaaataaattaataaaaaagcttttgaacatcacatgcaaaggggtagacctaatgatccccacaactaggaccatttttaaacttgtttttttcactcacactgtccataagcttaagcttcagttttgtgaacaggaacctctgctggggcttccactgactcagctggttagctctcttcctct

SEQ ID NO: 227372 - DNA, 607 bp, Glycine max
  unsure (1)..(607): unsure at all n locations
caccgcacgaatatcttgttgtttggagcgatccgagaaaaactctgtaaacatgttggtttaccaggacctccttacaggtgatgagcttctctctgactccttccgttacaaggaaattgagaatggaatgctgtgggaagttgaggggaagtgggttgttaaaggagcagttgatgtagacattggtgcaaacccttctgctgagggtggaggagaagatgagggagttgatgatgcagctgttaaggttgttgacattgttgacacattcagacttcaggagcaacccgcattcgataagaagcagtttgttaccttcatgaagaggtttatcaagaatttgactcccaagctcgatgcagagcaacaggagttgtttaagaagcacatcgagggagcaactaaatacctgctctctaagattaaagatttccaattttttgttggtgagagcatgggtgatgatgcttgcttggtctttgcctactacaaggacngcgctgctgatccaacattcctgtactttgcatatgccttaaaggaggtcaagtgctaagtgacttaatgtaccgagctatctactcattttatctagtttttttac

SEQ ID NO: 227373 - DNA, 467 bp, Glycine max
gaattaaaaattctgatcgcatattaaattcccaagtcgtattcaaatccttatcaataaaaccatgaagccaaattaaaatatttctagtacacacccaaaaattcttcaaaagaaacttccgggaatctagcacgaccaaaatcataaattaatgaaattctaacccatcgataattaaatttgatgggaattatgatgtagcagtagcacacgtctcaccattaaaatcaaaataccaggtcaaagtttcaagtaacttaggacagaacgtaaaaaaaaactagataaaatgagtagatagctcggtacattaagtcacttagcacttgaccttctttaaggcatatgcaaagtacaggaatgttggatcagcagcgccgtccttgtagtaggcaaagaccaagcaagcatcatcacccatgctctcaccaacaaaaaattggaaatctttaatcttagagagc

SEQ ID NO: 227374 - DNA, 523 bp, Glycine max
ctttttgctctctccatcgtcgtttttgtctcctccagactcagttcgtggatgggatggaaccctcaccactcctcttcggtttcctccacttcaaggggtggctatactgtgcttataaacacttggaggcataaatctcttctgaaacaaactgttgctcattatgcatcctgtcgaagtgctgaagcaatacatgtggtgtggagtgaaagtgaacaaccatccgagaggcttaaaacatatctgaataagattgtggttttgaagtctcagaaagctcataaaccaaactttagatttgacatcaatgcagatggtgagccaaacagcaggtttaagccaataaagaacctcaagacagatgcaattttctcagttgatgatgatgtggttgttccatgctctactctagattttgctttctctgtctggcaaagtgcaccatttacgatggtgggatttgttcctcgaattcactggctggataaggagcaaaacaatgctgcatattacaggtatg

SEQ ID NO: 227375 - DNA, 538 bp, Glycine max
  unsure (1)..(538): unsure at all n locations
attctatacattgactcttgtcatgcttgtgtttatcctgtttgtaacatacagacattggtccaacaggacaagacttcaacaagagagatacatatcagtctccgaggatgaaaatacatctgtagaatccaaaaaaatctgatctacctggatatgctgttgtaattacctctaaaggttctattatagtagaactttacaaggaaagtgctcctgaagttgttgatgaattcatagatttatgtcaaaaagggcacttcaagggaatgctttttcaccaagtaattaagcactatgtgattcaggggcctggagctactgaagattggaacctgttaggaaaaaaaatatgcaagtatgagacatgaagcattcatgcttggaacatcaaagggaaaatactntaacaaagtatttgatcttttcatcacaactgcaccaataccagatctaaatgaaaagcttattgtgtttggccgagtcatcaagggacaggatattgttcanganattgagaagtggatacagatgagca

SEQ ID NO: 227376 - DNA, 475 bp, Glycine max
ggagaataaagaaatgggcgcaacgaagagtggacgagttaaacttggaacacaaggccttgaggtttcaaaattgggattcggatgtctgggtcttactggagcgtataatgagcctctcccggaacaggatggcatatctattatcaagtgtgcattcagtaaaggaatcacattttttgataccgctgatgttcatggagccggtgctaatgaaattttgcttggaaaggctctgaagcagctacctagagaaaagatccagctagccacaaaatttggtattgcgagattagatttttctaacatgctgatcaagggttcgcctgaatatgtgcgctcatgctgcgaaactagcttgaaacgtcttgatgttgaatacattgatctctattatcagcatagggtggacacatctgtacctatagaggacacagtgggtgaactaaaaaactggtggaggagggcaaagtga

SEQ ID NO: 227377 - DNA, 432 bp, Glycine max
  unsure (1)..(432): unsure at all n locations
agatggtgtcagtcacacggtgcctatctatgaaggttatgccctcccacatgcaatcctgcgtttagaccttgcagggcgtgatctcactgatgccctgatgaaaatcttgactgagcgtggttactctttcaccacatctgcggagcgggaaattgtgagggacatgaaggagaaactggcctacattgctcttgattatgagcaggagttggaaactgccaagaccagctcagcagttgagaagagctatgagctacctgatgggcaggtgattacgatcggtgctgaacgattccggtgccctgaagttctcttccagccatccatgattgggatggaatctnctggtatccatgagacaacatataactgtatcatgaagtgtgatgtcgacatcaggaaggatctctatggtaacatagtcttgag

SEQ ID NO: 227378 - DNA, 281 bp, Glycine max
caggaaaagaatttgttgattcaaccaaaccaaatcggttacaattcacatcttttctacaccaaaacgggataaaaaaaaatgaatcttacatatcttgctagccttcatgctcttatctcaacatatcaaagaatggatatctcaaaaacatgatagataaaaggtttggtacagggtaggaaattgaaagttcctcaaccacttgatggattcttgtagagtgtccttaaataagaattttcctgggccatctttcatactccattgttgttacttag

SEQ ID NO: 227379 - DNA, 484 bp, Glycine max
  unsure (1)..(484): unsure at all n locations
cgttcttcttcgtcgttatcttcttcttttgttgtttgtgtgtttgttttttctctcacctgaaaatgtcttgctgcggtggtaactgtggttgcggaagcgcctgcaagtgcggcaacggctgcggaggctgcaagatgtacccagacttgagctacaccgagtcaaccaccaccgagaccttggtcatgggagtggcaccagttaaggctcaattcgagagtgctgaaatgggtgttcccgctgagaacgatggctgcaaatgtggagctaactgcacctgcaacccctgcacttgcaagtgaggtgttggagagctaaagcttcaagcagaaatggcccttagaaataatgataaaaactatatgtagtttcaaaacttcaaaattatgtagtatgtattatgttgcactctggtgttntgtgtctaaacaaacacccttagaataaagtggtcatttcttgcccttgagcaagttcaagt

SEQ ID NO: 227380 - DNA, 462 bp, Glycine max
ccagcaatagtactagtttaatattataagcagagattcataattcagattaactagccgaactttatacagaagcgaccaattaccaaacatttatatatatatatatatataaaaaaaaaggcaaccatgaccttaacacacccatcacaagtccaaaacacttgaacttgctcaagggcaagaaatgaccactttattctaagggtgtttgtttagacacaaaacaccagagtgcaacataatacatactacataattttgaagttttgaaactacatatagtttttatcattatttctaagggccatttctgcttgaagctttagctctccaacacctcacttgcaagtgcaggggttgcaggtgcagttagctccacatttgcagccatcgttctcagcgggaacacccatttcagcactctcgaattgagccttaactggtgccactcccatgacc

SEQ ID NO: 227381 - DNA, 507 bp, Glycine max
  unsure (1)..(507): unsure at all n locations
cttaaatcaaaatacttaatagcatggcgatacatttatacaaaacttctaccccaagcacacgcaatggagccgtagacagtcaagtaaaatccaatccacgaaatcatttgatctatggacagcatcgttgtggtaaaggccgtaatgccagaggaatcattaccgcagggcatagagggggaggtcataagcgtctataccgtaaaattgattttcgacggaatgaaaaaaacatatatggtagaatcgtaaccatagaatatgaccctaatcgaaatgcatacatttgtctcatacactatggggatggtgagaaaaaatatattntacaccccagaggggctataattggagataccattggttctggtacagaagttcctattaaaatgggaaatgccctacctttgagtgcggtttgaactattgatttacgtaattggaagtaaccaactaggtttacggcgaaacctagaaatcgatcactgatccaaatggagtacc

SEQ ID NO: 227382 - DNA, 502 bp, Glycine max
cttttgaagaaaacggagggaaacctgaaaccaacccttttggagcaagagctgtgaggctctaccttcgtgaggttcgtgaacttcagtccaaagctagaggaatcagttatgagaagaagaaacgaaagcgtccaccaccaccaccaccaccacaacaacaactacaacaatcattgcctctacctcttcaccaccactcactcactctggtcactgtcttaggaaccctagaacaagaaccctgagacaaaaacaactttggatctgtaaagccaaagggtttcaagtactttctttgctagcttgtctccatggattcaattcaagaatttatggagtcgtgtaacactgacatcaccaccaccacgcgaacaaccaccagcaacagcttagttggtagctccaattccccttctgcttgctccaccaccagcagccgctacgagaaccaaaagcgccgtgactggaacacctttggccagtacctcaagaatcaccg

SEQ ID NO: 227383 - DNA, 438 bp, Glycine max
ctgacctcacaaggattgagtgttggatctagtcatctagataaaaaaaataaaaatgaagatcattgagaaaattcgcgcagcttctgctgatccaaacagggtggtgttctcatttgagttcttcccccccaagactgaggatggtgtggacaatctgtttgagaggatggaccgcatggtggctcacaacccctctttttgcgacatcacttggggcgctggagggacaacggctgatcttacattggaaattgccaacaagatgcagaacattggctgtgtggagaccatgatgcaccttacctgcaccaacctggctgtgcaaaagaatggacattcctttcacaacatataaatccattggcctccaaatggggctggcccttgggggggatccgcctcatggtcaggacaaattcgtccaggtcgaaggcg

SEQ ID NO: 227384 - DNA, 536 bp, Glycine max
ggaaagcataatcaaatcaaccatggctaccctcattgctcccatcaccttttcgcctggtttagatgcagaagctcttagaaaagctttccaaggatgggggactgatgagaagaccgttatagcaatattgggtcacagaaatgttcatcagaggcaacaaatcagaaagatttatgaggaaatttaccaagaggacctcatcaaacgcctagagtctgagctctctggtgactttgagagagctgtgtaccgttggatgctggaacctgcagatcgtgatgctgttttggccaatgttgccatcaagaatggcagcaaaggttaccacgtgattgtggaaattgcttgtgtgctttcagctgaagaggtcttggcagtgaagcgtgcctatcacaaccgttacaagagatctttggaagaagatgtagctactaataccactggtgacattcgccagctgttggttgggttggtgaccgcatataggtatggtggagatgagatcaatgcaaaattggcccaaactgaagctg

SEQ ID NO: 227385 - DNA, 493 bp, Glycine max
acttgaatgtgattggatcagacccagagggcagattgggtgaggctccaagacctgaacttcgtgaacatggccgaatttctggtgcctgctttgatgcagctcgtggtattacaactggcttaaaggttagaggaactgactacaagacaccggatggaacatgcatacgagactacattgatgctcacgtgaaggctcttgagaaggcacaacctgctaaagtagggatctacaatgttggaactggaaagggtagatcagtgaaggagtttgtgaatgcttgcaaaaaggccacaggggtggacatcaaagtagactaccttccacgttgacccggcgattatgccgaggtgtatagtgacccttctaagatcaacagggaactgaattggaccgcacaatacactgaccttgagaagagtttgcaggttgcatggaaatggcaaaaagctcatcgtaacggttaccgtatttcatctgcaatctgagt

SEQ ID NO: 227386 - DNA, 511 bp, Glycine max
ttcttacatggtttcattgagaatgtattagtttaaagttccttaaactaatgaaagctgtgggcagtgcataagtgaatggaactttaaactaatacattcttacatggtttcattgagaaattcaacggccacaatatttaggagtgacgaagacaacgatgattcacaaacccctttcatagtttcattttcatctagaggtccaaatccacttacaccaaacactctcaagcctgatctcgcagccccgggagttaatattctagctgcatggtctccagtctatacaatttcagaatttaaaggtgacaaaagagcagttcaatacaacatagaatctggcacttcaatggcttgtcctcatgtatcagctgcagctgcatatgtcaaatcatttcatcccaattggtctcctgctatgatcaagtctgcactaatgaccactgccacaccaatgagtcctactcttaatcctgatgctgaattcgcatatggcgcgggtctaatt

SEQ ID NO: 227387 - DNA, 527 bp, Glycine max
  unsure (1)..(527): unsure at all n locations
gtgtgatacaaagaatgggcctgcaaccacacaattcttggaaacatcgtcagccgataccaaggacaatgtttacagctttggaatagtattgtttgagttgattacagggagaattccccttgctgggaacaatgaacttctggcagattgggcagcagaatatgtaaggtgggggaaatccttaagagatgttgtggatccaaggctgaagtctttgcaggaagaagagattgaggaatggtctgaagtgataagaaactgtgtacaaccagatccggagaaaaggccaactatgaaagaagttacatctagactcaaggaaatcacagctatggggcctgatggagcaaatccaaaagcatcaccactttggtgggcagaaatggcaattacatccactgattcaagttgagacattaatattataacacanattagagttggatgataatttgtacagttactctaaattggnattcatgcactttngaaatatgtatgtttatactaatgttttctaaact

SEQ ID NO: 227388 - DNA, 519 bp, Glycine max
aaaatgcccactttttttcttccaacgctcctcctccttctcatagccttcgccacctctgtctccggccgccgtgacctcgtcggagactttctccggctgccctccgaaactgataacgacgacaacttcaagggcacccggtgggccgtcctcctcgccggttccaatggttactggaattacagacatcaggctgatgtttgtcacgcctatcaaatattgaggaaaggtggtctgaaagaagaaaatattattgtttttatgtatgatgacattgcattcaatggggaaaacccaaggcctggagtcatcattaacaaaccagatggaggtgatgtttataaaggagttccaaaggattacaccggcgaagatgttactgttgataacttttttgctgctttacttggaaataagtcagcactgactggtggcagtgggaaggttgtggacagtggtcctgatgatcatatatttgtatactatactgaccatggaggtcctggggtgctcggg

SEQ ID NO: 227389 - DNA, 492 bp, Glycine max; identical to SEQ ID NO: 211306

SEQ ID NO: 227390 - DNA, 458 bp, Glycine max
  unsure (1)..(458): unsure at all n locations
actacagttccacagcattagccattagcactataaataaatagagaacacgcgaaacacctgattcccctccccagacgccgcagagtcagagagagagattcactgaaacagagcgcagaagaaaatacataaactaatccagaaaatgagcagcggcgctggaaaggtggtgtgtgtcaccggcgcttccggttacattgcttcctggatagtcaaattcctcctcaatcgcggctacaccgttaaggccaccgttcgcgacacaagtgatccgaaaaaaataaaccacttggttggcctcgacggtgctaaggagaggctgcacctctacaaggcgaatcttcttgaagaaggttcctttaactctgtcgttcaaggttgccatgctgtgtttcacactgcttctcccttttatcacaatgtcaaggacccncaggctgaattgttagacccag

SEQ ID NO: 227391 - DNA, 409 bp, Glycine max
gggaaggcaaactttacttggaaacccatgtttgaaacttaattggccccggtccaaatcaaaccaagaaggggttttttcagtacttataccaatcttgatttaaggcttatttaatagtaagtttgttcaaaagcatgagcattacaagccaagtgaccaaccccacaagggttttattattaacgttttctccttttggggatttcacaaattaaaagtggggaaactttttttttttcaagctatccacaggtttcttgggggttactttcaaaggggtattttcaatccccaagctctttgccttttttttggatacctgatatattggcacatatgggttatcatctgcacacttctttggaagtagtaatgtcgggtcaaattacgtaaaattttcacaatt

SEQ ID NO: 227392 - DNA, 536 bp, Glycine max
caaaacactcataacacaaagtacaaagcaaagctcatccttgagttaaaaaatgggagcagcttcttccatggctctctcatccccatccttggctggcaaggccgtgaagctgggcccatcagccccagaagtgggaagggtgagcatgaggaagaccgtcaccaagcaggtctcctcaggaagcccatggtacggcccagaccgagtcaagtacttgggcccattctctggcgagcccccgtcctacctaaccggtgagttcccaggcgactacggctgggacactgctgggctttccgcagacccagaaaccttcgccaagaaccgtgaactcgaagtgatccactccaggtgggccatgctcggagccttgggctgcgtcttcccggagttgctgtcccgcaacggggtgaagttcggagaagccgtgtggttcaaggccgggtcccagatcttcagcgagggtgggctcgactacttgggcaacccaagcctgatccacgcacagagcatcctcgccatctgggccacac

SEQ ID NO: 227393 - DNA, 484 bp, Glycine max
cttgaagaaggttggttacaacccagacaagattccatttgtgcccatctctggtttcgagggtgacaacatgattgagaggtccaccaaccttgactggtacaagggaccaactctccttgaggctcttgaccaaatcaatgagcccaagaggccctcagacaagccactcaggcttccattgcaggatgtctacaaaattggtggtattggtaccgtgccagtgggacgtgttgagactggtgtcgtgaagcccggtatggtggtgacttttggtcccactgggctgacaactgaggttaagtctgttgagatgcaccatgaggctctcacagaggctcttccaagtgacaatgttggctttaatgtgaagaatgttgcagtcaaggatctcaagcgtggttttgttgcatccaactccaaggatgaccctgccaaggaagctgccaacttcacatctcaagtcattatcatgaaccaccct

SEQ ID NO: 227394 - DNA, 491 bp, Glycine max
caacaacaaaattaaagaataatagcctttaaaccataaacagtttataaaacttcgttataaattaaatgcaacttaaaacatccctcagcagcaaaggaaatggactaaaaccctatagctgcttgtgaaattcgaaatatctcagactcttcttaccatcaaaacaaaaaacagtactcatcaaaaacaaacagcaatgaaaattgaccaccgccgatcaagaacctagttttgaaagttacggctacatgaaatcggcagaaacttaaaaatataacttaaacaaaacacctaagactctgcaaggataaaactactataaaggagtaaccacgatgatgatcacatgtgctagcaaaattgcccaaatgcaatcacttcttcttggcagcggccttggtgaccttggctccggtggggtctttcttctcaacactcttgatgactccgacagccacagtttgacgcatgtcccttacagcaaaacg

SEQ ID NO: 227395 - DNA, 547 bp, Glycine max
ctcgagccgaatcggctcgagctttcttcaccgttcgctctttctttctcccctacacaaaacatggctttgcccaatcagcaaaccgtcgattaccccagcttcaagcttgtcatcgtcggcgacggtggcacaggaaagacaaccttcgtgaagaggcatctcactggtgaattcgagaagaaatatgaaccgaccattggtgtggaggttcatccgttggattttttcacgaactgtggaaagattcgcttctattgttgggatactgctgggcaagagaagtttggtggcctcagagatggatattatatccatgggcaatgtgcgattatcatgtttgatgttactgcccgtctaacatacaaaaatgtccctacctggcaccgtgatctttgccgggtctgtgaaaacatcccaattgttctttgcggtaacaaggttgatgtcaagaataggcaagtgaaggcaaagcaggttactctccacaggaagaagaattgcagtactatgagatatctgctaagagcaactaccaatttgaaaa

SEQ ID NO: 227396 - DNA, 248 bp, Glycine max
gttggggaaaatttaaaacctcaaatccccgtaaaaaaatgttaattatacaaccccaaagacccattggggcatacccaaattcccttaactaagtaaaagggtccccagacccccaattcctactcaaattggtcatcatccgcgccaggaaggggcttactaacaattggaaaaaactcaacccttggctgggggtgggccgcttaaaaaaattgaacctttgggggggcccatgggggggaatt

SEQ ID NO: 227397 - DNA, 517 bp, Glycine max
  unsure (1)..(517): unsure at all n locations
gcaatggactcataagagtagtaactaagaaaaaaaaaggtttctgatttatttagttcggcacttccgatcatttctccgcggcggcgcaaccgattcccccgccgcatatggccaaaggtcgaaaattaacgaccagccggagcgaacgttttttgggaacctacgcctatagccaaggctccgccgccttgaacccatcggagctccgggaagaagatgtctggggcgccggagatgacgccggcgatcgcgagtgggagccacacgccgccgccttaaacaacagtggcgtcagccggcgccggattccacgtgacacggaggagcactcgcgcgtgggtggactgtcactggcgtttgaagctccggctagtggctcgtcgccgaggatggtgcaccagtttcgggcgcgtgaggagatgacgtcgacgccgcgagggcgccacatggcgacgtcggcgccggtgaacgtgccggactggagcaagatanctcgagtcgactcggtcgagtc

SEQ ID NO: 227398 - DNA, 491 bp, Glycine max
gaaaataaagtggccttggccagaaaagatcttaatcataattcacaaattacaatttcaattacatgctaatcaattattacggctcaggctcactggccactgagttggactctcttcagtcgagtccacccagccgaatcatcgcccagaaaaaccaaaacaattgtcttcaactaaccatcacttaccacctgctcaataataattattataataaacacaaaacttaaaatacagttttataagcatttttagtaccgttcatcgattaaaattggatttctattttgataatttatcataataaaaactttttattatgtaaattatcaaaataaaactccaattataattgcaaaacagaactaaaattacatacaaaactgggtgtttgtcttgtcttttatagaaccagcagaaatataaacactattgtggttattgtgtctgcacttctattactttaaaaaattaatatactgtaatag

SEQ ID NO: 227399 - DNA, 515 bp, Glycine max
  unsure (1)..(515): unsure at all n locations
gtagcctgcctgttcaagaaccaaaaaagatgacacaaataattgtagatgctttggagatcactggacagaggggcatcatcaataaaggatggggaggtcttgggaatttggcagaaccaaaggactctatatacttattggataattgccctcatgattggcttttcttgcgttgcaaggctgtggttcatcacggaggtgctggcacaacagctgcggngctcaaagctgcttgcccaacaaccatagttccttttttcggcgatcaaccattttggggtgagagagtacatgctagaggagttggtcctccacctatcccagttgatgagttttcacttcccaagttggttgatgcaataaaacttatgctggatcccaaggtaaaggaacgtgcaatcgaacttgcaaaggccatggaaaatgatgatggagtgacaggagctgtgaaagcattttttaagcagcttcctcanaaaaaatcagagtctgatgcagatccgcaaccactg

SEQ ID NO: 227400 - DNA, 445 bp, Glycine max
ttcttttttttttttttttttttttttttaaaagcaacagtaaatttacatacaaactgaatctcaagttaaatagtacaaatacaagcatgcatgaaattatacaatcacatgacagggtgacaagtcccgcacatcctatagatgcagtaactatttgtgatttacactattaattaccaaaaaggggggtttaataaactgcatttgaatcaggaacaaccaaaacatcttcttacagagaaaaaaccagttggttgcggatctgcatcaaactctgattttttttgaggaagctgcttaaaaaatgctttcacaggtcctgtcactccatcctcattttccatggcctttgcaagttcgattgaacgttcctttaccttgggatccagcataagttttattgcatcaaccaacttgggaagtgaaaactcatcaactggga

SEQ ID NO: 227401 - DNA, 518 bp, Glycine max
  unsure (1)..(518): unsure at all n locations
cgtcaaggtcctggccgttcattcctgtcaacgaagctcagacccgcgccagccgtggtggtggtggaggcggtggtttcggaagtggtggtggatacaaccgcggtagcggtggatatggtggtggtggtggcggcggcggatacggtggtcgtcgtgaaggtggatacaaccgtaatggtgggggtggaggtggaggatacggtggtggtagagaccgtggttacggtggtgatggtggttctcgctactctcgcggtggggaaggcggtggatccgatggaaactggagaaaataagcatatgaccctgtaaattagggtttatgattaagttcaattattttaaggtgttgtctgtgtgtggtttaagattcagtatctgtgttggctttgattcgcgttactgtggttgtcgatgttgacctacaattctagatgtgtttatagtctatcgaatgagatgattgtttgacattatcgcnttgtgaatcccaaggaatgaangattgggcggtc

SEQ ID NO: 227402 - DNA, 230 bp, Glycine max
tatctttgcaactaaaatggcgtcgtcacaaccagagatggagcatccaaagaaggtttttggttgggctgctcgggactcatctgggcttctctccccattcaacttctccagaagagaaacgggggagaaagatttggtattcaaagtgcaatactgtggaatatgccactcagatctacatatgttaaagaacgagtggggcaacacaacctatcctctggttcctg

SEQ ID NO: 227403 - DNA, 472 bp, Glycine max
cttgccaacaatcaaaataattaaaaacatttaacatgttcataatctcacacaatttcactctttaaaatgtatatatagtacaaaacaattttcgtcccaaagggattataaccaagcttaagcaattgcacaccccacacttaattgcttatttatcaaggaatagcgtagctaaatccttgaaacaaaaactcattacggaaaacacatataatgcttaaagaaattattatcaattctcaatctttatctcttgccccatgtacgttcagtatctgaagtctgaatcaccgcatgcatatttcttttatttactcaaaagcttggcttcaccgggtttccaaggccaattacaaatcgatatttcacatctgctttggcgaggcgctctattgcagtgttcacataatctatgggaataacctcaatatcaggcttcactccatgcttagcagcaaaatcaatcatt

SEQ ID NO: 227404 - DNA, 456 bp, Glycine max
cactgaaagaaagttgctaactcttggcaccagttatcagcttaacatagttgataacaccaaaggcacaacaacattgagggaatgaggcttgtcatatcagctgtatgtgttattgtgctattttcttatgctgctgcgtatgatcctttggatccaaatggaaacataacgatcaaatgggatgttgtgtcatggacaccagatggctatgtagccgtggtaacaatgagcaattttcaaatgtttcggcacatcatgaatactggatggaccttgggatggacatgggcacagaaggaggttatatggtccatggtaggagctcaaaccactgaacaaggagactgttctaagttcaaaggcaatgtacctcactgctgcaagaaaactcccacagttgtagactggctccctggtgtgccttacaaccagcaattctaaaactgtgcaagg

SEQ ID NO: 227405 - DNA, 401 bp, Glycine max
aggtcataaaaaatatcttgttacttttattgatgatgcatgaaggtattgttatgtatatttattaaatacaaaagatgaagctcttgataaatttaaaatttataagagagaggtagaactttatcaaaatgggctaatcaaaactcttctgacgaataggggaggtgagtattatgatccggtttattttcaatctactggaataatacatcaaattacagctccctatacaccacaacacacacatataacttcagatttatccagtctcatctcgattttcaaattaaccaacactattcagcatctgataagcacttgtgaatcacaacacacacattcatgagtccggcttggattttttcaagccattccgttagattcttcatacctgatgt

SEQ ID NO: 227406 - DNA, 520 bp, Glycine max
ggaaaacaaagtatagagtgaatgaatgggtgagaaaagcaagattttgatcataggaggcaccggctacatcggcaaacatatagtggaagcaagcgcaaaggctggaaatcccacttttgctttggtgagggaattcacactctctgacccctacaaggcacaactcatccacaattttgaggctttgggcgttaatttggtccgcggggatctgtacgatcatgagaagttggtgaaagctatcaagcaagtagatgtcgtcatatccacgctgggtcacctgcagcttgccgatcatctcaagatcatcgctgccattaaggaagccggtaatgttaagaggtttttcccttcggaattcggtaacgacgtggatcgtgttcatgccgtggaaccagcaaaatctgcattagctatcaaagcccaaattcgacgcagcattgaagccgaaggcatcccctatacgtacgtttccagcatctactatccttggctattttctttccacattagcaca

SEQ ID NO: 227407 - DNA, 503 bp, Glycine max
ggaaaacaaagtatagagtgaatgaatgggtgagaaaagcaagattttgatcataggaggcaccggctacatcggcaaacatatagtggaagcaagcgcaaaggctggaaatcccacttttgctttggtgagggaatccacactctctgacccctccaaggcacaactcatccacaattttgaggctttgggcgttaatttggtccgcggggatctgtacgatcatgagaagttggtgaaagctatcaagcaagtagatgtcgtcatatccacgctgggtcacctgcagcttgccgatcagctcaagatcatcgctgccattaaggaagccggtaatgttaagaggtttttcccttcggaattcggtaacgacgtggatcgtgtccatgccgtggaaccagcaaaatctgcattagctatcaaagcccaaattcgacgcagcattgaagccgaaggcatcccctatacgtacgtgtccagcaactacttcgctggctattttc

SEQ ID NO: 227408 - DNA, 393 bp, Glycine max
cgtaagtcatttattatttttcaaccattcagggaggaacattctacacatgaaaggcaagattacatcacatagcgatcttttgacataaaacacaatcttccactctccaaatcaacaactcagattatttaaatatccgatcacaagagcatctttctccttttaaattctcaagcgaactgaccaaggtattcttccacggtggtgtagttgacatccgggtacaactcagaagcctcaaccccgaaagatggctcaatctcaaagttggtgtggtcacccttcacgaacactgagtggttgattgctaataccacattgattggaagaggtgcctcttcgatgtccttgagaaccttctcctctggtacataaatttttttgagggtc

SEQ ID NO: 227409 - DNA, 513 bp, Glycine max
  unsure (1)..(513): unsure at all n locations
ctgggacaaaatctcccagggtggactcaagcgtattcatgagaagtacacatggcaaggatcaatctggttaccacattgatccttaccatggtgaccatgctgctgagatccttgttgagttctttgagaagagcaaggctgatccatctcactgggacaaaatctcccagggtggactcaagcgtattcatgagaagtacacatggcaaatttactcggacaggctcttgacactcactggtgtgtatggcttctggaagcacgtgaccaatcttgaacgccgtgagagcaaacgttacctcgagatgttctatgctctcaagtaccgcaaattggctgagtctgtgccccttgctattgaagagtaaattcatgtttgaagagaacatcaatggagaaaccggcttttggtcgtttgaagtcttatggagctttcataaataacgccattgattttgatngtgatcagcttttggatctaaagagtctaaaacaaagtgtcgtttggtt

SEQ ID NO: 227410 - DNA, 503 bp, Glycine max
gaatggaagaaggcatatctttaaattgaattgatggggtggaaaacccgaatttaaagatttccaatcatacacaatattgcaacaacaaaaagaattttaaaaaaaaaagactttctttttttactttttttacccaaaacctaagcaaaatataaaaacaaacgacacttttttttagactctttaaatccaaaagctgatcacaatcaaaatcaatggcgttatttatgaaagctccataagacttcaaacgaccaaaagccggtttctccattgatgttctcttcaaacatgaatttactcttcaatagcaaggggcacagactcagccaatttgcggtacttgagagcatagaacatctcgaggtaacgtttgctctcacggcgttcaagattggtcacgtgcttccagaagccatacacaccagtgagtgtcaagagcctgtccgagtgaatttgccatgtgtacttctcatgaatacgcttgagtccaccctggg

SEQ ID NO: 227411 - DNA, 567 bp, Glycine max
  unsure (1)..(567): unsure at all n locations
ctgggacaaaatctcccagggtggactcaagcgtattcatgagaagtacacatggcaaggatcaatctggttaccacattgatccttaccatggtgaccatgctgctgagatccttgttgagttctttgagaagagcaaggctgatccatctcactgggacaaaatctcccagggtggactcaagcgtattcatgagaagtacacatggcaaatttactcggacaggctcttgacactcactggtgtgtatggcttctggaagcacgtgaccaatcttgaacgccgtgagagcaaacgttacctcgagatgttctatgctctcaagtaccgcaaattggctgagtctgtgccccttgctattgaagagtaaattcatgtttgaagagaacatcaatggagaaaccggcttttggtcgtttgaagtcttatggagctttcataaataacgccattgattntgattgtgatcagcttttggatttaaagagtctanaaaaaagtgtcgtttggttttatattttgcttangtttgggtaaaaaagtaaaaaagaaagtcttttttttaa

SEQ ID NO: 227412 - DNA, 509 bp, Glycine max
gaatggaagaaggcatatctttaaattgaattgatggggtggaaaacccgaatttaaagatttccaatcatacacaatattgcaacaacaaaaagaattttaaaaaaaaaagactttctttttttactttttttacccaaaacctaagcaaaatataaaaacaaacgacacttttttttagactctttaaatccaaaagctgatcacaatcaaaatcaatggcgttatttatgaaagctccataagacttcaaacgaccaaaagccggtttctccattgatgttctcttcaaacatgaatttactcttcaatagcaaggggcacagactcagccaatttgcggtacttgagagcatagaacatctcgaggtaacgtttgctctcacggcgttcaagattggtcacgtgctttcagaagccatacacaccagtgagtgtcaagagcctgtccgagtaaatttgcatgtgtacttctcatgaatacgctggagtccaccctgggagatttt

SEQ ID NO: 227413 - DNA, 502 bp, Glycine max
ctcgagccgatcacaaatctttcgctaacactcattaattgcaagaatggcacttcgttgcttggtgatgtccctttctgttctcttcactcttggtcttgcgagagaaagccatgccagagacgaagatttttggcatgctgtttggccaaacactcccattccaagttcattgcgagatcttctaaagcctggccctgcaagtgttgaaatcgatgatcaccctatgcaaattgaagaaacacagtacccgaaaaccttcttctataaagaagaccttcatccaggcaaaacaatgaaagtacaattcagcaagcctccctttcaacaaccatggggtgttggtacatggttaaaggaaattaaagacactactaaagaaggatatagttttgaagagctatgcatcaagaaagaagccattgagggagaagagaagttctgtgcataatccttgggaacagtaatttggtttgccatttcaagctgggaaagacattca

SEQ ID NO: 227414 - DNA, 489 bp, Glycine max
agataaccactttttaccatatatatatagagagagagaatacgaagcacactgatcacaggatgatgctctctttaagtagggaagcagatcttatcagtacacataggtaggttgaaattctagctctagcaatctagctagagaaggtagtacttgcacaacacacagcacatgataatttattttatacacaatctcattctcatggtgctcaagatgcatggactaattaagcaacaatgttggtctgataggcagtgtccacagataaattgggtacccataaaatggccttgcttccaaggaaatggcaaacagggttagttccaggatcaactcccataagttgatgaagcatttgatgattcattccagaagtatttgagtggcaaatagcaagtgcctgagtgttggttccatcaccagccaccaatggaaccatgaaagctgttgtttcacggacttcatggcagtaaaatactgcag

SEQ ID NO: 227415 - DNA, 533 bp, Glycine max
  unsure (1)..(533): unsure at all n locations
ctcgagccgatcacaaatctttcgctaacactcattaattgcaagaatggcacttcgttgcttggtgatgtccctttctgttctcttcactcttggtcttgcgagagaaagccatgccagagacgaagatttttggcatgctgtttggccaaacacttccattccaagttcattgcgagatcttctaaagcctggccctgcaagtgttgaaatcgatgatcaccctatgcaaattgaagaaacacagtacccgaaaaccttcttctataaagaagaccttcatccaggcaaaacaatgaaagtacaattcagcaagcctgcctttcaacaaccatggggtgttggtacatggttaaaggaaattaaagacactactaaagaaggatatagttntgaagagctatgcatcaagaaagaagccattgagggagaagagaagttttgtgcaaaatccttgggaacaagtattggttttgccatttcaaagctgggaaagaacattcaagtactttcaagttccttttggtcatagc

SEQ ID NO: 227416 - DNA, 483 bp, Glycine max
agataaccactttttaccatatatatatagagagagagaatacgaagcacactgatcacaggatgatgctctctttaagtagggaagcagatcttatcagtacacataggttggttgaaattctagctctagcaatctagctagagaaggtagtacttgcacaacacacagcacatgatgatttattttatacacaatctcattctcatggtgctcaagatgcatggactaattaagcaacaatgttggtctgattggcagtgtccacagataaattgggtacccataaaatggccttgcttccaaggaaatggcaaacaggggtagttccaggatcaactcccataagttgatgaagcatttgatgattcattccagaagtatttgagtggcaaatagcaagtgcctgagttgtggttccatcaccagccaccaatggtaccatgaaagctgttgttcacggacttcatggcagaaaatact

SEQ ID NO: 227417 - DNA, 498 bp, Glycine max
gatctagttagggttccttacacgatggagcggttgaagtgggcgcaactgggtgagaggctgaagaccggtggggcccagatggggcgaatggtgagcggaaaagtgaaggagatgcttcacgcgccgacgccggagttcaagatggtggacgaggccacgctggagaccatggaagaaccccattggggcatgaatctcaaaatgtgaggcatgatcaacagcgaccagctcaacggctctgaggtcgttacggccatcaagagaaagatcaatcacgagagccccgacgttcagaccctcagccttgacctcctcgaagcctgcgccatgaattgcgacaaggtcttctccgaaatcgctctcgagaaggttctcgatgagatcattcgcctcatctataacccggaggcccatcaccagacccgtagtcggtctgttcaattgattcgggcctggggcgagtacgaggatctcgcttatcttcccgtctttcga

SEQ ID NO: 227418 - DNA, 480 bp, Glycine max
ataattcttctatgtaagataaaacaaagaagaagaaagctcttattagtattcaactacatcaaaatctctaccactttttccgatccaaaattttcatatggttacaccactaaggtgtcttaatttcattcacaaagtatagccttatatgatgtgaattcaaacttcaatgtatatatgagtctctactacagtgacagaaattaaacgctaaagggcaacaatcccagttgaaaacatttgatcccttgctgtgtatggtgaacttgacaactccacagaccttgaagcttctgatctacaccgttctttgcgttcatcgtccatcgatatttgccttgaacggcactcgttgctacaaaatgctttctctcctctgtacatgtatatgtctttgccatcgagattctttcggcacaagtgacacgagctgagaaaatccgaggtgggatatgactgttcatcttcttcaataaa

SEQ ID NO: 227419 - DNA, 554 bp, Glycine max
ctctctctcaccaaagccttcctagaacgaaaaaaaaaagaagagcaattttccctcaccaaagaagaagaagcaaacaatggccgatcaacttaccgatgaacagatctccgagttcaaggaagccttcagcttgttcgacaaggacggcgatggttgcatcacaaccaaggagcttggaactgttatgcgttcattggggcaaaacccaactgaggcagagctccaggacatgatcaatgaagtggatgctgatgggaatggtaccattgacttccctgagttcctaaatctcatggccaggaagatgaaggacactgattctgaggaggagctgaaagaggcattccgggttttcgacaaggaccagaatgggttcatctctgctgctgagctccgccatgtgatgaccaacctcggggagacgctcaccgatgaagaggttgatgagatgattcgcgaggccgatgttgatggcgatggccaaataaactacgaggagttcggtaggtgatgatggccagtgatcatacattatgccacaaaacctaatg

SEQ ID NO: 227420 - DNA, 399 bp, Glycine max
ggggcagaaagggaaaaaacattaacattacaaccctttttttggataaaattaccagacaaactaagaagggtcagttccactacagcctattagcaggacttgccactaattgacattttaagggtggattcaaaaaccatcaaataaaaatgtgggaagaaaaaagggcaaggactactacatcactgttataccacccaaacccttggcctttctcctacccctttttttggcggttccttttaaacaacatttcttcatttaggtttttggggccataatgggatgaatacttggccatttttaccttaacgaactcctcgtagtttatttggccattgccataaacattggccttgcgaattatctcattaacctttttattggtgagctttt

SEQ ID NO: 227421 - DNA, 552 bp, Glycine max
ctcttttagcgttcgaacaaaattagggttttctcaaccctagggtttaccttctcttgccctgttcgaaattaggcaaatcaaaacagaaacacgactacaaaaagaagaaaagaagaaaaagaatcaatcattcattgatcgctgaaacgatacgatgacagggaaggcgaagccgatgaagcacacggcgaaggagatcgcggcgaaggtggacgcggcgaccacgaaccgtggcggcgggaaggcgggtatgaaggaccgaaccgggttggagaagggcgggcacgcgaaatacgagtgccctcactgcaaggtgacggcgccggacgtgaaatcgatgcagatccaccacgacgcgcgtgaccccaagatccccttcgaggaggacaaagttgtcaatcttcacgccaccaccagcgttcccgagtgctgcaagcctcgccccggtgttcgcggaagcctcatgagtgatctcaatcgatcgttggaatcgatatggcccctccttcattcgtagttctcaatctcttgtttatctttctttttctt

SEQ ID NO: 227422 - DNA, 587 bp, Glycine max
  unsure (1)..(587): unsure at all n locations
attccccttatctttctctcttctctctccccgcccaaaccctaactccctaccctattccgctttctctcatccatcatgaaaggaggaaagtccaagaccgaatctaagagagccgatgccaaacttgctgtgaataagaagggcgccgccaccaagactaggaaacccgccggaaaggggaaggcagcgaaagatcctaacaagccaaagaggcctccaagtgctttcttcgttttcatggaggaattcaggaaggtgttcaacaaggaacatcccgacaacaaagcagtgtctgctgtgggcaaagctgctggagcaaaatggaagacgatgtctgatgctgaaaaagcaccttatgtggcaaagtctgagaaaaggaaagtggagtacgagaagaacatgagagcttataacangaaacaggcggaaggtcctactggtggngatgaagaagaatctgagaagtctgtatctgaggtgaatgatgaggatgatgacgaggaaggcagtggcgaggaggaggatgacnattagagaatggactgatgantatagcatttatgtagggtctgatgatttgatca

SEQ ID NO: 227423 - DNA, 433 bp, Glycine max
  unsure (1)..(433): unsure at all n locations
ggggnccagccgtcaagcagctacagaatacctgagctaggactgccnctgcacccctacgttcgcttggaattctgctacagattccccttatatttctctattttctgttcaagccccaaccctatcgcgctaccctaatacgatatttatcattcactgtggatggacgtaagattaatactgatgttataaaagtcgatgtcaaacttgctgtgaataagatgggtgcgtcactagacttaaaaccggatgggtggggagtgccacgacggatcctaacaatggaaatgaggcctgcagggactgggattggtatcatggaagaattccttatggtggtcaccattgaacatccactgaaccaaacagagtatggtgtgaatcgagcttttggaaccgaccatggtacgatgcgtgacgctgaactagc

SEQ ID NO: 227424 - DNA, 523 bp, Glycine max
ctcgagccgattcggctcgagcttctctcgtgtttcacaaactaaagaacaacaatatgcctccaatcttgccggatttctccaactcggtgaaactcaagtacgtgaaactagggtaccaatacctggtgaaccacattctgactctcactctcatacccatgatgatcgccatcttcatggagattctacgcttaggccctgaagagatcctgaacctctggcactccctccacttggaccttgtccaaatcctctgctccgccttcctcatcatcttcatcgccaccgtctacttcatgtccaaaccccgcaccatctacctcgtcgactacgcctgcttcaagccacccgtcacctgccgcgtccccttcgcaaccttcatggaacactccaggctcatccttaaagacaaccctaagagcgtcgagttccaaatgcgtattctcgaacgttccggtctcggtgaagaaacatgtctccccccagcaatccactacatccctcccaagcccaccatgga

SEQ ID NO: 227425 - DNA, 514 bp, Glycine max
cataaaataagcaattatcttcttgttcttgaacaattctccatcctagagcttaacgatctcaggaatatcgaccgggtaacgatcaatgcaatcagcccaaggcccatcaaccggtgtcttaatgcttctgttgcacttccacacagcactgttgcatttaaagccactcccaaacgctatctgccacaccctatcacccttcttcatcctccccttggactcaatgtagttgagctcataccacagcgaagaagacgaagtgttcccaaacctgtgaagggtcattctagaagcctcaacgtgttcagtagaaagctgaagattcttctgaagctcatcaatcacagcacgtccaccagcgtggatgcagaagtgctcaaaggcttgtttgaagtcaggaatataaggcttccatttggggttgaagattttcctcccaatgagagtgagaaggaacagcaactgctcggaagccggaagaacaagaggacccatagtagtaatgttagac

SEQ ID NO: 227426 - DNA, 523 bp, Glycine max; identical to SEQ ID NO: 227424

SEQ ID NO: 227427 - DNA, 490 bp, Glycine max
cataaaataagcaattatcttcttgttcttgaacaattctccatcctagagcttaacgatctcaggaatatcgaccgggtaacgatcaatgcaatcagcccaaggcccatcaaccggtgtcttaatgcttctgttgcacttccacacagcactgttgcatttaaagccactcccaaacgctatctgccacaccctatcacccttcttcatcctccccttggactcaatgtagttgagctcataccacagcgaagaagacgaagtgttcccaaacctgtgaagggtcattctagaagcctcaacgtgttcagtagaaagctgaagattcttctgaagctcatcaatcacagcacgtccaccagcgtggatgcagaagtgctcaaaggcttgtttgaagtcaggaatataaggcttccatttggggttgaagattttcctcccaatgagagtgagaaggaacagcaactgctcggaagccggaagaacaaga

SEQ ID NO: 227428 - DNA, 223 bp, Glycine max
gctggcatctcctatgccatcaacagtggctaccaatcttgcggacccctctgtggtaagctgttctttgcatttcgggtggatcatccttctatcccccttgcctaaagggtttaatggggggccaaaaaaaaacaccaccattgtggtggagtggcccagtctgattgcatccattttctcactcttgtggggtaagattgattcattcaccacaagggtc

SEQ ID NO: 227429 - DNA, 407 bp, Glycine max
ggagcaggaccctgacagcaaggttgcctgtgaaacctgcaccaagaccaacatggtgatggttttcggagagatcacaaccaaggccaacgtggactatgagaagattgtgcgtgacacatgcaggaacattggttttgtctctgatgatgttggtcttgatgctgacaactgcaaggtcctcgtcaacattgagcaacagagtcctgatattgctcaaggtgtgcacggccacctcacaaagaggcctgaggagattggtgctggtgaccaaggtcatatgttcggctatgccactgacgagactcccgagctcatgcccttgagccatgtccttgccacgaagctcggtgccaagctcaccgaggttcggaagaacgggacatgcccttggctgagacctgatg

SEQ ID NO: 227430 - DNA, 437 bp, Glycine max
gagagaacatttttttttgtttcatcatataaaatatatatgttctgaaagaacacatacaagtacacaaaaaaaagggggaaattcataaaaaaatacagaaaaaaaaaaacagaattgagtaagagggaaggaaacatagagaaaattttagcaatcagataataagaagccagtagtagtgcaaaagtcccttgccaagagtgttggaaccccttttagttaagcaggtaccttctcccccttgagtggcttcaccacttcccatgtgaagtcagggtcatctctgccaaagtgtccatatgcagcagtcttcaagaacctggcatttccacccctcttgagatcaaggttgatggagatcatgccaggcctgaaattaaaaactctcttcacaatgctgaggatttccttgtaggggatctttccagtgccat

SEQ ID NO: 227431 - DNA, 583 bp, Glycine max
  unsure (1)..(583): unsure at all n locations
ggagcaggaccctgacagcaaggttgcctgtgaaacctgcaccaagaccaacatggtgatggttttcggagagatcacaaccaaggccaacgtggactatgagaagattgtgcgtgacacatgcaggaacattggttttgtctctgatgatgttggtcttgatgctgacaactgcaaggtcctcgtcaacattgagcaacagagtcctgatattgctcaaggtgtgcacggccacctcacaaagaggcctgaggagattggtgctggtgaccaaggtcatatgttcggctatgccactgacgagactcccgagctcatgcccttgagccatgtccttgccacgaagctcggtgccaagctcaccgaggttcggaagaacgggacatgcccttggctgagacctgatggcaagacccaagtcactgttgagtactacaatgacaagggtgccatggttccaatccgcgtccacactgtgctcatctncacacagcatgatgagactgtcacaaatgatgagatngcagctgatcttaaagacacgtgattaagcctgtgattcctgagaagtaccttgatgaga

SEQ ID NO: 227432 - DNA, 457 bp, Glycine max
gagagaacatttttttttgtttcatcatataaaatatatatgttctgaaagaacacatacaagtacacaaaaaaaagggggaaattcataaaaaaatacagaaaaaaaaaaacagatttgagttagagggaaggaaacatagagaaaattttagcaatcagataataagaagccagttgttgtgcaaaagtcccttgccaagagtgttggaaccccttttagttaagcaggtaccttctcccccttgagtggcttcaccacttcccatgtgaagtcagggtcatctctgccaaagtgtccatatgcagcagtcttcaagaacctgccatttccacccctcttgagatcaaggttgatggagatcatgccaggcctgaagtcaaaactctccttcacaatgctgaggatttccttgtcagggatcttcccagtgccataagtgtcaacaaacacagac

SEQ ID NO: 227433 - DNA, 552 bp, Glycine max
gtttgttgttgtaactcgttcttcttcttttgttgttctgtgtttgtgtttgttttttctctcacctgaaaatgtcttgctgcggtggtaactgtggttgcggaagctcctgcaagtgcggcaacggctgcggaggctgcaagatgtacccagacttgagctacactgagtcaaccaccaccgagaccttggtcatgggagtggcacctgttaaggctcaatttgagggtgctgaaatgggtgtgcccgctgagaacgatggctgcaaatgtggaccaaactgctcctgcaacccctgcacttgcaagtgaggtgttgggagagcaagcttcaagcagagatagcccttaattaggaataatgataaactattaatgtgtagctaaaaacttatgtattatgtctgtgatggttttcgtgcactctggtgttttgtgttaaacaaacatccttagaataaagtggtcatgtcttgcctttcagcaagttcaagtgttttggacttgtgatgggtgtgttaagctcatggctgcttcttttttttttttttta

SEQ ID NO: 227434 - DNA, 499 bp, Glycine max
atttgactttaatagaagatgataccaatgaggggatgaaccgaggatttgcatttttggagttttcttctcgttcagatgctaaggaagcctataagcgactgcagaagagagatgttgcatttggagttgataagcctgcaaaggtttcctttgccgactcttttattgatctgggtgatgaaattatggcacaggttaaaactgtatttattgattcgctgcctccttcatggaatgaagattatgtccgagatcttcttaagaaatatggagagattgaaaaagttgagcttgctaaggacatgccagctgctcggaggaagaattatggatttgttacatttagtacacatgttgctgctgtggaatgtgctgatagcattactagtgcagggttaggtgaaggtgacaaaaaggcaaaagttagggctagattgtcacggcctctttcaaaacctcttcagagaggccgtggaaaatatgttaatcatgggga

SEQ ID NO: 227435 - DNA, 510 bp, Glycine max
  unsure (1)..(510): unsure at all n locations
attgttgaacaagggtttctctgtctgcttcttcactttctctcgtttcaatcgaaaccaaaacaaaaacatgggcagaaaattcttcgtcggtggcaactggaaatgcaatgggaccactgaggaggtaaagaagattgttactactttgaatgaggctaaagtccctggagaagatgtcgtagaagttgttgtgagccctccttttgtgttccttcctgttgtaaaaagtttgctgcgccctgatttccatgtttcggcacaaaactgttgggttcgcaaaggtggtgcttataccggtgaggttagtgctgaaatgcttgttaatttgggaattccttgggttattattggtcactctgaacggaggcagcttttaaatgaatcaaacgagtttgtgggagataaagttgcctatgcacttcaacaaggtctaaaagttattgcatgcattgnggagactctcgaacagcgtgaagctggtacaacaacggctgttgtttctgagca

SEQ ID NO: 227436 - DNA, 508 bp, Glycine max
cactcactcactcactcactcactcactcgcaagcaaaaagaaagaatcccaggcgaggagaaagatggaggggaaggagcaggatgtgtcgttgggagcgaacaagttccccgagagacagccgattgggacggcggcgcatagccaagacgacggcaaggactaccaggagccggcgccggcgccgctggttgacccgacggagtttacgtcatggtcgttttacagagcagggatagcagagtttgtggccacttttctgtttctctacatcaccgtcttaaccgttatgggagtcgccggggctaagtctaagtgtagtaccgttgggattcaaggaatcgcttgggccttcggtggcatgatcttcgccctcgtttactgcaccgctggcatctcagggggacacataaacccggcggtgacatttgggctgtttttggcgaggaagttgtcgttgcccagggcgattttctacatcgtgatgcaatgcttgggtgctatttg

SEQ ID NO: 227437 - DNA, 494 bp, Glycine max
atatgactctggtgttatttttgattttgcaaattaaattacacaatcgcggccgtacatcacacatgagttgggcctcttccaacttaaaagcagaggataacattggcccatgacgcgacacatgcaccacctaataatcataattttacatctttacatacaaaatacaaagactttaaattttaaaaagaagaaaagagataaacagatcatcttaatgaaatgaaaccaaaacccacaaacattggcttgatttttgttgttgttgttgttcccaacttgattaagcatgaaccgtttgattgaatcacttggacttgaagggaatggccctgattacgacctggtggtagagtgctgcaagagctgcaccgatgaatggtcccacccagaagatccagtgttcatcccaaccaaggtccttgttgaagatgatagcagctccaagactacgagcagggttgataccagttcccgtgatggggatggtt

SEQ ID NO: 227438 - DNA, 460 bp, Glycine max
  unsure (1)..(460): unsure at all n locations
ctgaagcaagttttaaagatgctgctatttctacagagaagaaaaatgcatcatcaccttctttgtcccgtctcctattggtttgctctccttgtgcttatatatgtggttgctcaagttcaagtaacgaatcttctgatcaacaagcangtgaagatggcatgttctattgcagtttgtgtgaagttgaggtcttcaagtatagcacgcattgtagagtttgtgacaagtgtgttgatcgctttgatcatcattgcaggtggctgaacaactgtattgggaaaaggaactacagaaaatttttcacccttatggttgcttctctcctcttggtatgtgcatggtttgtgcacctagngcttgggattgcagcttattcttcagtggttgactgggatactngtgcttatctgctgttttgttgagaagaagaaatttctgtggatatctcctccaaaat

SEQ ID NO: 227439 - DNA, 358 bp, Glycine max
cggattattcatgattgattcataagcagcatgtcttcctccggctatagttgttgcagatctcggatgttgtaaaattagtgtatgatgtgaagctatgggctggaaaatgtggatgtaggagatttcgggacgaaaggcctcaaaacgcttcgtcgtttgtggttactgagtcctgagtgatcttgtcatccgacctttgccatgacaggtgcgcttgcttggcaggtcaaaatatgttaataaaaaaagttttattggtttagggagagatcgcacgggagttgccccgggtctttctcttgtgtggggtgtgggggttgctgggctcttcttttccgtatgccttttattatta

SEQ ID NO: 227440 - DNA, 403 bp, Glycine max
ggcgcatcttcgcttggattcacactgtccagtttgtaaagaaaaatttgaattgggcactgaagccagagaaatgccatgcaaccatatttaccattctgactgtattgttccttggttggttcagcataactcatgtcctgtttgccgtgttgagctgccacctcaaggacaggctagttcccggggtactcaaaattggggaggaaggaatgacagcaacaccagcagcagtggcagcaatgatagctccaggggtagagagaacagccgtcagaaccatggaaggagaaatccatcatcttttttgtggccattccgctcatctaactcaaacaataatcatcattctgatactgggggaagcagctcttcaaaccactcctgaccagaataatggaac

SEQ ID NO: 227441 - DNA, 493 bp, Glycine max
cctaaatatttcaaacacaacaatttctctagcttcgttcgccagctcaacacttacggattcagaaaagttgtacctgatcggtgggagttctcgaacgagtatttccgccgaggcgagaagcggcttctgtgcgaaattcagcggcggaagatctcctcgccggcgtcgtctccgacggcgccggcgacggtttcggtcactgcgccgatgccgttgactgcgataccgatcatatcgccgtcgaactccggcgaggagcaggtgacgtcgtcgaactcatcgccggcggagcttctcgacgagaacgagcgactgaggaaagagaacgttcagttaacgaaagagctcgcggagatgagatcgctctgcaacaatatttattctctcatgtcaaattatgcaaacgccaacggaaaaggaaacagcaacggcagttacaaaactaaaggcggcgccggtgtcgcgcacggaagtttagagtccggcatga

SEQ ID NO: 227442 - DNA, 571 bp, Glycine max
gcagaagaaggcaaagatagtggcagagctccaagctgtgaagcacaacagtggcaagtcctacaatcagttagcggaggagactggactcaccaacgtctatgttgctcagcttctcaggagacaggctcagctcaatccccaaactgcccctctacttcgggcagcgctgcccgacctgccccaagaccttgtttctgagatgatgagaccccctttgaggtcttatgaccctaatctcatccaagaccccactgtctataggttgaatgaagctgttatgcattttggggagagcatcaaagaaataatcaatgaggagtttggtgatgggatcatgtcagcaatagatttctactgctcggttgataaaattaatggagtagatgggaaggatcgtgtggtattgacatttgatgggaaatatttgccacattcagaacagaaatctgagcacatggtttcaagaacaaggccactgggaaaacagtgagtatcttcattggaggaccaactacgcaatcttcaacaccagtctacctgcaccatgaatatcattgatctgtacaac

SEQ ID NO: 227443 - DNA, 498 bp, Glycine max
  unsure (1)..(498): unsure at all n locations
acaatacaagcttctccatcttataattaactggcattaaaatacatggggcaagtgtcatgaaatatccaaagccataaaacattgtataaatatgcatggccaactactttttattatttataaatcttaaacacttttatttttctcttccaatgtttttctatagacaacacaaaatagcactgatcaaatacaacttgtggttgttacagatcaatgataattcatgtgcaggtagactggtgttgaaaattgcgtagttggtcctccaatgaagatactcactgttttcccagtggccttgttcttgaaaccatgtgctcagatttctgttctgaatgtggcaaatatttcccatcaaatgtcaataccacacgatccttcccatctactcctttaattttatcaaccgagcagtagaaatctattgctgacatgatcccatcaccaaactnctcattgattatttctttgatgctctccccaaaatgcata

SEQ ID NO: 227444 - DNA, 449 bp, Glycine max
  unsure (1)..(449): unsure at all n locations
catggaagctggaaaaagatttgcagtgaagactttaaaaaagaaacaagagaaagacaataaatgtacctcaattttggtcactcatcaagtcaaagggttgccactacttttcattttcttaatggttgtgtttaaaaagcaacatttttttatgctttacacanaatgtgtcttctctggatgctggcttgaactaactgctagattcagtttggttcggtttctggtccttaaatttagtaggtccttttatggagtaataatataataatatataagagaaagtgtgaaacaaagaaacgattacatattttatttgtaattaaaaaaaaaaaaaaaaaagctaaaaaaaaaaaaaaataaaaaaaaaaaaaaaaaaaaaaaaaaaaaaaagaagaaaaaaatacactatcaaataaaaaaaaaaaaaaaaaaggggggccccc

SEQ ID NO: 227445 - DNA, 474 bp, Glycine max
ttctttttttttttttttttttctctttttttttttttttcttttttttttttttgggttttgttttttttttccttttttttttttttttttttttttttttttcttccaaacccccaaaaaaaagggtgtccggttttgggcccccccccccccccgtctaacccagaacccacccccccccagggggcccccccaatgtgggggccccaacccccccccccccggggccccccgggggggccccccccccccccaagaaaccccccttggggggggaccaaacaaaaggggggttttttccccccccccctaaaaaaaaaaaaagggggggccccccccccccccggggggggcccccccggggggggccccctgggggccccccccggccccctttaaaaaggctgcccggagaatgtttttccagaccccgggggggcccgaaattcaccccttaccgcccccgggggg

SEQ ID NO: 227446 - DNA, 623 bp, Glycine max
  unsure (1)..(623): unsure at all n locations
atctgaagaagctgctcaaagtagtgcctgtacatgcttgtgggtggtgcagtgaaatccatgtaggacctgttggacatccattcaagtcatgtaaaggcacacaggccaacatccgcaagggcctccacgaatggacgaatgcacatgttgaagacatattaattccaattgaagcttatcacctctttgatcgtcttggaaagcggattactcatgaagagagattctctatccctcgaattccagcagtggttgagctctgcattcaagccggtgttgaaattccagagtttcccaccaaaaggagaagaaagcctatcatccgtattgggaggaaggaattcatcgatgctgatgaaagtgacctaccagataaaatctcagagggtcctttaaaaccattactagctgaaatacatgattcagaaatagtagctccattagacaatgaagtagcccctcttgccgaggaaactctccaagcatgggaaccgatgangaaaggtgcatagagactaatgaggatgtacaatgtgaaggtctgtggatatngccctgaaatcatgttgtgcccaggtcacaaagctcaaactgtgagcccataacaccaacacgcaatg

SEQ ID NO: 227447 - DNA, 444 bp, Glycine max
acaccatcaatctgacactaacaattttatatattttttgcctgtatgtataggatagaaaacgacagcgtttgtctagatggcataaatacccccataaagaactatccaaagtgttcattccagtccctaaataaatcagtaaattatcattgcatccagtttgacacaatttacactatattcaaaagttgggatttgtctataagagaaattaatctcaaactaccatgtcagcttctttcaaagttgatgggatccccacgtccagccgcatggtcgatttatattgttctggtaaaccagcaccagcctgaatgcacatttctactactgcaggcgcctggccataaaaattcctaagctctcgttctagcggtgcatttacatcaggaacatgccacacaaatcttggagggatcaaatcattcagaactgcagact

SEQ ID NO: 227448 - DNA, 537 bp, Glycine max
gcaaaacaagtcaaggttgttgaaccaaaaaaagataacgaggaggactctgatgatgattctgatgatgatgattttggatcttctgatgaagagatggaggatgctgatagtgacagtgatgatgagagtggtgatgaagatgatgatgaagagacccctcccaagaaggtggatctgggaaagaagagacccaatgagtctgcatcaaaaactccagtttcttccaagaaagccaaaaatgctactcctgaaaagactgatggtaagaaaggtggacatacagcaactcctcaccctgcaaagaaaggcggaaagactcccaacagcgaagccaaagccaagactcccaacagtgaagccaaagccaagactcctaagtctggtggactctcttgcaaaacctgcagcaagtctttcaccaatgaaagtggtctgcaacaacataacatggcaaagcatggtggtcagtgatatttttgctgttggttatgactcattcatgtattatttttggcttatgtaatagagtgagtt

SEQ ID NO: 227449 - DNA, 488 bp, Glycine max
agacaataattgaagttcccattaaaatttcaaacaaaaacttatcaaacatgcattcaccttcaacactaccacaataccacggtttactgggccgaaaaacaaggacagatgcctaacgtccttaggaaactcactctattacataagccaaaaataatacatgaatgagtcataaccaacagcaaaaatatcactgaccaccatgctttgccttgttatgttgttgcagaccactttcattggtgaaagacttgctgcaggttttgcaagagagtccaccagacttaggagtcttggctttggcttcactgttgggagtcttggctttggcttcgctgttgggagtctttccgcctttctttgcagggtgaggagttgctgtatgtccacctttcttaccatcagtcttttcaagagtagcatttttggctttcttggaagaaactggagtttttgatgcagactcattgggtctcttctttccc

SEQ ID NO: 227450 - DNA, 567 bp, Glycine max
  unsure (1)..(567): unsure at all n locations
aacagaacacacagctcttactttcttccgccatattccacaagaactctccaaggatcctccttcccacgagattctttggtgggaaaaatccaagaggtttgaaatttgaaggcagggaagatggattatttcaatgcaccaggaagaaaccatctctatgttccagggccggttaacattccggaccagatcatccgggccatgaacagaaacaatgaggactaccgttctccagcaattccagctatgacaaaaactttgcttgaggatgtcaagaagattttcaagaccactactggaaccccatttctcatccctacaactggtactggtgcttgggagagtgctctcacaaacacactgtctcctggggatcgaattgtatcgttcctgattggccaattcagcttgctttggattgatcagcagcaacgcctgaagttcaatgttgatgttgttgagagtgaatggngccatggtgctaagcttgatgttctggaatcaaagatggcttcagatacttcacacactataaaggcaatttgcatttgtcacaatgagact

SEQ ID NO: 227451 - DNA, 563 bp, Glycine max
acaggacaataaaagaagcaatgcattaaagctgaaagtagaaagtacgttcatcttcaaaggagtgtaaaagagggtaatatatattttacagaatttctgaaagagcagaaaaaggaagtaaagacaagaatgatttgtgactcaaatcctggaagggatcataggaatagtgttctgtaagtatgcactggcagcagcaactccacttccaagctttacaggataacccacatctttgagtatcatctctacaccagctagacatcccaacagttgcaactcattcaagtggccaagatgtccaattctgaaaaccttcccagcaactttgttcagtccaagacctaagctcaaattgtatctcttccatgccctcctaactatttcagtactatcaatgtaagcaggaacaagaacagcagtcacagtgtcactgtaccactcttccttttgggtgcaattcttcaaaccccatgcctctacagcaagtctggttgctttgcctaaacgactgtgccttgcgatcacattttcgagtccttcctcaaaatcagatcaag

SEQ ID NO: 227452 - DNA, 377 bp, Glycine max
ctctctctctatagatctgtctgtatttctgattatatcaccttatcctatttattttgccatgacccaccaactgcacatgagggtactgtgagctatgttaactatttaattcatacatgtaactggcatgacttgaatctaaatagtaatgcacttgctgcagccgaagcatatgatatcagtgactaatctgatattaatattatctcagctgatgcagtctttagaaatgcaacaataggtcatatgactactgatgatacatcacataccgattggcaatgactgagccactgtgcatggactatggtgatgcgacgcactgagactagcatttgataccacctaacacacatcaagtcccatgcatatgg

SEQ ID NO: 227453 - DNA, 464 bp, Glycine max
cccttgatgatgaacatagacaatgggcttttgaaatgtgctctactcaatgatccgtaattaagcaacagacatatgctcgttccaatcagcaggggaactcaacaatgggaacacgtgaaataactacccgagtaaaatcactttccaacatgctaccaatatgcctaccaaaggaatactacaaataaaaccacaatgagactattaagattattttttctcctcttcatttggtggctggtcttcattcttctgctgtggctcaaactgattttgcatggaagccagcaaatctttgacagatgggtcatttgggtcaaccccaggaagcgatgcaaggatagaagatacaaaggactgatctgccaacagtttactcacgtaagactggctagccgagtcctttgagctgtcttctactgacaattggagagctagagccaactcgggatcttcagcag

SEQ ID NO: 227454 - DNA, 545 bp, Glycine max
  unsure (1)..(545): unsure at all n locations
atcagccataaataagtgagttataaaaactataaaaaaaaagtactatttagctttataacacgttctagagcttatggatttcaggcaaagagctccaactttccgtccacaactttctgttcgtcgcgtgtacgagactttggagccacgatcagagacagaagaacttccagaagcttatcttctgcgtgtatatattcctggttttccaagggagaatgtaaagattacatatgtggcctcttcaagaactgtgaggattacaggagaaaggcaacttcaaggtaacagatggcacaaaattgacaaatcatatcccattcctgattattgtgaggcagaggcacttcaaggtaagtttgagattccaattctcaccattacaatgccaaaaaaggccacttcacaagctgctactaaacaacangaagtgggaacatcccaagagaaaggtgcagtagtagctgaaccaaagcctcaagaaaaagtccaagagaccacttcagcaccacaacctacaacaactactaaagtggaagaac

SEQ ID NO: 227455 - DNA, 561 bp, Glycine max
cttaatttctctctgccttgctcatttacacacctctccaacctttcactttcagctttatttgaatccctctctctcctttccaaatggccagcgttgaggttgcacatcaaacaccaacaacagttccagaaaatgaaacaaccgaggtaatcaagacccaggaaacaaccccggaaccagtaccagccactgaggctcctgcaacagaacaagcagcagctgaggttcctgctcaagaagaacaacaagcaactgaggttcctgccccagaatcaaccaccgaagcaccaaaggaagaaaccaccgaagcaccaacaacagaaacagtagaaacaacaactacagaagaagccaagccagaggagcctaaagaagttgcagttgagaccgaggaggtggtgacaaaggagacagaggaagagaagccagcagcagaagagaaatcagaggagaaaactgaagaagtgaaagatgaagcagaagagcctaaagaaactactgaaacagaaacagaatcagcaccagcagcaaccacagaggaagagaacaaccagctga

SEQ ID NO: 227456 - DNA, 499 bp, Glycine max
aataagaagaaccgcaaaattagcattcgatactgataaatgatagtctaaatatatttatgatgaatattccgaacggtgataagtggacccttcccattgagcagatcctagatcactcacctccgtgcaattctgtgccctgctcccaataataacgctctccccacagctccagtatgaagacccaaaaccagagcaacagtgccaccaacagccacccacttccagtctatgccattacccttttgtgcagtattattcatggcttgcaccctatcttccatgcaagacgaaggctctgaggaatgcatgtttgcgtcagaagtaatcttggttgttttacttgccatcaatgcacatcttgataaagaagcctctgttttcctagcactctggtaagctctcattccagaatgcaatttcttgacagctccccacattccatgccggactcccaacttcgcaacatctttgggaatccccatgtcttcataat

SEQ ID NO: 227457 - DNA, 496 bp, Glycine max
tggtgtctgtcacgagacccatagtgctgccaagttatagggactctctttctctatctgacgaagactacgttctgaagaagcatgtgtggaggtgctatcatctcacacttcattggtgtgaagcgtggccgcaacctcgccgggcaggaacctgtggtccgagcttgaccctttctctgacctccttggcttcgataccaccaccacgaccagcaaccatccaccccttccagacaaaacagtggtgtcatcatgtgagatgatgaagaagactagtgtgagtgctgctcagaatagtggtgggcgagctcggaagagcgtgtccagaggaatcaggcaaaggccgtctggcctgtgggccgcggaaataaaggacccacatatgggcgtccgcgtctggctcggcacctttcccaccgccgacgtagctcgccgagcctacgacgacgccgtcgagcgcatgcgcggcgacaaggccatgctcaactttccg

SEQ ID NO: 227458 - DNA, 561 bp, Glycine max
  unsure (1)..(561): unsure at all n locations
ggcttagctaaaatggaagttcaatcagataaaatatggatggacaatggaccctctcgccgggccaaatggtggtattcaacattccacactgtgacagccatgataggtgctggtgttctaagcctgcccaatgccatggcatatctaagatgggggtccagggatcttgatgttgttgttatcatggtgcctgaccttaaacacaatgtggcaaatgatccagttacatgagtgtgttcctggaactcgttttgatcgctaccttgatcttggtagacatgcttttggaccaaaacttggaccatggattgtactcccccagcagctaatagttcaggttggatgtgacattgtctacatggttactggggggaagtgcctaaagaagttcatggagatagcatgcactgattgcacacaactaaagcagtcttactggattctgatctttggtgccatccatttctttctggctcagcttcccaatttcaattctgttgccggngtttctttagctgcagctgtgatgtcattaagctattcaactatagcctggct

SEQ ID NO: 227459 - DNA, 572 bp, Glycine max
  unsure (1)..(572): unsure at all n locations
aagcactatagtaaaaaaaggacattcattcatctatggctacccttattgctcccagcaaccactctccccaagaagatgctgaagctctcagaaaggcttttgaaggatggggaactgatgagaacactgtcatagtaattttgggtcatagaactgtgtatcagaggcagcaaatcagaagagtttatgaggaaatttaccaggaggatcttgtgaagcgcctagagtctgagatcaaaggagactttgagaaagccgtgtaccgatggatactggaacctgcagatcgtgatgctgttttggccaatgttgccatcaagagtggcaaaaactacaatgtcattgtggaaattgccactatcctctccccggaagagcttttggcggttagacgcgcctatctcaaccgctacaagcactccttggaagaagatgttgcagctcatacctctggccatctacgccagcttttagtggngttggtgaccgcattcangcatgttggtgatgagatcaatccanaatnggcacaatctgaggctgaaattcttcatgatgctgtaaaagag

SEQ ID NO: 227460 - DNA, 450 bp, Glycine max
acacgttccaatgtaaagctttgtactttaaattaaattaaacatagtacatctcaacattgtttagctcaaaatcagtttttttaaaaattcaaatggccactgagatatcttttattttgagcccgttaataataatttataagccaccaaacagctttcatattaccactctataagatagaactccaagttctcatgatcaaggaaaactgaaaacagactcaagcaaaatcaacacagattatcaccatcaaccatcacacacacacaagtatagcttggtgtcctaaactcgtaatcacaaatgccctcagagaaaaaatatttagtcttctttccccaacagagtgagaaggaacttcttgtagtcccctgagatttccttggcaatagcatgctcaagaagaacgctgtttctcttgtagtaaacctctgagattattctta

SEQ ID NO: 227461 - DNA, 526 bp, Glycine max
gtggtgtgtgtgggtgagaggaagaagaagaagcaaatggagttccagcgcagcgattcatcatcgtcccagcccacacccaacgacgccgatccgtagaaagtcactcgttctgacccaatgcattcatggtgggaatcagtctgaaaagcccgctcccgaatccacgccctcgtcggcatactccgctcctcctgctacgactctgtctgctctttagcggacttcgaccgccccgctctgtcgttactttcctcccccgacgactactccgccggctgctgctccctatccgggtcccacttggatcccctctgccactggctctacgacaccttcctctcctctgacccgcacctacgcctggtagtcctgtccttcgtccacctcctcgccggcctgtacctgtcccgcatacactccccggagccaccggccctcgcgggattcgaagccgtcctcctggacctctacgccgtctagaccagatcccgcaacggcaaaccgcttgtggtcacaatccccg

SEQ ID NO: 227462 - DNA, 577 bp, Glycine max
  unsure (1)..(577): unsure at all n locations
gccatttatgacatctgcagacgctctctcgacattgagcgtcccacctacaccaacctcaaccgccttgtttctcaggtgatttcatctttgactgcttccttgaggtttgatggtgccctgaatgtggatgtgactgaattccagaccaacttggtcccataccctagaatccatttcatgctttcctcctatgcaccagttatctctgctgagaaggcctaccatgaacagctctcagtggcagaaattaccaacagtgcttttgagccatcgtccatgatggccaagtgtgatcctcgtcacggaaagtacatggcgtgttgcctgatgtaccgtggtgatgttgtgcccaaagatgtaaacgctgctgttgccaccatcaagaccaagaggaccattcagtttgtggattggtgccctactggtttcaagtgtggtattaactaccagccacctaccgttgttcctggaggcgaccttgccaaggtgcagagggcagtttgcatgatttcaaactccaccagtgtggctgaagtgtatggccgcattgatcacangtttgatctcatgtatg

SEQ ID NO: 227463 - DNA, 467 bp, Glycine max
aaaacaacatagttcaatattgccattcagtttaggtacgtaacaggagcagcgaagcataaaagcaatgcatccaaattaaaaccacatcggttctggtacacatctgaacatcaaacacaacagaaaacagaccacaagaacaagaatctgaagtagattctagtagtcttcatcctcttcctggccctcaccagactcagcacccacttcttcataatccttctcaagggctgcaaggtcctcacgggcttcagaaaattcaccttcttccataccctcacccacgtaccagtggacaaaagcacgcttggcatacatgagatcaaacttgtgatcaatgcggccaaacacttcagccacactggtggagtttgaaatcatgcaaactgccctctgcaccttggcaaggtcgcctccaggaacaacggtaggtggctggtagttaataccacacttgaaaccag

SEQ ID NO: 227464 - DNA, 428 bp, Glycine max
ccaacaccaaaccttaaaattattttgcccctctgcttctctctctgtctttctcagaagacaactcaaaaaaaccatggacgtgggtcagatgcagagacagtggatcgactacaccaaatccctcttccttgagggcttcctggatggtcagtttctgcaacttcagcagcttcaagatgagaacaaccctgactttgtggtcgaagttgtctctctcttctttgaagattctgaaaggcttctcaaagatctcacctttgccctagatcagaatggtgttgacttcaaaaaagttgatgctcatgtgcaccagttaaagggtagcagttcaagcataggcgcgcacagggtgaaaaatgcctgcattgctttccgcaacttctgtgaggagcagaacacagatgcgtgcctcagatgtctgcaac

SEQ ID NO: 227465 - DNA, 368 bp, Glycine max
ggatggaaaacttctattttataaaaacccatacattcaccatggacttaataagataaaggataatctttaacaaagaggatcataatacaagcatctctacaaaccctttcagtcacccaatgaaactcaattccgcagggattgatccaccagctgccacaatctgttgctcaagcctgaacattgtttcaagcttattcttgactatgcagtactcttgtttcacttgttgcagacatctgaggcacgcatctgtgttctgctcctcacagaagttgcggaaagcaatgcaggcatttttcaccctttgcgcgcctatgcttgaactgctaccctttaactggtgcacatgagcatcaactttt

SEQ ID NO: 227466 - DNA, 505 bp, Glycine max
  unsure (1)..(505): unsure at all n locations
ataacacaaggcagaaagcaagctcatcctagagttttaaaaatggcagcagcctcctccatggctctctcttccccatccttggctggcaaggccgtgaagctgggcccatcagcccccgaagtcgggagggtcagcatgaggaagaccgtcaccaagcaggcctnctccggaagcccatggtacggcccagaccgcgtcaagtacttgggcccattctctggcgagcccccgtcctacctcactggcgagttcccaggtgactacggctgggacactgctgggctttcggccgacccagaaaccttcgccagaaaccgtgagctcgaagtgatccactccaggtgggccatgctcggggccttgggctgcgtcttccccgaactgttgtcccgcaacggggtcaagtttggagaagctgtgtggttcaaggccgggtcccagatcttcagcgagggtgggctggactacttgggcaacccaagccttgtccacgcncagagca

SEQ ID NO: 227467 - DNA, 486 bp, Glycine max
gtaaaaagcaagtaacattaagttggattgggatacacaagataattcacattatctgaagtacattgcaataacatatacttcaccaaacacaaatctaaaaactctcaaaagtccacaagtcatccttttctttcatgctcacttgccggggacgaagttggtggcgtaggcccaggcattgttgttgactgggtccgcaaggtgatcagcaaggttctccaatggacccttaccggtgacaatggcctgaacaaagaacccaaacatagagaacatggccaatctcccgttcttgagttccttcaccttaagctcagcaaaagcctctgggtcatcagcaaggcccaatgggtcaaagctgccaccagggtagattgggtcagtgacctcaccgaggggcccaccagcaatacgataaccctcaacagcacccattaggataacttgggtggcccagatggcgaggatgctctgggcgtggac

SEQ ID NO: 227468 - DNA, 593 bp, Glycine max
ttttggtttccttctctctttcaccgataaaacaaactaaattcttcttctttctactgaaaacgatagtaatggcgacgaatccaatcgaagcggggaacggcgacgccgctcctaaccctaacgcgactaccaaaccctccgtctaccttccaggacacggaggagctgaagcgagtcttcagccgcttcgacgctaattgcgacggcaagatctccgtcaccgagttggacaacgtcctccgctccctcggatccggcgtcccgccggaggatatccagcgcgtcatggacgacctcgacaccgaccacgacggattcattaacctctcggagttcgccgccttctgccgctccgacaccgcggatggcggcgacgccgagctccacgatgctttcaacctgtacgatcatgacaagaacggccatatctccgccacggagctctgccaggtgctgaaccgcctcggaatgaagtgctccgtcgaggaatgccacaacatgatcaaatccgtggattccgacggcgacggcaacgtcaacttccccgagttcaagcggatgatgagcaacaatcgtgaaaatgctagcaa

SEQ ID NO: 227469 - DNA, 439 bp, Glycine max
aaaacggcaagcataggaatagtttttcattcgatttctaattctgcgcagcgattcaacacaaatatatttatatttatagaaaaaaaaaagaggaaacgaggggtaaaagtaataacaaatcgatcataacaaacaggcatagatttattattcaagagggattgggccttgcccagcctagctataaacatcaaatccaaagcgcctaatcggttttttcttcgccattgctagcattttcacgattggtgctcatcatccgcttgaactcggggaagttgacgttgccgtcgccgtcggaatccacggatttgatcatgttgtggcattcctcgacggagcacttcattccgaggcggttcagcacctggcagagctccgtggcggagatatggccgttcttgtcatgatcgtacaggttgaaagcatcgtggag

SEQ ID NO: 227470 - DNA, 489 bp, Glycine max
ttgacaaccaagtctatcttccacctggactcactcatcaaaattctcatgatctctactgctctggtggggtggtgttggcttctcgtgatggaaagattgtgtgtgaaaatacacttgatgcacgtcttgatgtagttttccgtaaaaagcttccagagatccgaaagcagctctttggacaaattgttgcttgaagattttgattgtattgtttggttaccgctggaatgttaatatcccaaagcaaaagctttgtcttcatgtccttgacctgaatagctatcaagccattgcttctgtgaacttataattattgacttttaaataacattattttcggtagtccagttgtccggtgttcttgatttgatttacttctgattgttatgacctaagtttttccggcttatttcagctttgagcttcttggcaataaagtagcaagatgtaaacattactgctaatgttattaaaaaaaacattact

SEQ ID NO: 227471 - DNA, 478 bp, Glycine max
ctgtcacaatattgacagtaatgttgtttttaataacattaacagtaatgtttacatcttgctactttattgccaagaagctcaaagctgaaataagccggaaaaacttaggtcataacaatcagaagtaaatcaaatcaagaacaccggacaactggactaccgaaaataatgttatttaaaagacaataattataagttcacagaagcaatggcttgatagctattcaggtcaaggacatgaagacaaagcttttgctttgggatattaacattccagcggtaaccaaacaatacaatcaaaatcttcaagcaacaatttgtccaaagagctgctttcggatctctggaagctttttacggaaaactacatcaagacgtgcatcaagtgtattttcacacacaatctttccatcacgagaagccaacaccaccccaccagagcagtagagatcatgagaattttgatgagtgagtc

SEQ ID NO: 227472 - DNA, 519 bp, Glycine max
ggccacagcaacaataacaatggcagcctcactacaagctgcagctaccttcatgcaacccaccaaggtgggcatggccactcgcaacctcaaatctacacaatgcatttctaaggcttttggcttggaacccgctgcagctaaactcatttgctcccttaagcccgatctcaaagattttgctcaaaaatgtgtcgacgccaccaaaattgcaggattcgcccttgccacctcagctctcgttgtttctggagcgagtgcagaaggtgttccaaagaggctaaccttcgacgaaatccagagcaagacatacttggaagtgaagggaactggaactgctaatcagtgcccaaccattgaaggtggagtggactcatttgccttcaaggcagggaaatacaaggcccagaagttgtgcctggaaccaacttccttcacggtgaaggcagatggtgtggccaagaatgccccgctcgaatttcagaacaccaagctcatgactcgtctgacctacaccct

SEQ ID NO: 227473 - DNA, 430 bp, Glycine max
ggcgccgaaagggaactcaaacattttaattttaagccttttaatcgaagtcgttataatattcacacatgataacgccctgagggcttcgccaactggggtcccaagaccggggatggggttaccagaaagcagagggaccaccttaaaaaaagggctttgaatcaagctgatcataccatatgccttgaatcttaacatccttaggagctgtagcccccatatcaacatcagaagggtgaacactttttaacaccccaataacctcaccagtctcagggttggacctggtgacacccaaggggactctcccttgggaagaggaagcacttttattgttctccttggcaagttcctgttgatcttctatttcaccagcaggcaaagtaacagctttgtgataacccgttgaggcgcccccttccttggg

SEQ ID NO: 227474 - DNA, 614 bp, Glycine max
ctttctcttgaaattcaaaactctatctattctgctgcgaactacatacaattctcaaatcaaatccaaacacataatagcagtatcagggcattagcacttcaactcacaaaccttacacattttttttataaagaaaatgaagctctcggcgttgcagcagagttacctcacgcgccgggcgaacagcttcagaggatcggcgcagttggattcgtccgccgacggcgcggtgaagtcgccggcggcgattttctggcttgtaatccacggcgtctgctgcctcatcagcttggttctcggcttccgcttctcgcgcctcgtcttcttcttcctcttctcgacaagcctctacaccgtgccgttccggagcggttcggaaatcgcggctccgcatgacgttcctccggcggcgaaccggacggcgatgctgagcaccgcgagccgcgtggtagtcgggcggcacgggatccgaatccgcccgtggccgcatccggatcccgtggaggtgatgaaggcgcaccgcataatcgagagagtgcagagagagcagagggcgcttgttcgagtgaaaaaccctaggacgggatcgcgtgacgccgacgacgttcgac

SEQ ID NO: 227475 - DNA, 531 bp, Glycine max
ccacagcattttcaccaccaccaataacaagaaaatcaatataataaattttcttctctgtttcttttttttttttctcttccgacgacgttaataactaatccgtcgtgactaattctttcgatcttgaagatgaagcagctgatccgccggctctcgcgcgtggccgactcctccaactacacgctgctccgcgcggactccgccgcctcccagcgctgccaccaccgccgccgccgtgcggagtcctttcgcctcgccgctgcggcgaagatccgccgctcctccgcggtggtgccggaggggcacgtgccgatctacgtcggcgacgagatggagcgcttcgtcgtgtgcgccgagctcctcaaccaccccgtcttcgtgaagctcctcaacgaatcggcgcaggaatacggctacgaacagaatggagttctccggctgccgtgccgcgtcttcgtcttcgagcgtgttcttgacgcgctccgtcttggactcgacgcgcgtgacgtggcggagctcgtaaatttc

SEQ ID NO: 227476 - DNA, 496 bp, Glycine max
gaatggaaaattcaaaagagattctcattctgcaacaacaaagtgaaaaatatctttacctttacaacgagagagcatcgaactacaactacaacaatcaatcagaaaaaagaaccccaaacaaaaagaaattgcaaaccctaacatttatgtgcctcattttttttttctatcaagatcctaatgtagtatatttacagagcaccaaaaccagcaaaagttctcactaatcaacgatcttcgtattttgtttttttgtgttttttgcttttttgcttctttttctttgtttctcaggagaactcttccggcgagaaatttacgagctccgccacgtcacgcgcgtcgagtccaagacggagcgcgtcaagaacacgctcgaagactaagacgcggcacggcagccggagaactcctttctgttcgtagccgtattcctgcgccgattcgttgaggagcttcacgaagacggtgtggttgaggagctcggcgcaca

SEQ ID NO: 227477 - DNA, 480 bp, Glycine max
gttatgttaatttgaaagaagctacgtggcatcaagaatgggttcaggtgattggtttaagacaataattagctcaagaaaatcaaaagaaggaagatcaaagaaattaaagactaagatttatacaagaaaaaagtccaatggtttagcaaatggaatgaaaagcgaaaatctagagtcagatggggtatcagttgaaactattgctgcaacaaggatccaaacagcattccgagcttataaggctagaaaatatttacaccgcttgagaggattcacaaaactgaagatccagactcaaggttcctctgctaaaaaacaagccgttaccactataacttatcttcattcatggagcaagatacaggctgagattagagctcgtcgtatatgtatggttacagaagacagaatcaggcggaagataatacattctcaactaaaacttgaggccaagattcatgacctggaggtggaatg

SEQ ID NO: 227478 - DNA, 539 bp, Glycine max
gcacaaaactggtaaaattccagatcaataaggattgcggcgaagccgcaaagatacaacattcattagggaaaacaggagtggggaaaaataaggggggaggggttgaggaagaatcaattgctcacagagcatgctaagacacctaaatattccacacacagttattgaaacaacccaatatagagaaaatttttctttggtgtattataatataaagcagaaccaaatgacttggaagattctactttcttataccattcacttggcaagttcgttgcggatgagttttgctgcggcaaccatgtttgtgagggctggcttcacctcagtgtacttacgggtcttgagcccacagtcagggttcacccacatgatgttcttctcgagcactgccagcatcttgttgattctgtcagcaatttcttcagttggtggtattcttggggagtggatgtcatagacaccagggccaattccagcaccatacttcacaccttcgcggaagactgacagaagcttctcgtcggagcgagagt

SEQ ID NO: 227479 - DNA, 514 bp, Glycine max
gacatggtcacccacgccgacaccgacgtcgtcatcgttggcgcgggctccgcgggtctctcgtgcgcctacgagctcttcagaaacccctccatcaacatcgccattgttgagcagtccgtcagtcccggcggaggcgcctggctcggcggccaactcttctccgacatggtagtgcgtaagcccgcacacctcttcctagacgagctcaatgtggagtatgacgaacaagacaactatgtggtgatcaagcacgcagcattgttcacatgcaccatcatgagcaagctcttggacaggccaaacgtgaagctcttcaatgccgtggcggcggatgacttgattgtgaagaacgggagagctggtggagtggtgaccaactgggccttggtttcattgaaccatgacactcaatcctgcatggaccccaatgtgatggatgcttaggtggaggtgagttcttgaggccatgatggaccctttggagccactgaggtgactaggctcaagagca

SEQ ID NO: 227480 - DNA, 504 bp, Glycine max
gctaccttaagtggtttgcctagccaaagagagccatatctgcagcacgttgaggtaaagacgaaaaaaatgctgaggactctgctgcattgacggctggatatgtggacggtgccaacactggcacatgatgtactgaaatgcccctgaatagtagtggctgatgatgactgtgtcgattcaggattgatgcctgcaacagagtacaggtccctatctatgagcacggccttgatgatgtggtgaaacagagtcgtgccaagaacctatgctctagaactgatgctgagacacatgtctatgaggcccacatacggtttggatgcgtcaccaccgggacaagtactcacggtcttggagccagaagggctgcacactatgactgactgggagagtgcatcacgcatgaatgctgatgtctacaagagcgacaagattgagatggataaatccactgtacctgacaagactgatgcagacatatagatgatattgactcacagt

SEQ ID NO: 227481 - DNA, 636 bp, Glycine max
caataacacactgtcaccgttccgttccgttttcctctgttttttttttctttctttcaaatccccgcttcgtggaaatcccgaaccagaaaccatgcttctccgaaccgctgctgcttctgcttcgtccctctccctcttcagcccgaacgccgaaccctccccgttcggttcccgctcgtggattggtggttcgcgcagcgaaaggatccacgaaccaccgcgccctgaccggagtgatttttgaaccgttcgaagaggtgaagaaggagctcgatctcgttcccaccgttccgcaagcttctctcgcgcgccaaaaatacgttgacgaatctgagtccgccgttaacgaacaaatcaatgtggagtataacgtttcgtacgtttaccatgccatgtttgcgtacttcgatagggacaacgttgcgctgagaggacttgccaagttttttaaggaatcgagtgaagaagaaagagagcatgctgagaaattgatggagtatcagaacaaacgtggtggaaaagtgaagttgcagtcaatggtgatgccgctttctgatttgatcatgcagataaggagatgcgctgcacgcaatggaactcgctctgtcattagagaagctacccacgagaagc

SEQ ID NO: 227482 - DNA, 590 bp, Glycine max
  unsure (1)..(590): unsure at all n locations
ctcacacaaccttctttcgggtccaattcctcccaaacttataaaagggggtttggtggaaagctttgctgggaatcctgggttgtgtgtgttaccggtgtatgctaattcatcggatcataagttccctatgtgtgcaagtgcctactacaagagtaagaggataaacaccatctggatagctggggtgtctgtggttttgatcttcattggctctgccttgtttctcaaacgtaggtgcagcaaagacactgctgcagtagaacatgaggacacactgtcttcttcgttcttctcttatgatgtcaagagcttccacaagatatctttcgaccaaagggagatagttgagtccttggtggacaagaacataatggggcatggagggtctgggactgtgtacaagattgagttgaaaagtggtgatattgttgcggtgaaaaggctgtggagtcacgcgtccaaggattcngctctcgaggatcggttatttgtagacaaggcatngatagcagaggtggagaccctgggaagcatangacacaagaacattgtgaaactgtactgctgcttctacagttatgactgca

SEQ ID NO: 227483 - DNA, 613 bp, Glycine max
  unsure (1)..(613): unsure at all n locations
cttcaaccacaactacaacttccacttctcacctttctgcattggagcttcttactgggatcacttcaagttccagtgctggtttgacttctttcatgcctgtgccggttccatctgatccaaattctatctacacatgtgggtttcctctgcaagatttcaagccaaccttgaatttctctttggatgggatcggaaacgggtacacaagccttcagaatgttcaaagtgggaggctcttgtttccatctgatgacttaagacaggtttctagctccaccatcaccacaatggatcagaaacaacaaggagattcaactgggtattggactggaatgttaggcggaggatcatggtaattaatcatcaagagagtcataaagatatatatttatttacttaatttcttctcttgctttctactaagttaattttccttttgaacttttttcttttgggttttaatgagtttccgtcagatcatgtggngacttcacttgtttggatttcttcataactggctaacagctgataggatcgattcatacatgagtttcttttcctcttctgtcaattccttatatgtatatctggcttcgcttatatctcttca

SEQ ID NO: 227484 - DNA, 416 bp, Glycine max
ataaaaaacgcaagaaatggaaaaaaaaacaaacacagacaaagccacgtaaagaaaattcaatgctacaaactgcggcaaatgctgacctaaggacaaggctatcaagaggtttctggtgaggaacattgttgaacaggctgcactcagagatgttcatgaggcttgtgtctatgaacagtacacgcttgcgaagctgcatgtgaagacgcagtattgtgtctactgtgctatccactctcatgtcgtgagggttcgatcccgcactgataggagaaagcgtgagcctccacagcgatttatcagacgcagggatgatgcaccatggcctggtcagcctggtcaagccccacgtcctgctggagtaggagctcctgcccgaacttagtagacaaattgcaaagttgtttgcggct

SEQ ID NO: 227485 - DNA, 492 bp, Glycine max
ggtgagcacccgcggcggtcgaccgacggtgctagccgcgcgcccgtcgcgcattgccgagtgcctcgtcggcgacgaaaccggaaccataatcttcaccgctcgcaacgaacaggtggaccatatgaatgctggcgcaactgtaattctgcgtaatgcaaagattgacatgttcaagggatctatgagacttgcagtggataaatgggggcgtattgagcccacagaccccgcaaattttgacgttaaagaggataacaacctttcgttagttgaatatgaattagtgaatgttgttgaagagtgattttgtcttctgagagtgaatctttggggtttacgggaggttttaatttttattttgacaccattgaacaattggctgcggtgcagttttcttatggtacagtctttgcttatttagtcttaagattgctgtggttaatttaaggaatgatatttcagatcagttttgaaaaaaaaaaataaggg

SEQ ID NO: 227486 - DNA, 370 bp, Glycine max
aaaactgatctgaaatatcattccttaaattaacgacagcaatcttaagactaaataagcaaagactgtcccataagaaaactgcaccgcagccaattgttcaatggtgtcaaaataaaaattaaaacctcccgtaaaccccaaagattcactctcagaagacaaaatcactcttcaacaacattcactaattcatattcaactaacgaaaggttgttatcctctttaacgtcaaaatttgcggggtctgtgggctcaatacgcccccatttatccactgcaggtctcatagatcccttgaacatgtcaatctttgcattacgcagaattacagttgcgccagcatttatatggtccacctgttctttgc

SEQ ID NO: 227487 - DNA, 447 bp, Glycine max
cattcgaattcattttatttatatattaatattatattcaaatgaaataaaaagattttaaaagatactaattataagaatttgaaagtgaaattataaagttattaaatgattaatcaatttttttctacctgttcctgtagtaaaaagagttccatctgttcttgaatagcttccttcaaaaggacttctgcttccccagtgaatgtcttggtagaagatatgatttctttgaattgaggtttattcgtgtttaagtaagcacgtaactcaacaagaaatttccttacctgtccaatttctaatgaatcaagataaccattcgttccagtataaatagttattatctgttcttccacggtaagaggagctgattgggattgtttaagcaactcgcgcaatcgttgacctcttgctaattgattttgagtagctttatcgagatca

SEQ ID NO: 227488 - DNA, 574 bp, Glycine max
gaaccacccaattcacctgaaccctgcgcactacatcagtgagattattagagaaggcacaaaaaatggcactgctttctttaagtgccatggacatgagcaatttgagatgacgggtttggatcctgagtataataggttgttcaatgaaggcatggtgtgcactgctagggttgtgtccaaggctgtgatcactggctacaaagatgggttcaaccagattaagtccttggttgatgttggaggtggcattggagggtctctttcggagattgttagggcttatcctcatatcaatgccatcaactttgacttgcctcatgtggttgccactgctcctaagttcgatgggatcacccatgttggaggtgacatgttcgtgtccattcctagtgctgatgctatttacatgaagtggattctgcatgactggagcgacgagcactgcatcaagatcttgaagaactgcaggaaggcaataccagagaagacaggaaaagtcataatcgtggatcacgttcttcgacccgaaggcaacgaactcttcacagacgttggcatcgcattcgacatg

SEQ ID NO: 227489 - DNA, 536 bp, Glycine max
gtgcccctaaaaaatacgacgagatcgacgccgcccccgaggagcgcgcccgcggcatcaccatcaacaccgccaccgtcgagtacgagaccgagaaccgccactacgcccacgtcgactgccccggccacgccgactacgtcaagaacatgatcaccggcgctgcccagatggacggcgccatcctcgtcgtctccggcgccgacggcccaatgccccaaaccaaagaacacattcttttggccaaacaagtcggcgttcccaacattgtcgtcttcctcaacaaacaggaccaggttgatgacgaggagcttcttcagttagtagaattggaggtccgggagcttctttacaagttcgagttccccggagacgatgttccgattatctgcggttccgctttgctgtctttggaagctttgatggccaaccctgccatcaagcgcggcgaataccaatgggttgataaaatttacgagctcatggaagctgtggatgactacattcccatccctcagcgccaaactgaacttccc

SEQ ID NO: 227490 - DNA, 451 bp, Glycine max
gggaagacaaatttcataatttcaggcaagcaaaaatttatggaatcttgctctcaagttctaaccgatgaatcataaccataaaaaagatgggaggtaaacaagccataggaaactcattggccaactcaactaaacattatttagaaacctacaaaatttaacaaaatagccgccgttgtgtaaaatgacaaaactcaattgcacaagcccatcgtcgatgatagatactctgctaacagagtaagagtcaagtagttgggataccaatctcacaacaacttactactcaatgatggattggataacacccgctccaacagttttgcctccttctctaataacaaaccttattccttgttcacaagccacaggcccaataagttcaaccaccagcttaacacggtcgcccggcataaccatcttggactcttcatccctgggattcata

SEQ ID NO: 227491 - DNA, 554 bp, Glycine max
gccaattactttgggtcgctgacccaggcatcagctattagagttgggtctttccaaggggaggaaatatatgccccattcaagagcctgcttccaatggtaaaccctgatgatgttgtgtttgggggatgggatatcagtaacttgaacctggcagatgccatggccagagccaaggtgtttgatatcgacctgcagaaacagttgaggccttacatggaatctatggttccactccccggaatctatgaccccgatttcattgctgccaaccaaggagaccgtgccaacaacgtgatcaagggcacaaagaaagaacaagttcaacaaatcatcaaagacattaaggagtttaaggaaagcactaaggttgacaaggtggttgtcctgtggacagccaacacagagaggtacagcaacctagttgtgggactaaacgacaccatggaaaacctctttgcttccttggacaggaacgaggctgagatttccccttccaccttgtatgccattgcttgtgttatggaaaatgttcctttcatcaatggaagccc

SEQ ID NO: 227492 - DNA, 413 bp, Glycine max
aagcacaaaagacggggataacttgatattattttattacatacatgcatagatagcctgctctcaaataagtcggcgggaacaaagattgagagattcaacgatcttcaaatttcacatttgccagaaatttttaacagaaaagagggggttgggatatgagttaagttttgatcacattcaactacactatcccaaaccggtactcttaaaactttgaacttcacttgtactctaggatcatgttgttctcaggagctaatccaacacaagccctcaggatgttttccaacatagctcgctggtttgacaacgcattcaccactggtgtacccggtggaaccagaggggccttggtcaggtaactaaggatgggcgcaactgggtggaatgagtggaattttccctcattt

SEQ ID NO: 227493 - DNA, 626 bp, Glycine max
  unsure (1)..(626): unsure at all n locations
gcctcaaagtgccctacaccctcctcacttaagctctcatcctgatccctaaaatgaagatcaaacaacaatctctcttctcagcctcaattttactagttatagcacttattaccttcttccacaccacttcagcccaactcacaccaattcaagccccagtttcatcacccccatccncaccacaacaacaaccacaaccaccagcattcacaccaccctctccaccagccactgctccagccccaggattcaacacagtacccttagtccccgtgacaccaagtggcgcccccacacccaccatcccaaaagcaccatccattgacatagtccaaatcctaagaaaagcaaagagattctccgttctcattaggcttctcaaaaccactcaactcatcaaccaactcaactcacagcttctaacctcaggctcaggagggttaaccctcttcgccccagaagacagtgccttctcaaaactaatagctggtttcctcaactctcttagtgacagancaaaagtggaactnttacaattccacacactctcttccttcatttccatctcaaacttcgacacactcaccaaccccgttcagactcaggccggagacgaccccaag

SEQ ID NO: 227494 - DNA, 575 bp, Glycine max
  unsure (1)..(575): unsure at all n locations
aagaaatttaagtgaggagctagagaatgatgatgaagtctgctatgtgtgcagtggtggttgtagcacttcttcttctggcggaggtggggcccatggctgaggctgtgacatgcaccccaacagagttgagtccgtgtcttccagcaatcacttccggtgctaaaccttccaatgcttgttgcacgaagctgaagcagcaaaaaccatgcttatgtggctacctcaaaaacgctagcttgaagcagtatgttaactctcctaatgcccgaaaaaccgttgcttcttgtgggattccctttccaacttgttaattaattaagccttcttataattaaagtgtgggatatatatatatatatagataaacagtttaatttatacacactctgatcctacaaagcatcttgacacangcattcaataggatttcaccactttatcgcaacattntaacatgatgcggtaataaagtaaattcttggtgaatatttggataacgatgttatatactcatagtatgtgtgtataaaataaacctatatntattacttactctatatatgtcactctac

SEQ ID NO: 227495 - DNA, 399 bp, Glycine max
tgttactcaccgccccgccctcctcttttgacgacttaatactttcttttaaacacactctttctatcgcgctctctcactttcccgctctcgcgggaaggtttgagaccgattccaacggttacgttaatattgtatgcaacgacgctggcgttggatttattcatgctaaagcaaaacacctaactttaaacgccgtcgtttcgccgtccctcgttgatgttcacccttgcttcaaggaggagttttttgcttacgacatgactatctcctacgccggccacaacacacccctcgccgccgtccaggtgacggaactcgccgacggagttttcgtcggctgcaccgtcaaccactccgtcaccgacggcacctcgttttggcacttcttcaacacct

SEQ ID NO: 227496 - DNA, 530 bp, Glycine max
  unsure (1)..(530): unsure at all n locations
gctgccgtagaaattcattatggtggcaacagctgcaacttcatcatttttccctgttacttcaccctcgccggactctggtggagcaggcagcaaacttggtggtgggcctgcgaaccttggaggtctaaaatccaaatctgggtcttctggtggctttgaaggcaaaggcacaagcccctttgaaaattaatggaaccacagttgttacatctaaagaaatcttgaagcatgaggatgatctaccttcacctccccccaggacttttatcaaccagttacctgattggagcatgcttcttgctgccattacaacaattttcttggcagctgaaaagcagtggatgatgcttgattggaagccaaggcgacctgacatgcttattgacccctttgggataggaaaaattgttcaggatggtctcgtgttccgtgaaaacttttctattagatcatatgagattggtgctgatcgaaccgcatctatagaaacagtaatgaaccatttgcangaaactgcacttaatcat

SEQ ID NO: 227497 - DNA, 424 bp, Glycine max
ctgccatattcttgttctactcgttatcttgtgtttggattgtccgcatattaagaaagacatttgttattgcttaaaaaaaaaaaaaaaaaaaaaaaaaaaaaaaaaaaaaaaaacaaaaaaaaaaacaaaaaaaaacaggaaaccgcgaggcatacgcctgtgcgaacccgcgaaatgctgcctaactgccgccgagacccagccgcccggccactccgggaccaacccccaccgccgcatcaatcgcggtcctatcggcaccgcgcaaacgtcgcacagccactgacactttcacaggccaaacaacgcgcgagcccgaccttcaggcgctgaacttcgccggccttgacccgagcggccgcattagcgactacatgtgccgtccctggcacgccaccacccgggaccaccagcaaccccc

SEQ ID NO: 227498 - DNA, 572 bp, Glycine max
  unsure (1)..(572): unsure at all n locations
gaaagtgagaaaaaataaaaatcaaagagcataatgtcagggatcattcacaagattggggagacccttcatgtgggagggcacaagaaggaggaggagcataagggtgagcaccatgctggagaatacaaaggggagcaccatggtgaacacagtagtgagtacaaaggagagcatcatggtgaacacaaagctggagagtaccatggtgagcacaagccagagcacaaagaggggttcctagacaaagtcaaggacaagatccatggtgagggcggcgccgccgagggcgagaagaagaagaaggagaagaagaagaaggagcatggccatgagcatggccatgacagcagcagcagcagtgacagtgattaaactgctgcatcacctatatatttaaaaggtttatgggaccatagtagcgagggctgtgccttaatttctctctctctctctctctctctctctctctctctctctgtntcctttntccctatctggtgatctatntatgagtgagaaaaacanaagtgagaaattgtgcgtgtatctgggttgctaatcgagtgcta

SEQ ID NO: 227499 - DNA, 596 bp, Glycine max
  unsure (1)..(596): unsure at all n locations
gaggacatgtgccagttgtgcgaccatattgcttccaatttggtcttcttcaccctcttagggtttgcatcagattcccctaattcttgcttgattttgcgctttcgctagattttcttcaaaatgactcaagatctagagatgaaggatcgctcaacgccttccaactccgtttcttcgcctgctccatctactctgcagcatttgaaggagatagcgtctcttatcgagaccggttcgtactcgaaggaagttcgtagaattgctcgcgctgttcgccttacaattgcgttgaggcggaaattgacagcatccgctatctcttcttttctcgatcatgttctcactcctggctctgaagttcacgccaaattgtctgcgtatcttcccaaggatgatgatcatgagatggaagtggacgctgcaacatctgcgattcaaaccccagccaaacacttgttgcccgagctagaaatctactgttacctgcttgtactcctttttctgattgatcagaananatacagtgaggccaaagcttgttcctcagctagcatttgttggctgaagacataaacaggagaactggtgatgta

SEQ ID NO: 227500 - DNA, 492 bp, Glycine max
cgccctaaatatttgatttttttttcttcaggtcctaaaacataattctcctaacaaggaacaaaccatagcagtcatcatggatgaaaaaaaaaagtaaatatttcgatatgttaaactgactttcagagatcttccacttaggaaatgaaaaattcactttttgaaaaaggaaatgataatgaaagttcttcaaaaggaaaagatgagcaaacgttggaaatgaaggtatccagatagcaattcatagggtgaaaaaaaacaattatcagaaatcatcgtcatcctcctctgcaatatgcttagccagctcttgctcttgctgttgactctctcttctcttttcagcactttccttctctttgtgtgtgttgggaggaaatcgaagtgctcgaaccgcctcattgtgcatgttaagacagaaagcaatccgagaattaaaggctaactgaggctcatttgtggagtaaatatctccagtttctttggaca

SEQ ID NO: 227501 - DNA, 425 bp, Glycine max
tgttaaccattctcttcactttaaagttacatagtttttcattgttttacttaatctacaatggctgcttcaacaatgactctctcttcatcatcattggctggccaagctatcaagcttgccccctccacccctgagcttggtgttggaagggttagcatgaggaaaacagcctccaagactgtttcctcaggaagcccatggtacggcccagaccgtgtcaagtacttgggcccattctctggtgagcccccatcctatctcactggtgaattcccaggtgactatggctgggacactgctgggctttctgctgacccagagacttttgccaaaaaccgcgaactggaagtcatccactccagatgggccatgttgggagccttgcgctgtggtttccctgaactcttgtccccaacggtgtc

SEQ ID NO: 227502 - DNA, 510 bp, Glycine max
  unsure (1)..(510): unsure at all n locations
gaacctcctcgtcaccctggatttattcttcaaacaaaatggaccaaagtgaaagacaagaggaagtctgatgaacctcctcgtcaccctggatttattcttcaaacaaaatggaccaaagattctaaaatacgttctttgtcattgtcactggattcattgctggattatacagataaagatgttgaagaatcaaatcttgagctttcattgtttgccgaatcattttatgaaatgcttcagtttcaaatgggttctagaattttgacatttcttcagaaactgcgcataaaatttgtgatcaaaagaaatcagaagaagaggcagagggatgatgagcaagagaagatgaccgtaaaaaatccctgtaagcgtcaaaggagatgatccttctggaagagtgagccccaaatatggacacatcaaatccaacccaagtagatgacgagaaagcttgtgttgagaatgaanactctaagtataaggaggatgatgtgaagatggaagatg

SEQ ID NO: 227503 - DNA, 211 bp, Glycine max
accaaatcatattaagccatggccacctccaacttctcaattgttctctctctctccctagccttctttctagtgctgctcaccaaggcaaactcaaccaacaccgtttctttcaccgtcagcaagttttccccacgccaacaaaaccttatcttccaaggagatgctgctatctcaccctccggggtgttacgactcaccaaggttgaca

SEQ ID NO: 227504 - DNA, 500 bp, Glycine max
  unsure (1)..(500): unsure at all n locations
ctctgtcttaccattgagtttatatgcaggttctttggccagaatgtggttggcagccagtgtctctgacagatatgattacctcttctgcagttaaaaaagtgtatagaaaagcaaatttatgtattcacccagataaagttcaacagaaaggtgctactcttgaacagaaatacacagcggagaaggtttttgacattcttaaggaagcttacaccaagttcaatgcggaagagctttcttagatcccactgctaatgtctttgcaaaatcaatagatctattagcacttgcacggtttcggcatcggcctgtttgcttgcctagctggtgcctcatatatttgtttttgtgtcgttgaagataactgcataaatgtttcgtggcatcgtttggcagcagattctttttcccttataacgtgaacgatctacgataatgatagcatcttngaaggaagattctagatcctgagcacttgagcaaggtggaatcaattt

SEQ ID NO: 227505 - DNA, 571 bp, Glycine max
taaagatcttgcatttcattcaattgcaccagaggcactgcttccctatttccagaagctagatatatggcctattaatgttcgggtggattacagtcccaatcgtgtagatctagcagcattaagtcatggaaagtatgtagaacttgtaaatcttgtcccttggaagggggttgagcttaacctgaaacatgttcatgcttctggcatctatggttgggccagtgtttgtgaaactactgtaggggagtggttggaagatatatctcaaaatcagattcgtaaaatactgcgggggcttcctacagtacggtcattgattgcagttggggctggtgctgctaagctggtttcatcaccagtacagagctacaaaaaggagcggagagtgctcaagggtgtgcagagaggtacgatggcatttcttcgaagcatttctcttgaagctgttggacttggagttcatctagctgctggagcccatgacattctgctccagcagaaatttttgcagcataccctctcagtcctctgctgtaaagacaatcaaaacgatgtcgatctatcacct

SEQ ID NO: 227506 - DNA, 542 bp, Glycine max
ccgatccgcaagaacacgcaaacaccgatcaattaattttctttatgctagatggggagtgcatcagagttcgacccagcgcttgcgctttcccacaaattccctgatactacgtactcttataccgaaagggatgcagcactttatgccctaagcgtaggggtgtgtttgtcggacgctgttgacgctgatgagcttaaatatgtttaccatgaaaatggtcaggagtctatcaaggtcttgcctacgttttctactctacttgtacttagatctggggcgagtggttataatctcccaggcttgaaatatgatccacgtcttctgcttcatggacaacaatacatagaattatacaaaccacttccttcaagctgtcatatacacaataaagtaagccttgcggatacatgataaagtaagcagcatttggagattgaacataagctacgagaaagaactggtgattattgtgcatgacaggacactgtcttctacggggtctgtggcttctcaagcatctaaccatttcttatcaacta

SEQ ID NO: 227507 - DNA, 506 bp, Glycine max
gcaaaacccacaacagcatcaccgtgaatgggcaatacccgggcccaacgttggaaatcaacaatggagacactttggttgtcaaagtcactaacaaagctcgttacaatgtgaccattcattggcacggtgttaggcaaatgagaacaggatgggcagatggaccagaatttgtgactcagtgcccgattcgtcctggaggaagttacacctaccgttttaccgttcaaggacaagaaggcacactttggtggcacgctcatagctcatggttaagggccactgtttacggtgctttaatcattcgtcctagggaaggagaaccctaccctttccccaagcctaagcacgaaacacccattcttcttggggaatggtgggacgcaaaccctattgatgttgtgaggtaggccacgcgaactgggggagctccaaacgtgtctgatgcatacactatcaatggtcaacctggtgatctttacaagtgctctagcaaagacactacc

SEQ ID NO: 227508 - DNA, 523 bp, Glycine max
ccgatccgaaaccgaatggggattctgtacgcgctggttggtcgtggatcggtggtgctggcggagttcagcggcaccaccaccaacgccagcgcaatcgcgcgtcagatccttgaaaaaatccccggcaacaacgacacgcacgtttcttactctcaggatcgctacatcttccatgttaaacgcaccgatggactcaccgttctctgcatggccgacgacaccgccggaaggcgaattccttttgcgtttcttgaggatattcatcagaagttcgtgcggacttacggacgcgccgttcactccgctcagccttacgggatgaacgaggagttctctagggttttgagtcagcaaatggagtattactccagtgatcctaacgccgataggatcaatcgtctcaaaggtgaaatgtctcaggtacggaatgtcatgatagaaaatattgacaaagttttagatagaggtgatcggttggaaatgctggtcgataaaactgctaatatgcaagggaaacaca

SEQ ID NO: 227509 - DNA, 455 bp, Glycine max
taagaggttagaggctggtaacctggaccccagagaactagccactgctttagagggtcagaagaaggactttccaaatggtattgatgaatgtggtgccgatgctctccgttttgcactggtctcgtacacagctcagtctgacaaaattaacctagatattcaaagggtggttgggtatcgccaatggtgtaataaactgtggaatgcagtacgatttgctatgagcaagcttggggatgattatatccctcctgctaatttgattccagaggttctcccatttagctgccagtggatactctcagtgttaaataaaaccatatccaagacagtgaattcacttgaatcatttgatttctcacaagctaccactgctgtgtattcttggtggcagtatcaattgtgtgatgtatttatcgaggtgattaagccttactttactggtaatgatc

SEQ ID NO: 227510 - DNA, 455 bp, Glycine max
ctctctctcaccatagccttcctagaacgaaaaagaaatgaagagctattttccctcgccaaagaagaagaatcatacagtggccgatcaacttaccgatgaacagatctacgagttcaaggaagccttcagcttgttcgacaaggacggcgatggttgcatcacaaccgaggagcttggaactgttatgcgttcattggggcaaaacccaactgaggcggagcttcaggacatgatcaatgaagtggatgctgatgggaatggtaccattgacttccctgagttcctaaatctcatggccaggaacatgaaggacactgattctgaggaggagctgaaagaggcatttcgggttttcgacaggaccagaatgggttcatctctgctggtgagctccgccatgtgatgaccaaccttggggagaagctcaccgatgaataggttgatgagatgat

SEQ ID NO: 227511 - DNA, 523 bp, Glycine max
ctgatctgagagaatggctcctcggtctagcagcaaggacgcccaagaccttttccgcgctctttggtctgcttatgctgcaacccccactaatctcaagatcattgatctctatgtcatctatgccgtattcaccgctttcatccaggttgtttacatggctttggttggatcatttccatttaactccttcctatcaggagtactttcttgtgtaggaactgctgttcttgctgtttgtctcaggatccaagtgaataaagagaataaggaattcaaggatcttgcacctgagcgcgcttttgcggattttgttctctgtaatttggtgcttcatttggtgatcatgaacttccttggttaaattgggtttgtgtggcggttgttgtttctgattgaacccttggataataaaaattaaatagtagtatacctagacttttgtaatagtatttatagacagtagccggcattctactaattgctttagctttatgttgattacccccaccccccatttttg

SEQ ID NO: 227512 - DNA, 508 bp, Glycine max
ccgttcgcaacctcgccctcaaaattcccgtcgcttccaaacccgcgcgctccgttgttcatccttcttcttctccctgtttctgcaaaatccagctcaagaattttcctcttcaatccgccgtcgttcccttcattcctccggattccctcttccctgactccctggtccatcctatcgctgctactttccacctcagcaagtccgatctcgacaagctcgccggcaaatccatcttctccgccaagctctgcctcaaaatctctatctacaccggccgtcgcggctccacctgcggcgtcagctccgggagactcctcggcagagtttccgttcccttggatctcaccggaacggtagccaaaaccacagtgttccacaatggatggattaggataggaaaagacgccaaaggctcttccgctcagttccatttgaatgttaaagccgaacccgatcctcgattcgtcttccagttcgacggcgaacctgaatgcagtcctcaggt

SEQ ID NO: 227513 - DNA, 450 bp, Glycine max
atcttaaacaacttggacagaagaaaacttctccaacaaatggctagagtagcaggcatttttctgtgcctcctgattttagtcatggatgttgcagctgggattcttggcttcgaggctgaaatagcacaaaacaaggttaagcacttaagattgtggatatttgagtgtagagagccaagtcatcaagccttcatgttagggttgggtgcagcagtgcttttgggactagcccatgctatagccaatttgcttggtggctgcaattgcatttgttctcaacaagagtttgagaaggcttcctccaataggcaactctcaactgcttgccttattttaacttgggttgtgctggccattggattgtccatgctggtgatagggaccatgtcaaacaataggtcagatggttcctgtggtttctcacaccatcacttcctgtccattggt

SEQ ID NO: 227514 - DNA, 516 bp, Glycine max
atcttaaacaacttggacagaataaaactattccaacaaagggctagaggagcaggcattcctctgcgcctcctgagggcaggcatggatgacgcaccagcaatccttggctagaacgttgaaatagcacagaacaaggttaagcacttaaaatagtggatatctgagtgcatgagagccacatcatcaagccttcatgtgccggttggctgcagcagtgcttgagggactagaccatgctatagacaatacgctaggtggctgcgactgcatttgctctcaacaggagttagagaacgctgtctccaataggcaactctcaactgatggccttaatacaacttgggttgcgctggccattggattgtccatgctggtgatagggaccatgtcaaacaataggtcacatggtgcctgtggtgtctcacaccatcacttcctgtgcatggtgggaattggtgttttggtcatggcctattctgtattgcatattacggttctgccactgcctctatg

SEQ ID NO: 227515 - DNA, 435 bp, Glycine max
  unsure (1)..(435): unsure at all n locations
tgaggaggtaaagaagattgttactactttgaatgaggctaaagtccctggagaagatgtcgtagaagttgttgtgagccctccttttgtgttccttcctgttgtaaaaagtttgctgcgccctgatttccatgtttcggcacaaaactgttgggttcgcaaaggtggtgcttataccggtgaggttagtgctgaaatgcttgttaatttgggaattccttgggttattattggtcactctgaacggaggcagcttttaaatgaatcaaacgagtttgtgggagataaagttgcctatgcacttaacaaggtctaaaagttattgcatgcattggggagactctcgacagcgtgaagctggtacaacaacggctgttgtttctgagcanacaaaagcaattgcagctaaaatatcaaattgggacaatgttgttt

SEQ ID NO: 227516 - DNA, 527 bp, Glycine max
  unsure (1)..(527): unsure at all n locations
aagaaatgctgctaagttgaatacttcagtggaggcagagcttcacatgccaaggcctcccaacaagccacgacgcttcgccttttctcaactttcatcttcaacaaggtcattcagtgagatagagttgctcggcagtgataatagaggagagtactacagagggaagctttctaatggcagccaggtggctgtgaaaaggttctcagctcagtttctcagcacacatggatcggacaagaagagattgttgaaggaaatcaaaggcgttagccacgttcgccacccgaatttgcttctggttagaggggtggtgtcaagacaaccatgaaatcatggtggtctatgactttgtccccaatggcagcctagacaaatggctattcggggccggtgttcttccgtggactcgacgtttcaaagttattaaagatgtagctgatggcttgagcttcctccacactaaacaactagcccacaagaacttgaaatgcagcagtgtgtttctagatgtcaatntcagagct

SEQ ID NO: 227517 - DNA, 473 bp, Glycine max
gaaccaaaccaaaccaaagcatgccatcattcatggctttcctttcacatccttatttctttgcagctttgactgcatctttgactcttttggtggtccaacttctgttcagaaaactgaacaaaaggcatagtacaaagaagtaccaccctgttgctggcaccatcttcaatcagatgctcaacttcaacaggctgcaccattatatgactgattttgctgccaagcacaggactaacggctgctcaaccctttcagatatgagggttacaccactgagccaactaatgttgagtatatactcaaaaccaattttgagaattatggaaagggcttatacaactaccacaatttgaaggatttactaagtgatgggatcttcactgttgatggcgagaaatggcgggaacaaaggaagatatcaagtcatgaattctccaccaagatgtgaagggacctcaccatttcaatat

SEQ ID NO: 227518 - DNA, 458 bp, Glycine max
cttccagacagcagcagcaacaacaaacaaactctttctggattcagtttttgatgtgaaaatggcagtgactcttacatcaacactctttctggctttgctatttgctgcttcagcttttgctgctcttcagcctagagtacctgaagcttacctccaaaatgggaactttgaggagcagccaaaccctaaatacctgaagaaaacaaagctctttggtaaatacgctttgcctaaatgggagatcaatggtctggttgagtatgtctctgggggtccccaacctggaggcatgttcttcccagtgactcatggaatccatgctgtgaggcttggcaatgatgcctcaatctcccaaagcatcaaggtcaaacccggtcaactgtatgctctaattcttgggcctcaagactcgtgcgcaggatgaaagtttgaggatctctgtgccttcacagact

SEQ ID NO: 227519 - DNA, 522 bp, Glycine max
ccgtgaacaagggaagaaggtcttggaagctagggtaatctatgacagggaaagtggacgatctagaggctttggattcgtgactttcggtagccctgatgaggtcaaaagtgcaattcagtccttagatggtgtggacttgaatggcagagctatacgagtctcattagcagattccaagcccaagcggttctgaagcttttcatctatacccgagagaggatttcggtagttgggacttgggagttatacagctgcaagatgtcattggcaatcagtttggacaagaaatacacttacatgcattgagactagatgtacacacagtttcaatatctgacagaggagaatatatcagtgtctcttgaagtttaaatgtatgttccaaatttgattgttgtcatttgtaactgatttgtagtccgtattttcactatagaagtagatgtctcacatatttattggttaccccgttccacattgttgtggaagattttataattgcaatgtgcctggaaaata

SEQ ID NO: 227520 - DNA, 397 bp, Glycine max
ggaataatagtgtgttttatttgtgttttataaaaaaaaaaaaaaaaaaaaaaaaagagagatgagggcctgcctgctcataatgaacgtgaccacccggcattcaattgctgtcctggtcctgacggaagcgcgggggctcctatgctgagacttatctcagctcgacgtgaggatggtcctgcctgttgtctgtgacaaaatgatcctggatcacttgctacacatggttcgatcctggggggtaccaagtacatgcctgtggcgcctagatgactggtgctactcttcttagtaggaatgggcctactggcctttttgcaatcaggaaccctgccggcccggctgttgtcatgaatgatgcaccacccgctgcgaggcagtgttgcatttgggc

SEQ ID NO: 227521 - DNA, 516 bp, Glycine max
taatatttttctcactgtcttgtctctccagagaactgtatagagagagatggcagctgcaacatctggtgctgtgttaaatgggttgggatcttccttcttgagtggaggaaacaggagccaaacccttctggccactgctattggaggcaaagttggtgctgctgctgttactgttagtcctagaagactcattgtggtagctgctgctgcaccaaagaagtcatggctccctggtgtcagaggtggtggcaacctcgtcgacccagaatggcttgatggatcgctaccaggtgactatggctttgacccactaggccttgggaaggacccagcattcctcaaatggtacagagaagctgagctgattcatgggagatgggcaatggctgcagttctaggaatctttgtgggccaggcatggagtggagttccatggtttgaagctggagctgacccaaatgcaattgctcctttctcctttggtactcttctgggaacccagttgattctcat

SEQ ID NO: 227522 - DNA, 546 bp, Glycine max
  unsure (1)..(546): unsure at all n locations
agagtcttcagtttctcctcgttgttcttcgctttcctgttttcaatttcgattctttcgttaatttaataagatgtttgggagggcaccgaagaagagcgataatacgaggtactacgaaatcctcggcgtctccaagaacgcttcgcaggatgatctgaagaaggcttacaagaaagccgccattaagaatcaccccgacaagggcggtgatcccgagaagtttaaagagctggcgcaagcttatgaggttctgagtgaccctgagaagcgtgagatatatgatcagtatggtgaagatgcgcttaaggaaggaatgggtggtggcggtggccatgatccatttgatatcttttcatctttctttggcggtgggagtccctttggatcaggtggaagtagtctaggtaggaggcagaggcgcggagaagacgtggttcaccctctcaaggtctctttggaggacctttatcttggaacttccaagaagctctccctctccagaaatgttatatgctccaagtgcangtggcagggttctaagtc

SEQ ID NO: 227523 - DNA, 505 bp, Glycine max
gtttggagattcaatacattacattacccctcttatatataacatataacttgttacctaggttttcctaccttctttatctctcaaaagagagacacaacaaaaggaaccagagtggattaattagggacatgagaacaaggagaggagcgtgttactctggagtagtctcaaggatgtgttccgatgcgagggtttccaagaaaaaaaacaaggatctgcacatgcacatgcatatgcatatgcatgtccccgccggagactccattatttacagccggaaaaggcagaagaaaacgccggagaaaaccgccggcgctgattacgaatttttcgagtctttgccggacgaactcgtaatctccatcttctgcaaacttagttccaccgccactaaaccttccgatttcgtcaatattttaatcacgtgcaaaagattaaacagattagcacttcattcgcttgtattatccaaagcctcgcccgaaactttcactattaaagc

SEQ ID NO: 227524 - DNA, 484 bp, Glycine max
  unsure (1)..(484): unsure at all n locations
aagctcatgtcctccactttcctggtcgccctttgccaagccattgacttgaggcatttggaggagaatttgaagaacacggtcaagaacgttgtgagtcaagttgctaagaggactctcaccacaggtgtcaatggagagcttcacccttcaaggttttgtgagaaggacttgctcaaggttgttgatagggagtacacatttgcatacattgatgacccctgcagtggaacataccctntgatgcaaaagctaaggcangtgcttgtggactatgcattgggcaatggagagaacgagaggaacacaaccccttcattcttccaaaagattgcaacatttgaggaagagttgaagacccttttgcctaaggaagtggaaggtgcaagagttgcatatgagaatgaccaatgtgcaattccaaacaagatcaaggaatgcaggtcttaccccttgtacanngttgtgagagaggagttgggga

SEQ ID NO: 227525 - DNA, 436 bp, Glycine max
aacaatttcgggaatccgctggctatgactgcagttgtggtcgtcccattgggccttctcttcttcgcttccggcctcatcgttaacctcattcaggcaatatgctacgtggttgtgcggccggtgtcaaagaatttgtaccggcggatgaacagggtggtggctgaactgctgtggctggagctcgtttggattattgattggtgggctggtgttaaggtccaagtattcacagatcctgaaacctttcattcaatgggtaaagagcatgctcttgtcatatccaatcacagaagtgacattgattggcttgttggatgggttttagctcagcgttcaggttgccttggcagcacacttgctgtgatgaagaaatcttcaaagtttctaccggtcattggttggtcaatgtggttgtctgaatatctttttctgg

SEQ ID NO: 227526 - DNA, 488 bp, Glycine max
atcattttccaaacgagcatcttcgtagtttcttaagtcaagagaagaagtgaagtgctgcttcaatggcttcaagtcaggaagaggtgatccttttgggggttattggaagcccatttctgcacagggtgcatattgctctcaaattgaagggagttgaatacatatatttggaagatgatttgaacaacaagagtgatttgctcctcaagtataacccagtttataaaatgattccagtgtttgttcacaatgaaaagcccatatccgagtcccttgtgattgttgagtacatcgatgacacatggaaaaacaaccccatcttgccttctgatccttaccatagagccttggctcgtttctgggccaagttcattgatgacaagtgcgtggctctagcagcgaaatctgtttttattgttgatgagaaagagaaagagaaggcaaaagatgaattatttgaggctctgaattatcttgagaatgag

SEQ ID NO: 227527 - DNA, 514 bp, Glycine max
ctgcaattgagcagaggagccatggccaaaatcgcacttggaagcacccgagaggccactcagccagactgcattcaggccctcatcgttgaattcatagccaccttcctctttgtctttgttggcgttggttcttccatggtcgttgacaagcttggtggggatgcactagtgggattgtttgctgtggccgtggcacatgcacttgtggtggctgtaatgatctccgccgcccacatttccggtggccacctcaaccccgccgtcacccttggtctactcgccggtggtcacatcaccatctttcgttccatgctctattggattgatcaattagtagcagccgcaacagcttcttatctcctttactacctctcaggaggacaggcaactccagttcatacgctggccagtggagtggggtatggtcaaggagtagtttgggagattgtgttgacgttttctatggtgatcactgtgtatgcgaccatggtggatcccaagaagggagcac

SEQ ID NO: 227528 - DNA, 359 bp, Glycine max
catacatcaacttgggaggttaaagagacggcaacgttgtgctggccaccttgaccgagccagagcttcgtgttggccctctattctgccctgtagaactaatcccagtcacaacagaaataatcaatggcaccgaaacagaccaaggctgagaagaatatcgcttacgatgcgaagctgtgcgacctaatggaggagtacagaccaatactactggtacactccgacaacgtgggatcgaaccagctacagaacattcgcatgggtctccgcggcgactctgttgtcctgatggggaagaacaccatgatgaagcgctctgtcaggatgcacgctgaaaaaaccggaaacaatgccta

SEQ ID NO: 227529 - DNA, 436 bp, Glycine max
caacaacaccatactcaaaatctccaaactcgcgatcctactcgatatgctcgcttgagtctgcaacgccgatatgtcggactccaccgccaaacccctcgaccagcacgccaccacgggctctgaccctactgcgccagcggttcacatcgtgtgcaccgagagaccacagaacgaggagcctgaggcctaccacatcagaaccctcacttgaggccttggcagtgaggaggctgcaaaggaagctgtggagtatagttacaagtctgcagccagagggtgctcagctaagcttactccggagcaggtggaacagatttcaaagctaccaggtgtgcttgaaggagctcctagccggacatatcagctccatggaccaaataacctgcagtagagaatgttccctaaagttggattcgggtaacccggatctatg

SEQ ID NO: 227530 - DNA, 238 bp, Glycine max
agctttccgatcatcactgtatgacgtcctcctatctttgggggggggggggggggggggggggggggggggggggggggggggggggggggggggggggggggggggggggggggggggggggggggcccccaaaattccgcggggaggcggccaaagtagtttaagtttaagggggggttatggtccagattttgacagggaacgggttgtaaaggccctttgaaaaaaatttggg

SEQ ID NO: 227531 - DNA, 612 bp, Glycine max
  unsure (1)..(612): unsure at all n locations
ccgcaccagtttcaccgcacgaatatcttgttgtttggagcgatccgagaaaaactctgtaaacatgttggtttaccaggacctccttacaggtgatgagcttctctctgactccttccgttacaaggaaattgagaatggaatgctgtgggaagttgaggggaagtgggttgttaaaggagcagttgatgtagacattggtgcaaacccttctgctgagggtggaggagaagatgagggagttgatgatgcagctgttaaggttgttgacattgttgacacattcagacttcaggagcaacccgcattcgataagaagcagtttgttaccttcatgaagaggtttatcaagaatttgactcccaagctcgatgcagagcaacaggagttgtttaagacgcacattgagggagcaactaaatacctgctctctaagattaaagatttccaattttttgttggtgagaacatggatgatgatgctngcttggtctttgctactacaaggacggcgctgctgaaccaacattcctgtactttgcatatgccttaaaggaggtcaagtgctcagtgacttaatgtcccggctatctactaattttattagttttt

SEQ ID NO: 227532 - DNA, 505 bp, Glycine max
gctgattgtggccttcgatcccttgttgtttcaaacaaatgaattgaacttgtgattgtgtgaatacaccccttcttcaaatgatggttcttgtggcaaattagtttgattcacaaagcgccacaaaaagcaaagagagggcatgggcaattagggggttggttgcctctatttgacccaccaaggcatgacattgccgagaccataagacgtgctattatgactgttgtcttattctaggcgctgctcttacatcgaatttcttcacggacatatttggcgtgagatctatcaagaacaaccaccgtgagctcataacaggtgtttatcttcaagtattgaaggtcaggctttcattgctacacagtcaaggagctggacttacattgaaatgggtatgctctcctaatattcttactcttgcatagaaaccacacattaatgattgctgatattttgttgtatggatcattttttagatagccatgatcatagctgcgtatgt

SEQ ID NO: 227533 - DNA, 540 bp, Glycine max
  unsure (1)..(540): unsure at all n locations
aacaacaagcagatcaatctctctctctctctcaaccataatagtcatgggtttgaaggaggattttgagcagtatgctgagaaagcaaagactttgccaccgactcaatcaaacgaagacttgcttatcctttatggattgtacaaacaggccaccgttggacctgtcaacaccagccgtcctggaatgttcaacatgagggacagagctaaatgggatgcatggaaggctgttgaagggaaatccaaggacgaagcagtgggtgattacatcattaaggtgaaacagctgctggaagcagctggcttgcctgcttgataacattgtcatgccttgctttctgattctgtgctagaagttcacaacagtttggaaataaacaattgcagtgtttgaagcttttattatcataatcatatttatttctaatgatttagacatgttgcttttgagtttagttatctgtatcactgttattggaaatgcctgtagacagatgctgaggatctganaatttctgtctagtataattaaaacta

SEQ ID NO: 227534 - DNA, 475 bp, Glycine max
ctcacgccacccaaagttgtctttcgacctttctctctcaaaacctttgcttttgcgttggctatatatatataaaactaacttccccaaaacccaatcatatatcatttcatttcttttttctcgtccatccgtaaccatgtctcagactgttgtcctcaaagttggtatgtcatgtgaaggatgtgttggagcagtgaagagagttttaggaaaattggatggtgtggaatcatatgacattgatttgaaggaacagaaggtggtagtgaagggaaatgtccagccagacacagttcttgcgaccgtttccaaaactgggaagaagactaccttctgggaaggtgaaacagcagcatccgaaactagcacagcaactgcctagaacatttcgctctattatgtgcagaagaagtagctgcgtaaatcaaatactattttatggactggaaataacgatgggactggttatctg

SEQ ID NO: 227535 - DNA, 530 bp, Glycine max
gaggaaagcataatcaaatcaaccatggctaccctcattgctcccatcaccttttcgcctggtttagatgcagaagctcttagaaaagctttccaaggatgggggactgatgagaagaccgttatagcaatattgggtcacagaaatgttcatcagaggcaacaaatcagaaagatttatgaggaaatttaccaagaggacctcatcaaacgcctagagtctgagctctctggtgactttgagagagctgtgtaccgttggatgctggaacctgcaagatcgtgatgctgttttggccaatgttgccatcaagaatggcagcaaaggttaccacgtgattgtggaaattgcttgtgtgctttcagctgaagaggtcttggcagggaagcgtgcctatacaaccgttacagagatctttggagaagatgtagctactaataccactggtgacatatcccagctgttggttgggttggtgaccgcatataggtatggtggagatgagatcaatgcataattggccaaaactg

SEQ ID NO: 227536 - DNA, 589 bp, Glycine max
gtagttttggttatggccttttgttgcctacagtggatggacctgtggaaaaatatttagcttcaaggcacttagcaagcaacaagtcttcaatcttccttatccagtaggcaccaccattgctttgtaagtaaggctaaataaaacaatcttatcgttttgaaatcaatctcacccttattttaggttttcctaaatttttttccaacacattcggtctaatttccttccctatagagtcggataaatagaagcaactcattatatacgtagatatattattattcattcacaaacgatcgtatataataacaacttttatattaggcaaaatatgattttaatccctggtctaaattttttgtttaagtttgcccttcaagttttaaaaaataatatttaaatctcttaaaaaatatttttaggatacatatttactattctggggctactcacccccagttaagaagggtggtcctcatattaatatgatggcaaacattcatattgaaagattaatattaatatataatgaataaaattaattttcagatctggaaaatcagtgattaggaggaattaattaata

SEQ ID NO: 227537 - DNA, 431 bp, Glycine max
cttccaattacaacacaatcagtctgagattcgccaccgaaaaacctctcaccatggtttctcgccatttggtttcgctcttcctctgtttcctctgtttcgagatctctgtttcatcaattcgattgcccggtttggaccaagacgccaaggccacgcatggatcggtgcttaggttgaacagaggaggctcttcagtgaagtttgatcccacacgggtcactcagctctcgtggagtcccagggcttttctctacaagggctttttatccgatgaagaatgtgatcatttgataactctggccaaggacaagctggagaagtctatggtggcagataacgagtctggtaaaagcataatgagtgaagtcagaacgagttctgggatgtttctcaacaaggcacaggatgaaataggtgctggtattgaa

SEQ ID NO: 227538 - DNA, 353 bp, Glycine max
cgctacaagcagatcaatctatctttctttcttaaccatcatggttatggtatggtaggaggattttgctcactttgcccttaaatcggacactacgactgcgcctcaatcagaccacgacttgctcatcctttatggatggaacaaactggccaccgcagggcctggcatcaccacccgttctgtaatggtgcacgtgtgcgacagagctaaacgcgatgcatcgactgctgatggatgcaaattcagcgtccaaacgatgcgtgattgcatcagtaaaggcaaacagatggtgacagcgaatcgctcgcctgctagacaacatggacatgccgtgcattgtgagactgggc

SEQ ID NO: 227539 - DNA, 461 bp, Glycine max
gtttatttgaaattaacaagtagcaaagatgtttggaatcatcggaggaaacaagggtcacaagataaaggggaacttggtgattatgcgaaagaatgtgttggatatcaacagcattaccagtgttaagggtgtcatcggaaccggcattaacatcattggaggagtcgtcgacaccgttactgctttggcgtcccacatctccatccagctcattagtgccaccaaggctgatggacatgggaaaggaaaagttggaaaggctacaaatttaagaggacaagtgtcgttaccaaccttgggagctggcgaagatgcataccatgttcattttgaatgggacagtgacttcggaattcccggtgcattttacattaagaacttcatgcaagttgagttctatctcaagtctctaactctcgaagacattcgcaaccacggaaccattcacttcgtatgca

SEQ ID NO: 227540 - DNA, 464 bp, Glycine max
atctcccctccggcggccacctcacccacggctactacacctccggcggcaagaagatctccgccacctccatttacttcgagagcctcccttacaaagtaaactccaccaccggctacatcgactacgaccgcttggaggaaaaagccctagacttcaggcccaaattgataatctgcggtggcagcgcttaccctcgcgattgggactacaaacgcttcagggaaattgcggataagtgcggggcattgcttctctgcgacatggcgcacactagcgggcctgtgggccggcaggaagtggaccgcccctttcagtattgggacctttgtgaccaccaccacgcataaaagctggcggggtccacggccggggatgatcttttaccggaagggcccgaagccgccgaagaaggggcagccggagaacgcggtttatgatttcgaggacaagatcaactttgc

SEQ ID NO: 227541 - DNA, 492 bp, Glycine max
  unsure (1)..(492): unsure at all n locations
cagagtagtgctattagaggtttttggggaaaacatcttttccaaatttgtgctctctggaagtttttggggaaaacatccagagtagtgctattagaggtggtgcaagtctcaatgaatccataccattgagtaagcaggaggatcttattgtctggatgcgtactgctgctttgccaacttttaggaagttgtatggaaagatagaggtggatctcaatgcaggtgatcaaataaatgtaacactgcaaaataactacaacacatacagctttaatggcaagaaaaagcttgttctatcaactactagctggcttggtgggaagaatgacttcctgggcattgcctatctcactgttggagggttgtgtttctttttggcattggctattaccgttgtatattttgtcaagccaaggcaacttggagatccctcatatttgtcatggaataggaatccaggagggcactgagcanagaaactcactatgc

SEQ ID NO: 227542 - DNA, 531 bp, Glycine max
  unsure (1)..(531): unsure at all n locations
caacattttactgggtatataagtggagagtgtaactgaaattatgtggaggtgcatcaatggaagaattgccagaagatttttatccacttcttctgccagtgcccgtggttggtgggaccatgtaaggccagcaccgaaggaccccattgttcgtgtgaacgaggcatttctagctgacccttttccccataagatcaatcttggaataggtacttataagggtgatgatggcaaagctttcattcctcaaagcgttcgtgaggcagaaacaaagattcagagatgtaaattggaggagtcaaacgcttccgcagtcagatcaaaatttgttcaggagtgtgtgagattagcatatgggaatgattcaaatgttgtaagagaaggattgtttgcaggagttccaactctgtctggaaccngtgcatgtcggctttttgctgaatttcaacggcatttctatcccgattctcaaatgtatctaccagatcctacttggtcaaatgaccacaatatatggagacaggctga

SEQ ID NO: 227543 - DNA, 503 bp, Glycine max
  unsure (1)..(503): unsure at all n locations
cacacacacactctccccgaggtttgagagggtactggcatccaaaaaatgggttctaaaactaatgcttcgggccatagagcacgaaggccgctgtcaatatttgctgtgcttggtctttgctgtttcttttatcttttgggagcatggcaaagaagtggatctgggaagggagataaccttgcattgaaagttaataacctgatgactgactgcactgttttacccaatttgagttttgaatctcatcacaatgatgtagaaattgtcgaacctgctgagccaaaagctaaagagttcaagccgtgtgatgtgaaatatactgattatacaccttgccaagagcaagaccgagcaatgacatttcccagagagaatatgatctatagagaaaggcattgtcccgctgaaaaggagaaattgcgctgnctcattccagcccccgagggtacacaactccttgtgcgtggcctaaaagccgtgattatgcctactatgctaat

SEQ ID NO: 227544 - DNA, 396 bp, Glycine max
atttgggggcgagtgttgtgcgaagtgagggagatgcagtagaatagtaatagtggtaacaaaaggcaacagagaacaacaacctcgccgtggcggaggcgctggtgaaacagatcggcttcctcgccttgtcacaggtcggagctatgaggaaagtcgcaacctacttcgccgaagcgctcgcgaggcgaatctacagagtcttccctcagcagcactccctctcggattctctacagattcacttctacgaaacttgtgcttaccttaagttcgcgcacttcaccgcaaaccaggcgattctcgaagcgtttcaagggaaaaatcgcgttcacgtgattgatttcggaatcaaccaggggatgcagtggccggcactgatgcaagcccttgcgc

SEQ ID NO: 227545 - DNA, 388 bp, Glycine max
gcaagatgatttatgccagctccaaagatagattcaagagggagcttgatggaattcagattgagctgcaagcaactgatcctactgagatgggtcttgatgtgttcaaaagccgtgccaattaaatgattccgattattcataaataggagttgtgatggggatggtcaacttggctaatttggactcaattttccaagttttgacatgaggtctattgcagcttcaacaaagcttctcttgttccagtgtatcttgtggtttgcgacatataacccgtgtttgggtgtaatcttagtcctattcctagtagttaattttgtaactgttctttgtgtgattgaacgaaaatttgggaccaggtattgatgtaatgttgccagttgcc

SEQ ID NO: 227546 - DNA, 388 bp, Glycine max
ggcaactggcaacattacatcaatacctggtcccaaattttcgttcaatcacacaaagaacagttacaaaattaactactaggaataggactaagattacacccaaacacgggttatatgtcgcaaaccacaagatacactggaacaagagaagctttgttgaagctgcaatagacctcatgtcaaaacttggaaaattgagtccaaattagccaagttgaccatccccatcacaactcctatttatgaataatcggaatcatttaattggcacgggttttgaacacatcaagacccatctcagtaggatcagttgcttgcagctcaatctgaattccatcaagctccctcttgaatctatctttggagctggcataaatcatcttgc

SEQ ID NO: 227547 - DNA, 347 bp, Glycine max
gttctagatcgcgagcggccgccctttattttttctttttttttttttttttgattatttcctttttttctattttctttcatagctttcttttctaatttaattcttccttctttttttttgactacaaccgttcggaggaaacagccctagactctaggcccacaaggatcatctgaggaggacactctaacccgcgggattgggactactaacgcttcacggaaattgcgaataattgcggggcattgctattctgcgaccgcgccccacctaggggccgagcgtccatcaagaagggaacagccgctttgagtgttgccaccatgtgaccaccaccccgcata

SEQ ID NO: 227548 - DNA, 471 bp, Glycine max
  unsure (1)..(471): unsure at all n locations
gcgaaacgcatagaatcgaaagaggggaaaagaaaaagaaaagttagggttagggattttgagagatggcatcgactaagaagatcaccctgaagagttcggacggtgaggccttcgaggtggaggaggcggtggcgctggagtcgcagacgatcaagcacatgatcgaggacgactgcgccgacagtggaatccctctccccaatgtcaccagcaagattctggcgaaggttatcgagtactgcaagaagcacgttgaggcgaacagtgctgatgagaagcccagtgaggatgtgctcaaggcttgggacgtggatttcgtcaacgttgatcaggccactctcttcgatctcattctggctgcaaactacttgaacatcaagagccttttggaccttacttgccagacagtagcagacatgatcaggggaaagactcctgaggaantcncaagacattcacatcaagaat

SEQ ID NO: 227549 - DNA, 507 bp, Glycine max
taagacattttgaggtcaagcagatgataaaaaaaatatctaggcatgcctcatcttcaaaagttacaaatttaaatgaagtgcttatatctcttattagtactattgtatgtagaattgttttggggagaaggtatgaagaggagggatctgaaggtagcagattccataagttgttcaatgagtgtgaagctatgttgggtaacttctttgtttcagattatattcctttcatgggttggattgataaactcaggggactggatgcacgtcttgaacgcaatttcaaggagatggataagttctaccaagaagccattgatgaacacatgaattctaagaaaaagactccagaggaagaggatttagttgatgtcttacttcaactgaaagagaacaacacgtttgccatagatctcaccaatgataacatcaaagcagtgctcttgaacttacttgtaggagctacaggtacaactgaagtcacaacaatctgggccatgactg

SEQ ID NO: 227550 - DNA, 299 bp, Glycine max
ggtatggtgatggtggagcacatggaggtggttatggtggcggccaaggaggtggagcaggtggagggtatggtgctggtggggagcatggtggtggatatggcggtggtgaaggaggtggaacaagtggagggttttggtgcaagtggagaacatggtggtggttatggtggtggccaaggatgaactaattttttaagttcttacatgagggtcattgcaactttacatagtttttctgggttcactgtattttgtggtttgcaaataaaacccctgtttgggtgtaatcttagtcc

SEQ ID NO: 227551 - DNA, 348 bp, Glycine max
ctcaaactctaaacatatttcttttatgcaaatatatataatcagaagagcaattacaagatgatagtagtttcacgataatgcaaataataattatggaaatacttttgttacataaaaatcacgagttgataacaacgtgcttagaattaatggtgatgatatgattgttacgttattaattattatgatcctgttattaatagcatacttattattcttgatacgcgaaaggggacacttgcacatctattgtgcattgaagagtagttcttagggaacatagccaccatggccaccaccacttccaccacctcctccaaaaccaccaccatgtgctccaccagc

SEQ ID NO: 227552 - DNA, 349 bp, Glycine max
aaagtaaatatcatttattcaaacctaaggaaacgcaggaacacaccatcacaaactcatgttaccctgccaataaaccatcacccctaaactccagcaccagcagcttgctcacttcaatacacaactcccagaatttcttatgttaccacgtggcaagcacgctgatgtggagccaagtgttgtgcttacacgtaggtgtaccctccattatacaaccaaagacttaagcatcatataataatatctataaagccttctaccggaatccaaggaaaaataccacaggaggctcttctacatggcatgcaaaatggtagacctgatccccacaactaggaccattttt

SEQ ID NO: 227553 - DNA, 510 bp, Glycine max
  unsure (1)..(510): unsure at all n locations
cgcgcatagtgtggtaccagcagcagagcttgtatacgtcgccgcttcagcgtagcaacatgatcattcccgagaagaaccgtaaagagatctgcaaatacctcttccaagagggagtttgctttgcgaagaaggacttcaatctggcgaagcacccggagattgatgtgccgaatctgcaggtgataaagctgatgcagagcttcaaatccagagagtacgtgagggaaacatttgcgtggatgcactattactggttcctcaccaacgatggaattgagttccttaggacttacctcaaccttgcatgcgaaattgtgcctgccactctcaagaagcaggccaagcccgccggaagaccattcggtggcccacccggtgatcgccccaggggcccacctcgctttgacggagagaggagattcngcggtgaccgtgatggatagccgggaggtgcacgcngacctggcggtgatttcngtgacaagggtggagctcctgctgactaca

SEQ ID NO: 227554 - DNA, 522 bp, Glycine max
caccactctgtgccaaaggattggtggacggaggatgtttctgatcttgacatagatcttttcaggtgcataatcatggctattagatcaacctatgtgctccctccgcagcttattggagaagctttgcatgtctatgcctgccggtggctaccgggcctcacgaagataaaaagttctggcagttcagcatctcaaacagaagaatctaaggagaaaaaccggaaaattcttgaaacaattgtgagcatgattcctgccgatagagggtctgtttcggttggcttcttgtttaggcttctcagcatttcaattcaccttggtgtctcatcggtcacaaaaacagaactaataagaagagccagcctacagtttgaagaggcaacagtgagtgacctactttacccttcaacatgctcttctgaccagaattattatgatacagagttggttctagcagtgttggaaactttcttgaagctttggaaaagaatgtcgcctggggctgtggataacagctac

SEQ ID NO: 227555 - DNA, 225 bp, Glycine max
aggatttcgatttgtggctactttggttggtgcaaccaactgccaagggttgttcattgttttctattcctttccctcgttttccgattgttacaataataataatgtaatatggttattttcagtctcaaacaaaagtaatgctgattgtgaagtataataatatatgaaattgtcatgtccattggaaaaaaaaaaaaaaaaaaaaaaaaaaaaaaaataggg

SEQ ID NO: 227556 - DNA, 412 bp, Glycine max
  unsure (1)..(412): unsure at all n locations
cttgtttggttgcacacttcaattatcttaccattattaaattctcatcatctctctcagctaaatcttcttctccaccatctcttcgcccataacctaattagtgctcaatcacaaaacatcaatttctctatgatcatgatgatgatgatgggttcaaacacaaaaccccttgtgcacctttctcttctaattttggttctcttttcttcttcaaccgaatccctcagattcgaactccaatctgggcacaccaaatgcatctccgaggacatcaagagcaattccatgaccgtgggcaagtaccaaattgttaactgcaacgagggtcagcctcttcccgattcccacagagtcaccgtcagggtgacttcgtcttatgggaacaactatcactacngngatcgcgttc

SEQ ID NO: 227557 - DNA, 487 bp, Glycine max
  unsure (1)..(487): unsure at all n locations
cttgtttggttgcacacttcaattatcttaccattattaaattctcatcatctctctcagctaaatcttcttctccaccatctcttcgcccataacctaattagtgctcaatcacaaaacatcaatttctctatgatcatgatgatgatgatgggttcaaacacaaaaccccttgtgcacctttctcttctaattttggttctcttttcttcttcaaccgaatccctcagattcgaactccaatctgggcacaccaaatgcatctccgaggacatcaagagcaattccatgaccgtgggcaagtaccaaattgttaactgcaacgagggtcagcctcttgccgattcccacagagtcaccgtcagggtgacttcgtcttatgggaacaactatcactacngngatcgcgttcagaccgggcatcttgcgtttgcggcagtggaggctggagatacatgactngcttttgggctgggatcacaaccct

SEQ ID NO: 227558 - DNA, 402 bp, Glycine max
cacagtgctcactgtgattggttacaagagccagagtgatgtaaaggctgggggtgatgtgtgtggtggagttggcattcttggcattgcttgggcctttggtggcatgatcttcattctggtgtactgcactgctgggaatctcagggggtcacataaacccagcagtgacatttgggctcttcttggctcgcaaggtgtctttgattagagcaataatgtacatggtggctcagtgcttgggagccatatgtggagttgggttggttaaggccttccaaaaggcttactacaacaggtatggtggtggggccaatgagctcagtgaagggtacagcacgggtgtggattgggtgctgagatcattgaaccttgttttggttaactgtgtctctgcactga

SEQ ID NO: 227559 - DNA, 445 bp, Glycine max
aagtaaaagcatggatttatatatatttttttccacgttgagtacaagagattaaattacctaaaagaaaatatcacacactgaaagaaaggaaagtgcttgaaaatactaaagggtatttaccaatggctcttgtcttgaaaagaacctttaatctacataataggatcaaagaaaaggttgcaataaaagcacaagcaattgccattattgacaatatttttattattcttataatttcctcttcattttgaactcatcatgaagaagaaattaaattgactcaaatagcggggttgctcctgaatgatccaagagccttagcagcacctgctctcaagatgaattggtggtagaaggctgcaatggctgctccaataaatggtccaacccaaaagatccaatggtcatcccaggccttctgttggttgtacatgacagcagc

SEQ ID NO: 227560 - DNA, 501 bp, Glycine max
  unsure (1)..(501): unsure at all n locations
cctggaattgcttttattattctaacaggactgaattttcttctctggggcagcaaaagtactggtgctattcccatttccctgtattttgagttgctcttcctctggttctgcatatcagttccacttacccctaatcggaggatttatggggacaaaagctcagcaaattgaatatcctgtgcgaactaaccagattcctagggagattcctgcacgtaaatatccgtcatggcttcttgttcttggtgcaggaactcttccatttggaacccttttcattgagcttttctttatcctttccagcatctggcttgggaggttctattatgtatttggcttcttggtggctgctcttctattgctggttattgactgagctgcagtgtcagtggtcctcacatatatgcatctttgtgtggaagatggcaacggtggtggaagtcattctttgcttcaagctctgatgctctntatgccttgctgtactccattaactac

SEQ ID NO: 227561 - DNA, 509 bp, Glycine max
gcaattacaacttcctcaagcaacttgaccaaactaaatcacatgaaacagaatgataccaaacactagttgaatgagtaaacttacgggagagacaggtagaaaggggaacaaactgtagttcgcatagcaacataaaattgagtggcaactatttactgcaatcagcaaggcatctatttcaccactcaacatgctgcaaatcaagctacaaaaagaattaagcaaaagttacactatttaagaaaaattcctcttccagcatgccttttgctttagctggtgagagatagcaaagcaaacttcaatctatctttactgatgagaacaagtagtgcacaaagtaaaatgacataaggaagccaacggttccagttgacaacatgattgcaattgccatgagcagggaatagccgagataaagtatagctgagacaggtccactcaaactctgcaggtcgaaaaccaagtagttaatggagtacaggaagacataaagagcatcagag

SEQ ID NO: 227562 - DNA, 498 bp, Glycine max
cgcaaagaaatcaaagattatggcactgctaaagctattgaaggcgatttcaagcctggccaaagttgcttaatcattgaggatttggttaccagtggcacgtcagttttggaaactgcggcgccattgcgtgctgtgggattaaagatcagtgatgctgttgtgttgatcgatagagagcaaggtggcagagaaaacttggaggagaatggcatcaagctgcatgcaattattaaattgactgaaatggtgaaaattttgggcaatcacgggaagcttgatgaagagatggtaggggttgttacgaagttcttagaggataatcgtaaggttgctgctttggcaaaggtggagaagcctgtaactaaggtcaaagctttgccatttggggagagggctaagctgtcgaagaatccaatgggaaagaggttgtttgagataatggctgagaaggagagtaatctatgtttggcttgctgatgtggaactgcagctgaa

SEQ ID NO: 227563 - DNA, 423 bp, Glycine max
gaaagaactagaactagggtttcatctttgccatcagtaaacgacaatgatttacgacgttaactctcctcttttccgatccttcctcagccagaagggaggctcctctgataagaggaaatcggacgaacagaagccaaaagagcagaaacccaaagccagcgagaacaaacctataatgactgagtgataacagctgagctgcattcagttgtagaatgaaaataggtggtaggtattgtatttggtgctaaactaagatctttttggctgtgttctgaagtatatgccggcgatgttggtctttgttattgtaatggtttgattttggatatggttataacgaaaacttataatggacacaagttgaacttgatgcacgcatgacacatgcaatggaagtcactcgttaaaagttgtttg

SEQ ID NO: 227564 - DNA, 413 bp, Glycine max
atctctctctctctgtttcgctttcaccgaagaataacttgactttcccgaactccacctgagaaaaagatacccttaattcgcaggcgcgtcttgtgttggacaacaaccacaagatgattaacttcgaagaaaccgagttgcgactcggcctccctggcaacgactcagcactcaagggaagtgctgccaagagaggcttctctgaaactgcttctgttgatttgaagcttaatctttcttcttgcattaacgactctgcctcggattcaccctcatctatgtctacagagaagcccaaagagaacaagactaccactgctgaacctgctgcagctaatgatccagcaaaaccacctgcaaaggcacatgtggtgggttggccaccagttaggtcatttagaaagaacata

SEQ ID NO: 227565 - DNA, 441 bp, Glycine max
gaacccttaatcctgaagaagctgattggttttatacccctgtatacaccacttgtgacttgacaccaaatggcctccctttaccctttaagtcaccacgaatgatgagaagtgctatacagcttatttcttcaaactggccttattggaaccggacagagggggctgatcacttctttgtggttcctcatgactttggggcatgtttccattaccaggaagagaaggcaattgaaagagggattcttacactactacggcgtgctaccttggttcaaacatttggacagagaaatcatgtgtgcttgaaagagggctcgattaccatccctccgtatgctccaccacagaaaatgcatacccacctaatgcctgacaagactcccaggtccattgttgtatacttccgaggactcttttatgatgttggcaatgaccctg

SEQ ID NO: 227566 - DNA, 373 bp, Glycine max
caaacttgaacggatccatcatacacagagcccaatcgtctctcgagccctgattgaccctcagatacatggccacagaagagcccactggcggggagggacccgatcccgagcctgactgagtccatccttccccggacgagaaggaggagaccaaacctagaagccaaggctaagaaaaccaaggagcccaaacccaacaaggctctcagacctggccaccctcccactcaacctatctacgaaaagatcgttaaagatgcaaatacctcgctgaaggagaaaaccggtgcgagccaatacacgattgcaaagttcatccaaggaaagcacatgcatgatacacctgacttaatgaagcaaaaactctacc

SEQ ID NO: 227567 - DNA, 474 bp, Glycine max
gggggatgggatatcagtaacttgaacctggctgatgccatggccagggccaaggtgtttgatatcgacctgcagaaacagttgaggccgtacatggaatccatggttccactccccggaatctatgacccggatttcattgctgccaaccaaggagaccgtgccactaacgtaatcaggggcacaaagaaagaacaagttcaacaaatcatcaaagacattaaggagttcaaagaaagcactaaggttgacaaggtggttgtcctgtggacagccaacacagagaggtacagcaacgtagttgtgggactaaacgacaccatggaaaacctctttgcttccttggacaggaatgaggctgagatttccccttccaccttgtatgccattgcttgtgttatggaaaatgttcctttcatcaatggaagccctcagagcacctttgtcccaggactcattgatctggccatcaaa

SEQ ID NO: 227568 - DNA, 401 bp, Glycine max
attccattctctctgtgtatttccctacctctcccttcaagatgcagatcttcgtcaagaccctcaccggcaagaccatcacccttgaggtggaaagctctgacaccatcgacaacgtcaaggccaagatccaggacaaggaaggaatccccccggaccagcaacgtctcattttcgccggaaagcaacttgaggacggccgtacccttgctgactacaacattcagaaggagagtactcttcacctcgtcctccgtctccgtggtggcatgcagatcttcgttaagacactcaccggcaagaccataaccctagaggttgaaagctgcgacaccatcgataacgtcaaggccaagatccaggacaaggagggtatgcccccggaccagcaacgtctcatc

SEQ ID NO: 227569 - DNA, 519 bp, Glycine max
ggagttgcttagaaccgttatctctgaacatagaacccgtaaaagacttcaagagcttaaggaagcccgggctgctggttgccgcaattcagctgaagctgatagatatctggcgcaaaagagaagaagggaaagctgaagaaagtggttgtaggacaaaagaaagtgctcagggcggcccaagcaatcaaggggttcctaatgcattgatgtctccagactctgctggcaaggatttgagtggaagacctgcagggcctgctacttctagttctgtcaatgaaatggatgtgacgggatactatggggcagatttactttctgaaccggagaaacgtttatgctgtgagtaaggttgcctccagccatgtatctaaagatgcaagaacaactgtctctgcaaatacttgccggcactgtcactgcaaaatctgatgctcatcaattgttcaagatggatgccatgaaaattgacagggtgtatgatatgctcattaaaaaggggagtggttccccctg

SEQ ID NO: 227570 - DNA, 501 bp, Glycine max
tgattgacaacagccttgatgatcttatttcaattctaaaacggggaaaagtagaggaggatcttttggacattttcccccctacaaaaagatccattgaagctttctctgagcatttcaccaaggaaggattggtggccttggtggagtataatgaaaagaaaatttttgaggtgaaacttaaggaaatgaagtcttctttaacagcacagataacagaggaggctgatacatctgaagtcattgagactgtgaagctgcgagttagagatgctaaattgccggaaattgaggtggtgcggatcttgtgggatgttttaatggatgctgttcagtggtctggaaaaaatcagcaacagaatgcaaatgcagcccttcgtcaggtaaaaacttgggcagaattgttgaatacattctgcaccagcgggaaacttgagctggagctgatgtacaaagtacagatgccatgctatgaggattgctaactgatgaagcttgtcc

SEQ ID NO: 227571 - DNA, 369 bp, Glycine max
aggtttcccgtcatcactgtatgacgtcctcctatctttgggggggggtgggggggggggggggggggggtgggggggggggggtgggggggggggggggggggggggggggggggggggggggggggccccaaaggctttccctaatgccccaaagaacaagaggggggggaaatttttaaaatggcaaaaaaggcttacccctaggggcccggggaaaaaaaatatccttggccctcgggggaggagtaaaagccccactaaggggcttttttttataagggatttagggttccaaaaatttttccgggggattttggccaattggggaattaaaattggtaaccccgggtggaaaaaaaaatttta

SEQ ID NO: 227572 - DNA, 439 bp, Glycine max
gaggtgttgtagaaagtctcaaaatcattacacgtcaagcaagtttaagggtagctgagtatgcttttcactatgccaaggctcatggaagagagagggtttctgccatacacaaagccaatattatgcaaaagactgatggccttttcctcaagtgttgccgtgaggttgcagagaaatatcctgagataacttatgaggaagttgtcattgacaattgctgcatgatgcttgtgaagaatcctgcacttttcgatgtactagtgatgcctaacctttatggtgatattatcagtgacctttgtgctggcttgattggaggattgggcttaacaccaagctgcaacattggtgagggcggtattgcacttgctgaggctgtacatggttcagcacctgatattgctggaaagaatttggctaatccaactgctttact

SEQ ID NO: 227573 - DNA, 499 bp, Glycine max
  unsure (1)..(499): unsure at all n locations
gtgggtttttctagggtttggaggctatgccgaaaacgggttaaataagctcggaaaatgattctcacaaagcagtaccgatgcatacactcagctagttgtcaatgtactaaagggcatttaagtgaagatatgatattcttagtatttcataatttgaattggaatcccaagctaattgcaactctatcatgtgtgtgcaaatggtttgatgatcttgccaagcgagttctatggaaagagttttgtcgaacaagagctccgaaaatgttgtgtgatctgcaatctaatgggagccacattgttgatgggaactggagggccctagggaagcttcttatatactgttcaggatgcacanaaggtggcttgttcaatagcattcagattcctggtcactttgtttatcagacacgattttctagaacatcaggaaagagctttcttttgccacaatgcangactgatgttttgtatgtatgtgatccttgtgagcatc

SEQ ID NO: 227574 - DNA, 515 bp, Glycine max
agacaatgacattgcagctctataatatccggaaaactcgaatccctcgtgttgtcatacgtaaaattgtatcaaaacaactctgatgaattgttctgctagcattaacataattgatgacaattccatactaaataaaaaattatataataccattcccataacaaatcgttaccgcaactttatccatttatatgtctgcagcaagaaagttaccggacagtgcaaccttctcgcccaatttgaaggcaggcagtcccttgtaagggcaggtactgcacctgaaagcatcccctagcccacaattgccacaagctgattgaggattatcaatctgttctgttgtcaatcctaacttcaatactttttcctcttcttcagccctcccacaggtgcaatttttgcaggcttttcttgtgctcccaatttcacaatcaccaggtggaagctggggtttctttaaatcttcctcagtcaaaagactatcttcatcaatcagatctgaatcaaaatca

SEQ ID NO: 227575 - DNA, 486 bp, Glycine max
  unsure (1)..(486): unsure at all n locations
tctcattctccctttcctctccgaaccctcgatcactctcacgcgctcctatattcgctcctccaccgtcgctctctcgaacaaccacaacaccatcttcatcacatggcaaacgcagcatctggtatggcagtccatgatgactgcaagttgaggtttttggagctgaaggcaaaaaggacacaccgtttcatagtttttaagattgaggagcagcagaagcaggtcattgtggagaagcttggtgagcctgcccagggctatgaagatttcactgccagccttcctgctgacgagtgccgttatgctgtttatgattntgagtatctgactgaagggaatgtccctaaaagcagaatttttttcattgcgtggtcccctgacacatcaagggtgaggagcaagatgannttatgcagctccaaagacagattcaagagggagctggatggaaatcaagtagagttgcaaggcactgatcctact

SEQ ID NO: 227576 - DNA, 432 bp, Glycine max
  unsure (1)..(432): unsure at all n locations
ctcgagccgaatcggctcgagaagcagctcgaggacggccgtaccctcgccgactacaacatccagaaggagtcaacccttcaccttgtccttcgtctccgtggtggcatgcagatcttcgtcaagactctcactggcaaaaccataaccctagaggtcgaaagctctgacaccattgacaacgtcaaggccaagatccaggacaaggagggaatccccccagaccagcaacgtctcatcttcgccggaaagcaacttgaggacgggcgcaccctcgccgactacaacatgcagaaggaatcaacccttcacctcgtcctccgtctccgtggtggcatgcagatcttcgttaagaccctcanccggcagactataaccctagaagtcgagagctccgacaccatcgacaacgtcaaggctaggatccaggac

SEQ ID NO: 227577 - DNA, 427 bp, Glycine max
  unsure (1)..(427): unsure at all n locations
ctcgagccgaatcggctcgaggtgtgcatggccttgagttggcattggatgagatctcttatgatttggctatatcaagtggaaggatgactaaacctgatcctcatggtaacacatgttgcatgctacctggagcagaatttttgagctccaaattctggaggaaaacacatggccgggattcaatcacccgattctctagatcaggtggcaccccatcacttgctgccatgaactaccaagccaacagggatgctgaaaccaagttggcaaaccacagattcaggcctgatggaggcttcatcactaatccgctggcagagattcatacaaactcgaggaatttntgcacatcggagatagcttaaaagaagcagatgtgctgcacaatctagaaatgcaaattgatcatttgattctcatatca

SEQ ID NO: 227578 - DNA, 79 bp, Glycine max
aaaaaaaaaaaaaaaaaaaaaaaaaaaaaaaaaaaaaaaaaaaaaaaaaaaaaaaaaaaaaaaaaaaaaaaaaaaaagg

SEQ ID NO: 227579 - DNA, 339 bp, Glycine max
caaaactttgagctcttgcctccccctggccagtcacagattgacactagtgagaaaggagggcaatttagcttgcacatactcaagcattccaccattgtggcaaagccaaggtcattttagactccaccacatgatcatgatcatatgatcaatccccttaattttttcttttttcttttcccttttctttactctgtattgtatcaatgcttgaaaatggggttgttccaaaaatgtcatatatatttggcctgctaatgggtattgtaaatctctgaacttgaagtgatgcacggttttgagatggttttctaataaacctacacttttgtctct

SEQ ID NO: 227580 - DNA, 422 bp, Glycine max
gagatattgaaacaggaaaaccacgatattgcatataagctggaacaaagtgaactgcaagaacaattaaaaatgcagtatgaatgttcatctcctcctcctgctgttgatgacgttgaggcccatattcagaatctggaaaatcaactcaagcaacagtctgaagaattctcaaattctctggctactatcaagaaacttgaaacccaaataagcagattagaggaggaactggagaaacaagccgcaggatttgaagctgatctagatgccgtgacacgcgacaaagttgagcaggagcaaagagccatccgtgccgaagaagctttgcgaaacaccagacataaaaatgctaacactgctgagaggcttcaagaagaatttagaaggctctcaacgcaaatggcttctacatttgatgc

SEQ ID NO: 227581 - DNA, 459 bp, Glycine max
  unsure (1)..(459): unsure at all n locations
gaaacaaccaaccttttcaatgacaagaacagttacagggagctttcagagattgctgagcaagctaagagacgtgccgaggttgcaaggctcagggagcttcatactctgaaaggacatgttgaatcagtagtgaagctgaagggacttgacattgatacaatccaacagcattatacagtttaaggaatttggacaaccttcaagcagaacacactttggtgcttatgcaagaacaagaacaacaaatgtaatgaagacctaagttaatccgtctttagattaggatgaaggtccttttgtcagtcaaaatctgaatggtttactcttctattccataccaaataacgtggttgataggatttacttttcgtcttgttttgagaatgttaatgatatctaggtcactttaaggctctatatatatattnnttttttctgatgaaaaactcatatatt

SEQ ID NO: 227582 - DNA, 395 bp, Glycine max
gaaaggcaatgatacacttttgttgcatttattctacactctcttgttgtttcttggagtacgaagttcatcttcagcagggaatggaagtaacgatgtcactaaccgtaaagaagtttatatcgtgtatatgggagccgcagattcaacaaatgctgtcttccggaatgaccatgctcaggttctcaattcagtgctaagaaggaatgagaatgctctagtacggaactacaaacatggtttctcagggttcgcagctcgtctatcaaaaaaggaggcaacctcaattgctcagaaacctggtgtggtgtctggtttgcctgacccagttctgaaactgcacactacacggtcatgggatttgctcaaataccaaactcaagtcaaaattgaca

SEQ ID NO: 227583 - DNA, 423 bp, Glycine max
tccaaatccaatggcttcagagaagaaactttcgaacccaatgagggagataaaagtgcagaagctcgtcctcaatatctctgttggcgagagtggagatcgtctcaccagagccgccaaggtgttggaacaacttagtggccaaaccccagtgttttccaaagcacggtacactgttcgttcctttgggattagaagaaatgagaagattgcatgctatgtcactgtcagaggtgacaaggcaatgcaacttttggagagtggtttgaaggtgaaggaatatgaacttcttagaaggaacttcagtgatactggttgcttcggctttggtattcaggagcatatcgatttgggaatcaagtatgatccttcaactggtatttatggaatggatttctttgttgttctggagcgtcctggcta

SEQ ID NO: 227584 - DNA, 466 bp, Glycine max
aaagcattgaattcaaaaacttaagttcattccttgtgttttgctttcttcctcaaaaccaaacatgtcgaacacatgcggcaactgcgactgcgctgacaagactagctgcaccaagggaaacagctatggtgttattgtagagactgagaagagttacatcgagactgttgtcatggatgttccagcagctgagcatgatgggaagtgcaagtgtggcactaactgcacttgcacggactgcacctgtggccattaaggaatatgtatgaaaatgtaattgcatgtgtttggcaatacaaatatccaaataatgtaatcttcgtatgaataaatgtgtgtgctgttatcctacttaggtctgtgtagtcatgcagtctgaatcatttcaagttcctgtcttagttaatataacagccatggttgtggcattctatggtttattagactaaaaataagtgtaatc

SEQ ID NO: 227585 - DNA, 491 bp, Glycine max
  unsure (1)..(491): unsure at all n locations
gttgctggggatgcgtttatatttttaaggggtgagaatggggaacttcgagttggtgttaggcgtgcaatgagacaacagggtaatgttccatcatcggttatctcaagccacagtatgcatctcggtgttcttgcaactgcttggcatgccatattgactgggaccatgttcactgtgtattacaagcctaggactagtccagcagagtttattgttccctatgatcaatacatggagtctctcaaaaataattataccattggcatgcggttcaaaatgaggttcgaaggtgaagaggctccggagcaaaggtttactggtaccattgttggaattgaagatgctgatccaaaaggtggccaaagtccaaatggagaagtcttaaggttagatgggatgaaacatcaaacataccacgtcctgagagagtttcacaatggaagatagagcctgctcttgcacctnctgctctgaatccctctaccatg

SEQ ID NO: 227586 - DNA, 371 bp, Glycine max
ctgtcataccaacgagttgccagagtatgagtttgaattcgaagtttaattacaacacagagataccaacgtagcaacccgattcgttacaaaatgttacatggaattatacaggtagctattgaaacaaatatttgatttttttttttaagggcaaaatcgattgggggataatgatgtttcaatgttgttgtgccatgggtcagccaagtgagcagccaagttcttcaaaggtccagtgccgggataagctgattgttgaacacagaatcccacaaaagccaacaaagcaagacgtccattcttaagttctttgactttgtattcatggaatgttttagggtccttagagtatcccaaaggatcaaaag

SEQ ID NO: 227587 - DNA, 424 bp, Glycine max
  unsure (1)..(424): unsure at all n locations
tgcagttgctgcgtcgcaaggtaccggcggcgacggagagctatcttctcaatttccgatcactgcattggttctgttgacgagggttttgttctacttgacttgcatacttgatggcgtcaaagttgcagaagttgcagtccgcagcatgtcaagcatctcaatttgtatccagtcgtggaactaactactacaggcaattgctggaacagaacaagcaacacattcaggagcctcctacagtagagaaatgcaacctgctggcaaagcaattgttttacacccgccttgctagtattccgggtcgtaatgagtccttttggaaggaacttgattatgtcaagaatttatggaagaaccaggaagagctaaaggttgaagatgcangcattgctgctttgtttggcctggaatgctttgcatg

SEQ ID NO: 227588 - DNA, 401 bp, Glycine max
atccaaagacagtaagttagtgcaacacgagaatgtcactgttacccctcatcttggagctagcaccaaagaggcacaggagggggtagctattgaaatagctgaggctgtgctaggagcattgaaaggggaactttcagcaactgctgtcaatgctcctatggttgctcctgaggtgttgtcagaattggccccatatgtggtgctggctgagaagctggggaggctagctgtgcagttggtgtgtggaggaagtggaatcaaatctgtgaagatagtgtatcgatcagctaggggcccagatgacttggacaccagacttctgcgagccatggttacaaaaggcctgattgaaccaatatcaaacaccattgtaaaccttgtgaatgcggatttcatag

SEQ ID NO: 227589 - DNA, 359 bp, Glycine max
atcaaacaaagtttcggttattggtgttcatttttcttcctccatctttctctaaaacattaattgaactctccattccttaaattttaccaacgagctagttccgacacagacaaagcaatggcaaagactgagttagaggtgactgttgagagcaagaacaaagaactaaagcacctgggatttgtgaggattgctgctattcaaacttttgtgattgtgtcaaatctgtatgagtacgcaaagcagaattctgggcctttgagatccgctgttggaacggttgagaacactgtaaccacccgtcttggtcctgtctgaacaaattcaaggacttgcctgatgatgtcctggtttat

SEQ ID NO: 227590 - DNA, 459 bp, Glycine max
cagagcgaaagtaatttatactattcgatttcgatttcttggttgccaattgccgtgctttacaatatctaaacatttctcacaccccttagactacagaaaaaaataaaattacacaactttactcattgccttgcttctttctattcagactcagagtccatgtggcccattgctttaaaccctctgggtctttttttttctcctacctttatggatatcttcttctccctaacttcatatggttccagagtaagatcgcacaggcatgttcctggactaacgagatagagggttcgctgtatgaatatggctctctttttgggcctctgtggaagctttgaacccttcaacagcagaaaatcttcttccttctccttgatggtcaaggcaatcacgaactttggggggcacaccggcggagccactgcaccactgccggacggtgagccaccaccc

SEQ ID NO: 227591 - DNA, 551 bp, Glycine max
  unsure (1)..(551): unsure at all n locations
gctggaagtagcaagcaagttagtgcgcgcgcttgctagttaaagttttagggtattgggagagagagagagagtcgaatctgaattgagctgagcagatatggtgagaaaacatggctggcaattacctgctcacacttttcaggttgttgcgatcactgtattctgcttattggtgattgctttctatgctttccttgctcccttcatcggaggaggtcatatatgggaatacaccttcattgctgtttactctcctgtggctctcattgtgttcattctttacgtcagatgcactgcaattaaccctgcagatccgggcattatgtctaaatttgaccctagagtgggaaataagttcaattctgctcacaatttatcagggaagcatcttggttctgaacatgaacacgttgctgctagagagcaatattctccatcatctgctgcttccaaaaggtctatgacaaatatcagcaagaagagctcagtggaagatcttgacagactagatagttcagggaaagagaataaccaanactcatgtaatg

SEQ ID NO: 227592 - DNA, 393 bp, Glycine max; identical to SEQ ID NO: 208347

SEQ ID NO: 227593 - DNA, 340 bp, Glycine max
gttcaagcttgttggagatgcacctgcatagtctagtgcttaattaggttgcagaagagtgaagagtgagacagcctggctcgaaggggaaagcctaaggatatatcaaagcatgctatatgtataaaataaatgtagcttttctaccttcggtattgatatttgaaatcgtgatttggcatcttatatatgatctctgtgtttgtctattaaaaaaaaaaaaaaaaaaaaaaaaaaaaaaaaaaaaaaaaaaaaaaaaaaaaagggggggcgggcactaagagaactaggcaacccaaaaatgaattccagaccggaccctgacaagcaaaccaaaaag

SEQ ID NO: 227594 - DNA, 471 bp, Glycine max
aacctttctggctgtgttaatatgcgtttcagcactgtcactgagtccttctgttgcgggggaagggcaaaataatggccttgttatgaacttctacaaggaatcatgccctcaggctgaagacatcatcacagaacaagtcaagcttctctacaagcgccacaagaacactgctttctcctggctcaggaacatcttccatgactgtgctgttcagagttgtgatgcttcactgttgctggactccacaagaaggagcttgtctgagaaggaaacagatagaagctttgggttgagaaatttcaggtacattgagaccatcaaagaagctttggaaagagaatgccctggagttgtttcatgtgctgatatcctcgttctctctgccagagatggcattgtttcgctaggaggtccccatatccctcttaagactggaagaagggatggtagaaggagcagagctgatgt

SEQ ID NO: 227595 - DNA, 406 bp, Glycine max
  unsure (1)..(406): unsure at all n locations
cttgttatcaagagttaacaattccggatctaatgatagaactgcagagaatgagaatgatatctgcgagaacaaaccaaattctggtgcaaagctgcatcaactactggatacaaatcctagagctaatgctgtagcagctggttgaaaccagtaactgcactggctaattatgtaattttggcatattacaagcccaaaattacagcttggtgctaacagttttcagagggatggatcagctgaattttacaatctaattccatctatatagaccagaactaattctttgcttgtgagtttcttagggcataaactctgtattttactagatttcacagaattgaatgacaactttaaaagtttgtaaattgaagagtattannggattagtttagactttaag

SEQ ID NO: 227596 - DNA, 497 bp, Glycine max
tcttccaagaaggtttcccgtcatcactgtatgacgtcctccttctttgggggggggggggggggcggggggggggggggggggggggggggggcccacccggggggggccggggggggggggcgggggagcagggggggggggggcgagcagggagggggggcagcacgggaggggggaggcggcgatataaaccacccaaccccccccaaaaaaaacttttaatccaaaatattattacaccacacaaataaattaatagagcccccccccctcaaacttttcgcaaacccaaaaaaaaagcaattaatattacaaaaatgaaaaaatgccaaccccccctaaaaaaaccccccaaacaagccaaaaaaatccccaccccttttaaaaaaacctaaaacaaaaaaaacccccccccccaaaaaccccccacacccccaaaaaaccccccctttttcactcaaaaaacccccctattatcgccgaccccccccccc

SEQ ID NO: 227597 - DNA, 442 bp, Glycine max
gttttcggaaattttcctatgatcactgtatgacgtcctccttctttgggggggggggggggggggggggggggggggggggggggggggggggggggggggggggggggggggggggggggggggcaaagaggcaaaacccccataaaaattttgaagggaagggggaaaaaattaaaattaaaacctttttttggagttttaaaaataaatagcctgcgagggtaatttaaaggcgccggtagggtataaaatttaatcccagccgggtttgttggatttcatttttttagggcaataaaaaggggttccaaaggaaaaggtgaaaaactgaaatgggggggtttttaaagggtaaaacgggattttttaaagggtaaaaaacccaaaagggaataagtaagtttggggagaaattttcggggggttgggattttaaggt

SEQ ID NO: 227598 - DNA, 370 bp, Glycine max
caaaacacttcaactttaggctccatctcaaaaaaatgggtggtttagctagcaatcttcctctaattgttatggtgggtctgcaaattcattatgcagcacttgctatattcacaagagccgctttgttagatggattgagtacgacggtctttgtagtgtacaggcaaggcatagccactttggctttggcgcctatgtttttctctcctaagcggagacaatcagtgaaagattctttgggattcaggagcttctttttgatgtttgtgaccgctcttgttggagtcacagcaaatcagaatgcatactttaaaggtttattttatgcatcctctactgcagctaccgctatgagtaatctgatacc

SEQ ID NO: 227599 - DNA, 521 bp, Glycine max
gcattgagacctttgttgctgatattaatagtggaaggtgggatgcaatattgcctcaagtttctcaactcaagcttcccaggagtaagttggaggatttgtaccagcagattgtattagaaatgattgaacttcgagaactggatactgcacgtgctattttaaggcaaacacatgtgatgggtgtaatgaaacaagagcagcctgaaagatatttgcgtcttgaacatctcctagttagaacttattttgatccaaatgaggcttatgaagactcaacagaagagaagcgacgtgcacaaatagcccaagctcttgcagcagaagttactgtagtgccaccatcccgattgatggctttaattggtcaagcattaaagtggcagcagcatcaagggttactttctccatgaacgcagtttgatttgtttcgtggaacagctgctatgaaacaagatgtggatgacatgtattcaacaactctctctcacacgataatagtatgggacaaaaagtcatgc

SEQ ID NO: 227600 - DNA, 466 bp, Glycine max
ccagaaaaaaaaagatagttaaaaataaaataaatactgaagtaaaaaatgtaaattgtaaaattattttacccacaatacatgaaaattaaactcctgaatatatacattgcacaaactacacagatgttcatttatgttaacaagatagaatataaatagacttgaagcagacaagattcatggcttccacaacttcattgtgcagtcttcactaaaagttgcaacaagattcctatggggatgatgagtgacacctataactttcttctcgtggaccttcattagatgctccaatttgccagatagatagctgaagcagtatatattcctatcttcaccaacacaggaaatccattctcctttaggtgaaacacatgctgcaacaaagtttccgccttttcttttaccagatgagaagctcttcacaacctgtcctttgagtgtcatgatatatatggatgac

SEQ ID NO: 227601 - DNA, 378 bp, Glycine max
atcagatctggagcaggagaatagcgttgggagcgttcgcgtttgttctgcttttcctatcggcctcagcagacgacgtcgttgtgctctctgaagataacttcgagaaggaagttggtcaggacagaggagctctcggtgagttctatgctccttggtgtggacactgcaaaaagcttgctgcagaatatgaagagcttggtagcagcttcaagaaagccaaatctgttttaatcggcaaggctgactgtgatgagcacaagagtttgtgcagcatatatggagtctctgggtacccaacacttcagtggtttgcgagaggatctcttgaacccaaaaagtatgaagggccacgcactgctgattcacttgctgagt

SEQ ID NO: 227602 - DNA, 325 bp, Glycine max
aaagacaaaagctatcggctcccaaaattttaaacccctcaggtcaacttcaatggggagaaaaaccccatgttcggaatttttaaccccaaaagcgccatgcaagataaggtcaattgtacggactcaaattaagccctacaagtatccacgttgaatatctcccagcattttcgctatcaaagtcaaacaatccttaggagctgccattgatcaccagcttccatgagagatggttaatgatgcaccaaaaagtcaagccgcatatgtcgacaagatttttttctttagagttaactaaaccgccttggcaggactaatggac

SEQ ID NO: 227603 - DNA, 387 bp, Glycine max
gcaaagcatccttcgcttcaatctctctctctctctttgcgctttctgcaaaccgaacatttcatctccaaagggatcaacaggtcgaaggagaaatggggctgacattcacgaagcttttcagcccgcttttcgcgaagaaggaaatgcgaattctgatgggtggtcttgatgccggtgggtagaacccctttcctttccaggctcaggctgggagagatcgttactcacattcctaccattgggttccatggtgagacacggtggaacacaagaccattacctacactgtttgggatgtgtgggccacgacacgagatcgtcccttgtgggggcgctcctctcacaacactctcggggtcatatttgtggtgtacaccaatgata

SEQ ID NO: 227604 - DNA, 448 bp, Glycine max
agacaaaacctggtggcacattgaattagtatctccattacagttatgggcgttgcatccaaacccaatagaaagctcagagtattacacatcccaaaaagtaaaatcctactacagtttagcaccgagatgtcctaaaccacattacatgaacacaaattcgagttgtcttggaagaggaccaagaaataaaagctagataatgttcaaccctgcatccagaaataccaatccgcaagactcccgtctcccaaaggcattaagccttattggcaatgttgttggaaagccagtccagaccttcgtaaaggccctccccagaggttgcacaggtgctctgaatgtaccagtgacgctgtctcagagagtggagacccaacttgtcagtaatctcagcagcattcattgcattaagaagatcttgtttgtttgcaaacacaagcaatac

SEQ ID NO: 227605 - DNA, 545 bp, Glycine max
gtgccccaacctctggaatggacatcagtaatgctggcactgctaatacagtcagaacctgtcctgtttgtcgcaaactatcatattttgtcattccaagtggtatttggtattctactaaggaagaaaagcaggaaaattattgacaactacaaggcaaactgcaaactaattgattgcaagcattttaactttggaaatgggaattgtccatttggggctagttgcttctacaagcatacagtgaagcccggctcttacacatggatacatcacaggccaccacctcaacgtagacagaaccattttgatgtgcatgacatgttgaacatgctccaggatgttgacttaacaagtgcagaatatttttccatcatgagggactcggacctttatgatgatatggatccattcgagatgatggtatctgataggcttgctggtgattcaggtccttgtttaggtccttttgattctgatgaggaggactcggatattcttcagatggctgcattgtcagaaagtgctggcttctggtgtggatg

SEQ ID NO: 227606 - DNA, 556 bp, Glycine max
  unsure (1)..(556): unsure at all n locations
gagagagagagaaaagcgtgaatcatgtcggacgaagagcatcacttcgattctcaggcggatgcgggagcgtccaagacgtatcctcagcaggctggtaccattcgcaagaatggctacatcgtcatcaaatccaggccttgcaaggttgtagaggtctctacgtcaaagacaggcaagcatggacatgcaaagtgtcactttgttgcaattgatatttttaatgggaaaaagcttgaagatattgttccatcatcccacaactgtgatgttccacatgtgaatcgcactgactatcagcttattgatatctctgaagacggctttgtgagtctgttgactgataatggaaataccaaggatgatctgaagcttcctactgatgaggcattgcttgctcagattaaagatggattttctgaaggaaaagatcttgtggtttctgttatgtctgcaatgggagaagacagatctgttcactgaaggacatcngtcccaaaaattaatatgatgctatggctgtagctatagctgatagcacgctttttcttctatg

SEQ ID NO: 227607 - DNA, 313 bp, Glycine max
tttcactttaccaactcctaacaattgctctctgattacttcttcaccgcatcaatggagttggacggcgttctcctcggcatgtgcaaccctgttctcgacatctctgccgtcggcgacgacgctttcttgcacaaatacggcatcaagttgaacgatgcgattctcgctgcagataagcacagacctatgtatgaagaattggctaacaatgctaatgtggaggacattgctggaggtgctactgagaattcaatcagggttgctcagtggatgcttgaagcaccaggtgcctacaagttacataggttgc

SEQ ID NO: 227608 - DNA, 469 bp, Glycine max
attgttgtgactcgttcttcttcgtcgttatcttcttcttttgttgtttgtgtgtttgttttttctctcacctgaaaatgtcttgctgcggtggtaactgtggttgcggaagcgcctgcaagtgcggcaacggctgcggaggctgcaagatgtacccagacttgagctacaccgagtcaaccaccaccgagaccttggtcatgggagtggcaccagttaaggctcaattcgagagtgctgaaatgggtgttcccgctgagaacgatggctgcaaatgtggagctaactgcacctgcaacccctgcacttgcaagtgaggtgttggagagctaaagcttcaagcagaaatggcccttagaaataatgataaaaactatatgtagtttcaaaacttcaaaattatgtagtatgtattatgttgcactctggtgctctgtgtctaaacagacacccttagaataatgtggtc

SEQ ID NO: 227609 - DNA, 583 bp, Glycine max
cattaatgtgtgtttgtcacgagacccatagtgctgccaaattatagtaactctctttctctatctgaagaagaagaagttctgaagaagcatgtgtggaggtgctatcatctcagacttcattggtgtgaagcgtggccgcaacctcgccgcgcaggaactgtggtccgagcttgaccctttctctgacctccttggcttcgataccaccaccaccaccaccaaccaaccaccccttccagacaaaaaagtggtgtcatcatgtgagaagaagaagaagaaaagtgtgagtgcagaaaagaagagtggtgggcgagctcggaagaacgtgtacagaggaatcaggcaaaggccgtggggcaagtgggccgcggaaataagggacccacataatggcgtccgcgtctggctcggcaccttgcccaccgccgaggaagccgcccgagcctacgacgacgccgacaagcgcatgcgcggcgacaaggccaagctcaacttcccggccaccgctccgtcaccctccaaaaacaacgctgcctcagccttgacaccaccactcgacagagcagcagctcacaatcca

SEQ ID NO: 227610 - DNA, 503 bp, Glycine max
tattgctcagggtgtacacggccaccttaccaaaaaacctgaagaaattggtgctggtgaccagggtcacatgtttggctatgccactgatgaaacccctgaattgatgccattgagccatgttcttgcaacaaaactcggtgctcgtctcaccgaggttcgcaagaacggtacctgcccttggctgaggcctgatgggaagacccaagtgaccgttgagtattacaatgacaatggtgccagggttcctattcgtgtacacaccgtgctaatctccacccaacacgacgagactgtcaccaatgacgaaattgctgctgacctcaaagagcatgtgatcaagcctgtgatcccagagaagtaccttgatgagaagaccattttccacttgaacccttcaggccgttttgtcattggtggccctcatggcgatgctggtctcaccggccgcaagatcattatcgatacttatggaggatggggtgctcatggtggtggtgctt

SEQ ID NO: 227611 - DNA, 482 bp, Glycine max
tctgaatgtcgaattctcaacaaaatgagattgatttaaccggcgacggggaagagaggtcaaactctctcttagcgaacacgcgctgcagcttctgctttccctgctgctttggttcccggtgccactcggtcagcgtcgggttcgcgtggtgggagcgcgtgcgagccacgtcgtcatggtcggagacaagccctcactctgaggcgcaaccagcaaccgggagttccagtgggagttggtggtctggcggcgtgagggcctttatgaaggtgcgggagtggtcggagctcgcggcggggcctcggtggaagaccttcatccggcggttcagccggagccggagtggctgggcccggcacgcggcggggaagtaccagtacgaccccttgagttactccttgaacttcgacgaggggcataacgggtatttcgatggtgacggttacgacgggttacggaatttctccgcgcgttacgcc

SEQ ID NO: 227612 - DNA, 505 bp, Glycine max
ataatatcttctactagctagttttatttttattatcacaataaaatctatctgcaatatattgttatttttattttctgagaaatttgtgtctagttataagtgtctgggtcctggtcctgcctattgtgtcaattaaattgagaagggttgtattgtattgaatcatatatcgtatcatataaacatggcttgttcaagtggaacatcttcagggtcattatctctgcttcagaactctggttctgaggaagatttgcaggcgatgatggaagatcagagaaagaggaagagaatgatatcaaaccgcgaatctgcacgccgatctcgcatgaggaagcagaagcacttggacgatcttgtttcccaagtggctcagctcagaaaagagaaccaacaaatactcacaagcgtcaacataccacgcaacagtacttaagcgttgaggctgagaactcggtgcttagggctcaggtgggtgagttgagtcacaggtggagtctct

SEQ ID NO: 227613 - DNA, 507 bp, Glycine max
attattattattattattattatataggaaaggagggtgacaaattacagtaatggcccatgccccatgccccatttacggaaccagcacctaacattaacaatcccacccgtttttatgatacacattcattattaatattattccttatcaccatcatatggtagtgattacaatttctcgacagactcaaacccagaagaagaagaagaagaaatcctcatcaaatctcagagatgaagcatctcaatcaatactgcaatatgtctgcagaagccataataggctggttcagataccccatattcaacgggttgaagttgaagaagctattattattattattcattggctcaacgaaggtgctcgatgctgctgctccaaaacccgccacagtggtggtggcattcaacacgtcaacgatctcgttcagagactccaacctgtgactcaactcacccacctgagccctaagcaccgagttctcagcctcaacgcttaagtact

SEQ ID NO: 227614 - DNA, 245 bp, Glycine max
ttccattctctctgtgtatttccctacctctcccttcaagatgcagatcttcgtcaagaccctcaccggcaagaccatcacccttgaggtggaaagctctgacaccatcgacaacgtcaaggcctagatccaggacaaggaaggaatccccccggaccagcaacgtctcattttcgccggaaagcaacttgaggacggccgtacccttgctgactacaacattcagaaaggagaagactctttaa

SEQ ID NO: 227615 - DNA, 207 bp, Glycine max
gggacaaaaaatcatttgatatttcacacattcataacaaacgtaggggggatattaaagaactattattaatgggacactattgagttcaacacaaaccgaacttatttttaagggacatttttccagacccataaaacatcaaagttctttaaatgttttgggaacacatccaaaattccccaccgggcttaaaaccccccccgg

SEQ ID NO: 227616 - DNA, 400 bp, Glycine max
cattctcatctttctctcttctctctccacccaaaccctaactcccgaccctgttcccctctcgtatccgtcatgaaaggaggaaagtccaagaccgaatctaagagagccgatcccaaacttgctgtgaataaagaagggagccgccaccaaggctaggaaacccgccggcaaggggaaggcagcgaaagaccctaacaagccaaagaggcctccaagtgctttcttcgttttcatggaggagttcaggaaggtattcaacaaagaacatcctgaaaacaaagcagtgtctgctgtgggcaaagctgctggagcaaaatggaagaccatgtctgatgctgaaaaagcaccttatgtggcaaagtctgagaaaaggaaagtggagtacgagaagaacatg

SEQ ID NO: 227617 - DNA, 532 bp, Glycine max
tcgttttttttttttactgcagaaagcgaatgataagccaattatattgatacaaacttaaccagatttcaacaagaaaactctaaatcaaactaaaagctctacaagagataaacaccccttaactaaacagttggatttagaagtacaaataaagaactcccttctttaaactattcacgttttggaaagacaaccaatttacggagggagcagggaaatattttttggaagcaagaaatatgtttatcaggaaatgaccagaccacctacaacagatgatcaaaatcatcagaacctacataaatgcaattatcagtccattctctaatcgtcatcctcttcctcgccactgccttcctcatcatcatcttcatcattcacctcagatacagacttctcagattcttcttcatccccaccagtaggaccttccgcctgtttcttgttataggctctcatgttcttctcgtactccactttccttttctcagactttgccacataaggtgctttttcagcatcagacatg

SEQ ID NO: 227618 - DNA, 519 bp, Glycine max
  unsure (1)..(519): unsure at all n locations
gaattggtggattgtgatactggatataaccaaggatgcaatggaggacttatggactatgcatttgagttcataatcaacaatggcggcattgattctgatgaggattacccataccgtggtgttgatggtagatgcgacacatataggaaaaatgctaaagtcgtttctattgatgactacgaagatgttcctgcctatgatgagttagccttgaaaaaggccgttgcaaatcagcccgtgagcgttgctattgaaggagggggcagggaatttcaattatatgtatctggtgtattcacggcgagatgtggcacagcactagatcatggtgtcgtggctgttgggtatggaacagctaaaggtcatgactattggatcgtaaggaattactggngttctagctggggagaggatggctacatcagattagaaagaaatcttgctaacagcagatcaggcaagtgtggaatagcaattgagccatcttatgcccttaagaatggtccaaatccccct

SEQ ID NO: 227619 - DNA, 462 bp, Glycine max
  unsure (1)..(462): unsure at all n locations
tttattttttttttttttttttttttttttttttttttttttttttttnggagggggcaaatccaaatattgctgctgcattgtcccataatctacaaaaccttgaaaactaacagcaaacaaatatgttcgccctttggaatttgaattcaaaaacagtgccttgataattttaccctatttacagagcccatgtctgactgaaattttatacaaaacattatctattttggattataataaaatggggaagaactttatgttacctgccgcattttgtgaagaagggggaagtgcctccacccggggctttaaaccctcggcttcccttttactttataaatgggtccttttgtaccttcacaattccttaaactggttaagcactggtgaccttgtttttaccccccaagggcccatggggttttcctggggtaccccttaatggctttactccaaagg

SEQ ID NO: 227620 - DNA, 521 bp, Glycine max
gagattctaacaccagctgcttgcaccattgtttcttcgctcaaaaacgataatgtcgactcctatgttctatctgagtccagcctctttgtttatgcctacaagatcatcatcaaaacctgtggtactactaagctattgcttgcaatcccacccatattgaagttcgctgaaatgctttcccttaatgttaagtctgtgaattacaccaggggaagtttcattttccccagtgctcagccatatccccatcgcaacttttctgaggaagttgctattcttgatggctactttggcaaacttggtgcaggaagcaatgcttatattttgggtggccaagacaaagcacagaactggcatgtctactctgcttctgcagattctgtaactcaatgtgacaatgtttacactcttgagatgtgcatgactggcctggatagagagaaagcacaggttttctacaaagaacaatctgcttcagctgccatgatgactgttaattccggcattagaaaaattct

SEQ ID NO: 227621 - DNA, 460 bp, Glycine max
ctgtgatctctcttttcattttcctggtttgtagtcagctccctctatatgggatacactcaacaacaggtgctgatccattctattggatgcgtgttattctcgcttcaaaccgtggaactgtcatggaacttggaatcactccgattgtgacttctgggctagtaatgcaacttctggctgggtcaaagatcattgaagtggacaacaatgtacgagaggatcgagccctgttaaacggagcacagaagctacttggtattttgatagctgatggtgaggcagttgcctatgttctttcggagatgtatggtagtgtggggcaactcggagtaagaaatgctatcctgatcattatgcagctctgctttgcgggtataattgtgatatgtctagatgagcttcttcaaaaaggatatggtcatgggtctggaatttcccttttcatagcaactaatat

SEQ ID NO: 227622 - DNA, 535 bp, Glycine max
attagacaagagcaggcccagccgagagcacaacttggttgagtgggcccgtccactactgaatcataacaaaaagcttttgaaaattctagacccaaaactagaggggcaatattcaagtaaaacggcattgaaggtggcccatttagcataccagtgtcttagccaaaacccgaaaggtagaccactaatgagccaggttgttgaaattctcgaaaactttcagtcaaagggggaaaatgaggaagatcaaatgcttcaaactggcgataccagtataaccctttatgaggttcctaagggcagcaatggcactccaacttagggctaaaaccaaactacaaatgacgacgaggtttacaggagcaaaggttggtgagaaaagaaaaaagctgaagccagccttcaaaagactctaatttatgtagttccttcacctatgtttgtgcccgagataagtcttcttccagaagttgaagtttcaccaatgtggatggcaattaaaatctgtacaaaatgttaacaggtggatccc

SEQ ID NO: 227623 - DNA, 446 bp, Glycine max
acttggttcactcgaatggcgacatccttgtcaaacatgttcttgaagggaatcgcagctcgttctctcagcagacccttaaatgggttgttttattgcacaagatactcgactactgtgtcaaatgattctgacacgcatgatgacttcaagccagctaataagcttgagaattctggcatttctttgtcaaatgttattgagcatgatgtcaaggataatcctgttatggtttacatgaaaggtgtgcctgattttccacaatgtggatttagttcgcttgctgtaagagttttaaaacactatgatgttcctattactgctagaaacattttggatgatcccgaccttaaaaatgcctgtaaagcctttagtaactggaccacattttcctaaattttcatcaagggaaagtttattggtggatcagataatggtctgcatat

SEQ ID NO: 227624 - DNA, 556 bp, Glycine max
  unsure (1)..(556): unsure at all n locations
ataccaacgaaagcaactactcacgcagtttcttcttcttcttcttctcctgcgcttcgtctcaatctcaagcgtcaattctccatcgccaatcctctctttctgctgatttcggactcgtcacttacttgggttttgcatgtatatgctgatgaaggtgaaatgatgctctcagcggcaataattacttttggacgctggacataaggcgtgatgggcggttgctgttgttgttgttgttctgctaaggagactgtgttgagcgctccacctgcgtactattattatccaagagcatcagaagagcatgttcctctatcatctcaccagggtgctgcttctgctttctctgggcggctcttggtgatactaatctagatacttcatctcctgatacttatagacctccccctgctcctatccctttcaatgttaccttgggtaccactcaaactccacctgcggctcaagaattcgtagtgacaagaataatacttncttgcattctacanattctaatgcaatcaagaaccagttgctggagacaatcatggga

SEQ ID NO: 227625 - DNA, 503 bp, Glycine max
tttccttctttccccacctaaatccttatgattttaaaatgtacaaattgatctacatgcagcgctgcagcagcatccatggctgccttgaagcagccaacgatcagagttgttgctattattgctgaaggagtacctgagtcagacactaagcaattggttgcgtatgcccgggcaaacaataaggttgttattggtccagccactgatggaggcattcaagcaggtgcttttaaaattggcgacacagctggaacaattgacaatataattcactgcaagctctataggccaggatctgttggatttgtatctaaatctggggggatgtccaatgaattatataacactatcgcccgcgtaactgatgggatttatgaaggcattgacattggaggagatgctttcccaggctccacactttctgaccatgttttacggtttaacaacataccacagattaaaatgatggtagtacttggagaacttggtgggcgtgatga

SEQ ID NO: 227626 - DNA, 486 bp, Glycine max
ctctactctactgcttcaccttctgctctagaaaattcagtggtgatacatggcttcggctactctctctgtagccaaaccagcccttcaggcaaatgggaaaggcttctctgaattctctggcctccgcagctcatcaggcttccttcccttttctagaaaatcttcagaggatttccattctgtgattgccttccagacctatgcagttggaagcagtggaggatacaagaagggtgtgacagaagcaaaactgaaggttgccataaacggatctggaaggattggaaggcacttcttgaggtgctggcacggacgcaaagactgccctcttgatgtcattgccatcaacgacaccggtggcgtgaaacaagcctctcaccttctcaagtacgattcgatcctcggaaccttcgatgctgatgtcaagcctgttggcagcgacatcatctctgtcgatggaaaggaaatcaaagttgtgtctga

SEQ ID NO: 227627 - DNA, 484 bp, Glycine max
caaggtaagaattttattgcccaatgagaaggcagagaaaattgatggctctgtttctcagtacaagttttagaatgaaaaatgaagcaacaagtgtttgtagtggtagtattagtagtagaaagcatacaaaactacaatggcatggcacatacatataataattgaattaccaattcagaatttgatggctctcacttccacttgtgggcaacaatgtcagccaaatccacaaccctttgggagtagccccactcattgtcataccaagcaatcaccttaaccatgtcatctcccatgaccatggtcaacgatgagtcaacggatgaggacacatcagtgcacctgaagtcaacagacactagtggctcatcacacacagagaggattccctggagctcattgtctgcactctctctgaatgctgcattcacttattctgcaaaggtcttctttgagacctgaacaacgaggtccaccactg

SEQ ID NO: 227628 - DNA, 339 bp, Glycine max
ttggcatttatgatgaaccaatgactccaggtcaatgcaacatggtagttgaaaggcttggcgattatctcattgatcagggtctctaatctttgctttatgtcttgttatcgtgcatatttcattggcttctgtacaagtttttgcatcgacctggactggaatgctttgattgcagtgtaataatcttgttgtgagtatgaaaagtcacgggatctgcgtgtagtgaagaaagtgtttgatgcttgagaaatgatgactataatctctatctttgtacttttttagtggggtacctgtatacattacagtggttttaaaattttaatgctatgttat

SEQ ID NO: 227629 - DNA, 362 bp, Glycine max
ggaaaaaaatgccaaccattttaacatagcattaaaattttaaaacccctggaatggttacagggccccccctaaaaaaggccaaagatggggatttttggctttattttttaagcataaaacactttttttactacacgcaaatcccgggactttttatactcacaacaagattattaccctggaatcaaagcattccagtccagggggatgcaaaaacttgtacagaagccaatgaaatatgcccgataacaagacataaagcaaagatttgagcccctggtcaatgggataatcgccaagcctttaaactaccatgttgcattgacctggagtcattggttcataataaaagccaactt

SEQ ID NO: 227630 - DNA, 504 bp, Glycine max
  unsure (1)..(504): unsure at all n locations
gttatcgatccctttggggagataagaaaatgtggcttgtgcagctctcaaccccatttctgaacggccatggccatggctccagccttctctggaaacccagttcggcggtgactcagacccactgggcccccgccgagtttgctgcctcaaatcaatgcgatgaagacgatgcagggaaaagtggtgtgctccacgaacgacaagacggtggcagtggaggtggtgcggctggcccctcacccaaagtacaagaagcgcgtgaggaagaagaagaagtaccaggcccacgatcccgataaccaattcaatgtcggcgacatcgtccagctccagaagaccaggcccatcagcaagaccaaggcctttctcgcactccccgttccaagaggtcctccaacaggcccgagccccagcccgatgagctntccattcccttcgagtcccagccccaggcctagattccagagttacacctcaatttcactctctcctacgccctac

SEQ ID NO: 227631 - DNA, 468 bp, Glycine max
gaaataaaaagacgattatatatgatagcagtcagctagaatgataagaattgcacatatagcgaagctcgaaaacacaagcagcatccaaattacaacacataagcataaaagcgaatgcaaaagaaggatttggataaaaagtaggcgtaggagagagtgaaattgaggtgtaactctggaatctaggcctggggctgggactcgaagggaatggaaagctcatcgggctggggctcgggcctgttggaggacctcttgggaacggggagtgcgagaaaggccttggtcttgctgatgggcctggtcttctggagctggacgatgtcgccgacattgaattggttatcgggatcgtgggcctggtacttcttcttcttcctcacgcgcctcttgtactttgggtgaggggccagccgcaccaccttcactggcaccgtcttgtcgttcgtggagcacaccactttt

SEQ ID NO: 227632 - DNA, 538 bp, Glycine max
  unsure (1)..(538): unsure at all n locations
ataaaatctctcttgcccaacttgttcagcctattgccaatggagcctttgtgttgagtatcgacactgattttgatggttgcatgcagttgatcagagaggtcactgctgagttgcctatttatttggctaactctctcaacagtttgaggttggaagggcagaagactgctgctattgagattctgcagcagtttgattggcaggttcctgattgggtcattgtgcctggaggcaaccttggcaacatttatgccttttacaaagggtttaagatgtgtcaagagcttgggcttgtggataagattccaaggcttgtttgtgctcaggctgccaatgctgatcctttgtatttgtactttaaatccgggtggaaggagtttaagcctgtgaagtcgagcactacatttgcctctgccattcaaattggtgatcctgtttccattgacagggcggttcacgcgctaaagagttgcgatgggattgtggaagaggccacggaggangagttgatggatgctacagcgcangcggattc

SEQ ID NO: 227633 - DNA, 470 bp, Glycine max
tttccatttccataaccttagtcatcttcttctttcatctttctccctaacggtatcgagggaaaaatatggcggaagaacacagatgccaggcaccgcgcttctgcgccaacaattgcggtttctttggcagccctgccacgcagaatatgtgctccaagtgctaccgcgatttccagctcaaggagcagcaatcttccaacgccaagatggttctcaatcagtcgctggttccttcaccgccaccggcggtgatttctcagccgtcgtcttcttcttcggccgcggtagatccgtcatcggcggtggttgatgacgcgccacgcgaggcggaggaggttaaggcgccgcagcagaaccggtgtatgacgtgcaggcggcgcgtggggctcacagggttcaagtgtcggtgcgggatgatgctgtgcgggacccaccgttacccggagcagcacgcgtgcgagttcgac

SEQ ID NO: 227634 - DNA, 531 bp, Glycine max
gaaaccctaattatccatcgatcgatctggtgtggagggtgtgaattgtgaatttgtgattgtgggaaaaagatgccgcagaggcactcgaagaacaacaacgatcttgcgttcttcacgtacgatgagaagcgaaaactaggttatgggacccagaaggagaggttgggcaaggactccattaagcccttcgatgcttgctctctctgcctcaaatccctaattgatcctatgagctgccagaaaggccatctcttttgcaaagagtgcattcttcagtgcctcttgtctcagaagaaagacattcaaaggaagcttgcagcccatgctgctcagcagaagcaagaaaaagaggaggaagaagagaagttgaagttgcaaaaggctaaagagcttgatgcatttgatcaacaaaatcatggtgctgtaccacaatacagcgactgaaattatagtcgtgataagaatggtttccatggagcatacagtgtgaaggtcacttcctatgatgaggaagcccttcggacaatg

SEQ ID NO: 227635 - DNA, 532 bp, Glycine max
gtggcaatggcagcaccgctcttcctattctgcgggccaacaaagatttgattgtttatgcatgcgactgtagtgatgagactcttgagagggctaaagagattataagtgcagcctccacagatgcatcctttaagcatcgattccgcacattctgttgtgatctttccactaatggattcccgaactggttggcgtgcaatccttcccaagataattttttacagaaacagtcatactgcttatcaggtgtcagagaggataatgggctgcattttaccaatctgtctccctcggaagaatttgaatgttgtggtggtggagttgattttgtaacattgatattcactctatcagcagtaccactggaaaggatgccaaagtccgtcaaggaatgttttattgtgttaaagccaggaggcatggttttttttcgggactatggcctctatgatatgaccatgcttcgatttgagccagactagcaagtgggattcatggaatacatgcggtcagatggaacacgatcata

SEQ ID NO: 227636 - DNA, 269 bp, Glycine max
gattgttgtgactcgttcttcttcgtcgttatcttcttcttttgttgtttgtgtgtttgttttttctctcacctgaaaatgtcttgctgcggtggtaactgtggttgcggaagcgcctgcaagtgcggcaacggctgcggaggctgcaagatgtacccagacttgagctacaccgagtcaaccaccaccgagaccttggtcatgggagtggcaccagttaaggctcaattcgagagtgctgacatgggtgttcccgctgagaacgatgg

SEQ ID NO: 227637 - DNA, 537 bp, Glycine max
attagaaattgctgcgcaacagaccaagtcctctagggttgctataccagtttctaggcaaaaggatgctctggaatctgataagggatctgcctctgagagaagtgtgaagtctagggctattcttgcaagacaagctaatggagtagttactgatccgggtgtccgtgctgcatcagatgttgaaaaaattgtaccctctggaaacactggtggatcaagttggggtatctcatcgatttttggtggaggtgatagccgtatgactatgaaggagaatatagctagtaaaccacatgctgaaccagttcacagcattgagcaatcaatctctatgatccatttgagagagccacctcctatcttgaggccatcggagagcaattcagagacggaagctattgaaataactgtgacaaagttgcttttgagatcatactacggcattgtcagaaaaaatgttgaggatcttatccccaaagcaattatgcacttcttggtaaacaacaccaagagagagctgcacaacgtcttcat

SEQ ID NO: 227638 - DNA, 411 bp, Glycine max
tcgatgaggaagatctctacagccgcctcaaatccctagtgcgtcagctcgagttcgtcgacatccaggaggagtatgtgaaggacgaactgaagaatctcaggcgcgagctcctccgcgcgatggaggaggtgaagcggatccagtcggtgccgctcgtcataggccagttcatggagatgatcgaccagaacaacggcatcgttggatccaccgcaggatccaactactacgtgagaatcctcagcactatcaaccgcgaattgctcaagccttctgcttgcgtcgcgctccaccgccactgcaacgcgctcgtcgaggtgctgccgccggaggccgactccagcatctcgctcctcagccagtgcgagaagcctgacgtcacttataatgacattggaggatgtgata

SEQ ID NO: 227639 - DNA, 528 bp, Glycine max
tcgatgaggaagatctctacagccgcctcaaatccctagtgcgtcagctcgagttcgtcgacatccaggaggagtatgtgaaggacgaactgaagaatctcaggcgcgagctcctccgcgcgatggaggaggtgaagcggatccagtcggtgccgctcgtcataggccagttcatggagatgatcgaccagaacaacggcatcgttggatccaccgcaggatccaactactacgtcagaatcctcagcactatcaaccgcgaattgctcaagccttctgcttgcgtcgcgctccaccgccactccaacgcgctcgtcgaggtgctgccgccggaggccgactccagcatctcgctcctcagccagtccgagaagcctgacgtcacttataatgacattggaggatgtgatatccagaaacaggaaatccggaggctgtggagctaccccttacacatcatgaactatacaaacaagatggtattgatcctcctcgggtgtttactgatggaccccctgcactggcaaa

SEQ ID NO: 227640 - DNA, 474 bp, Glycine max
gtgatctatccctttggcgagagacgacaatgcggctcgtgcaggtctcagccccgtttgtgaacggtcatggccatggctccagccttctctggaaacccagctcggcggcgaccaaaacccactgggccctgccgagtttgctgcctcaaaccaatgcgaagagcactatgcgcggagaagtggtgtgctccacaaactacaagacggcggcagcggcggtggtgcggctgacccctcacccctagtacaagaagcgcgtgaggaagaatatgaggtaccatgcccacgagccccatgtaccacattaatgtgggcgacatcgtccagcgccagaagaccaggcccatcatcatgaccaaggcctttgtcgcactccccgttcccaagaggtcctacaacaggcccgagccccagcccgatgagctttccattaccttcgagtcccagccccaggcctagattccagagtta

SEQ ID NO: 227641 - DNA, 466 bp, Glycine max
gaaataaaaagacgattatatatgatagcagtcagctagaatgataagaattgcacatatagcgaagctcgaaaacacaagcagcatccaaattacaacacataagcatccaagcgaatgcaaaagaaggatttggataaaaagtaggcgttggagagagtgaaattgaggtgtaactctggaatctaggcctggggctgggactcgaagggaatggaaagctcatcgggctggggctcgggcctgttggaggacctcttgggaacggggagtgcgagaaaggccttggtcttgctgatgggcctggtcttatggagctggacgatgtcggcgacattgaataggctatcgggatcgcgggccgggtacttcttcttcttcctgacgcgcctattgtactttgggtgaggggtcagccgcaccacctccactgccaccgatttgtagttcgtggagcacaccactt

SEQ ID NO: 227642 - DNA, 309 bp, Glycine max
agaataccccctcttttgctgcatcagaggagccgtaaattaagagcatggctgcccaagctcttgtatcagcagctcctcttaccttctcagcggaggctgcaagacacagccttggacccagatcactccagtctccatttggcttgtacagaaaagcctccttacttgtcaaggcagctgctaccccccctgtcaagcaaggatcagacagacctttgaggttcgcatcaaagcagagtcttgcctactaggatggcagccttccgggtgactatggattagaccctctgagactatcacaccctg

SEQ ID NO: 227643 - DNA, 464 bp, Glycine max
gtacaatgtttatagttgttttacatgtaattctttacagcgccacaccaaggaacaaaatgtccacatgatatataaaggttgaaaggtagttgagttctggcaacgttacgaatatgtgaaataacatataatacattcagtggaacttgagactggtcaagatgttgttgggcacggggtcagccaaatgatctaggaggttttggtatgggccaacacctgtgacaagagcttgaacagagtaacccaagattgccagcatagccaaccttgcattcttcactttcttgagcttcaaatcctataaggacttctcatccttacgaaagcctagtgggttgaagaaaggtcctcctgtataagctgtctcaccagatcctggaagacccttttctagacctatgaagtattgattgcccatagagcctgcccaggcccacacttggaatcttgtgtgctct

SEQ ID NO: 227644 - DNA, 456 bp, Glycine max
  unsure (1)..(456): unsure at all n locations
attctccagagagaagaagaaacttaatcgatcatcacttcacttcactaatacatcatggcagacgagacccagaacaagtatgagagctctgaggttgaggtccaggatcgtggtgtttttgactttctcggtaagaaaaaggatgaagaagacaagcctcatcctcaggaggaggtcatcgccaccgagtttcaaaaagtcactgtctcagaccaaggagagaacaagcacagcctcttagaaaagcttcaccgatctgacagcagctctagctcttcaagtgaggaggaaggagaagatggagagaaaaggaagaagaagaagaaggaaaagaaagggctgaaagagaagatcgaggagaaaatagagggtgatcatcatcatccaaggatgaggacacangtgtccctgttgagaaagttgaggttgttgaaacagcacatgctgaggaaa

SEQ ID NO: 227645 - DNA, 475 bp, Glycine max
atgattaaagatgagaagaaccatggaagctatgacttcatctttgttgatgcggacaaggacaactacctcaactaccacaagaggttgatagagcttgtaaaagttgggggcgtgatcgggtacgacaacaccctatggaacggatctgcggtggcacccactgatgctcctattacgaaggatgttacgtactacatggacttaatactggagctcaacactagccctaaatgcggactcgactatcgagatttggaagatgactgctgtggataggatggctatgctgtgcaaaggaagccgcagataactgatcatcatgatacgtggaccatgcggcgcttgttgctgcacaccctatgaggaatgactggtcataagagactggttccagctctggcactgagaaacctgcagtactagctactgaaccttcaatatggacacgtactaaaaatggctacttaagtgc

SEQ ID NO: 227646 - DNA, 561 bp, Glycine max
  unsure (1)..(561): unsure at all n locations
cctctttccaaagtccaaattttctagttccaccaaaccaaaccaaaccaaaatggcagcagcctcagcctcatccatgatatcaacaccagccttatctccaaccatccaaaagcaccatcatttgaagccatccaacgtgtgcttccaaggtcttagacccctcgcaaggttcaccaaagcctcatcaaccaaagtgagcaccaccaccaaaagggttattccaaagggtggtgttagagctgaactcaactcagcccttgtgataagcctcagcactggcctctccctcttcttgggaaggtttgtgttcttcaacttccaaagggagaacgtggcaaagcaagtgcctgagcagaacggcctcacacactttgaggctggtgatacacgtgccaaggagtatgtcagcctcctcaaatccaatgaccctgttggattcaacattgctgatgtcttggcttggggctccattggccatgttgttgcttactacatcttggccaccactagcaatggctatgaccctgcattctttggctgatttaatntcatcatcat

SEQ ID NO: 227647 - DNA, 568 bp, Glycine max
cggctcgaggatcaacttaccgatgaacagatctccgagttcaaggaagccttcagcttgttcgacaaggacggcgatggttgcatcacaaccaaggagcttggaactgttatgcgttcattggggcaaaacccaactgaggcagagctccaggacatgatcaatgaagtggatgctgatgggaatggtaccattgacttccctgagttcctaaatctcatggccaggaagatgaaggacactgattctgaggaggagctgaaagaggcattccgggttttcgacaaggaccagaatgggttcatctctgctgctgagctccgccatgtgatgaccaacctcggggagaagctcaccgatgaagaggttgatgagatgattcgcgaggccgatgttgatggcgatggccaaataaactacgaggagttcgttaaggtgatgatggccaagtgatcatcacattatggccacaaaaacctaaatgaagaaatgttgattaaaaggaaacgacaaaataaggagtaggaagaaggccaagggtttgggggtataacagtgatgagtagtc

SEQ ID NO: 227648 - DNA, 348 bp, Glycine max
ggaggccaaggagaaggaacttgccaatgggagattggctatgttggcattcttgggattcatagttcaacacaacgtgacaggcaaaggaccatttgagaacctcttgcagcacctctctgacccgtggcacaacaccatcatcaatacaattcgtggctactaagtttgtatccaatgacatggataagcctgtgtccttctcgtgtaatcctgaatggatgaattttgagagtgatttgggcgtgattgttgtgatccatctattttcatgtacagaggaactacgatggttctatattgctatttagactgtccatcaatcagtaatcaagcatgatactttct

SEQ ID NO: 227649 - DNA, 532 bp, Glycine max
gctcggcgttatcctcctccgccggctccgccggcgccatgttccgcaaggactgcaccgatctggttcgccggatctccctcctcacccacctcttcgaggagattaaggaactcagcaacaacgttgtcgggggttcttcttcttctccttctccttcttcctcggcttcttcaaagtggtcttctgatctggtcctcgcgcttcactccgcaagacgcttgctttccgtcgctagaaacttccgctccaattgctcctctgatggagctgcaaagaccattgtcttccaatttcagtgtgtgacatggaaattggagaaactgttgagcaatttgccatatgacgatttggacatctcggaggaagtcaaggagcaggtggatttggtgagaacacaattgagacgggccacggataaatatggggttattgaattcaaagatgccatctcatgaattatcccagccctggctgaagaaattagtcaggttcttgggcaatctgtgagtaggttgcacaaacaacaaag

SEQ ID NO: 227650 - DNA, 584 bp, Glycine max
atcaattgatttctttatacgctcataccggggttaacaaagaacaaaccaagaaaagaataactgaatcaatgaggctgattttcttatttcacctcgtatgaccagtttgcaaaccgcagtgtggagaattatatcaaataatgagagaacagaagaaacttaaagttctttgcagaactacaccattcaaagttgctgcaacttatgaatatgttccaataatgaagtagccttccgtttggccctctctgtgccatttcgagcaagttcagagagaggtatgagagcaccaagtctacttatacaagcaagattatctgcatccctcttgcacaaggcaagtagaatagcagctgcattctctttattgcgaggcaatccggtcctcaaaagatctatcaaaactggtatagtgctggcttttactatggcaacttttgcctcttggtggcttgcaagaactgacattatcgttagggcttcatcaaccatcgatttgcttgaatctgtaagcatctttcacaatgctgtgatgatacctgccctaatggccctgcccttgttcccttgataaatgcata

SEQ ID NO: 227651 - DNA, 545 bp, Glycine max
  unsure (1)..(545): unsure at all n locations
gtaactatacagctataccgcacaccgtatttggtagacataattcgtgaaaatgtggggcgagtgcttacattggactccattgttgctggaaatgcgtggaaaggcatggacatgctgattttcaactcgtggcattggtggacccacactggaaaatctcaggggtgggattatattagagatggacccaatcttgtgaagaacatggaccgtttggaggcctacaataaaggattaaccacttgggctaattgggttgatcagaatgttgatccctccaaaactaaagtcttctttcaaggcatttctcctacacactatcagggcaaggattggaatcaaccaaaaagaagctgtagtggagagcttcaaccattgtctggatcaacatatccagcaggtctacctccagcaactaccatattgacaatgtgttaaggaagatgagtactccagtttatctacttgatataacactcctctcacaattaaggaggatgctcacccttctgcttatagtggggaccatgcanngcatgact

SEQ ID NO: 227652 - DNA, 525 bp, Glycine max
agaattcaacatcattctgtgattcaataaaattagtttacgaacccttgtaaacaaagtactcatcttagtatgcaacaattttgatctctaaggaacttattttgttttgtaaattattcttccaagaatcctatatataattttacaattgagtttcacccctctgtagtatctatatatcccccaaataataaagaaattctaaaaacactagctgaatatataaccaagggatgaagaaaaggatcaatttgtatggggccttcaccttcatttggtgagagctgcatataggagctggttccaagtgtccggtaatcctggtaggcaccagtggctgcagtcattgcctgcatggtccccactataagcagaagggtgagcatccttccttaattgtgagaggagtgttatatcaagtagataaactggagtactcatcttccttaacacattgttcaatatggtagttgctggaggtagacctgctggatatgttgatccagacaatggttgaagctc

SEQ ID NO: 227653 - DNA, 512 bp, Glycine max
gacgaaacatttggaggaaatggaaggagcaaagagtcatctccatttttttgaaatggatcttcttgacatcgactccattgccgctgccataaagggttgttccggcgtaatccaccttgcatgtcctaacatcattggtcaagtcgaagatcccgagaaacagatattggaaccggcgataaaaggaacggttaatgtgttgaaggcggcgaaagaagcaggggtggagcgcgtggtggcgacttcatcgatttcgtcgattatgccaagtcctaattggccagctgataagattaagggagaagagtgttggacggaccttgaatactgcaagcaaaaggggttgtattatcccattgcaaagactctagcagagaaagcgggttgggactttgcgaaggagacaggttttgatgttgtcatgataaaccctggacagcatgggccctctgcttcctccaagaatcacatcaagcatggcttgtgcttgttagtgtctcaaagggggc

SEQ ID NO: 227654 - DNA, 480 bp, Glycine max
gtgagagtgaagcgagaagcgagaagcgacatggatccagacgcgttggcaaaggcattcgtggagcactactactccaccttcgacaccaaccgcaacaatctcgccaatctctaccaggaaggttccatgctctctttcgagggtcagaagatccagggctcccacaacatcgtcgccaaactcacctcccttcccttccaacagtgccagcactccatcaccaccgtcgattctcagccctcaggcgtcaacgccgccatgctcgtcttcgtcagcggcaacctccagctcgccggcgaacaacacgccctcaagttcagccaaatgttccatttgataccaacaccacagggaagctattatgtgttgaatgacatattccggttgactatgcgtgaaagatagacctctgagtatgttgacatttgcctacagctgttttgcttcagacatttgcatttgagaattaacgagttc

SEQ ID NO: 227655 - DNA, 395 bp, Glycine max
atcctgagaaaggcatggtcattccacatcctaatgcgactcatgaaaaccacccaattgatcaaccaacttaatgcacagctcctcactactaaattcggaggcatcaccattcttgccccagatgacagttccttctctgaactcaaagcaggctatctcaactatctttctgatggctcaaaagctcgagctctcacagctgcacgttatctcagactacgtgtctagcttcaactttgatacactgaccaaccccgtgagaacactgtcaggggctaaacctgtaaaggtggaactgaatgtgataagttatggagagagtgctaacatctcgactggtgatgatgacaccaccatcactggcattatatataccgagtcacatcttgctt

SEQ ID NO: 227656 - DNA, 403 bp, Glycine max
cttcccttggtgacttggaacatcttctgaagttgaatctaagcagaaacaatttaacaggaattattccagcagaatttggaaatcttagaagtgttatggaaattgatctttcaaataatcaactctctggcttgattcctgatgaacttagtcagcttcaaaacatgatatccttgagacttgaaaataacaaattgactggcgatgtggcatcactttcaaattgcattagtctctctctacttaatgtgtcctataacaaactatttggtgttatcccaacgagtaacaactttaccaggtttccccctgacagtttcattggaaaccctggtctttgtggtaattggctgaatttgccgtgtcatggtgctcgcccttcaagcgagttacattatct

SEQ ID NO: 227657 - DNA, 458 bp, Glycine max
ctcactttgaagagaaaataacaacgtaaagatgtctgcatcaggaggcagaggaagccaagaggaagagaagaagccttctgatcaaggagcacatattaatctcaaagtcaagggccaagatggtaatgaggttttctttaggattaaaagaagcactcagctcaagaaacttatgaatgcatactgtgatcgtcaatctgtcgattttaactcaattgcttacttgttcgatggaaggagacttcgagctgaacagacccctgatgagctagagatggatgatggtgatgagatagatgcaatgctgcaccaaaccggatgtggacacaagtttctttaaatgtatgatgatcatctatatcaaaatgcttgataaaacgcatggtattcggtgcttgcttcaaggattctattgttgtatcatatcttacgatactaatgtagtaaagttgaca

SEQ ID NO: 227658 - DNA, 499 bp, Glycine max
tcacacttctcagaatttatgttgtgaagtttgtttattctgagaaggaagagagaatagaacgccatggatgagatattgaacaaggtggggtcttactggttctccaagaaggccagcaaggaatttaactctgtcggcgatgatatcaactcactgtcaaccagtattgcagggggaaccacatggtagggcaacaagttaaaaggaaagatgcacaaggcattaacagagttgctaaaggagtatgatctacccataggaatctttgctcgcgatgcgacatactacgaatttaacgaatagacaggatagcttgttgttgacattcctcaagtgtgtgagggcggctacagggattcgtcaggtctgcgtttctccaccagcgtgagtggctatttggagaaagggaagctagcagaaatagaaggaatcaagaccaaagtgctgatctgggtgaaagtgactgccatttcatgcgaaggaccaaagcttcatt

SEQ ID NO: 227659 - DNA, 386 bp, Glycine max
atgaatctctcagcccctcaaaccttccgctctaaggaaatctccaagagcaatgttgttgacgatatggtcaacagcaacgccatcctctatgagcccggtgaacatccagaccatgtggttgtcattaagtacgtgccttatgtaggggacagcaagagggccatggatgagtacacttctgagatattcatgggtggaaagaacacaattgtgttgcacaacacatgtgaggattcactggtagctgctcctattatctgggacttggtccttcttgcttgagctcagcactcaaatcgagtttaaagctgaaattgagggaaaattccactcattcaacccagtggggaccatccttagttaccggaccaaggcccttttgg

SEQ ID NO: 227660 - DNA, 542 bp, Glycine max
gttagttcagctagtaaggggcagtctgttcagaccattcaacagagggtttgcattgtagtctctgagcttctctcccagctgcaagattggaacaataggcggcagtttacatcccccagtaacttccatgctgatggggtgaatgacttatttagctctcaggctgtaatagaaaacacacgagcaaatgaaattttgaaacaggcccctttcttgataccatttacaagcagggttaaaatattctcttctcaactagctgctgttaggcaaaggcatggacctcaagctgtattttctagaaatcgattcaggatacaacgagatcatattttggaagatgcttacaatcaaatgagtcagttgacagaagatagtcttcgaggatcgattcgtgtgacttttgtcaatgaatttggagttgaagaggctggaattgatggtggtggaatattcaaagatttcatggagaacatcacacgtgctgcctttgatgtgcaatatggattatttaaggaaacagcggatcacctgcttta

SEQ ID NO: 227661 - DNA, 547 bp, Glycine max
gagatactaacatcagctgattgatctactgctttcatctttctccctaacggtatcgagggaaaaatatggtggaagaacacagatgccaggcaccgcgcttctgtgccaacaattgccggtgctttggctaacctgtcgctcgcaatatgagctatatgggcttccgctgtaatgctttcactgaatgttaagtttgtgaattacaccaggggaagtttcattttccccagtgctcagccatatccccatcgcaacttttctgaggaagttgctattcttgatggctactttggcaaacttggtgcgttgatgacgcgccacgcgaggcggaggaggttaatgcgccgcagcagaaccggtgtctgacgtgcaggcggcgcttggggttcacatggctctggtgacactgttgaaatgtgcatgactggactggatggacagaaagcacatgttctttacagagaacaatctgcttcatctgccatgatgactgttaatttcggcatttagaaaatttttccagattccgagaattgtgactttg

SEQ ID NO: 227662 - DNA, 546 bp, Glycine max
  unsure (1)..(546): unsure at all n locations
gtaactatacagctataccgcacaccgtatttggtagacataattcgtgaaaatgtggggcgagtgcttacattggactccattgttgctggaaatgcgtggaaaggcatggacatgctgattttcaactcgtggcattggtggacccacactggaaaatctcaggggtgggattatattagagatggacccaatcttgtgaagaacatggaccgtttggaggcctacaataaaggattaaccacttgggctaattgggttgatcagaatgttgatccctccaaaactaaagtcttctttcaaggcatttctcctacacactatcagggcaaggattggaatcaaccaaaaagaagctgtagtggagagcttcaaccattgtctggatcaacatatccagcaggtctaccccagcaactaccatattgaacaatgtgttaaggaagatgagtactccagtttatctacttgatataacactcctctcacaattaaggaaggatgctcacccttctgcttatagtggggaccatgcanngcatgact

SEQ ID NO: 227663 - DNA, 539 bp, Glycine max
  unsure (1)..(539): unsure at all n locations
agaattcaacatcattctgtgattcaataaaattagtttacgaacccttgtaaacaaagtactcatcttagtatgcaacaattttgatctctaaggaacttattttgttttgtaaattattcttccaagaatcctatatataattttacaattgagtttcacccctctgtagtatctatatatcccccaaataataaagaaattctaaaaacactagctgaatatataaccaagggatgaagaaaaggatcaatttgtatggggccttcaccttcatttggtgagagctgcatataggagctggttccaagtgtccggtaatcctggtaggcaccagtggctgcagtcattgcctgcatggtccccactataagcagaagggtgagcatccttccttaattgtgagaggagtgttatatcaagtagataaactggagtactcatcttccttaacacattgttcaatatggtagttgctggaggtagacctgctggatatgtngatccagacaatggttgaagctctccactacagcttc

SEQ ID NO: 227664 - DNA, 499 bp, Glycine max
ccccagtgattataggtacttcctgtataagcacattcacttcgacgtgttctacaacaaggacagggtcatcgagatcaacgtgcgcaccgatcccaatgcgctcgtggatctcaccaaggattctgaggttgatgccgagtttttgtacacggtgaagtggaaggagacgaacacgccgttcgagaagaggatggacaggtactctcagtcctcgtcgctgccgcatcatttggaaatccactggttctcgattatcaactcgtgtgtgactgtgctgctcttgaccgggttcctcgccaccattttgatgcgggtgctcaagaacgattttgtcaagtatgcacatgatgaggagtctgcggaggatcaggaagagactgggtggaaatatatccatggggatgtgtttaggttccccaagtttaagtctctgtttgcggctgcgcttggatctggcactcagttgtttacccttacggtgttcatattcatattg

SEQ ID NO: 227665 - DNA, 517 bp, Glycine max
aaaggtgaaatttatcaaaataagctcatgataaactctaacttaacaagcgcctaattaaattgttttgcccaagccctcctaacagctaactcaggaatcagttgacatctcaaattcactaactatccacaaggaattaaacatcaagccatgaaaaacaagaaagaaatttgtgataaacagtgatttcatacctccaccaccactcatgatcctcagcagcaagctggaagtatgtcaatgccacagtgatgaaagcagtaacaatcaagagaatgatgaagacaatgaacaggatgctgtagatggtgtaaattctgtggccccaaacactggcaaatatatagtaaagttcaatgtatatagcactgaaaggcaaaaatcctgccatcgccatctgaggaattgttccacgataccaaggcagaggtggaatctcccttggatatttagttgtccgaacaggagcttgaaattcagccttgctattcttcccagcaatccctcccaatac

SEQ ID NO: 227666 - DNA, 428 bp, Glycine max
gacgaaacatttggaggaaatggaaggagcaaagagtcatctccatttttttgaaatggatcttcttgacatcgactccattgccgctgccataaagggttgttccggcgtaatccaccttgcatgtcctaacatcattggtcaagtcgaagatcccgagaaacagatattggaaccggcgataaaaggaacggttaatgtgttgaaggcggcgaaggaagcaggggtggagcgcgtggtggcgacttcatcgatttcgtcgattatgccaagtcctaattggccagctgataagattaagggagaagagtgttggacggaccttgaatactgcaagcaaaaggggttgtattatcccattgcaaagactctagcagagaaagcgggttgggactttgcgaaggagacaggttttgatgttgtcatga

SEQ ID NO: 227667 - DNA, 455 bp, Glycine max
gctaacttgattatttatgaaaatatttcaatatgttttttaggttaataaattctatgatcttgctactagcttttatgagtatggctgggggcaatctttccattttgcacctagatggaaaggggaatctgttcgagaaggcattaaaagacacgagcacttcattgctttacaactttgcctaaagcctggacaaaaggtttttatgctcgacggagcaaattgatatttgtcatgctatatgttacttataattcatgagttttacctatttgtttttaggttttggatgttggatgtggaatcgggggaccacttagagaaaatcccgattcaggtgaatggaccaataatattcggttttgtggtatctttttccttaaccctacctacttttatgtactaggtcataagatagttcataagtcatgttatttctgagatgttctttt

SEQ ID NO: 227668 - DNA, 570 bp, Glycine max
  unsure (1)..(570): unsure at all n locations
atttcatactttgtttgttgtctgtcttttatattctgagaactaagaacagagagctgaaagaaactgccatggacgctctgaggaaacaagccagcaagctcagagagcaagttgccaaacagcaacaggcagtaataaagcagttcagcagtagtggttatgagagttcagatgttgtggtcatcgatgaggtcgaaatgcagaggcaccaccagctggaaaagctgtacagggccacacgtgcagggaaggacttccagaaagaaattgttaaagcagcagaaacatttacagctataggttataagcatattgaaacaggaacgaaactttctgaggattgctgaaatatggagcagagaacaacagtgacaacatattatctaaggctgcatcagtatatggtgatgcccgcangcatgtggaaaaggagcacgaagaattaaatcggcttttatctacacaggtattggatcccttgagacnatgatcaaggtgtcctttgaggatgctcgcatctgctcaacgattagtcgatgagacaagagcagaggcacaagagagaga

SEQ ID NO: 227669 - DNA, 384 bp, Glycine max
attttgccaaatgtattttgtagggagctgcgcacaaggagcgttctggattcgagggtccctggacctctaatcctcttattttcgacaactcatacttcaaggagttgttgagtggtgagaaagaaggcctccttcagctaccttctgacaaggcacttttgtctgaccctgtgttccgccctcttgttgagaatatgcatcggacgaagatgccttcttcgctgattacgctgaggctcaccaaaagctttctgagcttgggtttgctgaagcctaagcaacgttttggggattgttggagaggcacggtgcccataatatttctctcataaattctatggtcatggtttctaatgcgccactgtgggttccctcaaattt

SEQ ID NO: 227670 - DNA, 406 bp, Glycine max
aatatcgcaatcgctgaacaatgttatttaacaaaaggatcgaccacaaataaaaacaacccaactccaatcatcatcaccacgtccagcaaaatacattcaaaagctatctaaaaatttgaggaacccacagtggcgcattagaaaccatgaccatagaatttatgagagaaatattatgggcaccgtgcctctccaacaatccccaaaacgttgcttaggcttcagcaaacccaagctcagaaagcttttggtgagcctcagcgtaatcagcgaagaaggcatcttcgtccgatgcatattctcaacaagagggcggaacacagggtcagacaaaagtgccttgtcagaaggtagctgaaggaggccttttttctcaccactcaacaactccttgaagtatgag

SEQ ID NO: 227671 - DNA, 555 bp, Glycine max
  unsure (1)..(555): unsure at all n locations
ctcactttgaagagaaaataacaacgtaaagatgtctgcatcaggaggcagaggaagccaagaggaagagaagaagccttctgatcaaggagcacatattaatctcaaagtcaagggccaggatggtaatgagggtttctttaggattaaaagaagcactcagctcaagaaacttatgaatgcatactgtgatcgtcaatctgtagattttaactcaattgctttcttgtttgatggaaggagactccgagctgaacagacccctgatgagctagagatggaggatggtgatgagatagatgcaatgctgcaccaaaccggaggtggacacaagtttctttaaatgtatgatgatcatcttcatcaaaatgcttgataaaacgcatggtattcggtgcttgttcaaggtttctatttttgtatcatatcttacgatactatgtagtaaagttgacagtttccgatatggattnttcatgtntatngaagtctngatgcttanaagctgctattactgtgtnggatacaatactatggcttcactattcattcttg

SEQ ID NO: 227672 - DNA, 454 bp, Glycine max
cgatgatcgtagcctggggtgagtccaccggcgagttgcgctgtctccctgtctatgagggaacttacatgcacttgagatcgcggtggtattcggtgcttgggccgacctatgtcgagtcgtgctcctacaatcgactttgactacaaggagtatgcgatgcagagattgcagcaatactggttgaagaagcctactttattggactcaccaagtatcgtttcccaagatgggattgccaatggtgtgaaccattgacatggatgcttcttatgtatttagcatgttcagcttggcatgtgtcgactgagatatagaactggcatgatgcgatgcgtaaaacttgttgataatatctaactaacaatgtgtgatttgagaatttttacaacagttatgttagtaatccctccttttgtgataagttgaggaatggaagtgagaattcctagtt

SEQ ID NO: 227673 - DNA, 551 bp, Glycine max
cgaaacttgtgcacaggtaagaaaccaagcaatagtgaagtggatcagctagtgaatctcgcagaaaaatacactgttgcaaaccatctattctggggcttgcggagacttatatgcagtgatgacaatacgggtgaccatgactactcagagtactggcatgtctactctgcttctgcctgttctgtgactccatgcgacaatgtctacactctagagatgtgcatgactggcctggatagagagaaagcacaggttttctacaaagaacaatctgcttcagctgccattatgactgttaattctggcattagaaaaattcttccagattctgagatttgtgactttgactttgagccatgtggttattcaatgaactctgttgaaggtgctgctgtttctaccattcatgttaccccagaagatggtttcagttatgcaagctttgagactgttgggtatgacttcaaagtggtgaatctgaacgaaatggttaagaaggtattggcatgttttctcccaactgagttctctgttgcagttcatgtgga

SEQ ID NO: 227674 - DNA, 574 bp, Glycine max
cttcccactatctggctctcttctctctccccgcccaaaccctaactccgtaccctattccgctttctctcatccatcatgaaaggaggaaagtccaagaccgaatctaagagagccgatgccaaacttgctgtgaataagaagggcgccgtcaccaagactaggaaacccgccggaaaggggaaggcagcgaaagatcctaacaagccaaagaggcctccaagtgctttcttcgttttcatggaggaattcaggaaggtgttcaacaaggaacatcccgacaacaaagcagtgtctgctgtgggcaaagctgctggagcaaaatggaagacgatgtctgatgctgaaaaagcaccttatgtggcaaagtctgagaacaggaaagtggagtacgagaagaacatgagagcttataacaagaaacaggcggaaagtcctactggtggtgatgaagaagaatctgagaagtctgtatctgatgtgaatgatgaggatgatgacgacgaatgcagtggccaggaggaggataccattgaagaatggactgtgatattgcatttagtaggtctgatga

SEQ ID NO: 227675 - DNA, 429 bp, Glycine max
ctcgagccgaatcgggtcgagggatcaatggccaactgctttgaaggagttcatcctaaaaataagggctatgggattgcggcaagaacaagcagatatagacatggcattacctgacctgcagacactctcatctcacactgatgttgcacaggccatgaacggctggtattgacatgatgcagcagttcgatcggcaggtacctgatcgggtgattgcgcctggaggccaccttggcaacatgaatgcggtgctcgtcagggttatcatgcgcaaatacttgcctctcgatatcaacatcccgaggtctgtatgggcgcatgctggcaacgctgaacgtttgcatgatgcactgtcaataacgatggaaagagtctaagcctgagaagtcataaaatctgaatgacgcatgcggagaatgaatgagc

SEQ ID NO: 227676 - DNA, 496 bp, Glycine max
cgacaccatggaaaacctctttgcttccttggacaggaatgaggctgatatttccccttccaccttgtatgccattgcttgtgttatggaaaatgttcctttcatcaatggaagccctcaaaacacctttgtcccaagactcattgatctggccatcaaaaggaatagattgattggaggagatgactctaagagtggtcagaccaaaatgaaatcggcgttggtggatttcctagtaggggccggcatcaagccaacatctatagggagttacaaccatttgggaaacaatgatggcatgaatctctcaggccctcaaaccttccgctcgaaggaaatttccaagagcaatgttgttgacgatatggtcaacagcaacgccatcctctatgagcctggtgaacatccggaccatgtgggtgtcattaagtatgtaccttacgttggggacagcaagagggccatggatgagtactcttctgagatattcatgggc

SEQ ID NO: 227677 - DNA, 492 bp, Glycine max
gaattaagcacaaaatacttcgataactttatattattttacatgcatgcatagcatagatagcctgctctcaaattagtcagcaggaacaaagatagagagatccaacgatctttaaatttcacatttgccataaatatataacagaaaagagggtatgggatatgagttaagttttgatctcattcaactacagtatcccaaaccattactcttaagactttgaacttcacttgtactccaggatcatgttgttctcaggagctaatccaacacaagcccttaggatgttttccagcatagctcgctgctttgacagtgcattaaccactggcgtactcggtggaaccagaggggccttggtcaggtaactgaggatggtcgcaactgggtggaatgagtggaactttccctcattttcagctttaaactcgattcgagtgctaagctcagcaagaaggaccaagtccaagataataggagcagctaaca

SEQ ID NO: 227678 - DNA, 546 bp, Glycine max
  unsure (1)..(546): unsure at all n locations
caaattctctgtgttgtgttgtgtacttgtgttaattgtgttgttgttgtaggaaatttaagtgaagagagaatgatgatgaagtctgctatgtgtgcattggtgcttgtggcactggttgtggttgaagtggggcccatggctgaggctgcggtgacttgcaacccaacacagttgactccttgtcttccggcaattaattcaggttctgcaccttcgagtgcttgttgccagaagctgaaggagcaaaagccatgcttctgtggctacctcaaaaaccctagcttgaagcagtatgttaactctcctaatgccaaaaaaaccgttagttcttgtggtattgcctatccaacttgttaagcacctcttatatatatatataaatgtgtgaacaatatatatatattgattaaaaaatatagtttaatttatatacacactttgatcctataaaaacatcttgacacaagcattcaatagaatttcaccactttatcatgacattntactataatgatgtggtaataaagtaacatctttgtgaat

SEQ ID NO: 227679 - DNA, 520 bp, Glycine max
gtatgtcactctagaacatcattatttctcaatttatatagctctttaaccataattccctggatacaacatgtatactagtgtatacaccatattcaaagatagctaataaatacttgactgtataattaatatcacacaaacgtaaagtggcaatatatagtgtaaatatatataagcttaatttatacacagaaaccatgagtataaagcatctttatacaaaatattcaacaagaatttactttattaccacatcattatagtaaaatgtcatgataaagtggtgaaattctattgaatgcttgtgtcaagatgtttttataggatcaaagtgtgtatataaattaaactatattttttaatcaatatatatatattgttcacacattttatatatatatataagaggtgcttaacaagttggataggcaataccacaagaactaacggtttttttggcattaggagagttaacatactgcttcaagctagggttttgggtagccacagaagcatg

SEQ ID NO: 227680 - DNA, 505 bp, Glycine max
cgatgatgttgattcttccatctttggtgctatttatgagttcaagcctccatcatctatgtgcaatgacaccttacatagaagtccacgttatgtaattgccttccgagggactataaccaaggcagactcagttttcccgtgacatcaagttgggtatccattttgtgcgaaatgggcttcatcaaacttcacgtgctgagatagccatccaagctgttcgaaacatggtggctactgtgggtgcttccaatatctggttagctggccactcgctaggatcagcaatggcaatgctaaccgggaaaaccatggccaagactggcatatttattgagtcttttctcttcaaccctccatatgtatctgctcctattgagagaattaaggacaaaaaattgaaacatgggcttagatttgctggcagtgtagtaacagctggactcgccattgctatgaaggataagcagaagaagagtttgtcccttgacccatttgctgcttt

SEQ ID NO: 227681 - DNA, 529 bp, Glycine max
accaaacaacaacattaccaatatttatgtacggatatttaatcatacatcttacaacaatcacctccttagaatttctaaagagagcatcttaagaactggagtctatggccatattttagaacttccataaatatatgagccaaatccccaaaaggtgatcactagggagaggatcttgaaaccactcatagggtcctttagcagtataacagctgcaatgcttggtatgggtgttcttactgcattaagcacacctgctagcacagtagagcccaagaaaattacagcagtgccccccagaacccccagctgaaaagtgattgcaccccaaatgataacaagataataagcacttctaccacctttgaaagtggtagcctcatgtgccatcccttggaaatcaccactcataatcatccctacagtggtaaacagaaatgcaaacagagaaaccatgacttgctgctccagaacaacgatgaaggatcttcttttcagcaacttcacatagacaaagctcgagaga

SEQ ID NO: 227682 - DNA, 493 bp, Glycine max
cgcagagaagaacagagagagatccatccatcaattccaatggccgatcagctcaccgacgaacagatctccgagttcaaggaagccttcagcctcttcgacaaggacggggatggttgtattaccaccaaggaacttgggaccgtgatgcggtcacttggccagaacccaactgaggcagagctgcaggacatgataaatgaggttgatgctgatgggaatggtaccattgatttcccagaattcctgaatctcatggctcgcaagatgaaagacactgattcagaggaggagctgaaggaggctttccgcgtgtttgacaaggatcagaatggcttcatctctgcagcggagctccgccatgtgatgaccaatctcggtgagaagctgaccgacgaggaagtcgatgagatgattcgcgaggctgacgttgatggtgatggtcagatcaactatgaagagtttgtcaaagtcatgatggccaagtgaggac

SEQ ID NO: 227683 - DNA, 529 bp, Glycine max
  unsure (1)..(529): unsure at all n locations
aaaagaaaatcctcacccattttcttcgtagccaaacactctgaaattctcagttatgtcgtggcaagcgtatgtggatgatcacctactgtgtgaaatcgaaggtaaccacctcactcacgccgctatcatcggccaagacggaagcgtttgggctcagagcaccaacttccctcagttcaaacctgaggaaataactgccatcaataatgactttaatgagcctggatcacttgctccaactggattgtatatcggtggcaccaaatacatggtcatccagggtgagcctggtgctgtcattcgagggaagaagggtcctggtggtgttactgtgaagaagaccggtgcggccttgatcattggcatttatgatgaaccaatgactccaggtcaatgcaacatggtagttgaaaggcttggcgattatctcattgatcagggtctctaatctttgctntatgtctaggtatcgtgcatatttcattggcttctgtacaagtttttgcatcgacctggactggaatgc

SEQ ID NO: 227684 - DNA, 451 bp, Glycine max
aaacgacatatatgcagcgtcggtgttactgcatcatggttggtctagcctgggggctgtctctcccctggcgcagaaggtggatggagctagtgagatggcagaccatctgcgtgaacgactgccaccctatggctcggacacgcggcggcatcatctgctgctacatctacgacgtctgccaagtgctgcagggaccttcagctggagctctgcatagtcctcgctgtggaccccaggatcgagacttgcatgctccctgttgccgatggaatcactatctgccgtcggatcagctgatcactgatcatcatgctcgtggaccaccagcgcaccgatgctcacgctgtacagatgactgggcaccagctgatgacacctgctactgcatgaaccgcgctcagtacatctggctgcaaagcttgctgtgcatgtgcttcaggctagtact

SEQ ID NO: 227685 - DNA, 494 bp, Glycine max
cgatgatgttgattcttccatctttggtgctatttatgagttcaagcctccatcatctatgtgcaatgacaccttacatagaagtccacgttatgtaattgccttccgagggactataaccaaggcagactcaagtttcccgtgacatcaagttgggtatccattttgtgcgaaatgggcttcatcaaacttcacgtgctgagatagccatccaagctgttcgaaacatggtggctactgtgggtgcttccaatatctggttagctggccactcgctaggatcagcaatggcaatgctaaccgggaaaaccatggccaagactggcatatttattgagtcttttctcttcaaccctccatatgtatctgctcctattgagagaattaaggacaaaaaattgaaacatgggcttagatttgctggcagtgtagtaacagctggacttgccattgctatgaaggataagcagaagaagagtttgtcctttgaccca

SEQ ID NO: 227686 - DNA, 534 bp, Glycine max
ataacatgaactgttcatttacaaaattaacttcacatggaaaaccagatacagcataattcaagtcaatatacaattatacatccaccaacataatatcagcgtgtttggattaacagtgagtacccaaaaatcacgcaaaatacatgaaaatctgaaagcaacaatgagttgttatgctttcaatgggaaaaagaaataatcaatccaaccttattgtgctagtattccagacacacactacaacaactacaagaattattagtatcggtagagcttggattctaggcgtaagtcaggtttccaccattggtgaatcccatgagcttctttgaaatcctttgaaggagtatgattaactgtcagagaagctgaaggaatgaggtgcaggggttcatcagattccttccccaacacacccatcagtagacaattaagggaagtttgagtggctaacttttcaatgtttcctgcaccaatctcctacatttttcttctgtgctcaaagtatccaacatactcagagcagatatg

SEQ ID NO: 227687 - DNA, 466 bp, Glycine max
gtattgacaagcgtgtgattgagaggttcgagaaggaggctgctgagatgaacaagaggtcattcaagtatgcctgggtgcttgacaagctcaaggctgagcgcgaaagaggaattaccattgatattgctttgtggaagtttgaaaccaccaagtactactgcacagtcatcgatgcccccggacatcgtgactttatcaagaacatgattactggtacctcccaggctgattgtgctgtccttatcattgactccaccactggtggttttgaagctggtatttctaaggatggacagactcgtgagcatgctcttcttgctttcaccttggtgtgaagcgatgatctgctgctgtaacaagatggatgccactaccccgaagtactctaaggctaggtatgatgaaattgtgaaggaagtctcttcctacttgaagaagttggttacaacccagacagattcat

SEQ ID NO: 227688 - DNA, 535 bp, Glycine max
aaaccataaacagtttataaaacttcgttataaattaaatgcaacttaaaacatccctcagcagcaaaggaaatggactaaaaccctatagctgcttgtgaaattcgaaatatctcagactcttcttaccatcaaaacaaaaaacagtactcatcaaaaacaaacagcaatgaaaattgaccaccgccgatcaagaacctagttttgaaagttacggctacatgaaatcggcagaaacttaaaaatataacttaaacaaaacacctaagactctgcaaggataaaactactataaaggagtaaccacgatgatgatcacatgtgctagcaaaattgcccaaatgcaatcacttcttcttggcagcggccttggtgaccttggctccggtggggtctttcttctcaacactcttgatgactccgacagccacagtttgacgcatgtccctcacagcaaaacgaccaaggggaggatactcagagaaagtttcaaccaccatgggcttggttggaatcatcttaaccatacctgcat

SEQ ID NO: 227689 - DNA, 503 bp, Glycine max
tgagcggagctaatagcgccggctaagcctacgcctcgtgaagttaagaaactatcggacattgatgaccaagaagggcttcattgccaaatccccttcatacaatattatggtcataatcaagagttctccatgaaagaccctgctgaagtgatatgaaaggcacttacaaaagctctagtataatactacccctatgccggtcggcttagggaaggtgcctgccaggaactcatggtacgattgcaatggtgaatgctggccttttcatcggagcagacgcttactgtcacgctgtaacagttctgacccagttgtctacttcatccaccgctttcttgcttgtacgagctcttgcgccatgttcccggttcacgtggaggtaccaactgatcctactactaattcaggtgacgcggctctagtgtggcggcttcattatcgccctgcgattgaatcacagcatgagcgaccgattcggcatagcgaaattcatggaagcc

SEQ ID NO: 227690 - DNA, 535 bp, Glycine max
  unsure (1)..(535): unsure at all n locations
aaaagaaaatcctcacccattttcttcgtagccaaacactctgaaattctcagttatgtcgtggcaagcgtatgtggatgatcacctactgtgtgaaatcgaaggtaaccacctcactcacgccgctatcatcggccaagacggaagcgtttgggctcagagcaccaacttccctcagttcaaacctgaggaaataactgccatcaataatgactttaatgagcctggatcacttgctccaactggattgtatatcggtggcaccaaatacatggtcatccagggtgagcctggtgctgtcattcgagggaagaagggtcctggtggtgttactgtgaagaagaccggtgcggccttgatcattggcatttatgatgaaccaatgactccaggtcaatgcaacatggtagttgaaaggcttggcgattatctcattgatcagggtctctaatctttgctttatgtcttgatatcgtgcatatttcattggcttctgtacaagtntttgcatcgacctggactggaatgctttgat

SEQ ID NO: 227691 - DNA, 415 bp, Glycine max
gtgaattacaccaggggaagtttcatctttcccggtgctcagccctatccccatcgcaactatactgaggaagttgctattcttgatggctactttggcaagcttagtgcacgaagcaatgcttatattttgggtggccaagacagatcacataactggcatgtctactctgctgctgcctatgatcgaacttcatgcgacaatgactacactgtagagatgtgcgtgactgggctacatcgagctaaaccgcacgttgattacctagagcagtctgatggagctgacattatgactgtgcagtatggcatcagaagtagactcccagattctgagatgtgtgactatgactttgagccatgtgcttgttcaatgaactgctgtgcaggcgctgctgaatgtaccatatcatgga

SEQ ID NO: 227692 - DNA, 453 bp, Glycine max
cgaaacttgtgcacaggtaagaaaccaagcaatagtgaagtggatcagctagtgaatcttgcagaaaaatacactcttgcaaaccatctattttggggcttgtggggacttatttcgagtcatgtcaatacaattgactttgactacaaggagtatgcgaggcagagatttcagcaatactggttgaagaagcctactttattggactcaccaagtatcgtttcccaagatgggattgccaatggtgtgaaccattgacatggatgcttcttatgtatttagcatgttcagcttggtatgtgttgactaatatatagaaaggcatgatgtgatgcataaaatttgtaaataatatataactaaaaatgtgtgatttgagaatttttacaacagttatgttagtaatccctccttttgtgataagttgaagaatggaagtgagaattcctagtt

SEQ ID NO: 227693 - DNA, 486 bp, Glycine max
  unsure (1)..(486): unsure at all n locations
gattgtttcatcatctgatttttgtggaccacaacagctctttccagatctcaaaaagatagtattcttggatgatgatgtagtagtacaacatgacatatcttctttgtgggaactagatcttaatggcaaagtcattggctctgtattgaagtcgtggtgtggagacggctgctgccctggaagtaaatacacaaactatttgaacttttcacatcctcccatatcatcaaagtttaacggtgatcagtgtgtatggctctatggcatgaatatatttgatcttgaagcttggaggagaacaaacataacggagacctaccatcaatggttgaaaattaacctcaagtccgggatgacgatgtggaatccaggagtgcttccacctgccttcattgcatctgagggtcatgtgcatcctatangttcatcaatgcttgtgactgatttaggttatcgccatcaatcagcagaaatagcaaagag

SEQ ID NO: 227694 - DNA, 552 bp, Glycine max
ctgcaaactgactgggagataacttctgcttcagaaaagttggcggagtgtcaagaaaccatccttaaccttgggaagcagttgaaggccttagctgcaccaaaggatgcctccctttttgacaatgccattgctgcccaatgtcatacagttacagacacaaatattgtccccctaaaagacacgaaagtgaaaaatcgatcttctctatttgatcagatgttggctgatgatgatactaaaggaaaggttagcaaagcaagtgaaagaggctccagtcccaccagcattcctggttttaagctgcccctggaaaagattttacttttgaatggacttaaaggccaggatgacagtgccagtgttaattctatggccattgtaccagccaagaaatccagtggtcggaatttttggagaaggctatttgggagatagaaatccaagaagaaaacacagctttcgttgaacacatgatatgcagttctagtgttgatttagtacttgccgagacgggtaacagttatatcttctttgctataattctaatga

SEQ ID NO: 227695 - DNA, 415 bp, Glycine max
gccgaaagccaagaaaaagctttcgatccctgtaactgcgttcgactatttagggttttttcggagacaatggcggatgaatcggagcacacggcggcgccggctgccggcgaatcgctgctcgacaagatcgccgagaagattcacggccacgacgactcttcctcttcctccgattccgattcggataaaaaggaatcttcgtcgattaaggagaaggttttccgcctctttggaagggagaagccagttcactccgtcctcggcggcggaaaacctgctgatgttctcttgtggaggaacaagaagatatctgctggtgtacttggtgtagccacggctatttggatctttttttagttgcttgaatatcacctgcttactctagtctgtcacatttccattctggtgcttg

SEQ ID NO: 227696 - DNA, 439 bp, Glycine max
cgctcacaaaggcaaataatttagttcttaacgtagatggtgcaattggatctcttttcttggatcttcttgctggtagtggaatgttcaccaaacaagagattgatgaaattgtggagattggctatctgaatggcctctttgtgctggcacgctccattggtctgattgggcacacctttgaccaaaagcgattgaagcaaccactttaccgtcacccatgggaggatgttctctacacaaagtgagaaagttttgtgcgactgtaagaactttggcatgcttcaaattagcaatcttttgggaaatcatgcacatctgaaatatgctggagtggttttgtagctgatagactagtgttgtacgatctattggtgaaaagtcatcttccatttgtaacttgtattaaatctcataaagagagaacttggtcattttt

SEQ ID NO: 227697 - DNA, 368 bp, Glycine max
  unsure (1)..(368): unsure at all n locations
ctcgttcttcttcgtcgttatcttcttcttttgttgtttgtgtgtttgttgtttctctcacctgaaaatgtcttgctgcggtggtaactgtggttgcggaagcgcctgcaagtagcggtaaccggcatgcgggagggctgctangatgtacgccagactttgagctacaccggggtcacccacaaccggaccttgggcctgggaggggcacccagtaagggttcaattcgggagtgctgaaatgggtgttcccgttgaaaacgatggctgcaaagggggagctaactgaacctgcaacccatgcacttgcaagtgaggtgttggagagctaaagcttcaagcagaaatggcccttataaataatgata

SEQ ID NO: 227698 - DNA, 459 bp, Glycine max
ctcgttcttcttcgtcgttatcttcttcttttgttgtttgtgtgtttgttttttctctcacctgaaaatgtcttgctgcggtggtaactgtggttgcggaagcgcctgcaagtgcggcaacggctgcggaggctgcaagatgtacccagacttgagctacaccgagtcaaccaccaccgagaccttggtcatgggagtggcaccagttaaggctcaattcgagagtgctgaaatgggtgttcccgctgagaacgatggctgcaaatgtggagctaactgcacctgcaacccctgcacttgcaagtgaggtgttggagagctaaagcttcaagcagaaatggcccttataaataatgataaaaactatatgtagtttcaaacttcaaaaatatgtagtatgtattatgttgcactctcgtgttttgtgtctaaacacacacccttagaataaagtggtca

SEQ ID NO: 227699 - DNA, 401 bp, Glycine max
ctcgagccgctcaagcttctgaaatggagatatcctacatccaatgactttggatctgaaatcattgctgccccagagagggaaaacaatgtccaagcgtattttatcaatgactattgggaagacattggaacaataagatcattttatgatgctaacttggctcttactgaagagaatccaatgttcaaattttatgatcccaagacacccatttacacgtcttcaaaattcctaccagcaacaaagattgacaagggcatgaatgtggacgcaataatctcccatggatgtttcctaagagaatgcactgtccaacatttcattgtgggtgaacgttcacggttggattatggagttgagctccacgacactgtactgatggtagctgactattacca

SEQ ID NO: 227700 - DNA, 556 bp, Glycine max
ctccagccgctcgagccgattctgctcgagaaagagaggtgaggtgaactcgtgtggggtgtggtagtgtggcagcgacacgtatcaacttcaataatcgcatcgcacaagcagtttccggagcatctcatcgtctccgaaaatgaacgacgccgatgtctccaagcaaatccagcagatggtgcgggtcattcgccaggaagctgaggaaaaggccaacgagatctctgtctccgccgaagaggaattcaatatcgagaagctgcagttggtcgaagccgactagaagaagatcaggcaagaatacgaacgcaatgagcgctcagttgaaattcgcacgaagattgagtactcaatgcagctgaatgcttcttggattaaagttcttccagctcaagatgacgtgatcagttccatgaagaagctgcatccacggaacttatgactgtgagtcatcatcatgatgatcaggtgtacagagacccttctgaacgatctcattgttcagtgtttgctaaaactgaaagaaccttttgcttattgagatgcggaaaga

SEQ ID NO: 227701 - DNA, 522 bp, Glycine max
gtccatcaccaccttccttctcctcctcctcctctcgccggcgatcaccgccaccccgacggcgtacgagatgctggagagctttcactttccggcgggtattctccccaagggagtgaccggttacgagctggttccgtccagcggcaaattcagcgccgatctgaacggttcgtgcagtttctccctcgaaggttcgtaccagttgagctaccagaaaaccatcaccggctacgtatccgaaggcaggctcaccgaactccgcgggattagcgtgaagatcctcttcttctggctcaacattctcgacgtcgttcgcgtcggcgaagacctcgatttctccgtcggcgtcgcctccgcttcctttcccctcgataacttcttcgtctccccgcagtgtggttgcggcttggattgcgatgattttcgaattaggaaactcgatttgggaaaccgaaaaccctccctttcctctgtgtagaaatcaagttcaattaaactctcctttatttaattatgatt

SEQ ID NO: 227702 - DNA, 514 bp, Glycine max
  unsure (1)..(514): unsure at all n locations
gtgatttattagataatcgaaaacagaaaatcttgagaactattcgaaactcagaagaattacgggaaggggccattgaacagctggaaaaagcccaagcccgcttaaggaaagtcgaaacggaagcagatcgttttcgggtgaatggctattctgagatcgaacgagaaaaattgaatttaattaattcaatttatacgactttggaacaattagaaaattacaaaaacgaagccattcattttgaacaacaaagagtgattaatcaagtccgacaacgggttttacaacaagccttacagggagctctaggaactctaaagagttgcttgaacaacgagttacatttacgtactgtcagtgctaatattgncatgtttgggacgatgaangacaaaataactgattagtctttctattataaaatagagtataggcattattttttgcttctaaaaaaataaaattaagacattttcatggtaaccattcgtgcagatgaaattggtaaaat

SEQ ID NO: 227703 - DNA, 482 bp, Glycine max
caagagctcgcgccatggtttccccggaaaacagcaattggctgttcgattacccgttgatcgacgacgacgttattcccgtcggcgactcctccttcgccgtctccgcttccaccttctcctggcccccacctcccgccaatgtcagtgtcgaaattgatgcttcgcttggggattctgatggcctaaaaaatcctgctttgaagaaaaggactaaatctgattcaagtactgcttctagctccaaagcgtgtcgggagaagttgaggagggataggcttaatgacaagtttgttgaattgggctccatcttggagcccggaaggcctcccaaaacagacaaggcttccattctgattgatgctgcccgaatggtgacacagctgcgggatgaagccctgaagttgaaagactcaaatacgagtcttcaagagaagattaaagagttaaaggctgagaagaatgaacttcgtgatgagaaa

SEQ ID NO: 227704 - DNA, 436 bp, Glycine max
caactattctacttaccttttctcttaatccaaatatcatcatctgaaacgatggctgccatggcaaccacaaccctctcttcaaacccgaaactctcatttttccacggaaagcccgttacatattcttcccgcgtcgcacccaccaccaagttattctcatccaaacaaggcacaatctccatgtccctaacccaacccccatacgacctccaatccttcaaattccaacccatcaaagaatccatcgtctcacgcgaaatgacgcgccgctacatgaccgacatgataacctacgccgacaccgacgtcgtaatcgtcggagccggctcggcggggctctcctgtgcgtacgagatcagcaagaaccccgccgtgagcgtcgccataatcgagcagtccgtgagccccggcggcggcgcgtggctcggcggac

SEQ ID NO: 227705 - DNA, 486 bp, Glycine max
cacccaatccctacccagacaactcccaacttctctcagtactctcatcaggatccgtcgagcagagagatgatcatcaacgtgaaggaatcgacggtggtgcggccggcggaggaggtggcgcggcgggtggtgtggaactccaacgtggacctggtggtccccaatttccacacgcccagtgtatacttctataggtccaacggcacctccaactttttcgacggcaaggttctgaaggaggcactgagcaaggtgctggtgccgttctacccaatggctgggcggctccggcgagacgaagacggtcgcgtggagattgactgcgacggtcagggggtgctcttcgtcgaggccgacaccggcgccgtcatcgacgatttcggcgacttcgctcccacccttgagctccgccagctcatccacgccgtcgattattcacagggaatagaaacctatcccctgttggtgttacaggtaacacat

SEQ ID NO: 227706 - DNA, 484 bp, Glycine max
gtgaaagcagaagacaacttgtatgaagaagaatttgcaaaagataacaggatagtggggattttgtgggctaacaagagggatagtaagctatggtgggccagtgctgagtgtagagagtgtaggcttggaatccaagtgctacccttgttgcctattactgagacattgttctctgatgctgattatgtgaaggagctagtggaatggacagtgccctttttaagtagtcaagggtggaagggaatgacctatgccttgcaaggaatttatgatagggaaacagcactgcagaatattagaaagttgacaggttttgatgatgggaattcgttcactaatctcttgtggtggattcacagcagatgaggagtgttgcacacaagcttctggacaagttttgtttattgcaatattattttaaatttcattcttgtcaacattttttattttctgtaatttatgaaattctacatcttgtatc

SEQ ID NO: 227707 - DNA, 423 bp, Glycine max
aaaaatcactgcctacgttggcggcggcaatggcggcggtgggaaggtccgtccggcggctaatggaaccgacggtgacggccggtttgaccggtcgcgacacggaacggttttcagcgacggcggtgcttcgacgcaggcttataaaacaggggaaaaaacagagtcggtgtcagggcaagaagaggaggaagaggagaatctgtggaacgcgatggtggaagaagcttctagaatggaggtgagttggagagggaaggatttggatagtgatgttatgaaacggttcgtttcgccggtgatggcgagtattgaatccgatgactatgcagagtatctgagaacagagcttgtgtaccaaacagggttgtcttaggaccccaacaacactctccttcttgccaactatgcccagtttctcta

SEQ ID NO: 227708 - DNA, 244 bp, Glycine max
caatttattcgctcctttcttcactgaaccaaaattggattgcatggatgctatcagaaagcaagcctgcaagctacgagaacaggtcgctcgccagcaacaggctgctctgaatcagatgggggtggctgatattgacggttcaaataatgtgggtactgatggaggggagctccagctacaccagagacttgggaaactttatatatccacacgtgcggggaagcattatcaaagggatatt

SEQ ID NO: 227709 - DNA, 433 bp, Glycine max
gataggtcagccgctctcgcttctcatcaagatgtcgcctttagtttccaacctgcatctctatgatattgcgaatgtcaagggagttgctgctgatatcaggcactgcaacacaccctcacaggtcagggatttcactggagcttctgagttgcccaatcgtttgcaggatgtgaatgctgctgccatacccgtcggcgtaccaaggaagcctggcatgactcgtgacgaccttgtcaacatcaatgctggcattgtcagggacttggctcctgctgttgccgattactgccctgatgctgttgttcaaattatcagtcaccctgtgaactgtaccgtgcctattgccacagaagtgttgaaacagaagggcgagcatgatcctaataagctctcaggggtcaccacactggatggtctgcgggctaacacg

SEQ ID NO: 227710 - DNA, 465 bp, Glycine max
agcttgcttacgaccatggatgttcctgtagatgcattgcattcccaaggatatgtttcgattggctgtgagccgtgcacaaggccagttttaccgggtcaacatgatagagaaggaaggtggtggtgggaggatgccgaagccatggaatgtggtcttcacaaaggtaatataaaacatgacgatgctgcccatctgaatggaaatggggcctgccaagcaaatggatctgccactgacgctgacatgttcaactcccaggatgtggtacagcttgagcaggtctgggattgagaatttggcaaaattggagaatcgaacagaaccctggctggatgagctctatgcaccatggagccgcttatgtcaagctatggaggaatcatatgttgatttggcagaacagttagctgggtcaggagtgaaagttgcaaaattcagagcggttggagaccagacggaata

SEQ ID NO: 227711 - DNA, 340 bp, Glycine max
ctgatctcactcaccattcaccaacctgcttctctgctctcttctttcccttgccaagaagaagaagaagaagatgccttcttcagaatcatcaacaggcttctccgagaccatttgagtgaccggcgctggtggctccatcgcctcttggatgggcaaactcctcttggagaaaggctacactgtccgaggaaccctcagaagcccagatgatcccaagaacgggcacttacaagagtgtgaaggagcttccgagagactaactctgcataaggttgacctacttcatgttgacatcgatagatctgctattaacggctgtcatggcgtctttcacact

SEQ ID NO: 227712 - DNA, 394 bp, Glycine max
atcaaatccgaagcatgatgcattgtgcgagcattgtctcggctccgtcctacgcgttcccttttctctctggctccgcttccactactccaactgcgatctcgctcactaagcgcagttggaagccacctccgagcatggcaaaaggcccagtcagagccaccgtttctatagagaaagagaccccggaggccaatcgtcccgaaacgtttctcagaggagtggacgaggcccagtcttccacttcggttcgggcccgcttcgagaagatgataagggaggcccaggacaccgtgtgcagtgccctcgaggccgctgatggtggggcccaattcaaggaggacgtttggtccaggcctcgtggcggcggtggcattagcagggtccttcaaga

SEQ ID NO: 227713 - DNA, 492 bp, Glycine max
tcttcttcacaccaattcacaaatcaccaaaagcaccactgctattgagagagaggattcagaaagacaacatcaaaatcaatcacaccaagatgctgctcggaaagagacctcgtcctccaatgaagagaaccacaagcatgtccgaaatgaccttggatctgaacaccgccgccgccgccgatgccgccgccaaccaacagagatcaggtgttggtcccggtgctgcagcagatcagactacgaggatgttggcaacacccaaaatcctcagaagacattcttcggatttcggagacacgcctcccttgcttcgcgcctgctccctctgcaaacgttgtctggtgcccggtcacgacatctacatgtacaggggtgataatgctttttgcagcctggagtgccgccaacagcagatgaaccaggacgagagataagagaagtttgtcatggcgtcgaagaataggtcgtggctactccaccgtctgggtc

SEQ ID NO: 227714 - DNA, 465 bp, Glycine max
caccctacaacaacacatacactcacacaataatggaaaaagggcaaagaaaaacaacaccactactactatgctctcacattgtggttctccatttgctctccctagtggccgagactagtgccaaggtttccgcggtgatcgtcttcggtgactcctccgtcgacgccggcaacaacaacttcatccccaccattgcacggagcaatttccagccatatgggcgtgactttgaaggtggaaaagccactgggaggttctgcaatgggagaatacctacggattttatatcagagtcttttgggctgaaaccttatgtgccagcatacttggatcctaagtataatatttcagattttgcaagtggggtcacttttgcttctgcagcaactggttatgataatgcaacttcagatgtgctgtctgtgataccactatggaagcaattagagtactacaagggat

SEQ ID NO: 227715 - DNA, 532 bp, Glycine max
  unsure (1)..(532): unsure at all n locations
ggaacagttacttccctacttgaagagaagggtgttattaaaggtgtgcactacaaaacgaaggatagtcaagaattatcagcttgtgcaccccttaccattgtttgtgatggctgtttctcaaacttgcgccgttctctttgtaatcctaagatgttccctatcatttcgttggcttaatattggagaattgtgaacttccttgtgcaaatcatggccatgtcatattgggagatccttcgccagttctgttctatcggataagtagttcagaaatccgttgtctggttgatgtccctggtcagaaggtcccatctatttccaatggtgaaatgacaaattatttgaagacagtggtagctccatagattcctcccgagcttcatgacgcattcatagccgcagtggacaaaggcaacatcaggacaatgccaaacagaagcatgccagcagctccttatcctactnctggagccctgttgatgggagatgcanttcacatgcgccatcctctaacaggggtggaatgact

SEQ ID NO: 227716 - DNA, 428 bp, Glycine max
gccaaaacccctctcaaaatcccccattcaagctaccccagctccaaagtttcaattttgagttccgtaaaactactgggtctctctcaagtttccaccttgttgcgcacgtgtccacgtggccttccaaggagaacaagaaccaccaaagtggtggtaatgtgagtagtagttgggttgaattgtacttgcctaggaaggttcagccctatgctcgccttgctcgccttgataagccaattgggacatggttgcttctatggccttgtatgtggtcaattaccctggctactaccccaggtcaccttcctgattttaaaatgttggctctgtttggatgtggggctttgcttttaagaggtgccggatgtactattaatgatctccttgatcgggatattgatacaatggtagaacggacaaagttg

SEQ ID NO: 227717 - DNA, 524 bp, Glycine max
caaacctaggaagttggaagtcatggcagcaacattgatggcagcaacaacaagttctggtactcttaaagcaactcctttccttggccaaggcaagggtgccaatgccaatgctcttagggatgttgtctccatgggaactgggaagtacaccatgggcaatgatttgtggtatggaccagacagagtgaaatacttgggacccttctcagctcagaccccttcatacttgaaaggagaattccctggggattatggatgggacactgctggcttatctgctgacccaggaagcatttgccaagaacagggctttagaggtgatccaatggcgatggccatgcttggagcactaggatgcataaccccagaggtgctagacaagtggttgaaagtggactttaaggagccagtgtggatcaaagctggagcccagatattctacgaaggtgggcttgactatttgggaaacccagaccttgtgcatgcacaaagcatcctggcagtgctgggcttcaagttat

SEQ ID NO: 227718 - DNA, 500 bp, Glycine max
ccactctcatatgttcttctcttctcttcaacatgaccggtgttgctgatgaagcccccgttaccctcgacacgctgaagcaattaatggctgagttcgccacagagagagactgggaccgtattcacagtccatgaaaccttcttttggctctggtgggtgaagtatgagaattgtctgagatatttcagtggacaggtgaggctccaaagggtcttccagattggacagaggaggaaaaggctcatcttggggaagagctttctgatgtgttgctttaccttgtcaggctctatgacatttgtggcgttgatcttggtgaagctgctttacgaaaggttcaactcagtgccatcaaatattctgcacaagtttgcctagaggaggaggtggtggtttcaatttcaggcacccaagaggaagaaacaaacccttacaccaataataatggcactgtcactgaatctgatgctgactgatatgattatgatcattattat

SEQ ID NO: 227719 - DNA, 490 bp, Glycine max
ttctgatgagagtaatgatagggcaagccgagtagttcgctccctctttaaggaaacaaacacttcccctggagagtctagcttctctgcacccagaaccagttcagatagtcagcttggcacatcctctgagaagttgctagcagagaatgaggttcttgtaaatgaatttcttcacgagcatcactatagtgttactgatgaatttgatgtctctgatcacattcaaaacagtgttgaggggaaaataaagcagacaatggagaaggccttttgggatggtatcatggaatctgtggaggtggaccatcccaactatgaccgaattgttcaacttatgggagaggttagggatgaaatttgtgagatggctccaaaaagctggatggaggatatttttgctgcaatcgatttagaaattcttttgcaggtgctgaaatcaggtaacctggacattgataaccttgcaaaaattctcgagttttcactc

SEQ ID NO: 227720 - DNA, 556 bp, Glycine max
  unsure (1)..(556): unsure at all n locations
ctcgagccgaatcggctcgagatcaaggctatgatgagttcaagcagttctgtaatgttggtgcgaaaaggggtgcatccacgaggccaactgagcaggaaaggaagaaaggagtgccatggactgaagaggagcacaggcaatttctgctgggtctcaagaagtatggtaaaggggattggagaaacatctctaggaactttgtgaccacaaggacaccaactcaggttgcaagtcatgctcagaagtacttcatcaggcagcttacaggagggaaggataagagaagatccagtatccatgacatcacaatggttaatctccaagaaacaaaatctccttcatcagacactaccaaaccctcttctccacttcagaatcaggcattgtctagcatggttaaggaggaatatgagtggaaattgccatgtgagggcatgcccattgttttcaattccacaagtggaaacatgttcatgtcagcaccactgcatggcatttcttcatatgaatctagaccacaggagcanaatttacttagacaatctccatggat

SEQ ID NO: 227721 - DNA, 511 bp, Glycine max
aaacgaatacgttttctctttctcttcaatttcacccttattagcatagcatattcatttccctttcttgaatcgttgtaagcgcattgcgattttgcccttatctttatttcaattttttgttctgtttttgttattcatttgggttaatttcgattcgaagcttaactgcgagaggggatatcagagaagttgattggcctcccattaataacagatctgaatgatctgatggagtctaaaggtgggaagaagaagtcgtctagtagtaagtcctttttgtacgaagctcctctcgattacatcattgaagacgttcgaccacacggtggaatcaagaagttcagatctgctgcttactccaactgcatccgcaagccatcctgagattccctaggtcgtgtgaggacgtagcccccttagtcctgcatctgctatatttttctagtctcttctcttctcctttatcttgttttcttccttgcccttttgttctctctacctacacagc

SEQ ID NO: 227722 - DNA, 443 bp, Glycine max
ccactttgttcaagagttcaagagaaagaacaagaaggacattagtggaaaccccagagcacttataaggttgaggactgcttgtgagagggccaagagaacactttcatcgactgctcagaccaccattgaaattgattctctatacgagggaattgatttctactccactgttactcgtgccagatttgaggagctcaacatggatctcttcaggaaatgtatggagccggtggagaaatgtttgagggatgctaagatggacaaaagaagtgttgatgatgttgtccttgttggtggttctaccagaattcccaaggttcaacaactgctgcaggacttctttaatggaaaagagctttgcaagagcattaatcccgatgaggctgttgcatatggtgcggctgttcaagctgcaatcttaagtggtgagggcaatgaga

SEQ ID NO: 227723 - DNA, 500 bp, Glycine max
ctcgagccgctcgagccgattcggctcgagaaagagaggtgaggtgaactcgtgtggggtgtggtagtgtggcagcgacacgtatcaacttcaataatcgcatcgcagaagcagtttccggtgcatctcatcgtctccgaaaatgaacgacgcagatgtctcgaagcaaatccagcagatggtgcggttcatccgccaggaagctgaggaaaaggccaacgagatctctgtctccgccgaagaggaattcaatatcgagaagctgcagttggtcgaagccgacaagaagaagatcaggcaagaatacgaacgcaaagagcgccaagttgaaattcgcaagaagattgagtactcaatgcagctgaatgcttctcggattaaagttcttcaagctcaagatgacgtgatcagttccatgaaagaagctgcatccaaggaacttttgactgtgagtcatcatcatgatgatcatgtgtacagaaaccttctgaaagatctca

SEQ ID NO: 227724 - DNA, 513 bp, Glycine max
  unsure (1)..(513): unsure at all n locations
tgcagagctcaaaaccctatagaggaggaagagagagcgtgcaagttccggccaccaccgaccatgacattcaagcgcaggaatggaggtcgcaacaaacacggccgcggccacgtcaaattcatccggtgctccaactgtggcaaatgctgtcccaaggacaaggccatcaagaggtttctggtgaggaacattgttgaacaggctgcagtcagagatgtgcaggaagcttgtgtctatgaacaatatactcttccgaaactctatgtgaagatgcagtactgtgtttcttgtgctatccactctcatgttgtgagggttcgatcccgcactgacaggaggaaacgtgagcctccacagagattcatcaggcgcagggatgatgcacctaggcctggtcagcccggcggccaaggacctcgtcctgctggcacagcagcacctgtccgaacctaaaagcaaatacttaaaaaaagcctttatgttatgctggactattnttataatataaac

SEQ ID NO: 227725 - DNA, 459 bp, Glycine max
cgaagaattcgaagagaaatcaaatcgaatctcatttgatctgtgtgtggttgcggcggcggcaatggcggagcacttggcatcgatattcgggacggagaaggacagggtgaactgcccgttctacttcaagatcggcgcgtgcaggcacggcgaccggtgctcgcgtctccacacgaagccgagcataagccccactattctcctctccaacatgtaccagcgccctgacatgatcacccccggcgtcgacgcccacggccaccccatcgaccctcgcaaaatccaggaccacttcgaggagttctacgaagacctcttcgacgagctctccaagtacggtgatatcgaaagcctcaatgtctgcgacaacctcgccgaccacatggtggggaatgtgtacgttcagttcagagaggaggagcatgccgctaatgctgttaggaacctcactggaag

SEQ ID NO: 227726 - DNA, 408 bp, Glycine max
ttggtttaacgtttcatgaaccggattaaagtgttattatggttttcagattggaacatcagcaccaactcaccaatgtatggtggtgagaataagctgaagaacatgggcggtgaaggaagaaacacaaaggtgctgcaagatattgtgaatctggtgggtaaacaaggctatggaaatggaataaacgtgtctaaacctgtcacaaggaactttcgtgctcagctattggtcaatgcacaagccgcaacggaacagaataagaaatcatgctctggagtgaacaacggagcagtggtggcaactgatggcgttggtgatcggaattttgatactagtagaaaggtgggagcatctaagaagcttaatgaagaacctgaagtgattgtcattagctctgatgatgaa

SEQ ID NO: 227727 - DNA, 374 bp, Glycine max
cgtgtatattcattttagcatcaaggttgaatctcagagaaaaagaaacatcgacaagcatgtctggaagaggaaagggaggcaagggtctcggaaagggaggagccaaacgacaccgtaaggttctgagggataacattcagggaatcaccaagcccgcgattcgccgtctggccagacgtggtggcgtcaagcgtatcagtggtcttatctatgaagaaactcgcggtgttctcaagatctttctagagaacgtcattcgcgacgctgacacctacactgaacacgctcgccgcatgaccgtgactgtcatggacgatgctgacgccctcaagaggcaggggaagaccctctacggatttggcgggtagaca

SEQ ID NO: 227728 - DNA, 481 bp, Glycine max
aataatctataatgtatataggttttctttatagattttgttaacttatttggttaatcattttttaatgtctcaggagggatgtttactgatttttctaatttgttcaagccaaggtcctttaagtgccaatgatcagtatactatatatatagttggaacagtgaaagtactagtttctatgctcccaattttttttttctctccattgattttgtgctttgattgtctactatgttactgacagttgatgcaagggaacatatggttagtaccaaatgctcaaggttttcctcaagtcatggccctttttcttcagtttcaactgcggcggtctattgccgtatccatctatgaacctggggaaaattctgagccatccaatttagattctttcttcagaggtctgcaggtcttgttggccgacactgacgatgtaaatagagcggtgacgcagaagttgctttagaaactacgctgt

SEQ ID NO: 227729 - DNA, 486 bp, Glycine max
gtgaatcacacgcatcttgcagaagtcaaaggaggccaaaattgggtgcatgagaaggatcagctctggtggtttcctggtggtggtacccatttcaagcatggggcttctgattacatagagaggttaggacatatgattaccaatgaggctggtgatctgcgttctgctggggtagttcaagttctggatgttggctgtggtgtggccagtttttcagcatatcttcttcccttggatatacgaacaatgtcctttgcccccaaggatggtcatgaaaatcagattcaatttgcattagaacgagggattggtgcaatgatctctgccttgtccacaaaacaactaccgtatcctagtgagtcatttgaaatgattcactgttcacgatgccgaatagactttcatgaaaacgatgggattttactgaaggagttgaatcgccttcttcgctacaatgggtactttgtttattcagctccccct

SEQ ID NO: 227730 - DNA, 514 bp, Glycine max
  unsure (1)..(514): unsure at all n locations
aaaaaaatctaagtccctttggtcttcatcttctgttctgatccaggtatggcttctaaacgcatcttgaaggagctcaaggatttgcagaaggatcctcctacctcatgcagtgcaggccctgtggctgaggacatgtttcactggcaagccacaatcatgggacctgctgatagcccatatgcaggtggtgttttcctagtttcaattcattttcctcctgactatcccttcaagccaccaaaggttgcttttcggactaaggtgttccacccaaacatcaacagcaatggcagtatatgtcttgacattctcaaggagcaatggagcccagccctaaccatttccaaggtccttttgtcaatttgctcattgttgacggatcccaaccctgatgatccactcgtaccagagattgcacacatgtacaagactgacagggccaagtatgaggctacngcccgcagctggacccagaagtatgccatgggatgaccatatagagctgtttttc

SEQ ID NO: 227731 - DNA, 461 bp, Glycine max
  unsure (1)..(461): unsure at all n locations
attaaagatgataagattgcttccaagctgtctgctgatgataagaagaaaattgaggatgcaattgagcaggctatccaatggctcgatggaaaccaacttgctgaagctgacgaattcgaggacaagatgaaggagttggagagcatttgtaaccccatcatagcaaagatgtaccaaggagctggtggtgatgcggatggagccatggatgaggatggtcctgctgctggcagtggaagcggtgctggacccaaaattgaggaagtcgattaagcagaccaattgtcatgggttgatcttgattttgcgaagacccttttgaagtttagataataacctgtcttgtcattatgttttggatttggattttacttttctcgtttttttaatgtactnttccccgtttcaacttaacaatgatataagttgcatatggtctaaagaataaagcaagggat

SEQ ID NO: 227732 - DNA, 388 bp, Glycine max
gaatctcagaattctctaaaagagatctttttctgctctttgaagaaagaagggtctttgcttgattttggagatgtctctgctctcagatctcatcaaccttaacctctccgataccaccgagaaggtgatcgcagagtacatatggatcggtggatcaggaatggacctgaggagcaaagcagggactctcccaggaccagttagcgacccttcagagcttcccaagtggaactatgatggttccagcacaggtcaagctcctggtgaagacagtgaagtgattttatacccacaagccattttcagggatccattcagaaggggtaacaatatcttggttatctgtgatgcctacactcctgctggagaacctattcccactaac

SEQ ID NO: 227733 - DNA, 517 bp, Glycine max
ggaaaacaaagtatagagtgaaagaatgggtgagaaaagcaagattttgatcataggaggcaccggctacatcggcaaacatatagtggaagcaagcgcaaaggctggaaatcccacttttgctttggtgagggaatccacactctctgacccctccaaggcacaactcatccacaattttgaggctttgggcgttaatttggtccgcggggatctgtacgatcatgagaagttggtgaaagctatcaagcaagtagatgtcgtcatatccacgctgggtcacctgcagcttgccgatcagctcaagatcatcgctgccattaaggaagccggtaatgttaagaggtttttcccttcggaattcggtaacgacgtggatcgtgtccatgccgtggaaccagcaaaatctgcattagctatcaaagcccaaattcgacgcagcattgaagcccgaggcatcccctatacgtacgtttccagcaactacttcgctggctattttcttcccacattagca

SEQ ID NO: 227734 - DNA, 420 bp, Glycine max
gcaaaatcttttttattgcatggtctccttcggtagcccgcattcgccctaagatgctatatgcaacatccaaggacaggttcagaagggagctgcagggtatccattatgagattcaggcaacagacccaaccgagatggatcttgaagtcctcagagagcgtgcaaactgagcacctacacaagagggttgtgtctaggtgatgtagataagatatctgaggccttagggaatgatgctgactgataccctttagatgttctactatgatctctgtctgtttcgcgacatatttctcataaatagctgacttatcattttatcaagtgaataacctgcacctgtgaaggctgattaggggtttctgcctaaaaaaccccactgcaggggaatctatgcttatccttattgccatgatg

SEQ ID NO: 227735 - DNA, 423 bp, Glycine max
gccaaatcttttttattgcatggtctccgtctgaagcccgcatacaccctaggatgctttatgcaacatccagggacaggtacagaagggagctgcagggcatacattatgagattcaggcaacagacccaaccgatatggatctagaagtcctcaaagagcgtgcaaactgaacacctacacaagagggttgtgtctaggtgatgtagttaagatatctgaagcctcagggaatgatgacgactgataccctgtagttgacctactatgatctctgtctcgtttcgcgacatatttctcatgaatagctgacttatgattccatcaagtaaatgacctgcaccagtgaaggctgattacgggatgctgccatacaaaccccactgcaggggaaattatgctattacttattgacatgatggt

SEQ ID NO: 227736 - DNA, 349 bp, Glycine max
aggacttgaagataatctcagaggtttactacaagagaaacagtgatcttcttgagcatgctatcgccaaggaaacctctggggactacaggaagtgccttctcacactgtcgggaaacgaagacttacaactgtgcttccaaggcattagagattatgagttgcggacagtaagctatacttgtgtgcgatggtttcatgtgtgatggttttccttgagtctggctccaagagggcttgatcatgaaaacttggggctatatcttatagatggtcaatatgacagctgctatgaggcttataaatggaacaggctcgaaagaactgggccaagaacatgcccgggcgt

SEQ ID NO: 227737 - DNA, 497 bp, Glycine max
agtaactccacacaacacaacacagcctaagagaattagattctaagctctatagagagagattatctgagaaatcttagccagccaaggaggaagaaagaatcatgtggtgctggcaaggagagggaggctagaaagaaagaaaaaaagaaagagctagagagagagggtaccctcttcttaatttgcactgtttttgtgtctgttacagcacttttaggagttcttctattctagtaacctctgccaaccaacaaaacaagcctgaaaataaaatagagatgctgcctccttgctggcgatcgttcgggaagaaacagtaatgctactgacatgggaaagaaggggagttggttttctgcaatcaaaagagttttcacacaccactccaaagggaagcaggattcagataataacaaaggcacaaaagagaagaagaaaagtctaggaaaactaaagcatggagaggccaattcattcatccccctcttcagaga

SEQ ID NO: 227738 - DNA, 429 bp, Glycine max
ctcaaattgttgaattctttaaagattcaagctgatagaagatagggtacacattgcatgtcgccctgatgggaaatctactggagaggcatatgtggagtttgtttctgctgaggaggctaagagggcaatgtccaaggataaaatgaccataggatcaaggtatgtagagctgtttccttctacaccagatgaagctagacgggcagagtcaagatcaaggcagtaatcgtggcatttttccttgtttgttttaggtcttcaccttgttccttctggtgcctactataatgtttttgaattttagattatgtactttacttttactagttcgacttgctgttatatttgcatgtctgaaatggatgcattaattgattaatagaaagggcctttgaatatatggctcggtgctgtgaaaaacaaaaa

SEQ ID NO: 227739 - DNA, 458 bp, Glycine max
gttgccattctcatcctcttctttctctctctaccattgccatggatccctacaagcaccggccatccagcgccttcaattctcccttctggactacaaattctggtgctcctatttggaacaacaactcctctttaaccgttggagctagaggtccaattctgctggaggattatcatcttgtggagaagcttgcaaattttgatagggaacgtatcccagaacgtgttgtccatgccaggggcgctagtgcaaagggtttctttgaggtcacccatgacatttctcacctgacatgtgcagatttccttcgagcccctggagttcagacgcctgtaattgttcgtttctcaactgtcattcatgagcgtggtagccctgaaaccttgagggaccctcgaggttttgccgtgaagtttacaccagagagggtaactttgaccttgatggaaacacct

SEQ ID NO: 227740 - DNA, 500 bp, Glycine max
attccccttatctttctctcttctctctccccgcccaaaccctaactccctaccctattccgctttctctcatccatcatgaaaggaggaaagtccaagaccgaatctaagagagccgatgccaaacttgctgtgaataagaagggcgccgccaccaagactaggaaacccgccggaaaggggaaggcagcgaaagatcctaacaagccaaagaggcctccaagtgctttcttcgttttcatggaggaattcaggaaggtgttcaacaaggaacatcccgacaacaaagcagtgtctgctgtgggcaaagctgctggagcaaaatggaagacgatgtctgatgctgaaaaagcaccttatgtggcaaagtctgagaaaaggaaagtggagtacgagaagaacatgagagcttataacatgaaacaggcggaaggtcctactggtggggatgaagaagaatctgagaagtctgcatctgaggtgaatgatgaggatgatga

SEQ ID NO: 227741 - DNA, 497 bp, Glycine max
ttcctctgttgagtggcttcagggctttttagtttccagaagacagccattgacttggtacaaaactacctttgatgccccagctggagttgcaccattggctttagacatgggcagcatgggcaaaggtcaagtgtggataaatggacaaagtctgggccgctattggcctgcttacaaagcatccggttcttgtggttactgtaactatgctggaacttacaacgagaagaaatgtggaagtaactgtggccaggcttctcaaagatggtatcatgttcctcactcatggctgaagccaactggaaatttattggttgtgtttgaggaattgggtggggatccgaacgggatctttttggttagaagggatatagatagtgtatgtgctgatatctatgagtggcaaccaaatcttgtaagttatgacatgcaagcttctggcaaagtcagaagtcctgtgagaccaacagcacatttgtcatgtggacctggac

SEQ ID NO: 227742 - DNA, 270 bp, Glycine max
ctgaatctttcctttgccaatggatttccgtctgtcagtaatgcagtgctatgtgccaaagcatcgatgctattacagaatgtgcaccctgccattctccttaggttcctgcgggagcatagatcagaatgggcagacaacaatatggatgcttacacagctgctgctattaaagttggcccttgcagcttttcaggatctcgtgttggaaactatggaggtcaagttatactccccctagcacacacaattgagcatgaagagtttttg

SEQ ID NO: 227743 - DNA, 262 bp, Glycine max
cgagaattcatggcagagatggaaaccttagggaagatcaagcacagaaatcttgtccctttgttggggtactgcaaagtaggggaggagaggctccttgtttatgagtacatggagtatggaagcctagaagagatgcttcatgggaggatcaagacacgtgatcgacgcattttgacatgggaagaaaggaagaagaatgcaagaagtgctgctaaaggactttgttttctgcaccacaattgccttccttcttttattc

SEQ ID NO: 227744 - DNA, 471 bp, Glycine max
ttaacatatacaaattctctgtgttgtgttgtgtacttgtgttaattgtgttgttgttgtaggaaatttaactgaagagagaatgatgatgaagtctgctatgtgtgcattggtgcttgtggcactggttgtggttgaagtggggcccatggctgaggctgcggtgacttgcaacccaccacagttgactccttgtcttccggcaattaattcaggttctgcaccttcgagtgcttgttgccagaagctgaaggagcaaaagccatgcttctgtggctacctcaaaaaccctagcttgaagcagtatgttaactctcctaatgccaaaaaaaccgttagttcttgtgggattgcctatccaacttgataagcacctcttatatatatatataaagtgtgtgaacaatatatatatattgattaaaaaatatcgctgaatttatatacacactctgatcctataaaaacatc

SEQ ID NO: 227745 - DNA, 390 bp, Glycine max
gctggcatctcctatgccatcaacagtggctaccaatcttggggacccctctttggtaagcttttctttgcattttgggtgatcatccatctataccctttcctcaaaggtctcatggggcgccaaaacagaacaccaaccattgtggtggtgtggtccgttctgcttgcatccattttctcactcttgtgggttagaattgatccattcaccacaagggtcactggtcctgatgttgaggagtgtggcattaactgctagaagaccaaaagacaagtgtagtgtattgtgttttgggttgtaattataattgttgttttgtagccgttatgtttaagttatgtgcagttgtttatagaagatgcataagaaaacaaactagaaccgaac

SEQ ID NO: 227746 - DNA, 498 bp, Glycine max
aaattgtaatctcagaacatgtttgtatgtttgtgtttacgatcttttttttctctatttaagtagatactatgttgtcttcttataatgcaggttgctttgctcacctaggcaccaatgctacgaaaaaagataaaactttggttatctcaaaatatggagcaagtggagattatcctgcttgtaccgacttagcatataataaggccatatctgatggtgtggatgttctagactgtcctgttcaaatgtctaaggacggaacaccattttgcttaaactccattgatcttatagagagtacaacagtcgcccaatcaagcttcagcaaatttgccatgactatccctgagatcaaatctggcagtggcatatttgcattcaacttgacatggaatgatataaaaatcttgaccccctcaatattgaacccttttgcaaaatacagattgttcaggaatccaagatctaagaatgctgggacattgttggcattat

SEQ ID NO: 227747 - DNA, 470 bp, Glycine max
  unsure (1)..(470): unsure at all n locations
ctaaagcctggccctgcaagtgttgaaatcgatgatcaccctatgcaaattgaagaaacacagtacccgaaaaccttcttctataaagaagaccttcatccaggcaaaacaatgaaagtacaattcagcaagcctccctttcaacaaccatggggtgttggtacatggttaaaggaaattaaagacactactaaagaaggatatagttttgaagagctatgcatcaagaaagaagccattgagggagaagagaagttttgtgcaaaatccttgggaacagtaattggttttgccatttcaaagctgggaaagaacattcaagtactttcaagttcctttgtcaataagcaagaccaatacactgtggaaggagtgcagaatcttggagacaaagcagtgatgtgtcataggctaaatntcagaactgcagtattttactgccatgaagtccgtgaaacaacagctttcat

SEQ ID NO: 227748 - DNA, 487 bp, Glycine max
tttggaaggaagctcttacgtgaaagctgctaagaagttgcatgagattgatcctttacaaaagcctaaacaggaccgttatgctcttaggacttcaccacaatggcttggtcctctaattgaagtgattagattctctaccaagtcaattgagagggagattaactcagtcaatgacaaccctttgattgatgtgtcaaggaacaaggcacttcatggtggtaacttccaaggaactcctattggagtctccatggataatacacgtttggctcttgcttcaattggtaaactcatgtttgctcaattctctgagcttgtcaatgattattacaacaatggtttgccttcaaatctcactgccagcagaaaccccagcttggattatggattcaagggagctgaaattgccatggcatcttattgttctgaacttcaatatttggcgaatccggtgacaagccacgtgcaaagcgcggagcaacac

SEQ ID NO: 227749 - DNA, 516 bp, Glycine max
caggtacctgcttcctgaacatataggaccatgtggccttaagatcacatattctggacattcagacttaagtgtcaagtttcaaagtcacagaagcaggtttcctgattcctctggactctgagtttcttaggcctacatggatccatatttttatagaatttgtattgctctttttacctgtgttctctcttttccctgctggtatttaatttattccttatcacgggtattgctgtccatatagtttcttagcctttatttttatggttattatatcacattctttattgtttttaattattgtaacttttcttggttttttcttcttctagagactacactaatccttaccttcctgttgctcaatctgctatggagggaagtggacagcccatggtgggtttggatgggaagagactggaggccgagagtaatgttctttttgcatctattgagaacatgcagtatactgtaaccttggatgtcttacacatggttttctctgcctttgga

SEQ ID NO: 227750 - DNA, 579 bp, Glycine max
  unsure (1)..(579): unsure at all n locations
gaaccttactgcgtgggccagtttattaggctgaaagccaatgttttgagtcctcgatttgaatggccacgtaaaaggggaggtgcctgggctactggtaagatttcttggatcctaccaaatggatgtctagttgtcaagtttccaggcatgttgaacttttgggatgcaccaagaactgtcttggctgatccctccgaggttgatgtcgttaactttaagaattgtccgaagatgatagagaagtatcaacatgtagaggatcaccactgggcagttagacctgttctgattgcatttggctttcttactgctgtgaaactaggaatgtcaattggaaagaaacttgggaggaacatgaatgctaatgcaatggatagtgaaagtcattatacagataaccagaatgctagccctacatggacatcttcagtggctaacatcttttccagagaaggtgttaacttggctaatggtcgctagttttaccccttctatctcaatattaacctgttctatcatgctgttgttgggacaaacatatcacttgagaatnngtaaattgtaatatacataaat

SEQ ID NO: 227751 - DNA, 516 bp, Glycine max
acaaggcatatgtacaacttttacattcagtgttggccccgttggcatttatgtataattacaaatttacaattctcaagtgatatgtttgtcccaacaacagcatgatagaacaggttaatattgagatagaaggggtaaaactagcgaccattagccaagttaacaccttctctggaaaagatgttagccactgaagatgtccatgtagggctagcattctggttatctgtataatgactttcactatccattgcattagcattcatgttcctcccaagtttctttccaattgacattcctagtttcacagcagtaagaaagccaaatgcaatcagaacaggtctaactgcccagtggtgatcctctacatgttgatactgctctatcattttcggacaatttttaaagttaacgacatcaacctcggagggatcagccaagacagttcttggtgcatccaaaagttcaacatgcctggaaacttgacaactagacattcatttggtaggatcc

SEQ ID NO: 227752 - DNA, 398 bp, Glycine max
ctgtcaaagaaaatcctgccgagtggattccaatcctgaggaaaatatgttggtatttggttctatcaccgcatgatccaatgcagtcaagccttctcaattctaccttggaggataagaatctgtctgagattccaaactttaagttactgttgaaacagttggtcactatggaggttatccagtggacaactctttgggattcatacaaggatgaatttgagaatgagagtaacttaagaaagaatttgggtgaaaaagcagctgaagatctgagggaaagagtaattgaacataatattattgttatatcaaaatactatggaaagattactttgaagagacttgcggagcttttgtgtctcagtgttcagaaagctgagaagcatctttcagat

SEQ ID NO: 227753 - DNA, 483 bp, Glycine max
cggaaaaattaatcagacaaagaatatcagagcactcgatttcttcccactgagctacaaacaagaccgtttaggatcctgtcataagtcggtggtaacaggtaaggtattcaccattagtatacaacgctaaaaagcatataccatctctaccctaattgcatcattgacagtatctaaaatggaaaaagaaagcatcgtcttttaatccaatacctcaccaatctaatcagcaataattcaaattaacatccttttacggcaccttcagtccaaaatcacatctatattggggttcacctgtaacttttaacagtgatatggagcttcttaaaccttcaaggcagctttatgcaccatggtttccttgtgtatttgatggcagctcttcttcacaagatcaagcagcctctccaagtttgctgcccatgagttaagaacgtcattgctatccttagctctttggaaacaaactattcccat

SEQ ID NO: 227754 - DNA, 466 bp, Glycine max
  unsure (1)..(466): unsure at all n locations
cacagaactacaatggtaggagtcctgtggtcaattcttctagcatctattttctcattgatttgggtcaggattgatcccttcttgcccaagcaaactggtccagtgctcaaacaatgtggggtggaatgctaagactatgtggagaggccatgttgatgtcccaatgagaagagtaaatggcacttgtgtgcgtgcttttttattgtcttactggcattgagtggtttgccttaatgagaagattaatctgtgtacattgacttaaaggggaaaattgggtctgattggaatgtcttcatttcaagatacaacaaaaccatatactatagccattgtcattgtttgggaaaacatgttcttagttttggtgctactggatgatttttcatctactgaaacttgattcttgagaataagactaatattttttgccaaaaaaaaaannnnnnnnanaaaaaanaaa

SEQ ID NO: 227755 - DNA, 440 bp, Glycine max
ctctggcaaaaaatattagtcttattctcaagaatcaagtttcagtagatgaaaaatcatccagtagcaccaaaactaagaacatgttttcccaaacaatgacaatggctatagtatatgggtttgttggatcttgaaatgaagacattccaatcagacccaattttcccctttaagtcaatgtacacagattaatcttctcattaaggcaaaccactcaatgccagtaagacaataaaaaagcacgcacacaagtgccatttactcttctcattgggacatcaacatggcctctccacatagtcttagcattccaccccacattgtttgagcactggaccagtttgcttgggcaagaagggatcaatcctgacccaaatcaatgagaaaatagatgctagaagaattgaccacaggactcctaccattgtagttctggg

SEQ ID NO: 227756 - DNA, 531 bp, Glycine max
atcattatctatctccacatttaaagcagtgctttgtttattgttcattgtatcctatagattatgaattttggaaagaggaattaatcttgttgtggatggctgagggccttttaaatccccaaagaaatggaaagactttagaagaaactggtgacgactattttgatgatttggtttcaagatcattttttcaaccttctacaagttggcctcaacacaaatgttttgtgatgcaccaactcatgcgtgatctggcaatatcctttggtggagaattctatttcagatcagaagaacctcgggaagaaatcaagattggtgtctacactcgtcatttgtcatttaccaaatttggtgatatagccttggacaactttaaaacttttgacaaagtaaaatttttgagaactttcttgccgatcaattttaaagatgccccattcaacaatgaaaatgcgccatgtttcataatgtcaaagctcaagttcctgagagtttatcattttgtggcttccaaggttaaatgct

SEQ ID NO: 227757 - DNA, 497 bp, Glycine max
agttgtaaggggttttaaacacttttcactatatccacaatggtcttctaaatggggagttacatatgtacaaaaaacaaatctagcgtataactattaacaaggaaaaagcaagaaagatggttctatatgtatacttctgattacaaaattgatgttacttagtttattatgacaccatgctagttgatccctagatatttttgacatgttcaacactctccaaaccagtttcatgtccacttgaggaaaaaagttaagcaaatgatctcttccatcttcctcatgcttttggaacttctttattatgctacttctcttcaaaagctcattaagtctcttttccttctttcgaagttctgcttgaatctccctaagaaattctgaatctgcagggtcttggagcctttacttgagtttctttaggacctttatgagcccagctagatgcatctttatcagcttttatgaaacgcgaaattttcttaattgattct

SEQ ID NO: 227758 - DNA, 552 bp, Glycine max
atctcttgcaacactacaattttgcttacatgggagccaagttaacaaaaaggataagacttggcatgctggagaatatcttgacctttgaaactgcttggtttgatgaggaacaaaactccagtggagcattatgctcaaggttaagcaatgaggcttccatggttaagtcccttgtagcagacagactctctttactagttcaaacaacttctgctgtcacaattgcaatgatcataggccttgccgtggcttggaagctagctcttgttatgatagcagtgcagccactcacaatcctttgtttttatacaagaaaagtgttgctctccacactctcaacaaaatttgtcaaggcacagaatcgaagtacacaaattgcagtggaggcagtttataaccacagaattgtgacttcatttgggagcatcacgaaagtgctatggctattcgatgaggcgcacgaggcgccgaggaaggaggcgaggaagaagtcttggctagcaggcataggaatgggttctgctcagtgtctaacgttcatgtcatggg

SEQ ID NO: 227759 - DNA, 449 bp, Glycine max
aacaaatcccagggagccaccaaccatggcttccaagctctgcgactcatgcaaatcagccactgctaccttgtactgccgccccgacgcggccttcctctgcggcgcctgtgactctaaggttcatgccgccaacaagctcgcatcgcgccacccgcgcgtcgtgctctgcgaggtgtgcgagcaggcgcccgcgcatgtgacctgtaaagccgacgccgccgcgctctgccttgcctgcgatcgcgatatccactccgccaaccccctcgccagccgccacgagcgcatccccgtcacgccgttcttcgagtccgtacattcagtcaaggcctcctcgccgatcaacttccaccaccgcttcttctccgacgccgacgctgatgctgacgtcagcaccgaggaggccgaggccgcgtcatggctgctacctaatccaaagacagatc

SEQ ID NO: 227760 - DNA, 472 bp, Glycine max
acattgcataattcaaacaaaagaaggggtagtccatatatacagcagcaaaagcaaacataagaaaacaaaaaaggaagccttcatattcatatatgatatatatgataatcatcaacacgacggaacgacgccgtatccagccagagggtccgcatcagtgcgtttcgcgaaccttcctttgattcttggcctcgtttcggcatacgcttttctcgatgcgtaacgaaggggcttctcgaactttcgggtcttcctcttctccctgtacctcaacactctagccttcctatccgccgccgagaactgcgccgtcaccgtcaccggggccactttgctgtagctgcaagtcgatatctccgacatcgtgttcccgtccggcacaactccaactttcattgacgacggagaagatacctcgaaaaataaaaaataaattaaatccaacaagcaaatttagggtaagccgatt

SEQ ID NO: 227761 - DNA, 543 bp, Glycine max
  unsure (1)..(543): unsure at all n locations
gagatgaaccgcaatcatatgggagaaactcgatatctttcttctgatgggaaggcttgttcttcaatgaagaataatgaggcaaattggtctagtttttctgtaacctcaatccctaactgtggggaaggatgtgtttggagagcagatataataataagctttggagtgtggtgtatcaaacgtgttctggacctctccctaatggagagccgaccagagctgtgggggaagtacacttatgtactcaatcgcctccagggcatcattgatctggctttctccaagcctcgtagtcccatgaccccatgcttttgccttcaagttcccatgacttaccagcagaagtcaagctcgcctccttccaatgggatgctngcccctgcgtcaaaaccgngccgtggaaaatgcacaactgcatcagtggtgtttgagatggtcaaggatgtggagatagcaatctccagcccgaaaggtcgcacaggaaccgctgctggtgacgtagccttccccaaaggaaaggagaatttggcatctgttctc

SEQ ID NO: 227762 - DNA, 607 bp, Glycine max
  unsure (1)..(607): unsure at all n locations
gtggtaaatctggcgtggtttggattttgctggcgttgatcgccgccgcttggtgtctgttaactccagcgagggcgaattcgacgacaatatatgaggagctccgggcgcagggtcttccggtggggcttcttccaaagggaatagcgaagtactcgatgaacgcgacgagcggggagttcgaggtgtggatgaaggaagcgtgcaacgcgaagttcgagaacgaggtgcactacgactccaatataaagggtgttcttggctacggtcggatcggggaattatccggtgtgtcggcgcaggagctcttcctgtggttccccgttaagggtattagggttgatgttcccacgtcggggctcattcatttcgatgttggtgttgcggataagcagttctctctttcgctctttgaagatcctcctgattgtaacccccaggcccaggttaatgttggtggtgaaggtgagcaaagggctgtttggtagaagataggaggaatgttgctgcatttcanattatacagctcaatcggcccctctatgcctgtggttgggcctcatggatatatatatatatatatatatatatatatatatatatatat

SEQ ID NO: 227763 - DNA, 517 bp, Glycine max
ggccgatactccttattgttgcctcgcgttgtggtgtgcaccatgtgtgtcttaccttcttcgcaaacgagctctctatgatgatatgtcaaggtacacatgttgtgctggctacatgccttgcagtggtaggtgtggagaaagtaaatgtcctgaattttgcctttgcactgaggttttcctctgctttggaaattcagtcgcctcaactcgctttctattgcaagatgaatttaacattcaaactacgcaatgtgataattgcattattggtttcatgttttgccttcaacaaattgcatgtatattctctattgttgccatgattgtgggaagcgatgaaattcaagaggcttctcagttgctgtcttgtttggctgactttgtgtactgcacggtctgtgcatgcatgcagactcagcacaagattgagatggacaagcgagacgggaaatttggaccccaaccagcaatggcagtgcctcctatgcagcagatgtcacgcattgatcaacag

SEQ ID NO: 227764 - DNA, 460 bp, Glycine max
tttttttttttttttttttttttttatatattttttttttttttttttttattttggttggtttttaattaatttatacatttttttataacaattaaaccaaaattaaatccaaaaaaaaaaaaaaaacaaactaaaaaacaaaaaaaaaaaaataaaaaaaaaaaaaaataacaaaaaaaaaaaaaaaaaaaaaaaaaaaaaaaaaaaaaaaaaaaaaaaaaaaaaaaaaaaaaaaaaaacaaaatatgaacaccaaaaaccaaccacaaaggaaaaacaaaacaaaaaaaaccaaaaaaaaaaaaaaaaacaaaggaaacaccaaaagggggaaaaccacaaaaaaaaaaacactcaagaaaaaaaaaaaaaaaaaaaagcggggcacaaccccaccaagaagaaaccccaaaaaaaagagcaccaacgggagaaaaaaaaaaactggcaggaacac

SEQ ID NO: 227765 - DNA, 524 bp, Glycine max
attaagatcgttcggtgaaattgatcacgctggtgccgcataccctagcgttcctgttattctattgtggctgaaacaaaacagtgttgaacggcgaggtagaacgacgacccccttctgcgttttgaccttcaatctcaatcatggccaaagctgaaggtggcaaggaaccaataaatgaacaagcagtagcaaatatgtatgctgcaatgaggtctgagctcaaccaaatttactccaaaataactgaactggagatggaagttagtgagcacacattggttaccaatgccattcaaccacttgaccaatctagacgatgctatcgtatgattggaggggtgcttgtggagagaaccatcaaagaggtcttgcctgctgtgcagcgaaataaagaaggactcgaagaggttgtggcaaggcttaacgaggcgttggaaaagaagaaaaaggaaatttctgagtttgaggctaaatataaaatcaggataaggaaggctgatgctgaggtgaaggatgaatct

SEQ ID NO: 227766 - DNA, 544 bp, Glycine max
aaacttaattttttttcaaggtatacttgctaatgagcgtggttggaaacacgtcttggatccacgttcaagcagcaaaaccacgtcaaaatgatgcagaagttacatttacttgcttctatatggacggaacatgaatctaattcagacacgcacttagtctacatataaaacaaatcatcaaactgcatgcacccaattgtaagacaagttctggctactagtttgaggaaacaaaataaaaatagacaaatcattcacttccacctgcaggacccacaagaaccccctgagcagacccttccttcctaccagattcatccttcacctcagcatcagccttccttatcctgattttatatttagcctcaaactcagaaatttcctttttcttcttttccaacgcctcgttaagccttgccacaacctcttcgagtccttctttatttcgctgcacagcaggcaagacctctttgatggttctctccacaagcacccctccaatcatacgatagcatcgtctagattggtcaagtggttgaat

SEQ ID NO: 227767 - DNA, 535 bp, Glycine max
tggagccattgtcgctgtctcagaggcttacaatagcccttgatgttgctagagcgatggaataccttcatggtcttgcacgccaaaccttcatccatcgcgacctcaagtcttctaatattctactgggggatgattttcacgcaaaagtttctgattttggcctggtgaaacttgccccggatggccagaagtctgtggcaacaaagcttgcaggaacatttggttatcttgcccctgaatatgcagtgatggggaaaatcaccactaaagttgacgttttcagctccggtgtggtcttgatggaacttctgactggactaatggctcttgacgagagccggtcggaggaaagtcgatacctagctgaatggttttggcaaattaaatccagcaaagaaacacttatggcagccattgacccagctcttgaagcaagtgaagaggcttttgagagcatttctattgtggctgaactcgctggacactgcacttccagggatgcaagtcacaggcctgatatgagtcatgcagt

SEQ ID NO: 227768 - DNA, 511 bp, Glycine max
ctcatgtagcattattgataaatattattaacgtaccttgtagccaagattcgttactttagattttggaatttgtatatagacacaaacataaaaagaataaaaataatgtttctttatctacatctccatacctgtattctctaaaagtccaaagacaaagacttggaaacaaataaattatacccttttgctgccaacacagaaatagccaatataaagtgaattttattggtaagacaaagtaacaagttccacaaattgcactggagttacctccagatcatcttgcatcagcagaggtaaaagagtctgcaaaaccagtaggcctagctggtatgcttccttcactgtgtgcacttgtatagcttgattctttgccttctgattccttccaatctttcagcaactgaggaagtggttgactgaagtcaatgccagagccataatcaaattcttcatcaacaggtcgccatttctccactaatgcggatagcacactgactgcatg

SEQ ID NO: 227769 - DNA, 364 bp, Glycine max
aaaaaaaacagaattacacagaaactcaatttaaataaaaatttattatggatcataggttacgtgtgttttgtgacaatacccaaaattccttttctattgctactttctctgattctcgtcttcagttacgttaacgcagccttcgacctcgctactatacccttcaacgatggctattctccgctcttcggagatagcaacgttgttcgctccgaggatggcaacggcgtacaactccgcctgatcggtacacaggttgggttttcatttcctccagtttgtcccagtatggattcttcatcgcgagaatcaagttgccatcgaattatactgctggtatttgcgtggccttttatacatc

SEQ ID NO: 227770 - DNA, 485 bp, Glycine max
  unsure (1)..(485): unsure at all n locations
gatgcagtagaatagtaatagtggtaacaaaaggcaacagagaacagaagagaaaggaaaagagagggtttggtgagttacccaagagaaaggatgaagagagagcgccagcagcttggttccaacgcaggaacctcaagctgcggttattcaagcggaaaatcgaatctttgggaggaagaaggaggcatggacgagcttcttgcagtggtgggttacaaggtgaggtcatcggacatggcggaagtggcgcagaagctggagcgtcttgaggaagccatgggaaatgtccaagatgacctcacggacctttcaaacgacgccgttcattacaacccttccgacatctccaactggctccaaaccatgctttccaattttgaccctctcccctccgaggagcccgagaaggactccgcctcgtcggactacgatctcaaggctattccggngaaagcaatctatggagggtggtaagtgacgcg

SEQ ID NO: 227771 - DNA, 477 bp, Glycine max
gggcatgattagaaattaatttaaaacaaaaaataaaaagaaaaagctggctgaggaatcggcgagtcgactcagtgagcagcaaccaccgattttgtagcgagttgccacacggaggtggcaatcaagggcctagtgtgccatcccaacatgagacacccattgttctcttccactctatacccatccccacccccgaaaagcgatagcaacatgctggcctgcttgtacgcgttcgaacccaagtgaaccggagaaaacccggtcgaaccgaaccggttccgccactggttcagcgtctcgtgcctttccacgcggtccattccctcgcacgccaccacgttgcagatttgcttccctaagtaaacctccgacatggccttgtcgttcgggttcacaggcgaaccctccagcgagtcgaatagagttgaataatagtgcagtgactcggtgaaccggtcgacaaaactcagtccg

SEQ ID NO: 227772 - DNA, 512 bp, Glycine max
gtaatgttatctatcctcgtcccctttctccctcctcatcttctctccccatttggcatatagcatccaaaatcgaatcttcgtttgaaacatggcttcctcctccttcctctgccccgcagcatttaacttctcacagaagccacttcaatccacttttctgcatcctccccctcttctcactctaaacattcttccaaagaaattgagaaaaccccaccaactgagaaccctcatagtggccaaatccaatggcagtgactctgctgatgttcctgatcgtttgatttcagcactttgctacttttaccctttctttgatggcatacagtacggaaagtatgtaatcacacagttctaccctcttcaagccattgttcaaccattggttcctgcaataagagttttcaagagcttcccttttaatggattccttggtgtttttgaccctttattttggttgtggtgagaaaaccccaattttcagtagtatgtgagggttcaacactatg

SEQ ID NO: 227773 - DNA, 504 bp, Glycine max
cagtaaatccttttagatttttcatcgaattcaattaacaatggagaaagggaagtttctcatcatcttacaataatttaatcctgatttagaaagacgtactagaatccagcaatgtaagaaacaactaaaatccgttttgcagaaactttccaagatagtaactattaaggaagtgaaaatgcaaacttttccactacttaggctgaagttgctttgctatacaattaaattatctcaataacggattggtgattcaaagaacttgcctatcagctgcctcagcaacaatgggtaatctggggatttgacccagcaagcaagaagaagaaccataaatcaagcacaccaagaggaacaaaaacacagtgctatccaaactcattatcaaatccaatcccaacccatctttgggattaaaccctctttcaaggaggtcagggaaaatcaagagcacatcaaggacaacggcttgcatagtgttgaacctcacatacttactga

SEQ ID NO: 227774 - DNA, 522 bp, Glycine max
cttggacaggaacgaggctgagatttccccttccaccttgtatgccattgcttgtgttatggaaaatgttcctttcatcaatggaagccctcagaacacctttgtcccagggctgattgatctggccatcaagaggaacagtttgattggaggagatgactttaagagtggtcagaccaaaatgaaatctgtgttggtggatttccttgtgggggccggcatcaagccaacatctatagtgagttacaaccatctgggcaacaatgatggcatgaatctctcagcccctcaaaccttccgctctaaggaaatctccaagagcaatgttgttgacgatatggtcaacagcaacgccatcctctatgagcccggtgaacatccaaccatgtggttgtcattaagtacgtgccttatgtaggggacagcaagagggccatggatgagtacacttctgagatattcatgggtggaaagaacacacttgtgttgcacaacacatgtgagggatcactgttagctgct

SEQ ID NO: 227775 - DNA, 518 bp, Glycine max
aagcacaaaagatttggatattttgatattattttattacatacatgcatagatagcctgctctcaaataagtcggcaggaacaaagatagagagattcaacgatcttcaaatttcacatttgccagaaatatataacagaaaagaggggtatgggatatgagttaagttttgatcacattcaactacactatcccaaaccgttactcttaagactttgaacttcacttgtactctaggatcatgttgttctcaggagctaatccaacacaagccctcaggatgttttccagcatagctcgctgctttgacaacgcattcaccactggtgtacccggtggaaccagaggggccttggtcaggtaactaaggatggtcgcaactgggtggaatgagtggaattttccctcattttcagctttaaactcgattcgagtgctgagctcagcaagaaggaccaagtccaagataataggagcagctaacagtgaattctcacatgtgttgtgcaacacaatt

SEQ ID NO: 227776 - DNA, 495 bp, Glycine max
  unsure (1)..(495): unsure at all n locations
ctcacccacacaccaaaattctggtacaccatgatttttccaaggttttgtacgaatctaaaaggtatggcttttatagattctcaactttatcttgatcacacaggtaaaagattctgaaatctgtgcaccttgtgaatcaaagctctataatttcttcctttctgtgtttctgtgagcacccttttctagttcctctccatttccatctctttaggaacttaattcaactaagttttgtatgcttgtggcttgagatatggaattggaaaccatctaccctccttgttttatgccaaattcaaattggtttgtgcaagagagccacagcacagagtggactagagaagataacaagaagtttgaaagtgcccttgctatatatgacaacgacaccccagatagatggttcaaggtggcagctatgatccctgngagactgtgtttgatgtgatcaagcagtatagggaactggaagaagatgtgagtgaaatc

SEQ ID NO: 227777 - DNA, 504 bp, Glycine max
catcgattaaagacttgcttccaagatggttctgctagagaagctctgggatgacgttgttgctggccctcaacctgagcgtggccttggcaagctcagaaaactcaccaccctcaaaactagtacgtatcctttttatatataacactataataagagagagctagggaaaactatttgtaattaattgattagtgtttgattgttgatatagttgatgaaggagacagtagcaagctgcagaagacgttgtcgatgccgtcgacaccgacaaccccgatgactcccacgactccaacgacaccgggatccgcgcgtaaagctgacaacgtttggaggagcgtcttccatcctgggagcaactccgccacaaagaccatcggtgctcagatgtttgacaaaccacttcccaacactcccactgtctacgactggtaatattattggttcttcttttaataaaaaaactttacaaattatgaattcatttttggcaacctttga

SEQ ID NO: 227778 - DNA, 539 bp, Glycine max
tagaactgtcttttcatatagatatcccttcaacacaacataggtcatcgaaaggatctcgaagacccaccaacgcacgaaagccgggatctttcagaaaatggattcctattcgaagggtgcataaccgcatggataagctcacactaacccgtcaatttgggatccaattcggttccttaggaggtatcgggaaggaattttggaatgtaataatatcgattcatacagatacagaagaaagggttctctattgattcaaacgctctacctacgagatagggatagagaaagaggaaaaaaccgaggatttcacatagtacttttggtcgaaaaatcgatctgatttttttcgtacttttcgctcaatgatgaaatgggtcagattctacaggacccaaccttgtgggagttaaggaatgatggaagaaaagaaataaaaaaaaggtaataaaaatgcagtagaagagtcctgattccaaacgaaaaaaatcaaacttgatttgaaaggatctttctgattattgaagaatgggaca

SEQ ID NO: 227779 - DNA, 613 bp, Glycine max
ctcgagccgaatcggctcgagcaaggaatatgaacacagtgcccacaattaccatccccttccgattgtattttctcaggcaaagggaacctctgtttgggatccagagggaaacaaatatcttgattttctatctggttactctgctgctaatcagggacactgtcatcctaaaattctcaaagcattacaagaacaagcacaaaggctgactgtgagctctcgagccttctacaatgatcgctttccagtctttgctgagtatgtgacaaacatgtttggttatgatatggtacttcctatgaatactggtgctgaaggtgtggaaacagcactgaaattagcacgaaagtggggttatgaaaagaaaagaatttccaaagacgaggctattattgtctcatgttgtggctgcttccatggtcgtacactaggtgtcatatctttgagctgtgacaatgaaactacccgtggttttggtcctttattgcctggcaatcttaaagttgattttggtgatgcagaagccccttgtaagaatttttaaagaaaaaggagaacacatagctgcgtttattctaaaaccttacccaagtgaaactggggtgatttt

SEQ ID NO: 227780 - DNA, 539 bp, Glycine max
  unsure (1)..(539): unsure at all n locations
gcaatgtctcacagaatgcatgtagacaacagtgtaaaactgattgggaagcttttatttggcattgaaaagggtccagaagtactcaacgctgttagaccggctggatcggcacttgttgatgactggcactgcctgaaaaccatggtgaggacttttgagacacattgtggatccttgtctcaatacgggatgaaacacatgaggtcctttgcaaacatctgcaatgtagggataaagaatgaacaaatggctgaggcttcagcacaagcttgtgtcagtattccttccaatccctggagttctctgcaaaggggtttcagtgcataataactccctgtaatgtgcactagtaaagaccaaagtatgattattgttacattatgttacatggttgtacttgtatatacatatcttgtcccacctttgtaaatacaattgggacactactaggattgngaagaagggtctttacatttatagtttggcaaatagatattgcaactacctttgtataattctatttctgaagaagcaat

SEQ ID NO: 227781 - DNA, 543 bp, Glycine max
agttgtcattaatattaaacaataattttggcatcataaattcttccggaataattatacaaaagtgaccagggaaaacccgatctgccagttgcccactgaataaaaacacacatcatattactatgtgttgtcatacatgcattgtaatgagtggatattccaaagcaattggtccctttatccctccttaatccttatgccgtaaatggcaccatcccttgtaaattgtaattgcttcttcagaaatagaattatacaaaggtagttgcaatatctatttgccaaactataaatgtaaagacccttcttcccaatcctagtagtgtcccaattgtatttacaaaggtgggacaagatatgtatatacaagtacaaccatgtaacataatgtaacaataatcatactttggtctttactagtgcacattacagggagttattatgcactgaaacccctttgcagagaactccagggattggaaggaatactgacacaagcttgtgctgaagcctcagccatttgttcattctttatcccta

SEQ ID NO: 227782 - DNA, 543 bp, Glycine max
  unsure (1)..(543): unsure at all n locations
tcttcttctcttaaaagagcctttgctttttctttaggcctttccgaattaagtacttgtttcattttctctcgaagcaagaaaaatgttcatcgagagtttcaaggttgagagtcctaacgtgaagtacacagagactgagattcagtccgtgtacaactatgaaaccactgaacttgttcacgagaacaagaatggcacttatcagtgggttgtcaagcccaaaactgtcaaatatgaatttaaaaccaacacccatgtccctaaactaggggtaatgcttgtggggtggggtggaaacaatggctcaaccctcaccggtggtgttattgctaaccgagagggtatttcatgggcaacaaaggacaagattcaacaagccaattactttgggtcgctgacccaggcatcagctattagagttgggtctttccaaggggaggaaatatatgccccattcaagagcctgcttccaatggtaaaccctgatgatgttgtgtttggnggatgggatatcagtaacttgaacctggcagatgccat

SEQ ID NO: 227783 - DNA, 501 bp, Glycine max
  unsure (1)..(501): unsure at all n locations
aagcacttaagtttgtggataacttgatattattttattacatacatgcatagatagcctgctctcaaataagtcggcaggaacaaagatagagagattcaacgatcttcaaatttcacatttgccagaaatatataacagaaaagaggggtatgggatatgagttaagttttgatcacattcaactacactatcccaaaccgttactcttaagactttgaacttcacttgtactctaggatcatgttgttctcaggagctaatccaacacaagccctcaggatgttttccagcatagctcgctgctttgacaacgcattcaccactggtgtacccggtggaaccagaggggccttggtcaggtaactaaggatggtcgcaactgggtggaatgagtggaattttccctcattttcagctttaaactcgattcgagtgctgagctcagcangaaggaccaagtccaagataataggagcagctaacagtgaatcctcacat

SEQ ID NO: 227784 - DNA, 584 bp, Glycine max
  unsure (1)..(584): unsure at all n locations
agcggctcgtgatgatttgggtaaaggtgctattgacaaagaagtggtggagaaggtgtgggaccgaattgctcctggtttagcttcccaatttgactcaccttattcagttccaactatcgcaccacgtcctttgcttattgttaatggtaagacccttgtatatattgtacattaaacattttcaaaatgaatcaggctatcttattcatatacaacggcatatattgacaattcaggtaaccactctgctgcaacataagctttttgcttctttaggatatatcaataaatcgtagacccctgtattagtcaatttagttatcccgttcatttagattttgtggattttttttaagctaacttggaattgaagcatttgcttgggttttgggaactctaaggtgcgaagatcctcggtgtcccgttgcaggcttggaaattccaagggcacaagcaagccaggcatatggacagtttgactgtttagataatttcaagattattacagaacctgnagttggacaccaattaacgagactcaagtgaaagaatcatttatggtttgcagttcttgaccctta

SEQ ID NO: 227785 - DNA, 588 bp, Glycine max
gcaaattcattactgagacatattgggagtatagattcagatggcttaccaattggcctcagctctgacactataggcaagaaatttgcaacacaaagtaatgctcgtgtgttgaagattgttgtctttgtacatggatttcaggggcatcatctagatctacgacttgtccggaatcaatggcttttgatagatcccaaagtagaatttctgatgtccgaggctaatgaagataaaacatttggagacttcagagagatgggacataggctagctaaggaagttattgcttttcttaaaagcaaaatggacaaagcatcaagatatgggagtctgggagatattaggctaagttttgttggacattcaattggtaatctcattataagaacagcgatagcagatagcataatggagccatttctatgccacctacatacatatgtttcagtatctggtccacacttagggtatctttatagttcaaactcgttgtttaattctggattgtggtttttgaagaagctaataagcacacagtgcattcatcaacttactttcacagatgatgcagatttccaaaataca

SEQ ID NO: 227786 - DNA, 523 bp, Glycine max
attcttaatcaattttatatatgtatcaacctaaccaaataattacatcactctgtcgttgacccttcctaaaactatgcacagaagtacaactgtgttttaagaaaaacgtgttgaaggcaagtaaatatacaactcagacatcaacatgcacctgttaagtgctaaccttttctttgaacaccctgtcacagaaatctgagcactattggtatctgaagggtgagagattacgcctgaaggctttagaactgaatgcagagaaggaaaaccacaacaactgctatcgaaaaagatcagggaatgaccacattatgaaccttgcaaaaatgtcagaatccagaaattcaatatgtgcagcccgacctattatagagtccagattcttgccttgggtagatgcatcaaagttgacatcacagcgcatgaagactcgatgttgcatggagttggcacggattttggtccaaacaagcattcaacatttctaggaacagtttacccttttttgaagtgtcacgtg

SEQ ID NO: 227787 - DNA, 530 bp, Glycine max
  unsure (1)..(530): unsure at all n locations
agagagtgatctagagtcttggattgagcgtttactaaaacaactccaacaagtaaacacacagatgcaagcttgggtatcatctggtggttcagaaatggtttctcatactttgactagacaccaagaaattcttcaagatctcacccaggagttttatcgtcttcgctcaagtcttaaagctaagcaagaacatgcttcactgctagaagattttaaagaatttgatcgaacaagattagatttggaacaagtagactctgaacagcatgcactcctaaaagaacgcacatctatcagccgaaatacaggacatatggacaatgtaatttcacaagcacaagcaacactaggagcacttgtcttccaacgttcgacatttggtggtatcaattcaaagctcggcaatgtgagcagtcgcctccaacggtaaatagcatactttcagcaataaagagaaaaaagtcaatggataccatcatactttcccttngtggcagccgatgcacatttctcattttcatctactg

SEQ ID NO: 227788 - DNA, 520 bp, Glycine max
aattttctgactattctcagttgtaatgtttcattactgatgcaggagggacaaattttgtgagtgctatgtctgcaatattctccttgtttttaattatatctactaccttataattaactatcaggtgcgaacactggatcccaaagctgtcaatgatgaaaattgcactggaaatactagtgatggtggcaacaacacatggtgaagtgcaggctcggagaagaacaagatgaaagtgaggaggaagctaagagagccacggttttgtttccaaacaagaaatgatgtagatgtgcttgatgattgttacaaatgtaagaagtatggttagaaagttgtgaagaatagccttcacccaagcaaaatgaaaagaaagatgactccaatgaagtgccaagtagcaattatacagggattgagacagaaaagggattttaggttgacacaataagccttagtgaggactcatctataccataatgtatactagtggaactactgggtgaatgacattatg

SEQ ID NO: 227789 - DNA, 530 bp, Glycine max
aacgaatataatttattattatctttatatgaatttgtaagtgggcaaattcatatgggaacaaacttagttccctaatatcttacaaaggatccatgatagttcattgcaagtatgtcatcatttaacctttactaaagaaactatttacaaaaacaacacttactatgaataaccaaagttgcataatgtcatttcaccagtagttccactagtatacattattgtatagatgagtcctcactaaggcttattgtgtcaacctaaaaatccttttctgtctcaatccctgtataattgctacttggcacttcattggagtcatctttcttttcattttgcttgggtgaaggctattcttcacaactttctaaccatacttcttacatttgtaacaatcatcaagcacatctacatcatttcttgtttggaaacaaaaccggggctctcttagcttcctcctcactttcattttgttcttctccgagcctgcacttcaccatgtgttgttgccaccatcacttagtttt

SEQ ID NO: 227790 - DNA, 560 bp, Glycine max
  unsure (1)..(560): unsure at all n locations
aggaaagttaggccaaagatgacatggacggtcttcatacagatattagtacttggatttcttgagccagtggttgaccaaggattcactttcttggggatgcaatacacttcagcttcctttgcgtccgctgttatgaatgccgtaccctccgtaacctttgtgcttgcagtaattttcaggttagagcgtataaaaataagggaattacgcagtcaagcaaaagtaatcggaaccttagtaacctttgctggggcattgttaatgacactatacaaaggccctcagtttgacctatttcatcattcaaacacagcccaccagcaaggtggaagccactccactcagaatcactcacactgggtcgccggaactctcttcatttgccttggttgtctggcttggtcttccttctacatattgcagtccataacggtgaaaaggtaccctgcggaactatcactctcantccttgatatgcttgcgggtgctntgcanagtgccgtggttgctctgattgcagatcataaccctcgagcatgggctatcgggttcgacta

SEQ ID NO: 227791 - DNA, 562 bp, Glycine max
aaacacaatttttagattcttatagaattgcacattgattaacaatataaactcttggtataactaacgatagcaaaacactttctaacaaattagtattaacttaaacaaagtcttgtttcaacttaacatggctaaatatagtgcccacaccagcacaacaaatcactatatgatttgcatattacgctatcatcggtcacttccgccaacataagtcgatcgaattactatgtaaatttcgtttctataagttaacgcaaagtctctgttatttattatttggtgaggtaatcggaagctgcattgtttctgtttcttttgttgttgctggtgatgacatgtcttctttatagtctttgccttttccccacaccacagagtatagacccactgcgataatgatgcctccaatgatgcttcccaggtagaggtgttctcctagaaggagggaacccaaagcagtaacaattatcatgcaaagaggattgaaggatgttacaaacactggacctctgctttggattaccaacccttgtatataatatgctaattcagaact

SEQ ID NO: 227792 - DNA, 499 bp, Glycine max
  unsure (1)..(499): unsure at all n locations
ctgggccatcaaggccaaaaacggcggtgttttgcccctccacgatcccaagcccaaacccgaggccccggcccagaagccgcccaagttctacccggccgatgacgtgaagaagcccctcgtcaacaagcacaagcccaagcccgcgaaactcagggctagcattactccagggactgttctgatcctgcttgctgggaggttcaagggaaagagggttgttttcttgaagcagcttccatctggattgcttcttgtaacaggtccctttaagatcaatggggttcctctgagaagggtgaaccaatcgtatgttattggtacatccacaaaggtggatatctctgatgtcaatgttgataaatttgatgacaagtactttgccaaggaagctaagaaaaagaaaacatagggcgatagcgaattctttgaggcagagaaggaggagataaatgtgcttccccaagaaaagaaagatgnaccaaaaaccgtggacact

SEQ ID NO: 227793 - DNA, 443 bp, Glycine max
ataaaactactagaaagaaaaaactcttgaacaatgttcattaccatgatgaaaaaacagtacaactattgggaacaagctcgacaaaacagaatgaggaaaataattttagcactctagaaaactagctcatggggcttcactcctgccttcaaggaaaacctagcacccaagtaagacttgagctctggaacactctcaatggcctttaacaaagcagtgtccacggttttttggtcatctttcttttcttggggaagcacatttttctcctccttctctgcctcaaagaattcgccttcgccctttgttttctttttcttagcttccttggcaaagtacttgtcatcaaatttatcaacattgacatcagagatatccacctttgtggatgtaccaataacatacgattgggtcacccttctcagagggaccccattgat

SEQ ID NO: 227794 - DNA, 460 bp, Glycine max
atctcttgcaacactacaattttgcttacatgggagccaagttaacaaaaaggataagagttggcatgctggagaatatcttgacctttgaaactgcttggtttgatgaggaacaaaactccagtggagcattatgctcaaggttaagcaatgaggcttccatggttaagtcccttgtagcagacagactctctttactagttcaaacaacttctgctgtcacaattgcaatgatcataggccttgccgtggcttggaagctagctcttgttatgatagcagtgcagccactcacaatcctttgtttttatacaagaaaagtgttgctctccacactctcaacaaaatttggcaaggcacagaatcgaagtacacaaattgcagtggaggcagtttataaccacagaattgtgacttcatttgggagcattacgaaagtgctatggctattcgatgaggc

SEQ ID NO: 227795 - DNA, 549 bp, Glycine max
atgagactgctgaaactgagtctgctataaaaggaagccgaaagcttgatcacacagatgagttaagattttttgacaaagcaacagtgctagcacggtcagataaagtgaaggaatcaacaaacccttggagactttgcactgtaactcaagtggaagagctgaaatccattttaagattacttcctgtatgggcaaccggcatcatattttccactgtctatggtcagatgagcaccttatttgtgttgcaaggacaaaccatggacactcgtgttggcaactccactttcaaaatcccaccagcttcactttcaatctttgacaccctcagtgtcatattttgggtcccagtgtatgacaggatcattgtgccaattgctagaaagttcaccgggtacaaaaacggcctaactcagctccaaagaatgggaattggcctcttcatatccatattttccatggtagcagcagcaatattggagctcataaggctcagaatggtgaggaggcatgattactatcaacttgaggagataccaatgacaa

SEQ ID NO: 227796 - DNA, 409 bp, Glycine max
gggggagaaagatccaacccctctttgcagggggggttggaacaatttttcattctttttttaagggtttgacccaagaaattcccgggtgggggaaaaaccagacttccgggggaggaaccttccaaggggattttttaaaaaaacttctttccaatgggcaacttaacccactttttatgggaaaggtcccacaggccttttttttgttttcaacataaaccctccaagggatgctttcaagttcaccccacttagcaatgccaattgccaaaaaaaataatctatgggaccgaagttcaaattatcaggggtccacccaggacgcccattcctaggggggatctttggcccaattggcacaaaaagaaagctcaagtcctttcccaaaaccacggtggtgtgtgaa

SEQ ID NO: 227797 - DNA, 545 bp, Glycine max
  unsure (1)..(545): unsure at all n locations
attaattgcaagaatggcacttcgttgcttggtgatgtccctttctgttctcttcactcttggtcttgcgagagaaagccatgccagagacgaagatttttggcatgctgtttggccaaacactcccattccaagttcattgcgagatcttctaaagcctggccctgcaagtgttgaaatcgatgatcaccctatgcaaattgaagaaacacagtacccgaaaaccttcttctataaagaagaccttcatccaggcaaaacaatgaaagtacaattcagcaagcctccctttcaacaaccatggggtgttggtacatggttaaaggaaattaaagacactactaaagaaggatatagttttgaagagctatgcatcaagaaagaagccattgagggagaagagaagttttgtgcaaaatccttgggaacagtanttggttttgccatttcaaagctgggaaagaacatncaagtactttcaagttcctttgtcaataagcaagaccaataccactgtggaggagtgcagaatcttggagacaaag

SEQ ID NO: 227798 - DNA, 569 bp, Glycine max
gtctctctctttaagtagggaagcagatcttatcagtacacataggtaggttgaaattctagctctagcaatctagctagagaaggtagtacttgcacaacacacagcacatgataatttattttatacacaatctcattctcatggtgctcaagatgcatggactaattaagcaacaatgttggtctgataggcagtgtccacagataaattgggtacccataaaatggccttgcttccaaggaaatggcaaacagggttagttccaggatcaactcccataagttgatgaagcatttgatgattcattccagaagtatttgagtggcaaatagcaagtgcctgagttttggttccatcaccagccaccaatggaaccatgaaagctgttgtttcacggacttcatggcagtaaaatactgcagttctgaaatttagcctatgacacatcactgctttgtctccaagattctgcactccttccacagtgtattggtcttgcttattgacaaaggaacttgaaagtacttgaatgttctttcccagcttttgaaaggcaaaaccattac

SEQ ID NO: 227799 - DNA, 529 bp, Glycine max
ctgaccttggaggatgttgtttctgaggctgatatctttgtcaccaccacgggtaacaaggacatcatcatggttgaccacatgaagaaaatgaagaacaatgccattgtttgcaacattggtcactttgacaatgagatcgacatgctggggctggagaactaccccggcgtgaagcgcatcaccatcaagccccaaaccgacagatgggtcttccccgagaccaatgtcggcatcattgtcttggccgagggtcgtttgatgaacttgggatgcgccacaggacaccctagttttgtgatgtcctgctccttcaccaaccaggtcattgctcagcttgagttgtggaaggagaagagtactcgcaagtacgagaagaaagtttacgttttgcccaagcaccttgatgagaaggtggctgcacttcaccttggcaaacttggagctaagctcaccaagcttagcccggcccaggctgattacatcagtgtgcctgttgagggtccatacaagcctgctcattacaggt

SEQ ID NO: 227800 - DNA, 393 bp, Glycine max
ggggcagaaacccataatttagtttttaataaagcaaaagcaaaatgcccacccattccccaaacaaaacatgcttattcaacccaaattggtttcatatcacagaaaccaacagggtgtttttcttcttacccgtcccacccacttgaacagaaatttttcggaaattaaaaataaaaaagctaaactttttttacctcaaatttgaaaaggctaacaacaaaaattcaaaaaaagggaaattaaacaatcaatccggttcataaaaccgattttggctttccctcactttccgggggtaatctcaattacttagtacctggaaagagcaggcttgtttggaccctcaacaggcccactgatgtaatcagcctgggccgggctaagcttggg

SEQ ID NO: 227801 - DNA, 556 bp, Glycine max
accttctctgctgagacaacaatggcgatggctttcaaaatggccactactgggatgtgggtgacggatgagtgcaagaactctttcatggaaatgaagtggaagaaggttcatagatacatagtcttcaagatcgatgagaagtcaaggcttgtcaccgttgataaggtgggtggtcccggcgagagctatggtgatctcgccgcctccttgcccgacgatgattgtagatatgccgtattcgactttgatttcgtcaccgtcgataactgccgcaagagcaagatcttcttcattgcatggtctccaacagcatcaaggataagagcaaagatgctctacgcaacatccaaggatggtctgagaagagctctggatggaatcagctatgaagttcaagccaccgatccagccgagatgggattcgatgtaattcaagacagagccaaatagatgccccctttttaaagtgggaatccaactccttatttatgtgcctgagctaatcaattaatccatcaatcttactctcttttatttgctataataaagtaac

SEQ ID NO: 227802 - DNA, 494 bp, Glycine max
aaagaagaagaaaaaaggctccaccgaaatcaatttcccacagaatcaaacaaatcgttggagttggaaaacaaaacaagagaaaatgggtggacgcaagtgtttgttaacgttggtgttgagtttggtgttgatgatgagtatggcagaggcgcaatctggtactagcgcagactgcgcccaggagctaattccatgcctggactaccttaatggcacgatcaacccaccaagctcctgctgcgaccctctgaaacgaacagtccaaaacgaactcgcctgcctctgtaacatctacttctcccctggccttcttcaaagcgtcaatgtcactgtcgatgaggctctcggcctcagtcgccgctgcggcgtcactagcgatctcagcagctgcaaaaacgggtcagctccagcttcgggttcacggccaccaccagccactcctggaggtgacaaaggaggagcaggcacagtcacattcaccgggctttctt

SEQ ID NO: 227803 - DNA, 491 bp, Glycine max
gtaagcaacaacatcaccgcagtgctgaacttgatagctacgctggcctcaatcccgatcatagcctccggcatttggctggcatcgaagcccgacaacgagtgcgtggccaacttccggtggcccattgtcatcatcggcatcctcatcctcctcgtttccctggccggttttgtcggtgcctactggaacaaacagggtctcctcgccctctacctcttctgtatggctctcctcatcgccctcctcctcctcgttctcgtcttcgcattcgtcgtcaccagacccgatggagcctatgatgtccccggaagaggctacaaggagtacaggcttcacggcttctcctcctggttgaggaaccacgtcaccggttccgggagttggcagaagataaggccctgtttggctgcttctgatgtctgctctaagctcacccaggattacatcactgctgatcaattcttcaattcccatatctcccccttaca

SEQ ID NO: 227804 - DNA, 599 bp, Glycine max
ggatagccgttttaagtatttaagtttattcaaaagaaaataggagtatagaataacaattgaatatataattaatctaaattctaatcacacgctagctcagcgaaaggattattagaatattctattcttcgttttttcctgagcatcgagaaacgtattacttccaataccgtgtttctaaacagaaggaatatgtacactaaagacaaaaagacttaaaaaacggaattacagggaatagaaagaaagaaggaaaggtaaccaaaaaaacaaaagaagcagcgttaaaaacttgtaaatgttggggggggaaacgggatcaaacccaaccctgtttgtaacggtcgaagaggttttctgtttgggcattcctgaaggcactacaagctatgacatagacccatatgaggaccaccactgccacaatgagaatgatatttgctttcctccattcttttctgaggttacccaatagaccagccttgcacgcattacaattgtagcatagctgattctggtcattgttcccaagtagcaattctgatcagccatagggttcacaggggttgcccttagtatggggtttacataattgt

SEQ ID NO: 227805 - DNA, 616 bp, Glycine max
gattctactcttcattaattgtagacatttactataaatgtgagcccctgctttgtttaaaggggattggttacatgaaactatggtgcttaattgaagataagccatgcattgcatacaccgaattacatcacacaggtacaaagttacaacgtcattcactcattcaaggcttaattctccactgtgttggagtcttatatgtgggcagggtgtttcaggttctccacttgtccacaaaaccctcaaatctcctcgctttcgccccaatgtcatcagggtcccaagggtaaatggaacgatgtatagtagtgccggttggccatgcccgtccatcaagtttagtgccacgtacgtaattaaaaggccaaagccatatgcaaccattgcccacaagaaatattcacttttaaggctcttatttgccagccaatcgtacctgagtgagaatgccaccagcatttctggtaaaaggatgtctccaaaacctatgatgctgtaaccaccccatggataaaaaatacgagggaacttcagttacatggggaatttcatttttttcacttcgatcacctcgggcttccacaattatgacattttccttgaaaactttttt

SEQ ID NO: 227806 - DNA, 528 bp, Glycine max
  unsure (1)..(528): unsure at all n locations
cttcctctttgttttctgatctatggcttccaaggagttctctggtctttgctccttggctccttcactatctgagagcattttgtgcactactgggttgaaaatgtatatgctggagagcaaaggaggtgccatagcatgcatgttcttgtctcttttcttcttggggacatggcctgctcttttgactatgttagagaggcgtggtcgtcttcctcagcatacctaccttgattactcaatcaccaatttcttggctgctttactcattgcttttacacttggtgggataggcaagggcacacatgatcagccaaatttcttagttcaacttgctcaggataactggccctccgttcttttcgcaatgggggtgggtttgttccttagccttgggaatctgtcctgccaatatgcatttgcttttggtgggctatcggttactgaagtgatcacggcangcataactgttgtcataggcacaaccttgaatactttttggatgacaaatcaacanagctgagatcc

SEQ ID NO: 227807 - DNA, 553 bp, Glycine max
ctcttattcacgtctatgaattttgagaatttttctccctttgcactaggaaatctataaacaacttgtagtgtgttgtccaattattccttggcagtgctggttctttgccctgatgatgccattagcacagcaacagccacaataaacataaacaacatactccctagcagtatatatgttcttcttgatgattttctgtactccccaaacagaaccacgccccaaaaagtgcttacaagtggaagtgcctggactgcatctgctgctgcatatcctgcagcttgaccacccataaattggagaccattcccaaacccacaaagcaaaccagccaacatggcccagactctgccatctgagtccgccaaataagccttaaatgatgacttgggtaggtttaggacagggtggtagaggaaggtgatgtttagaatcatggcaataacaaaacatgagactgaaaaatagaagaaggcagtattaactgtcaaatggggaaccccttttctcaacgtattccattggtcattttgttgctatgttgaatgct

SEQ ID NO: 227808 - DNA, 496 bp, Glycine max
atctgttaccacagtgttatgcagagaaacaagctcttggagaagtgaatgctgagcttcttgacacccaagtgaatcctgctgtgtgggaaattagtggacacatggttttaaagaggaggaaggattatgatgaggcgtctgaaggcaatgcttggaggcttcttgctgaggtgtccctttctcaagagaggtttcaagaagtcaatgatcttgtttttgaagccattggctgtggtgaattggaggatgtcaatgttcaaagtgtcaaaaaagaagttgatgcagtcagcacaagcgaacaccctactgtggtggtggtggctggttcacaagaatgtgtggttctacagtaacaaggctcttgtattttgaacaaattcagaaaatctgcagtgttttaagaataattgctgaaatgtgtcaccgtttaagtcatactattgccttgtgcttgagccttatggtcgtgtgtgttgaaatgatttgcttttat

SEQ ID NO: 227809 - DNA, 472 bp, Glycine max
  unsure (1)..(472): unsure at all n locations
cggacacgcnggagaggccccgaaaagctccgcatcgngggaaagacccacgccgngaagggaattaaccgcggaacagacccagccgcacagagcgcggcaggcccgcgccccccaataccaccccaacaaatagaaaaatataacccgcaccacaaacagagggcagacgggaggacgaaaaaaccaacaaccccaaaaaccacaacccgaggacaacagcaccagaacacacaacaccaccccaagaaggccacgccagaccgccaaacaagcagacagagacaagagaccccaagcaaccaacaccacccgcggagaggagcacaccaaacaccgccacaccacaagaaagaggcacaaaggccgaccaaagcaaaaacacgcaacacacacgaccataaggccgaagcacaaggcaaaaccacgacacaaaccgggacaaaaagccaaacaagcacagcacaaaaac

SEQ ID NO: 227810 - DNA, 542 bp, Glycine max
caggatgtttgtattggatgaggcagatgagatgctctctcgaggtttcaaggatcagatctatgatatttttcagctgctgccacctaagatccaggttggggttttctctgccacaatgcctcctgaagccctggaaatcacaaggaagtttatgaacaaacctgtgaggattctagtaaaacgtgatgagcttaccttggaggggatcaagcaattttttgtcaatgtagacaaggaggactggaagctcgagacactatgtgatctttatgaaactttggcaatcacccagagtgttatctttgtgaacaccagacgcaaggtagattggctgacagacaaaatgcggagtcgtgatcacacagtttcagccactcatggagatatggaccaaaacacatgggatatcatcatgcgggaattccgttctgggtcctcccgtgttcttattaccacagatcttttggcccgtggtattgatgtccaacaagtctcacttgttataaattatgatctgccaactcagccagagaactatc

SEQ ID NO: 227811 - DNA, 563 bp, Glycine max
  unsure (1)..(563): unsure at all n locations
gttcctcttccaaagagaatgaatgactctattcctccaccctgtcaaccataattgcctttcccttctttctcatcccactgttagttgtatactactactatcccactctctctcaccatcaacttttcaaccccacaccacccaccctgttccaattctctttccgtccttccccacctcaattctagggttttcccattctttcttctttttttattacccctttttctctcctcttttaattcgttagttaggttaccctctcatcactctgcttttcgatctcctctctctctctctctctctctgatactcagtatatttcttctaaatcttcactctcttgtcctttccttttgtttttcttcctacaccacacgcacacacaattcttcctttctcttcttttgatgtcttaggaaccaaccaaccccccaatctgaattgatttcatcgctatttgtgtattcattgcgtgattgattntccgncttcttcttcttcttcttcttcctgngtgtgcgtgtggccgagaatagtgatcaattgttaatggcata

SEQ ID NO: 227812 - DNA, 548 bp, Glycine max
gaaaatttaattccaataattcatactcttccagaatcatcaaagccatcaactgccttgacttggcaattggaagatgaagcaagcaatccttttgtccttctcactgttgctactccttgcctccaccaccttggccatttcaccggcacctgcagcagcaccaaaagccgcagcaaaaactcctcctaccccaaaggccgcagcaccatcaccaaaacaattagtcccaactttacctcagtctccagactcccctgactcggtccccgacgacatcaccagaattctcaaaaaggccaaaatgttctcagtcctaatccgcctcctgaaaaccacagaaatcatgaacaacatcaactcacagctcataacagccaagagtggtggcataaccatccttgcaccagatgattctgccttttccaacctcaaagctggcttcctcaactccttaaacgaaggccagaaaatcgaacttgtgcagttccacttattggccgagtttgtgtcgagctcaaactttgattctctaagcaaccctgtgc

SEQ ID NO: 227813 - DNA, 505 bp, Glycine max
attgaaattcgtaagttataactgacaaagttttctgagaaaataaggattattattatcgagagaatggcaggctcctcggaggagggacaagtcattagctgtcacaccgttgacgcatggaacgatcaactccagaagggcaaccaatccaagaaactcattgttgtggattttactgcttcttggtgtggaccatgccgtttcattgcaccattcttggctgagctggctaagaagttcacaagtgtcgtattcctaaaggtggatgtggacgaattaaagagtgtttctcaagactgggctattgaggctatgcccacttttgtgtttgtgaaagagggaacacttctaagcaaagtggtgggagcaaagaaggatgagctgcagcagacaatagagaaatatgtggcttcagctagtgcttaatctttcaccttcaaaagagacataatatatatgctctctttttataatcttgtactagacttatgttggtatttct

SEQ ID NO: 227814 - DNA, 550 bp, Glycine max
  unsure (1)..(550): unsure at all n locations
tggagagatcatcttataagcacncagcggattattgcagggtcgcgagctactagtcggagccgcccttttttttttttttttaagacgtagttttgaccaggtactattcagaaatagaggatgagagtcatcacatttgaaaagctgattggtgcaataacagaaataccaacataagtctagttcaagattataaaaagaaagcatatatattatgtctcttttgaaggtgaaagattaagcactagctgaagccacatatttctctattgtctgctgcagctcatccttctttgctcccaccactttgcttagaagggttccctctttcacaaacacaaaagtgggcatagcctcaatagcccagtcttgagaaacactctttaattcggccacatccacctttaggaatacgacacttgtgaacttgttagccagctcagccaagaatggtgcaatgaaacgggatggtccacaccaagaagcagtaaaatccacaacaatgagtttcttggattggttgcccttctggagttgatccttccat

SEQ ID NO: 227815 - DNA, 517 bp, Glycine max
cagactcgtgagcatgctcttcttgctttcacccttggtgtgaagcagatgatctgctgctgtaacaagatggatgccactaccccgaagtactctaaggctaggtatgatgaaattgtgaaggaagtctcttcctacttgaagaaggttggttacaacccagacaagattccatttgtgcccatctctggtttcgagggtgacaacatgattgagaggtccaccaaccttgactggtacaagggaccaactctccttgaggctcttgaccaaatcaatgagcccaagaggccctcagacaagccactcaggcttccattgcaggatgtctacaaaattggtggtattggtaccgtgccagtgggacgtgttgagactggtgtcgtgaagcccggtatggtggtgacttttggtcccactgggctgacaactgaggttaagtctgttgagatgcaccatgaggctctcacagaggctcttccaggtgacaatgttggctttaatgtgaagaatgttg

SEQ ID NO: 227816 - DNA, 559 bp, Glycine max
  unsure (1)..(559): unsure at all n locations
aaaccataaactttttatatttttttcgttataaattaaatgcaacttaaaacatccctcagcagcaaaggaaatggactaaaaccctatagctgcttgtgaaattcgaaatatctcagactcttcttaccatcaaaacaaaaaacagtactcatcaaaaacaaacagcaatgaaaattgaccaccnccgatcaagaacctagttttgaaagttacggctacatgaaatcggcagaaacttaaaaatataacttaaacaaaacacctaagactctgcaaggataaaactactataaaggagtaaccacgatgatgatcacatgtgctagcaaaattgcccaaatgcaatcacttcttcttggcagcggccttggtgaccttggctccggtggggtctttcttctcaacactcttgatgactccgacagccacagtttgacgcatgtccctcacagcaaaacgaccaaggggaggatactcagagaaagtttcaaccaccatgggcttggttgggatcatcttaaccatacctgcatcaccattcttcaaaaatttgggc

SEQ ID NO: 227817 - DNA, 511 bp, Glycine max
ggagattcggttcccagttcagccttctttggcacaagcttgaagaaggttactgcctcaagggtccctaacgtcaagatttcttctggaagtttcaaaatcgttgcggcggagaaagagattgatgagcaacaacagacaaacaaggacagatggaaaggtcttgcctatgatatttcagatgaccagcaagacatcacaagaggaaagggtatggttgattccctcttccaagctccacaggagactggaactcactatgcagtcatgagctcttttgagtaccttagcactggacttaaacagtataacttggataacaacatggatggtttttacattgctcctgcttttatggacaagcttgttgttcacatcaccaagaacttcatgaccctgcctaacacaagggtcctctcatcttggtatttggggaggcaaaggtcaaggaaaatccttccatgcgagctcgtctttgcaagatgggaatcaaccccatcatgatgagtgc

SEQ ID NO: 227818 - DNA, 441 bp, Glycine max
gaagccacaaagttcagcagaaccacaatgaacaccaggaaatattaattgattatctcaagtgttttttttagtagtgagacaatgcaactcaaaattataaaggataacaatccaatatgaacaagataaattatttgattatatcaagtcatagcttctcttcaagtggagaatgcttaggttctcagggtgtgtataagcaggttccatcatcacttcttgcagttgggtcgaagtttgaggcatttggatcagtacaaccttcaggaacgggaatttttacttgctgggctgctttgccatagaaagttcctcttttgatggcatcctgattagcatcaccaagagcagcctcgttcaagtacttgtctgccagttgtactctcttcacattctcttgttcttggacaagcatgttaccatactccaagagcttgc

SEQ ID NO: 227819 - DNA, 461 bp, Glycine max
ggagactagttctgtattcagattacattgcaaaaatggcatcattcaccatgacagcttctatctttggctgcccagctgtcaccaaacggtcggcagtggctgcgcagaggagattactcgtagtgagtgctgccaaagctgaaggggaaaaggtcagttatgacaacaatgatagcaatggaaggaggaacttgatgttcgctgtggctgctgctgctgttttctctgttgctgggatggcagtggcagatgagcctaaaccaggaacctcagaagccaagaaaaagtatgccccggtttgtgtcaccaatcctacagctaggatttgtcgcaattgaggatctcctgtttcattttacctctgatgatcggaaatgtacgttggggatgtagtaatgtttttgatttaatatgatcctcattgtactagatgttcataaaactatccactttgcttt

SEQ ID NO: 227820 - DNA, 518 bp, Glycine max
cgccgcgagtcgcttcaacgagatccgtcagattttccgtcagccttctagggctttctcaaccgctctgaactaccaccttgacacaccggacaacaaccctaaacttccatgggaattcaccgaggccaatcaagcaaaggttaaggagattttgtctcactatccatccaactataagcaatctgctacaattcctcttttagatcttgcccagcagcagcatggaggttggctacctgtttctgcaatggatgcggtagctaagattgtagaggttcctcccatacgggtgtatgaggttgccacattttactccatgttcaatcgagctaaggttgggaagtaccatctgttggtttgtggaacaacaccttgtatgataagaggttcacgaggaattgaagaagccttattgaaacacttgggagtgaagcgcaatgaagtaacaccagatggtttggtttctgttggagaaatggaatgcatgggatgctgtgtgaatgctcctatgatta

SEQ ID NO: 227821 - DNA, 477 bp, Glycine max
caacgccgggaagtaatgaacatgccaagaaatttatggcgattatggaacaaatttttgaaatggaaaccatccaggacgggtgatacaaaaattggttgagcatttaacaatctgacaatgtttcaattaaggcaagctccaacacatgcaagcctcacattattgaaggcaaaaagtatatcacacttcagcaggaatccaggtcacggcagggaggaggcttgggctcacttaacaaagtagtgttcccttcttcaggtccactcttaattcggcggggattttgggtgccgtgcgggggcttctcaccctttctcagcttttctactatcttaactactttctttggggttacatcttcaaagtaattataagtatatccctctgatccatttgaataatcagccactgtaatcataggagcattcacacagcattccatgcatttcattttcttcaaacagaaaacaaacc

SEQ ID NO: 227822 - DNA, 530 bp, Glycine max
cgctctctaataacatttctaatctcattctccttctgttcaaacactctctctcatggcatcagataagaagattaggatcggcatcaacgggtttggaaggattggccgtttggtggccagggttgcccttcaaaggaatgatgttgaacttgttgctgtcaacgatcctttcatcaccactgattacatgacatacatgttcaagtacgacaccgttcatggccagtggaagcattttgatgtgaaggtgaaggactctaagacccttctctttggtgagaagcccgtcaccgtttttggaatcaggaaccctgaggaaattccatggggtgaggttggtgctgattatgttgttgagtcaactggtgtattcactgacaaggacaaggctgctgctcacttgaagggtggtgccaagaaggttgtcatctctgccccaagcaaagatgcacccatgtttgttgttggtgttaacgagaaggagtacaagccagagcttgacattgtttccaatgctagctgcacta

SEQ ID NO: 227823 - DNA, 523 bp, Glycine max
caatattatattattaacttaattataacaaagagacgtggaaaacaaaatgttgcttatactagatgattatgataacgaaacagaatagtcaatcgtcccttacgagaggaaaaacctattaggccgtgtaccaactcaacatattgcactgtttttcaatgatatctctcacagcaacacaaagtgtttattccgaattcacactaaaataaactcgattaagataaaaatttggaacggggtagcgatgatatccaagctcagactcaattctttaagccacggatgctatgtggacaatcaaatcaatcacacgggaactgttaccccattcgttggcataccaggaaacaagttttacaaagttgtcattcaaagaaattccggccttgggcgcaaatatgctagacctgttatcaccaacaaaatcagtagacacaacatcatcttgtgtgggacccaaaatacccttcaatttgccctctgattcctccttgatagcagatttgatttgctcata

SEQ ID NO: 227824 - DNA, 630 bp, Glycine max
  unsure (1)..(630): unsure at all n locations
gtcaaccaaaacagcacatgggagttatagaagctatgtgctgagttgcgaagccatcatcaatccaatcttgtgtgttactataagtatttaacagcatagacattagacacattcttcggttctggccaccctcaagtgtaaatacaaccttagcatgaaattcaactttgtgggactacgtgttggagtttgattggtgaacgtggtgtgctaatgccttcttaagttttgcttttctgtcactttccctctgtgttggtttgctctcatcacttttgtctgcattacacctgagcctcagatctcatctcttatccacaaaaccatggctgaaaaggtgaccatcatgaaactcaaggttgatcttgagtgtgagaaatgctacaagaaggttaagaaacttctcggcaagtaccctcaaattcgggaccagaagttcgatgagaaggaaaacattgtgttcatcacagtggtgtgttgcagcccagagaagataagagacaagctttgctacaaaggtggaggctcaatcaaaagcattgagatactggaaccgnccaagcccaagcccgccgggcccgagaagaggaggccgagaaacccaagccgagcccgagaaaagaaaga

SEQ ID NO: 227825 - DNA, 493 bp, Glycine max
ggtaattatattttattttattaactcatggaacgaaaaaaaaaaaacatcactgcagtatagcatttataaccattgattaaataaccttatttttcttttcccccctcattgttttttttttctctcgtcgaattttaaataacaaaaacagagaaatactagctcattggattgaacgtgattaaacatgatgataattgagagaaattgtgaatggccaccatcatttacagatcccaacaataatgcaacgccgtggatgtaattgtcacataattgtgcatccttgtggattctcttcgctgaaatattgatcacaacggttcccataacagggtctgcctccactgtaactatcgtaaacgggccttgcatagtaaccgtcgtaacagagcatgggcccaccgtactcgtagccaggcccaacgggcctgcctccgtagcacggaggaggagcatagagcatcccaactgggaccgccatcggtgc

SEQ ID NO: 227826 - DNA, 493 bp, Glycine max
  unsure (1)..(493): unsure at all n locations
gcaccaacagcatcggcggcgacagtcactctccgacaacaacacttccgcggcgaaaaatgtctctggtggcgaacgaggatttccagcacattctgcgtgtgctgaacaccaacgtggatgggaagcagaagataatgttcgctatgacctccatcaagggtattggaaggagattcgccaacatcgcttgcaagaaggccgatgttgacatgaacaaaagggctggtgagttgagtgctgcagagttggatagtgtgatgactgtggtggcgaaccctaggcaattcaagatcccggattggtttttgaacaggaagaaagattacaaggatggaaagtactctcaggtctgtgtctaatgctcttgatatgaagctcagggatgacttagagagactaaagaagatcagaaaccaccgtggtttgaggcactactgnngccttcgtgtcccgtggtcagcacaccaagactactggccgcaggggaaag

SEQ ID NO: 227827 - DNA, 473 bp, Glycine max
cccttcccggatcaaacggaattcgtaatttcaaaaatactattcaaggttctctacaactaagaaaaccaacatcatttaactaatcggaatctcagatgcaaataacaaacaaaattgaaattgtcaagccatttaacaacggatacaaagttggtatgatgcaaaacatgtagggtacttcaaacatgcctcctaaacaaaatctaatttccaagccaaaacataatagcttaacgctttttagagaccccaacagtctttcccctgcggccagtagtcttggtgtgctgaccacggacacaaaggccccagtagggcctcaaaccacggggggttctgatcttctttagtctctctaagacatccctgagcttcatatcaagagcattagacacaacctgagaggactttccatccttggaatccttcttcctgtgcaaaaaccaatccgggatcttgaattgcctagg

SEQ ID NO: 227828 - DNA, 213 bp, Glycine max
aacaaataccagggagccaccaaccatggctttcaagctctgtgacacatgcagatgggacactgataccttgttctggcggcccgacgcggtctttctctggggggcctgtgactttaaggttcatgccgccaacaagctcgcatcgcgccacccacacgttttgctctgtgaggtgtgcaaacaggcgcccacgcatgtgatctggaaagc

SEQ ID NO: 227829 - DNA, 503 bp, Glycine max
cttgcagaatcatctctacattcccaagggctcctactacgcaataactccaagcccgatctcaaattaatatttcatttactcatcttaatcaatattaaataagaaaagatgggagagatgtcaaacttccaattgggtgtgattggtgcactatttctctctgtggcttcttctgtctccattgtcatctgcaacaaagccttgatgagcaatcttggcttcccttttgccacaacgcttactagttggcatttgatggtcacattttgcacccttcatgcggctcaacgcttgaatctattcgtgtctaaatccgttgacttgaaaacggtcatgctttttggtattctaaatggcatctccattggatttctcaacttgagtcttggctttaattccattggattctatcagatgacaaaacttgctatcataccattcactgtattattagaaactattttcctaaagaagcagttcagctcgaaaataaaattcgc

SEQ ID NO: 227830 - DNA, 523 bp, Glycine max
agatgaggcttcaatggtcactggaagtattgggatgcttccttctgctagcctgggggcttcgggacctggactttttgaacccatacatggttctgcacctgatattgctggacaggacaaggcaaatccatttgccactgttcttagtgctgctatgcttttgagatatggcctaggagaagaaaaggcagctgaaagaatagagaatgcagtgatggacactttgaacaggggatttcgaactggtgacatatattctgctggaacgaagctggtaggatgcaaacagctaggtgaggagatactgaagtcagttgaatctaacgttcctgctggtgctgctgcagtgtgattttgaaaccaactcgccatagcattttgggttctggtttaggttggaggccactatgactgccaaagccgagaaagtctccctagtctattaagttctggctttcttctgtatcatgtatttcgggtaacacacccagcctatgtatgattgaattttagaaagtag

SEQ ID NO: 227831 - DNA, 497 bp, Glycine max
aacaagacaatttccatttttcattattccaccattacaagcgacctcgcatgcaagggaaactagaatcccgggtacaagaatacaagataaacaaccttgctactttctaaaattcaatcatacataggctgggtgtgttaaccgaaatacatgatacagaaggaagccagaacttaatagactagggagactttctcggctttggcagtcatagtggcctccaacctaaaccagaacccaaaatgctatggcgagttggtttcaaaatcacactgcagcagcaccagcaggaacgttagattcaactgacttcagtatctcctcacctagctgtttgcatcctaccagcttcgttccagcagaatatatgtcaccagttcgaaatcccctgttcaaagagtccatcactgcattctctattctttcagctgccttttcttctcctaggccatatctcaaaagcatagcagcactaagaacagtggcaaatggat

SEQ ID NO: 227832 - DNA, 539 bp, Glycine max
ctcgagccgtgcgtgtgtgtgtgtgcgagagagagagacaacgaccccagacgcttccactctttctttggcggcggcgtcgttttctctacgctttacccattcattcattcattctcaggttcggggcatttcattctgattcactatggccaatggtccagcaccgttttctgagattgggaaaagggcaaaagaccttttatacaaggattacaacttcgatcacaagtttagcctctcaattccaaactccactggattggggcttatagcaacaggattgaagaaggataaactttttgttggtgacataagtacactctacaagagtggaaatactacagtggatgtgaaagttgatacatactctaatatatatacaaaggtgactgtgaatgatatcttgcatggtacaaaagctgctttgagcttcaacatacctgatcacaagtcaggaaagctggatgtgcagtaccttcatcctcatgcagctggtgattctagtattgggttgaatccatcccctctattggagc

SEQ ID NO: 227833 - DNA, 438 bp, Glycine max
cactcacaaacgcacactgaattcaaaaacatcgaaagagagaggcatggccgagcaaaccttcatcatgatcaagccagatggcgttcaaagaggccttattggcgagattattagcagatttgagaggaagggtttttacttgaaagggttgaaactcgttactgtggaccgtccttttgctgagaagcactatgctgatttgtctgcaaagcctttctttagtggtttggtggattacattgtctctggccctgttgttgccatgatctgggagggtaagaatgttgttacaactggccgaaagattatcggagccacaaacccagctcaatctgagcctggaactattcgtggtgactttgctattgacattggaaggaatgttatccatggaagtgattcagttgagagtgctaacaaggaaattgcattgtg

SEQ ID NO: 227834 - DNA, 553 bp, Glycine max
aacaagtgccattttatttattataactgggaagttgagatgacaatggaagactataatgtaactgcacctgcatcctcatcaatggctcatatgcaaaaacattaacaatcaacaaggtaaaagcaaaactagtttgggatttaatttatcaaactgtgagcatgtttcaacagaaatgacataaatagactctacatgcaaaccacggtaccaaactcttagcaaaagtccaacaatggacaaaaacagaaaacatgtagataatctggatcaacctaaggccaatttcaagatcaacttgaggcatttgtattactcatagatccaagagtgctgggagctttgccagttagcagggccctcagggaaccacaatgcaatttccttgttagcactctcaactgaatcacttccatggataacattccttccaatgtcaatagcaaagtcaccacgaatagttccaggctcagattgagctgggtttgtggctccgataatctttcggccagttgtaacaacattcttaccctcccagatcatggcaaca

SEQ ID NO: 227835 - DNA, 469 bp, Glycine max
  unsure (1)..(469): unsure at all n locations
aattatgntattagatggcttgttggtagaatcaactgagaaagaaacatagcaacattgtatgttaaaaatgctctaaaatcctattacatcagagatgcactacggttacaatttagtcatacaaaagctgagtaacaacaattgcctactcccatgatactggtaatgaaaataggaaaagaaaagaaaaacaaagggaaatataccatcaacatcattgtttcattagctcacttataacccttctgattcatgatttatcttattcacaagccaatttggtgtcaaagctgctcaagcatattgcaaaagcttggaatgcagataaagggtaccgataatccatggtgaacatgtccttcccaactttgccaaactgaagaatgatcttatcgtgctccggtggagctggttgagatggtgtaggtgcaccagcagctggttgggtggcagcaatcaactggaa

SEQ ID NO: 227836 - DNA, 532 bp, Glycine max
gacagctatttttattctaaatgttattaattgcatcaaaggcctgatagaacatagtgacgtacactggataaacactccaaaaaccaactacagcaataaacactagatgggatgctgcaattacttgtgcaaagcacaaaggcaattcttttcacctacgtctgatgatatacagtagggttgatccttgccatcttgaaaccaggtagcacgcttctccagaagctcgttcagaaaatcatcaagcttctcaatagtgatgtttggcatcaccaccacatgtgcgatattccccttgcatgctaactgccacttgcgtataaattcctcatcatgtggcctctcaaacacaaccgtgctgctcagttcattaagcattgcaccaatcccagcctcaacaaggcggcctttgaagtagtgtgcatttcgcaagcatttctgtacttctttctgaaaacctctatatcctttccgattcaaggtataccaaaggaatatgggagcatggccattccgactacccatgatt

SEQ ID NO: 227837 - DNA, 466 bp, Glycine max
  unsure (1)..(466): unsure at all n locations
ccattctctctgtgtatttccctacctctcccttcaagatgcagatcttcgtcaagaccctcaccggcaagaccatcacccttgaggtggaaagctctgacaccatcgacaacgtcaaggccaagatccaggacaaggaaggaatccccccggaccagcaacgtctcattttcgccggaaagcaacttgaggacggccgtacccttgctgactacaacattcagaaggagagtactcttcacctcgtcctccgtctccgtggtggcatgcagatcttcgttaagacactcaccggcaagaccataaccctagaggttgaaagctccgacaccatcgataacgtcaaggccaagatccaggacaaggagggtatccccccggaccagcaacgtctcatcttcgccggaaagcagctcgaggacggncgcaccctcgccgactacaacatccagaaggaatcaaccct

SEQ ID NO: 227838 - DNA, 525 bp, Glycine max
cacacattcataacaaacgtaggtgggatattagagtactattattaatgggacacaattgagttcaacacaaaccgaacttattttcaagggacattattacagacccattaaacatcaaagttcttcaaatgttttgggaacacatccaacattacacaacgagcttaaaaccccccacggagacggaggacaaggtgaagggttgattccttctggatgttgtagtcagcgagggtccttccatcctcgagctgcttgccagcaaaaatcagcctctgctggtccggtgggatgccttccttgtcctgaatcttggccttcacattgtcaatggtgtcagagctctccacctcgagggtaatagtcttacccgtaagagtcttcacgaaaatctgcataccaccacgaagacgcaacaccaagtggagagttgactccttctggatgtagtagtcagcaagggtgcgtccgtcctcgagctgcttccggcgaagatcagcctctgctggtctggggggattc

SEQ ID NO: 227839 - DNA, 492 bp, Glycine max
ctttccattttctccattttttcttcctccatctgcattctctttcgctcgacaaaccctagcgatttgatgctgtgcgatgcgactcgctgagttgaaccggataaagatctgagtcgcggtgatcggttcgacgccctcatgggtgctgcgggctccaagctcgagaaggctctcggcgaccaattccccgaaggagagcgttactttggcctcgagaattttggcaatacttgttactgcaacagcgttttgcaggcactatacttctgtgttccatttcgagaacaattgctagaatattatgcaaataacaaaagcataacagatgcagaggaaaatcttttgacttgcctagccgacttattttcacagataagttcccagaagaaagaaaacaggtgtcattgctcccaaacgatttgtacaaaggttgaaaaaacagaacgaactcttccgtagctatatgcaccaggatgcccatgaattctt

SEQ ID NO: 227840 - DNA, 530 bp, Glycine max
catatacactgctcttattgtaacaaaaaaataaggggaaaaaggacagtgcttccgctatccactgtacatgccgaccactaagtatacattttcacaacccgtatcctctcattgatgtataacaactactcaagcaggttgaataaaaccggaaaaaataattaataattaaacagataaaaaagacaagtccaactgattcaagtatctaaaactcaaaggctcctccgtctagttcctgttaccagagccaatgctctcatagaataaaatgtaaccatggtctgtattgctggaatattcttgcgaagacccaaagaatgtctgaacagcagactcatcaatcatctcaacattttcgtcgtcaaaaaataaccagtggttatggcttttcacaaggcttacataatgcccgtggttgggcccactcccacatggacaactactgcaaatagagaatactcaatatctgcatctttagcagtatcacttaatttcagcctaagagggaagacaacccggtagac

SEQ ID NO: 227841 - DNA, 536 bp, Glycine max
  unsure (1)..(536): unsure at all n locations
ctcactcactgcagatctcaattgcatcgctgtccatggctaccatcgttagcatcaaggcccgccagatcttcgacagtcgtggcaatccaactgtcgaggtggatttgacttgctccgatggtacttttgccagagctgctgttccaagtggtgcatccactgggatttatgaggcccttgaattgagagatggaggatctgactaccttggaaagggtgtatcaaaggctgttgacaatgtgaacaccgtcattggccctgctttgattggcaaggacccaactgagcagactgctattgacaacttaatggttcaacagcttgatggaactgttaacgaatggggttggtgcaagcaaaagctaggagcaaatgccatattggcagtgtctcttgcagtctgcaaagctggtgctagcgtcctgaaaattcctctntacaagcatattgctaatatcgcgggtaacaaaagttggttttgcctgttcctgctttcaatgtcattaatggtnggatcacatgctggaaacaaa

SEQ ID NO: 227842 - DNA, 546 bp, Glycine max
aaaaaatatttggggatagcccataaaattggaaataaactgtaagtaggcttcaagtattaaagctaaatatcattaaacacctttcaaagtcttaagacataactgtcctagctctgggaatcagaactcaaattattggcaagggctttatcataccaagactaatgttccaactatcaacttatatatcacaccaaaaaccgggcacccaaatctcaatgctcaaactcgggtggatctccaggttttttccacttgaaaactttagtagggttcaacgggggtacggaagttagctccggcgtacactggttcagcaccaagctcctcctcaattctcaagagctggttatatttagcaagacgctcagacctgcatggagctccagtcttaatttgacccgtagccaaaccaacagaaagggcagcaatgaaggtatcctcagtctctccacttctgtgactggccatgacaccccatccagcttttttggacatcctgacagcttcaatactcttaagcacagaaccatttgggtgacc

SEQ ID NO: 227843 - DNA, 491 bp, Glycine max
  unsure (1)..(491): unsure at all n locations
tgcgtggcaaataaatgggacaagggacgaggtagagggagaggcagacacaagagacagcagagcagagatctagcgtattctctcgctctttctttcactgtcacagagccacatccatgggcttcccagccaacggcgcctctgcggcccagcccctaaacttcctcatctacggccgcacgggctggattggcggcctcctcggctccctctgccgggcccagggcatctccttccattacggctcgggccgcctcgagaaccgggcctccctcgaaaccgacatagccctcctcaagccctcccacgtcttcaacgccgccggcgtcacgggccgccccaacgtcgactggggcgagtcccacaaagtcgagaccatccgaaccaacgtcgtcggaaccctcactctcgccgacgtctgccgcgaccacggcctcattctcatcaactacgcccaccggttgcatnttcgagtacgactccgatca

SEQ ID NO: 227844 - DNA, 620 bp, Glycine max
agaaaaagatggcggctgagctagtcaatggtgcaacaagcgagaagctggctgaaactgattggacaaaaaatattgaaatttgtgagctagttgctcatgataaaagggaagcaagagatgttgttaaagctataaaaaagagactaggaagcaaacacttcaatactcaactctttgctgtcatgttgctggaaatgttgatgaacaatattggagagcatattcatgagcaggtgattgatactggaattattcctattctagtaaaaattgtgaagaaaaagtctgatttgcctgtgagggagcggatatttctcctactagatgccacacaaacatcccttggtggtgcatctggaaagtttccacagtattataatgcatattatgatttggtgagtgctggagtgcagtttgctcaaagggatcaagtggtccaatcaaataatcctagttcacaacctagtaggactagtaatgtaccaaacagagagcaagcctcacctaaacatgaagcagttgctcagccagcagagtcccagactgtccctgaatctagcattattcaaagggctggcatgcattagaagtactaaaaagaggtcctttgatgtgtg

SEQ ID NO: 227845 - DNA, 575 bp, Glycine max
gagataattacaggttcaattcccatagcctgaaatataagttctgtttctagttccccagcagacataattacaggttcaattcccatagcctgaaattatgtctgctggggaactagaatcagagagagctggagagccaggaaaattgattcgtgaacgctatagaacagcatctcaagtggtccagaatcaaggaaaaatgagctgtttgatgatcaatgatattgatgctggccttggtagatttgggaatactcaaatgacagtcaacaatcaaattgttgttgggactcttatgaatctgtcagacaatcctacaagagtaagtgttggtcaagattggcgagaatcagatgtcacaaacagaattccaatcattgtaacagggaacgatttttcaactctttacgctccactgatacgcgatggaaggatggataagttttactggcaacctaaccaggaagatatccttaatatcgttcacagaatgtatgagaaagacagtatatctagggatgaagttgaaagggttgtgaacactttccctaatcaagctttggacttttatg

SEQ ID NO: 227846 - DNA, 547 bp, Glycine max
aaaagagaatgtcaaaccttctctttttacttacagaatcttaatagactcaaagggccagtccaatgatattgctggaatggagcaagtgtttgagacaatgaaggaagaaggctttgaaccagacatccaaatacaggcactcttggctaggcattacacctcatctgggcttaaagaaaaagctgaagctatgttgaaggagatggaaggtgaaaacttgaaagagaatcagtgggtatgtgcaactttgctccgcctttatgcaaacctgggaaaggctgatgaagtggagagaatttggaaggtctgtgaatcaaaacctcgagttgaggactgcctggctgcagttgaagcctggggaaagttaaataaaattgaagaagcagaggcagtttttgagatggtgtcaaagaaatggaaacttaattccaagaattactcagttcttctgaagatttatgcaaataataagatgctaacgaaaggtaaggaacttgtcaagctaatggctgataagtgggtgaggataggccccataacatgg

SEQ ID NO: 227847 - DNA, 440 bp, Glycine max
  unsure (1)..(440): unsure at all n locations
gccagaaaaagcttccaggtgctttttctggtggggagcctttacctgaggctgtactgtggcttctattgacaggaaagataccaagcaaagcgcaagttgactcattatccaaggaattgcgaagtcgtgcaactatcccagattatgcttataaggcaattgatgcattgcctgtttctgctcatccaatgactcaattcacaactggtgtcatggcccttcaggtgcagagtgagtttcagaaggcatatgagggtgggatagctaaggcaaggtattgggagccaacttatgaggatacaatgaatctaattgctcgtttgccagccattgctgcttatatttatcgacggaaatacaaggatggaaaaatcataccgttggatgattctttggattatggtgcaaactatgctcacatgttanggtttgatgat

SEQ ID NO: 227848 - DNA, 509 bp, Glycine max
agttaaaagggtttattccgatttcataaagaatacaaggggggaaacttatacccaaatacaataatgcctttattcttatgctccctcaaacctaatttatgcaattcaaaaaaagtgggaaagaccattgagggtgaaaagccaccctttacctaaataccaaaatcttctaaaatagaaaccataggggagggtaatcaatatttctcattacaatggtaccacattttcaactcaacaccaccacacacatctaccgcagtgtgtattttagcaattattaacagagaaatggcgcttcaaatttcacgatgatttggcaaccaattgctcgagcttctctagtgtgacacttttgggcctttcaagtggcattccaagagccctatcccatatcaactgagggccaactccaaagctccttgatacaccaaagagaacagtataatagttttcctcagttagaccatagtagttcagtagcactccactgtgcgcatcaacat

SEQ ID NO: 227849 - DNA, 426 bp, Glycine max
aaagaaagaaggtttttttagtatagttaacagcatggagagggaggaagatgttaaggttggagcacagaaattctcggagaggcaagcactgggtacaggagctaagagtgacaaggactacaaggaggcaccaccagcacccttgtttgagccaggggagttaaagtcatggtctttttacagagctgggatcgcagagtttgtggccacattcttgttcctctacatcactgtcttgactgtcatgggtgtcaacagggcacccaacaagtgctcttctgttggcattcaaggaattgcatgggcttttggtggcatgatctttgcccttgtctactgcactgctggaatatcaggtgggcacataaatccggcagtgacgttcggtttgtttctggctaggaagctgtccctgacgagagc

SEQ ID NO: 227850 - DNA, 412 bp, Glycine max
ccccacaatctatcgtgggcacaaacgagtgggttgtaattaaggtcataatttacacacatgatggattttaaacaaaaagatattccttatgaatggggcaaacatacaaaaagacccccactaggtagataattcaaacacacagatggatgaaggattggttaaccccttgtcttgaaaggaattgctcggatcactatctggggatatacagcagcaggggcagctccaatgaaaggtccaacccagaaaatccattggtcatcccaagcatggtctcggttgtatattatagcagcaccaagactcctagttgggttaatgccagttcctgtgattggaatggtagccaagtggcccaaaaacacagaaaacccgattggaagaggggccaaaatcgggacgggag

SEQ ID NO: 227851 - DNA, 545 bp, Glycine max
  unsure (1)..(545): unsure at all n locations
cttgcagtcgcagaggaaaaccctagctagtagtctcagttcgtttgagagagaaaaaatggcagagggtctcgttctccgcggaaccatgcgcgcccacaccgacgtcgtgacggcgattgccactcccatcgacaactccgacatgatcgtgacggcgtcgcgcgacaaatccatcattctctggcacctcaccaaggaggacaagacctacggtgtcccccgccgccgcctcaccggacattctcacttcgtccaggacgtcgtcctctcatccgacggtcagttcgccctctccggctcctgggacggcgagctccgcctctgggacctcgcggctggcacctctgcccgccgcttcgttggccacaccaaggacgtgctctccgtggcgttctccatcgacaaccgtcagaatcgtgtcggcctctcgtgaccgcacgatcaagctgtggaacaccctnggtgagtgcaagtacacaatccaagatggcgatgcgcattcggattgggtaagttgcgtccgtttcagccctagcactctt

SEQ ID NO: 227852 - DNA, 538 bp, Glycine max
gtctatattggtaaccggagaaaaacaaagatgttgaaatatccatgtaacaagtaaataaccaaaacgaacgttttaaaaataaataaaaggcctcagtgccacggtcttcaacataaaaatcaattctacagtaaagcagtaactaactttgtcccaaaactcaaaaacagattcgcatctgaaaacactaaaaagcttaacctaataacgtccaatagcccaaactctgaccacaccatcggtatagccactaaacaaagtgcttccatccgcactccagttcaaacttgtgcaataaataaccttcttcttgttggcgttaccaccaccggaggtggcatcagcctcagtcttgaggtcaaccttcaaatcctcaacgatactcttgctctccaaatcccagatcttgatgctctgctcggtggcggcgcaaagccagtacctgttggggctgaagcagagtgcatggatgattgagccagcatcgagagagtaaagacgcttaccctcagccaaatgccacagaagaataccc

SEQ ID NO: 227853 - DNA, 529 bp, Glycine max
ggaagttcttcagctcaactctctgagaacttctatgatagtaaatgtcccaaggttttctatgccgtaaaatccgttcttcaatctgctttggctaaagaacctcgccagggagcatctatcgttcgcctcttctttcatgactgctttgtcaatggttgtgatggatcagtactacttgatggcccttcctcagagaagactgcacctcccaacaataactctttgagaggttatgaagtcattgatgccatcaagtctaaggtcgagacagtatgccccggagtggtgtcatgtgctgatattgtaaccattgctgctcgtgactctgttgcaatccttggagggccatattggaaggttaaacttggtagaagggattccacgactggatttttcaacctctgctagcagtggtgtgctcccaggacctggttcttccctcagcgaccttatcaaaagatttgatgatcaagggctctctaccaggacatggttgcattatctggagcacacacaattggaaagg

SEQ ID NO: 227854 - DNA, 534 bp, Glycine max
aaataattatttcagtaagctaatacatactgaaagtcattcttataaaaagaaaacaatattccactttcattatatcacgttttttgcaacagttacaattgttgtaaccgtaacaacacatccttaaaatgacattacatgtaagaaaaacatgctttacaattaattccttacaataactctagtaaaattgaaattgaacttaacaatacaaattttgaaggaacaagaaaacaccttaacagatcaactcacaaaagaactaccccacttttagggtgtatatgtaacacacaaacacacaattcatataatttatttgttgtgtctcttctaattgggcctcctacattgcttccttatctgcccatttgacccagttaagggtttgatgtttcccatcttaatcattgcagtgacaaagtcagcctcaaaggccttttgattgttgctgtaagctctcactagtgaatctgtggatcctccattgaagagctcttgatcagaatgaaggagaccctttttgttgat

SEQ ID NO: 227855 - DNA, 482 bp, Glycine max
cttccgttccttctttctttatcatcaccagtgttccatatttcagagaaaatggctttatcatctccctctctagtgttcaccgtacagaggtgtcaaccggagctggtggctcctgctaaacccactcctcgcgaagttaaacccctctccgacatagatgaccaacagggcttgcgtttccaaattccattcatactattctatggtaatgaaccatcaatggcagggaaagaccctgctaaggtcattagagaggcacttgcgcaaactcttgttttttactacccttttgcgggtaggattagggagggacctggtagaaaattggtggtggattgtactgagcagggtgtcatgttcattgaggctgatgcagatgcaacacttgatcaattgggtgacacacttcaacctccattcccatgcttcgaacaactcctttatgatgttccaggctcggagggagttattgactgtcc

SEQ ID NO: 227856 - DNA, 475 bp, Glycine max
ctctcttgtattatactcactttgtgccaatcaactttttgggtggccacttaatattttccaaggtagacgcgtaaaaaattggatgtggatccgtaggttggttttggttcccaattagcatgtgatctaactcgtttgcaaacttgtccatagctttggcgggcaaccaaattggtaataatatgccttcttctccttttgcattcttatgtgccatcagatagaatactgcaggaaagggtccagccccacctttggccactccaccatataatgccctaccccacccaaaatcaatttgtttgaaaccaaaatgtctcaaatctgacacaataaaagatctcacggcggttaacaagcatcttccattagtcaccattagatctgccacagaatgcatgtattcttctgtcacctcacctttcagtttatttattaactccactgcatacccaaatggattttcacaaag

SEQ ID NO: 227857 - DNA, 588 bp, Glycine max
  unsure (1)..(588): unsure at all n locations
gtcctgatagagctcctcaagtcatgaaggaccattggagaacatacataactgaagatgatttcagattcatgtcagaaaatggcttaaatgcagtgagaatacctgttggatggtggatagctaaagatccaaaccctcctaagccttttgttggtggatcattggaagcattggacaatgctttcatttgggcacaaaaccatgggataaaagtgatcatagacttgcatgcagctgaaggttcacagaataggtttgaacacagtggaactagagatggagaaatagaatggggagattcatacataccaaacacagtccaagtcatagacttcttagcagaaagatatggtaacaaaccaaacttaggaggaatagagctaatgaatgagccttctggtgtgaatctagagagccttaagaagtattacaaagaagcatatgatgctgtgaggaagcacaactcangtgcttatgtgatcatgtcaaacccattggatgcagatttctaagtgcttctctcatttgtcanagactttgacagagtagtcaatgatgtgcaatactaccatcttttttgggacg

SEQ ID NO: 227858 - DNA, 461 bp, Glycine max
ggagcttgacatagttgatgcagatggcttacaaaatggagatgttactgcgagtttggaggatggagaagtggctgaagaaaatgatgaatagggtggatgggagatggaggatttaggtctgggccctgaagctgacactcccaaagcttctatcagtacacaatcttcagtttttgtgaccccaacacctggcatgccagtaagtcatatatggactcagaaatcatctcttgcggctgatcatgcagctgctggaaattttgatactgcaatgaggttgctgaaccggcaacttgggataacaaattttgcccccctgaaaaccatgtttctggatctttatactggcagtcattcctatctccgggcattttgttgtgctgcgatcatatcacttgcagttgtaagaggttggactgagtcatcttgtgcttatgtgagaggctcaccggcacttc

SEQ ID NO: 227859 - DNA, 565 bp, Glycine max
  unsure (1)..(565): unsure at all n locations
gcaaaaggccatataatttttttttatttgaaataatgtccgggatcatccacaagattgaggagaccctccatgtgggagggcacaagaaagaggagcacaaaggagaacaccatggtgagcacaaaggtgaacacaaaggagaacaccatggtgagcacaaaggtgaacacaaaggagaacaacaccatggggagcacaaggagggacttgtggataagatcaaggacaagatccatggtgatggccatgacaagggtgagaaaaagaagaagaaggacaagaagaagaaggagcatggacatgaccatcatggtcatagcagcagcagtgacagtgattagatcttatatgttaagcaggtgtacggtacgatggtagtgaggagccagaatccctcttcctgctttatgatataatacanataaaatagcgattccggaaatcatgtctgtagctgctctttttatttatgtgataaatgtaaaacgctttggtttggcttggccgtgtgcattaggtgaaaaaataaatgttataattactcagaatctagatctttctc

SEQ ID NO: 227860 - DNA, 451 bp, Glycine max
gagaaagatcttatattctttgtaattataacatttattttttcaacctaatgcacaacggccaagccaaaccaaagcgttttacatttatcacataaataaaaagagcagctacagacatgatttccggaatcgctattttatttgtattatatcataaagcaggaagagggattctggctcctcactaccatcgtaccgtacacctgcttaacatataagatctaatcactgtcactgctgctgctatgaccatgatggtcatgtccatgctccttcttcttcttggccttcttcttctttttctcacccttgtcatggccatcaccatggatcttgtccttgatcttatccacaagtccctccttgtgctccccatggtggttgttctcctttgtgttcacctttgtgctcaaccatggtgttctcctttgtgttcacctttgtgctc

SEQ ID NO: 227861 - DNA, 448 bp, Glycine max
  unsure (1)..(448): unsure at all n locations
aaaatgattccaaccctactccgcctccggaaccccatgtagcggcggaacccattactgaggatttggtccaagacaaagaagaagaggatgatagtagtaagattgttattccagtcccagagagcgagtccttgtcattgaaggaggatagcaatagggtttctgattccgagaaaaatgccattgatgagctgaagaagctcctgaaagaggaattagaggacgaggaggtttccatctggggcgtccctctctttaaggatgacaggactgacgtcattctcctcaagtttctcagagctcgtgagctcaaagtgaaggacgcccttgtcatgtttcaaaacactctccgatggaggaaggacttcaacatcgacgcccttctggatgaagatctgggcgaccacttggagaaggttgtcttcatgcacggacacngcagaga

SEQ ID NO: 227862 - DNA, 449 bp, Glycine max
attggggtctctgctgacctgcttgttggtcagaaggtttatgctattgggaacccgtttggacttgaccacacactcacaactggtgtcattagtggacttcggcgagaaattagttctgctgcaactggtcgtccaattcaagatgttatacagacagatgcagcaattaatcctggcaacagtggagggcctctcttagatagttctggaaacctcattgggataaatacagcaatatattccccatctggtgcatcctctggtgttggattttctattccagtggacactgtaaatggtattgttgaccagttggtgaagtttgggaaggttacaagacctattttagggattaagtttgcccctgatcagtctgtggagcagttgggagtaagtggagtgcttgtcttagatgctcctgccaatggtcctgctgggaaagcagg

SEQ ID NO: 227863 - DNA, 498 bp, Glycine max
ggcttattatatttagtttaataatgagaaagttaaaaggatgatgagctggcagtcccatagtacatatgtacacttggacctgtttttatgaagcaagatacaacctaagaatacacatacacagctgcattcattcctggcatatgaaatgtatatacatgcagtataggatggatggatggataatgaattgcatatcatcatgattcatcaggctttggctccagaatgacgggtatcttctccttgtggtcacctctcaacacctgcacaatcaccttatcacccactttacactggtcaagaattctgtataaatcactttcattagtaaccttcttatcattcacagatgttatgatgtcacctaaaatgagtctaccataagagtcacgctttgttgattgcaagcctgctttcccagcaggaccattggcaggagcatctaagacaagcactccacttactcccaactgctccacagactgatcaggg

SEQ ID NO: 227864 - DNA, 416 bp, Glycine max
agaaattacgccaacgtgccggggcaaaaggaaaccaaagttaaggtccctctggctttgtttggaggttcaggaaactatgcctctgctttgtatattgcatctgtgaaagccaatgcagtggaaaaggttgagactgagcttctgcaatttgttgaggcagtaaagaatagtcccatattttcacagtttataagggacttgtctgtggctaaggatgttagagtgaaagttatccaggatatttgtggggaagccaagttttcggatgttacaaagaacttccttgttattgttgctgagaatggaaggcttaaaaacatagacaccattgcaaagagatttgcacagttgtcaatggcatataagggagaagtgcaagcgactgtgaccactgttgttcctcttacccctga

SEQ ID NO: 227865 - DNA, 483 bp, Glycine max
catgcaggtaccagtatgggaaacgtggatgccccagtagatgagactatatccgatgttgagaaagaaatagacgacctgcttcctgttgaggtaaaggaacagcgtctcagtaactcgcttcaatcaacaatggtgtgaggatgccttgcggccatgcctatgactactaagatcctaaccttatctctctggggccactatgcctctatggccattgtaagcttgccacgataccagcttcgggaaacaatcctattactcttcactgtgccacagcatgagatacatggtgctcgatgattaccatgctactttcgtagaaacagttacttataagacaatagcttcattcaccattgtccaaagcatttatcttcatatacgagatggctcacatgggttcctaatgacagggtcatgtctcctatgacgatcatgctcttagtttcggatagacacaactctcgtcccaagtttttc

SEQ ID NO: 227866 - DNA, 601 bp, Glycine max
gtttcatctttcccggtgctcagccctatccccatcgcaacttttctgaggaagttgctattcttgatggctactttggcaagcttagtgcaggaagcaatgcttatattttgggtggccaagacaaatcacagaactggcatgtctactctgcttctgcagattctgtaactccatgcgacaatgtttacactctagagatgtgcatgactggcctggatagagagaaagcacaggttttctacaaagaacaatctgcttcagctgccattatgactgttaattctggcattagaaaaattcttccagattctgagatttgtgactttgactttgagccatgtggttattcaatgaactctgttgaaggtgctgctgtttctaccattcatgttaccccagaagatggtttcagttatgcaagctttgagactgttgggtatgacttcaaagtggtgaatctgaacgaaatggttaagagggtattggcatgttttctcccaactgagttctctggtgcagttcatgtggatggtgcaagcaagttgtttgatcagacgtgttttctggatgttaaaggatactgtcgcgaagagaggag

SEQ ID NO: 227867 - DNA, 435 bp, Glycine max
ttggcacgcatacaaagggatttattaaaatccattcgatgttcaaatggtaatagtagaacaataaaagggccaaacgccctaacaatggtctaacataaaagggaaaaaacaccaaagaaaaacaatcactgtctggaaaaccggacttattttcgcaggggcataataaagacacttaagaaaactactcttcttcatcttcctctttccagcactttagagttgatctaggggaaccacagtcacaagttttggcaaatttttggtagacaagagaaccacccattccaagccctttgtgggtcctcttttcgcgacagtatcccttaacatccagaaaacacgtctgatcaaacaacttgcttgcaccatccacatgaactgcaacagagaactcagttgggagaaaacatgccaataccctcttaacca

SEQ ID NO: 227868 - DNA, 659 bp, Glycine max
  unsure (1)..(659): unsure at all n locations
gctgaaaaagccttgatatcaatgactatttggatttcccctatttctttattgccaaaattgcaaccataccttaagaacaagaatcctcgtatccgtgcaaaggcatcaatgtgcttttctcggagtgttcctcagctgggtgcagaaggcataaagacatatgggattgacaaattgatccaagtagctgcatctcagttgagtgaccagctcccagagtccagggaagcggcccgaactctacttctcgagcttcaaaatgtgtatgagaaatctcatgatctcatcaagccagctactcctactgtcaataatgagcatactgtgaatgaggagaatccagaggtgagttcttgggaaagcttctgtcagtcaaaactttctcctcttagtgctcaagctgtacttcgtgtaaccaccagtatcgctcgggagggtcttgtttcatgacacgcacattaaacctcactttgcggctntcatcatttccttgtttgcttatcattttcttctgtaaatacagtgcgacaattgagatgattgagttgagttgtcgtcgaagcacgtatttgagcccaagattataatgtgtattctatattttccccctagctggtggtacctnnatatactttgattaatactactactactac

SEQ ID NO: 227869 - DNA, 621 bp, Glycine max
  unsure (1)..(621): unsure at all n locations
cctctggctattggaaatatcagatcatcgaaccaaccaaacgaaggcagaaacaggcaaagagctcatagaaattctcgtcctcttcctacataagtcttctcttatcataaacgcgtgttgctcggataaggttgtgctgcggtgattcactcgtactttgcttaatatggcggttgagaagttgagcattgcaaaagatgtgactgaattaattggcaaaactccattggtatatctcaaccgcatcgtggatggctgtgttgccaaagttgctgcgaagctagaaatgatggaaccttgctccagtgtcaaagacaggatagggtatagcatgattgtagatgctgaggagaaaggactcatcacaccgggtgaaagtgtcctcattgagcctactagtggaaacactggcataggtttggcattcatggcagctgctaagggttataaacttattataaccatgccttcttcgatgagtctcgaaagaagaaccattcttcgagcttttggagctgagttagtcctcactgatcccgncaaggtatgaaaggagctgttcagaaggcagaagagatcgggataagactccaattctatattctcagcaatttgaaa

SEQ ID NO: 227870 - DNA, 588 bp, Glycine max
  unsure (1)..(588): unsure at all n locations
gaaccatgtgctcgttcttgctacaagcaacaagatgctatctttgatccatcaaagtctacatcatattccaatattacatgcacatctacgctttgcacccagctctctactgctacagggaatgagccgggatgttcagcctncacaaaagcatgcatatacggcatccagtacggtgacagttcgttctccgttggctacttcagccgcgagcggctctccgtgaccgccaccgacatcgtcgacaacttcctcttcggttgcggccaaaacaaccagggcctctttggtggctccgccggcctcatcggcctcggccgccaccccatctccttcgtccaacaaaccgccgccgtatatcgtaaaatcttctgctactgcctccccgccacctccagctccaccggccgtctgtccttcggcaccaccaccacttcctacgtcaagtacacccccttgtccaccatctcccgcggctcctccttctacggcctcgacatcaccggcatctccgtgggcggcgccaaactcccagtctcttccttcaccttctccaccggccgtgcaatcatcgactccggcacc

SEQ ID NO: 227871 - DNA, 554 bp, Glycine max
gcttgatcttcaaagggtgcagggtccacagtttcttttcttggatctatgtgctgctttccttgcacagcttcgtgtcctctagagcgaagagcttaggctcaccagagacataaatatgccttgtgtttcatgtgaataagcttacattgtacatacaagtatcttttcggtccaagcttatcctctgttttctacccgtttatctgtgggtaaacattataatgagccaatcccaagtatgggatttgcttcgttaacaatggtgctcgactaggttttcctttctcttggtgattttaattttatcagtgtaatgaattatatggggaatgtcttaaaagaattagccccaactgacagtgatatatgtatggttatcaaccaaatgctgtaaacgactgttgccattggaagggatgtctaggctgcttctaacttttgcagattagtctttgttgtcctataaatgtaatttcatattactcgtgtatgaatgctatgtaacgactgtgttcatccgacgagccatttcgtagagtgcaaccgttcta

SEQ ID NO: 227872 - DNA, 415 bp, Glycine max
gtagcaacgttttcaactccaactttgtggctgctatgaccaaattgggtcgtgttggagttaagactgcgagaaatgggaaaattcgtaccgattgttctgttctttaagttaaggctttagttgtacgtagaaagtcgcaaacagtgcatgttttggaggtgaacacaaaacacacacacacattgcaattttattgcggggaatttgcacggggtagtttagattgactgttgttaataaatttgtttgcgaataattcgggagttgtaatttggatgttcgggaaaggaagggtaaggttgagtttttatttgttgtaatgtttccaaataattcgaacttttagaattgttcatataaataaatgttacccagagggggaaatcactaaatatggattttagattacttt

SEQ ID NO: 227873 - DNA, 487 bp, Glycine max
gttcctccgagactctggcctcaatcacgtcattatccgcttatgcggtttcatgcagggccttatcggccagtatgcagttcccatcctagaagaaaaatctgtttggggtactgatgcccccacccgaattgcttacatggatactcaggatatagctcgcttgacatttatagccatacgaaatgataaattaaatggtaaacttcttacatttgccggtcctcgtgcctggacaacccaagaggtgataaccttgtgcgagaggctagcaggccaagatgctaatgtcactacagttccagtctccattttaagactcactcgccagttgactcgcttttttgagtggacaaatgatgttgctgacagactcgcattttcagaggtccttaccagcgatactgtattttctgttccgatggcggagacatacagtcttcttggggttgattcaaaagacatagttacactcgagaagtatttg

SEQ ID NO: 227874 - DNA, 503 bp, Glycine max
aagaaaaagaacacccctcacccagtgaaggtagtgtacatatccaaccccatgaagatcaagaccagcgcatccgagtttagggctttggtgcaagagctcaccggccaggacgccgagtccccgccagatcccacccgcttccacggcctaattcaccctgattcctcctcttctgtcgatcacatcaaagaggaggaggacaatgttcacagtgtgaattgtgttgttcctcccgcagtcgccgacgaaaatatgagcctcgccggctgctacgaggaggaacaacaacaacagccttcctcgatggagagtataaataatttcgagccgctggacgacgacgacgttttcacgccccagatgatagagaacatctccgccctgctcccgcaagtgtattctatgaatcccctcatcttaatcactggtgataccacggatggatgcagtgtaattagttattatattatggtccttctatcctcggtaaggtcaagctc

SEQ ID NO: 227875 - DNA, 265 bp, Glycine max
agaaattgatcggttaaggcgagacaggcaagttcttatggtggagttggtgaagctcagacaacagcaacaaagtaccaaatctcacctccaagaaatggaaggaaggatcaaaatgactgaacagaaacagaaacaaatgatgaatttcttggccagggcaatgcagaatccaaatttcgtgcaacaattggctcagcaaaaggagtggagaaaggagcttgaggaagttttttccaacaagaagaggaggcctattgatcaa

SEQ ID NO: 227876 - DNA, 579 bp, Glycine max
gcagacttaacaacagcacaaagcgggttactgtctgttcaagctaccatctctctctctctttcttagtgcctccttgccagaagttaaaatggcccaagaaactttcctattcacatctgaatcagtgaacgaggggcaccctgacaagctctgtgaccagatctccgatgctgtgctcgatgcatgcttggagcaggaccctgacagcaaggttgcctgtgaaacctgcaccaagaccaacatggtgatggttttcggagagatcacaaccaaggccaacgtggactatgagaagattgtgcgtgacacatgcaggaacattggttttgtctctgatgatgttggtcttgatgctgacaactgcaaggtcctcgtcaacattgagcaacagagtcctgatattgctcaaggtgtgcacggccacctcacaaagaggcctgaggagattggtgctggtgaccaaggtcatatgttcggctatgccactgacgagactcccgagctcatgcccttgagccatgtccttgccacgaagctcggtgccaagctcaccgaggggtcgaagaaacggacatg

SEQ ID NO: 227877 - DNA, 414 bp, Glycine max
attactcccactcctaaagttactggcgggaatcttaaaccatttccaagcaggctatatgccattcctcccagaattgctagtggcttagttcctggagtttcctctgagacataccaggatgataacaaaaagtggaaaaaacacgtaaaagcttacaagaaaactaatagactgttggactcgggaaggtatcgcaacattatggatatgaatgctggattgggtagttttgcagcagctattcattcttcaaaggtatgggtcatgaatgttgtgcctactatagctgaggcgaatacactgggtgtgatatacgagcgaggacttattggcatctatcatgattggtgtgaagcctttttaacatatgcaaggacatatgaccttattcaccccatggtgtctttagtc

SEQ ID NO: 227878 - DNA, 383 bp, Glycine max
ccaagccccactcaaccaccacaccactctctctgctcttcttctacctttcaagtttttaaagtattaagatggcagagacattcctatttacctcagagtcagtgaacgagggacaccctgacaagctctgcgaccaaatctgcgatgctgtcctcgacgcttgccttgaacaggacccagacagcaaggttgcctgcgaaacatgcaccaagaccaacttggtcatggtcttcggagagatcaccaccaaggccaacgttgactacgagaagatcgtgcgtgacacctgcaggaacatcggcttcgtctcaaacgatgtgggacttgatgctgacaactgcaaggtccttgtaaacattgagcagcagagccctgatatt

SEQ ID NO: 227879 - DNA, 433 bp, Glycine max
tgagcttgttcgcaatggcagtgttgagtcccatctgcatggtgacgacaagataaagggaatgctagattgggaagcaaggatgaagattgccctaggagctgcaagaggactggcctatcttcacgaggattccaatccccgtgttattcaccgtgacttcaaagctagcaatgtgttactagaagatgactttactcccaaagtttctgattttggcttggcaagagaagcaactgaaggaagtaatcatatttcaacgcgggtgatgggaacttttgggtatgttgccccagaatatgcgatgacaggccatttactcgtcaaaagtgatgtttatagttatggtggttgtgctgcttgaacttctcacaggcagaaagccagtggatatgtctcaacctcagggacaggagaatcttgtaacttgggc

SEQ ID NO: 227880 - DNA, 586 bp, Glycine max
  unsure (1)..(586): unsure at all n locations
tgctgatggtacaagactcttttcatgtgggacaagtaaggatgcggaatcctctattgttgagtggaatgaaagtgaaggagctgtgaaaaggacttatcaaggatttcggaaacgatctttgggttttgtacaatttgatacaaccaaaaaccgatatttggcttgcngtgaatgattctccattaaattctgggatatggacaatattcagcttttgacaactgttgatgcggatgggggtctccctggaagcccacgaatccgttttaacaaggatggagctcttttagctgtttctgcaaaagagaatggaattaaaatcttagccaatgcagatggtattcgtttgttacgcacattagaaaattctttatatgatacatcaagaacatcggaagtcatgacaaagcctacaataaatccaatttcagcagccgccgtcgctgcaactagtgctgcacttggagagagggccttgtctgtgaatggngatgcccggaacttgggtgatgttaaacctagaataagtgaagaatccaatgantagtcaaaaatatggaagctaactgaaatcaatgaacca

SEQ ID NO: 227881 - DNA, 566 bp, Glycine max
  unsure (1)..(566): unsure at all n locations
ctctttctctctctagaattctcagatttgcggggcgagatgatgcagcagccaggacccggcatggcacctcccaccatgggccagcagccgccgcaacagtaccagcagcctccgccgcagcagcagcaaccctacgtcatgatgccgncgcaagcccaagccccgcaggccatgtgggccccctccgcccagcctccgcctcagcagcagcccgccagcgccgacgaggtccgaaccctctggatcggggatctgcagtactggatggacgagaactatctctatacctgctttgctcacaccggcgaggttacatcggttaaagtaattcgaaacaagcaaactagtcaatctgaaggttatgggtttattgagtttaatagtcgtgctggagctgagagaattcttcaaacatataatggggcaataatgccaaatggngggcagagtttcaggttgaattgggcaactnttagtgctggtgagaggtcgcgccacgacgattctccagattacaccatatttgttggtgactnggctggagattgtactgattatcttct

SEQ ID NO: 227882 - DNA, 630 bp, Glycine max
  unsure (1)..(630): unsure at all n locations
aattgaagcaattcatatcaggaatcacagaattgacacctgatgctgttcaagttttgagagctgcagatcagttggagaaagaccttgtgcagatagcagttgaggattcagtggaaagtgaagatggtggaaaggcaattatccgtgagatgcctccttacgaggctgaaggtgcaattgccaaccttgtgaaaatatggattaagactagaatagacagactgaaggaatgggtcgacagaaatctgcagcaagagctttggagtgctcaagcaaatcaggaaggatatgccccatcttctgttgaagttttgcgaattataaatgaaactttggatgctttctttcagcttccaataccaatgcatcctgtattgcttcctgaagtaatgaatggtcttgacagatgccttcagtactatgttattaaagcaaaatctggctgtggatcacgaaacacatttcttccaacaatgccagcattgaccagatgcactattggttcaaagtttcagggctttgggaagaaaaaggagaaatctccanatcctcagaagagaaaccctcangttgcaacaaatggngatagctcttctggaatacccccactctgtgtcgcataaatac

SEQ ID NO: 227883 - DNA, 568 bp, Glycine max
aaaagctgcactcacggctgcaagaaccgctgcaaatgctatatatgtgcccccagctcaacaaggtgccatagatctgcagagtggaatacttcatgctgaagagaaggattataaaactgcttatagttatttctttgaagcttttgaatcattcaatgctcttgatgaccccaaagcttgttttagcctgaagtataatgtgctgtgtaggatcatggtgaatcaagctgatgacgtaggaggaattatttcttctaaagcaggcctgcaatatcttggccctgacttggatgctatgaaagctgttgctgatgcacattctaagcggtcccttaatttgtttgaaattgctttgagggactacaaggcacagttggaggaagacccaattgtacacaggcacctttcatccttgtacgatacccttatggagcagaatctctgcaggttgatcgagcctttctcaagggttgagattgcacatattgctgaacttattgaactttccacggatcatgtggagcggaagttgtctcagatgattttggacaagaagtttgctgga

SEQ ID NO: 227884 - DNA, 319 bp, Glycine max
ggagtgatagcgacgagcgtgggtttagccgtggcgagaactcacacgtgcgggaggcacgtgtgcgtggtgcccgacgagaggtcgagggcggagtacgcggagagaatgggggaggcggggatgtcgccggagatcgtggtgggggaggcggaggaggtgatggaggggttgtgccgcagaatctacttcatgatgatgtattccatgtacagtatcatcatcagatggctcttgctgaccatgctgagtacataggcttcagcacttatatgcacgaacgtgaactctgtcacctatatagctttttccaatggct

SEQ ID NO: 227885 - DNA, 586 bp, Glycine max
tgctgctgagatccttgttgagttctttgagaagagcaaggctgatccatctcactgggacaaaatctcccagggtggactcaagcgtattcatgagaagtacacatggcaaatttactcggacaggctcttgacactcactggtgtgtatggcttctggaagcacgtgaccaatcttgaacgccgtgagagcaaacgttacctcgagatgttctatgctctcaagtaccgcaaattggctgagtctgtgccccttgctattgaagagtaaattcatgtttgaagagaacatcaatggagaaaccggcttttggtcgtttgaagtcttatggagctttcataaataacgccattgattttgattgtgatcagcttttggatttaaagagtctaaaaaaaagtgtcgtttgtgtttatatcatgcttaggttctgggtaaaaaaagtaaaagtagaaagtctattgtttttaaaattctttttgatgatgcaatattgtgtatgattggaaatctctaaattctggatttgcaccccatcaattcaatttaaagatatgccttcttccattcaaaaaacaaggctaa

SEQ ID NO: 227886 - DNA, 585 bp, Glycine max
  unsure (1)..(585): unsure at all n locations
atcttgttcacctcagctcactccttccttcatcttcctgcagctcttctgccaaaggtcccaaaagaaaagcatcattagaagtggtacacaaacatgggccatgctcccaactgaataatcatgatggcaaagcaaagtctacaacaccacacagtgagattctgaaccaagacaaagaaagggttaagtacattaactcaaggatctcaaagaacttgggccaagatagtagtgtgagtgaattggactcagttacactaccagccaagtctggtagccttattgggtctgggaattactttgtggttgttggtcttggaacacccaagagggacttgtcactcatctttgacactggcagtgatctcacttggactcagtgtgaaccatgtgctcgttcttgctacaagcaacaagatgctatctttgatccatcaaagtctacatcatattccaatattacatgcacatctacgctttgcacccagctctctactgctacagggaatgagcccggatgttcagccttcacaaaagcatgcatatacggcatncagtacggtgacagttcgttctccgttg

SEQ ID NO: 227887 - DNA, 509 bp, Glycine max
gaataacgaagcctcctcgttcttcttcttccgccctttctctctctagaaccgtacggtcgtttctttctctctcctcaaccggagacagcgtcgccttcttttctgaatctcgcggtgttgttagttctgcggcggttgtagttccggcggcgatgggacagcaatcgttgatctacagcttcgtcgctcgcggcaccgtgatcctagcggagtacaccgagttcaccggaaacttcaccagcgtggcggcgcagtgcctgcagaaactcccttgctgcaacaacaagttcacttacaactgcgatggccacaccttcaactacctggttgataacggattcacttactgtgtggttgctgttgagtctgctggacggcagattccaattgctttcctcgaacgaatcaaggaggattttaccaagaagtatgctggaggaaaagctgcaacagcggctgctcatagcctcaacagagagtttggacctaaagttgaggaggagatg

SEQ ID NO: 227888 - DNA, 490 bp, Glycine max
ggagcagggtgacttgaacgaggctctgacaagggagtatgccgaagaccgatactccagcaagggagtgaggggtactccgatgcgcaccgaactcattatcatagtcaccagaacccaaggcgtatctggtgagaaagggaagaagatcacgggacttaccatcgttggttaaaagaaggttaaggtttcccgaaaccagcgtggaactgtacgctgaaaaggtcatcattagagggacattgcgctatagcatcaggctgagtctctccgctacaggctccttggcggcctagctgtgcgcagggcttgctatggtgtcttgacgtttgctatggagagtggagctaagggatgcgagggcattgtgagtggaagattgagagcccagagagccagatctatgaaggataaggatggctacatgatatcttatgggcaacctgatccagatgacattgactctgcagcgagacatgtgcttctgaga

SEQ ID NO: 227889 - DNA, 522 bp, Glycine max
aaagttctaaaaactcacaatactcggaactgaaaatggcaacattgctaagatttattatgctactaaaaattgaacatctctttggcaacaaacattggacacatgaaaaactaagttctcagctacgatgaataagactttcagtgtttgacggaggacgcatcagggacctgaccactactggcaatcaattactggttcgggctggctgatttcacattactactccggagagagggttgcgacgcgaccacgggggggagtcttaggaccctgtctccccttaggatcccaatcaagcatgatctttaccttaatgccaagaacaccctgcctcaggagcacatgtgtcactgtggagacaatgtgatctttgaccggttgcccagaagaaatcatgtaaccatcctcaaacttcatagatttggctctatgggctctcaattttgcactcacaatgacctgcgcttcctgaacagcactgtgcataacaaacctcaagacaccataacaagccct

SEQ ID NO: 227890 - DNA, 609 bp, Glycine max
  unsure (1)..(609): unsure at all n locations
gtttaagcttcctgtgttggcttggtatccttgcaagttcttctgtagcagattccaaggtgaaggtgtcacgttaaagtttctttcatgtttgaacaggctactatccatttgggagcaactgagctgcttggattgtatttttcttcttctagaaaaaaatacagacccttaacaaccaaaacttagtggtatgaacggttggccaccttccattatccttgaaggagattgttcaaggatacaggttaccttagaggctgaaatcacagctgcgtataatttgaattccagcatttgctgcctctgaatatctctggaactttgtaagtcaacaaacatggctttacagaacattggtgctgcaaacagtgatgatgccttctacaggtataagatgcctaggatgattaccaaaattgagggcagaggtaatggcatcaaaactaatgttgtcaatatggttgacattgcaaaggcactggcaaggcctgcgtcttacacgaccaagtattttggttgtgagcttggngcccagtcgaaatttgatgagaagaccggcacttttcacgtcaatggagcacacgatactgctaagcttgctggcct

SEQ ID NO: 227891 - DNA, 644 bp, Glycine max
gtttaagcttcctgtgttggcttggtatccttgcaagttcttctgtagcagattccaaggtgaaggtgtcacgttaaagtttctttcatgtttgaacaggctactatccatttgggagcaactgagctgcttggattgtatttttcttcttctagaaaaaattacagaccctcaccacccagacttagttgtatgaacggttggccaccttccattatccttgaaggagattgttcaaggatacaggttaccttagaggctgaaatcacagctgcgtataatttgaattccagcatttgctgcctctgaatatctctggaactttgtaagtcaacaaacatggctttacagaacattggtgctgcaaacagtgatgatgccttctacaggtataagatgcctaggatgattaccaaaattgagggcagaggtaatggcatcaaaactaatgttgtcaatatggttgacattgcaaaggcactggcaaggcctgcgtcttacacgaccaagtattttggttgtgagcttggggcccagtcgaaatttgatgagaagaccggcacttctcacgtcaatggagcacacgatactgctaagcttgctggccttcttgagaacttcattaagaaatatgtccagtgtat

SEQ ID NO: 227892 - DNA, 431 bp, Glycine max
caggcttttgatgaagctattgctgaattggatacactgggagaggagtcatacaaggatagcactttgatcatgcaactccttcgtgataacctcacactttggacctctgacatgcaggacgatggagcagatgaaattaaagaagcagcaccgaaaccggatgaccagtaaaaatattttactgctaattagaattgaacttctgctccatatctttttgaagggagaaggtgtttgttgctaatatctctttggtactgggattgtaggcattcatgtctgttatgaattgtggatgtactgggccgttttagtttgtgcttccattctctcaagtgttttccaaattgcctatgatattaaggacactgaagtttttattatatggaattggaattttaaaaatgatcctggagaagtgaaccaag

SEQ ID NO: 227893 - DNA, 378 bp, Glycine max
gcactgctgataccatcaccacccttgctgctcaggttgggcttggagatacttctggtggtgacagtccgaatgatcactattgctggatgcgtccggaggacatggactatgaccgccctgtgactgaatgccacagttgttccgatctcgcggctgagatggctgctgccttggcttctgcttccattgttttcaaggacaacaaggcctattccaagaaactggtgcatggtgcgaccacgctgttcaagttttccagggatcagagaggcaggtacagtgctgggagttcagaggcttcaatattttacaattctaccagttactgggatgagtacgtttggggaggtgcttggatgtactttgctactggaa

SEQ ID NO: 227894 - DNA, 626 bp, Glycine max
  unsure (1)..(626): unsure at all n locations
ctctatggtcgattgagtggggcattgctgagcttgtgaaccacccagagatccagcaaaagttaagggatgagattgacagagttcttggagcagggcaccaagtgactgagccagacatccaaaagctcccatacctccaagcagtggtcaaggaaactcttcgtcttagaatggcaatccctctccttgtaccacacatgaacctccacgacgcaaagcttgggggctatgatatcccagctgagagcaagatcttggtgaatgcatggtggctggccaacaaccctgcacactggaagaagccagaggagttccggcctgagaggttcttcgaggaggagtcgcttgttgaagccaatggcaatgactttaggtaccttccctttggtgttggcagaagaagctgccctggaatcattcttgcattgccaattcttggcatcactttgggacgtttggtccaaaactttgagctcttgccttcccctggccagtcacagattgacactagtgagaaaggagggcaatttagcttgcacatactcaagcattccaccattgtgggcanagccaggtcattttagactccaccacatgatcatgatcatatgatcaatccccta

SEQ ID NO: 227895 - DNA, 544 bp, Glycine max
gaggaaatcactatccaattatgcatctgcatgagcgtagccttagtgtgttagcttgccgttatgttgatgaagttattattggttcaccttgggaaattacaaacgacatgatcaccactttcaatatctcagtagttgtgcatggtactgtttctgagaagtcattaaattgtgaactagatccatatgagatccctaagagcatgggaatattccgcttgctcgaaagcccaaaagatattactactgccacagttgcccaaaggataatggctaatcatgaagcttatgtgaaacgcaatgctaagaaaactaggagtgagcagagatactatgaagagaaaaaatacgtctctggagactagagtgtatataatgatcttttacattagttcggtactgctcttcaagcttgaccctgtcacagagatgccaccactatagtatgaattgaatctatacacactgtgtgaaggacattagtacagggtatgtataacataggagtggcgataactcgggaataccgatgtactttaat

SEQ ID NO: 227896 - DNA, 448 bp, Glycine max
cccactaagatggcttcctttgtatccttcctagtgctgcttcttgcagcccttatcctcatgcctcaagggcttgctacttactacaaaccaattaagaagccaccagtgtacaagcctccagtgtacaagccaccagtgtacaaaccaccggtttataagccaaaaccaccggtttacaagccgaaaccaccggtttacaagccaccatataagaagccaccatacaagaaaccaccttatggaaagtaccctccagtagaggacaacacccatgcctaaagcaagcaatgaggtctattatctacttaataaataagaggaactgctttgtgttttctagcattgtgatttacaacttcgtagcaatgcatattcttgactcttgcatgcacttcaatccttcgtagcattaatgatgtggccaagtcatcatgagcatcatact

SEQ ID NO: 227897 - DNA, 454 bp, Glycine max
gtaaaccttataagttttttatttatagtaatctgtagtacaaaagcaccattttctctcttataattttgatttacattcacaaagaaataagtatgatgctcatgatgacttggccacatcattaatgctacgaaggattgaagtgcatgcaagagtcaagaatatgcattgctacgaagttgtaaatcacaatgctagaaaacacaaagcagttcctcttatttattaagtagataatagacctcattgcttgctttaggcatgggtgttgtcctctactggagggtactttccataaggtggtttcttgtatggtggcttcttatatggtggcttgtaaaccggtggtttcggcttgtaaaccggtggttttggcttataaaccggtggtttgtacactggtggctcgtacactggaggcttgtacactggtggctttttaattggtttg

SEQ ID NO: 227898 - DNA, 632 bp, Glycine max
  unsure (1)..(632): unsure at all n locations
ctcttttctcccaatgactactcaccattctctctctttccaactcctctgagcctcgctcgttaggttctctgtctcttctcggagacccacaaaacaatttcttatttatttccttctcaaacaaagaacctctatttccccttggctgctcagatctagtattccctaagtcacaacccttttttggtcccgttagcggtgtgagacatgagtaaagaagaattcttgaagatacagaaatgtgttcttaaagtgaacatacactgtgacgggtgcaagcacaaagtgaagaaaatcttgcagaaaattgatggggtgtttaccacagagatagatgctgaacaagggaaggtgacggtttcagggaatgtggatcccaacgttctgatcaagaagcttgcaaaatctgggaaacatgcagaactctggggtgcacctaaacccaacaacaacaacaataatcataatcataataaccagaaccaccttgccgaccagcttaagaacatgcaaattaacaaccatcccanaagtggtggtggtggtggaaaccacaacaacaaaggtcagaatcagaaccaacccanaggtggtggtggtggtggaaatagccaagccaagggtgggtg

SEQ ID NO: 227899 - DNA, 605 bp, Glycine max
  unsure (1)..(605): unsure at all n locations
gtgaatatgtgagacaatggctacctgagttggcaagaatgccaactgagtggatccatcatccttgggatgcaccgcttactgttcttagagcagcaggagttgagctgggtcaaaattatccaaagccaataattgatatagatttggccagagaaagactcactgaagctatattcaagatgtgggaatctgaagcagcagcaaaagctgcaggctctgaaccaagggatgaagttgttgtagacaactctaactctcttgaaaatttggacactcgaaaagttgtcgttctgggaaaggctccatgtgctactatttcagctaatgatcaaaaggtgccagcacttcaggattccaagaatgaaccgcctacgcggaagaggccaaaacatatggtagaggaggggcagaaccaggataactctcaaaatcataacaaagatactggcatgtcaagcattgaccaagacatttgctccacagctgattcttcatcatgtaagaagcagtgtgccagtacaagctcatattcattntcagttccacagcagtgctcctcatcttctaatctgaagtggccatggcaagatcagactgacatg

SEQ ID NO: 227900 - DNA, 533 bp, Glycine max
aacgaggaaaaaaaaaatatggaaaagaaacaagattaagaattggggtttgaagaagccggtggtgtctccttgcttgttctcgatcgatcttgttattgtaaaatataataacttttttatatcgtgatcaagatgcgccgagggagagccaccgccgccgtcgtggatccgacggcggagcaggcgaaggagacgcggttccgcggcgtcaggaagcggccgtgggggcgattcgcggcggagattcgagatccgtggaagaagcagcgcgtgtggctggggacgttcgattccgccgaggatgccgcgcgggcttacgacaaggctgcccgatccttccgcgggcccaaggccaagaccaatttcccctccttccccggcccgacggaccaccactcctcgcagcagattccgccgctctaccaggcccacgggctttccaccaagttcgagcccgcccaggtgaaccggcccaccaccagcggcatgagcagcaccgtggagtccttcagcgggcctagggttccccc

SEQ ID NO: 227901 - DNA, 627 bp, Glycine max
gaggccaagttgacccttcacgggcttgtgcagcactacatcaaattgaaagaggaagaaaaaaaccggaagttgaatgatcttcttgatgcactggactttaatcaagttgtgatctttgtgaaaagtgttagcagagcagctgagctggacaaactacttgtggagtgcaactttacatctatatgcattcattctggcatgtcccaggaagaaaggttaaagcgctataaaggtttcaaggaggggcatacaaggattcttgttgcaacagatttggttggaagagggattgatattgaacgtgtcaacattgttataaactatgacatgcctgattctgctgacacatacttacacagggttggtcgagctggaagatttggcaccaaaggccttgcaatcacatttgttacctgttctactgatgttgatgttctcaacaatgttcagtcaaggtttgaggtggatataaagcaacttcctgagcagatcgatacctctacctatatgccatcgtagaattttttgggaacaatgttaagtgcttggtggcatgagtaatcgtgacgcaaaacggtgcagctgatgattaccgtgctgatagatacaaagtctgttacagac

SEQ ID NO: 227902 - DNA, 617 bp, Glycine max
aggtaagtcacatcacatgagagtgtagttggtcagtttttcacgagacaaagttctcccaaacactataacatggcttcttcagctatggaaacctgcaaatcagaggatttgcacatgcaggttgacattgagaagaacgcgaaggacataaggtctcagtgggtgcttaacgctcctgagcccccaagtccatggcgtgtggttgcagattctgtgagcaaaactatctcccactataaacataaactttcctctctcatagatcaaccctgcaccacactcctcctttcagttctgcaggtggtttttccaattcttgcttggggcagaaactacactgctactaagttcaggaaagatcttcttgcaggtctcactattgctagtctttgtattccccagagcattgggtatgccaccttggcacatcttgatcctcaatatggcctctatacaagtgtggtaccaccacttatctatgctgtaatgggaacctcgagggagatagcaattggttcagtggcaagtggtttctcttctggtatcctcaatgatggagaaaatagtagaccctgctactgatccagtggttatacaaagctgatttgcttgta

SEQ ID NO: 227903 - DNA, 590 bp, Glycine max
cttaaaagctgctgagcttcatggaaatcttactcaagcccagcgccttgaagctttggaacagttcaggaagcagcaagtggattttttggttgcaacagatgtggctgcccgtggccttgacattattggtgttcaaacagttatcaactttgcatgtccacgtgatcttaccagctatgttcatcgagtgggtcgtactgcaagagccggaagagaaggatatgctgtcacttttgtgactgacaatgaccgatcacttttaaaagccattgcaaagagggcaggttcaaagctgaaaagccgtattgttgctgagcaatctatacataagtggtctcatataattgagcaaatggaagaccaaatttctgaagtacttcatgaagagagagaagaaagagttctaagaaaagctgaaatggaggccacaaaggccgaaaacatgattgcacatagggaagagatcttttcccgccccaaaagaacctggtttgtcacagagaaggagaaaaagcttggctgcaaagcatccaaggcatccatggataagtgcaagagttctggggaagaggttattagtgctgaac

SEQ ID NO: 227904 - DNA, 570 bp, Glycine max
aaaaaacaccacgcaaacagcaagatggccacttccgacagtaacatgctactaaattatgttccagtttatgtgatgctcccactcggagttgtcaatgttgacaatgtttttgaagacccagatggccttaaagaacagctcttgcagcttcgagctgcgggtgttgacggggttatggttgatgtgtggtgggggatcatagaactgaaggggcctaagcagtatgattggagagcctacaggagtttgtttcagctggttcaagaatgtggcttgacactgcaagctattatgtcattccatcaatgtggagggaacgtaggagatatagttaacatcccaattccccagtgggtgcttgacattggagaatcaaatcatgatatcttctacaccaaccgctcaggaacccggaacaaggaatatctaactgttggtgtggacaacgagcctatattgcatggaagaacagccattgagatatacagtgactacatgaagagtttcagagaaaacatgtcagattttttagaatctggacttattatagaccatgaagttgggctt

SEQ ID NO: 227905 - DNA, 460 bp, Glycine max
gataaaatagttttttaactttgtgataggaatacacacataagaagtacacgagagtactttgtagatgtttaggcagtgctacttcatggcattattatcagcattgcagattacagtggctggatgctttatttatattggtagatattatttccagcagattatttaattactcatggcaccaaattgggaaatcaaccatcaactttcatgtctgtctctggaagccaggggaatggcagtgttggtttagttgcttccagaagaacctcaatgggaatctttggtgcagatggcttcaatggtgttatggcgtgattatacttttgagggtttgcacagtaatcctgatctgcatgcatttttagcacaaattttttgaatatattaaaatttgatttttgcagtagatcatctgatagacgaaggtatgttacttcgaacatgcttagttttg

SEQ ID NO: 227906 - DNA, 400 bp, Glycine max
ctagaagaaggtattatggccgcagcagcagcagcaaccactctctcctcttcccttggcaaaccctcctctcttactttccaaacccactctttccccataaccctacccactccccctcgcgccgacgccaaaccccctcttctcgtcttctccaaaaacccaatttccgacatcgtctcctgcaccttctcacgcgccgaagaaggcgcgtgggacgacaagaagccgcgcgaggagtgcggcgtggtcggcatatacggcgaccctgaggcctcgcgcctctgctaccttgccctccacgcgctccagcatcgcggccaagaaggcgccggaatggtcaccgtcaacaacaacgtcctccaatccatcaccggcgttggcctcgtctccgaagtct

SEQ ID NO: 227907 - DNA, 484 bp, Glycine max
  unsure (1)..(484): unsure at all n locations
tctttttnnttttttctttttttgaaattatcaaaccggacaagattaagagacagttggggaagttcttgtaggactttctcgagtcagaattagaattttacttagagaacttatattgacctataatgtaaacattattatccgtatcattaagggaaaacttcaatttaaaatgaagaacaacaccaaaaacacctgaagaactgcatttgatttttgtccactgagggatgccttatgctgcaaaaaccagatattggaatattatgaaatactagtactagttccaggaccaaccttgatttgatttcggtttgcctgaacccaaccaccatcaatagactccaagctttcattcaagccattatcaacaaagtccccaaccctctttactttaagctctcttggctccacagggtaatttccagagaaacaagcataacaaaaatttgggacttttacttcccaacaaccctcttaa

SEQ ID NO: 227908 - DNA, 617 bp, Glycine max
  unsure (1)..(617): unsure at all n locations
ggtgtttgtgaccgtggatttcaccagctctgtttggatcctccgatgttaactgaagacattccacctggcgatgagggttggttatgcccaggatgtgattgcaaagatgactgcatggaccttgttaacgactccttcggaacaagtctctctattagtgacacctgggagagagtctttcctgaagcagcatcatttgctggaaataatatggataacaactcgggagttccttctgatgattctgatgatgatgattataatcctaatggtccagatgatgtgaaagttgaaggggatgagtcaagttctgatgaatctgagtatgcttctgcttctgagaaattggagggtggttcacatgaggatcaatacttgggccttccatctgaagattctgatgatggtgattatgatcctgatgctccagatgttgaatgtaaagtcaatgaagaaagttcaagctctgatttcacttctgactccgaggatcttgctgctgcaattgaggataacacatgccctggacaggatggaggcatcagttccagcaaaaaaaagggtaaagttggtaagaagctatctctgcccgatgaactgtcatncttactaga

SEQ ID NO: 227909 - DNA, 589 bp, Glycine max
gtttctccgttttgaaattcccatctgtttggatgcactaatcctgcatccctcgaagcgcgtttgatctaaaaccataaacctctgtctcgtcagatctccttcttccgttcagtaaacctgtccttcgatccgatctgatctattttccgaatccaaaatggcgacgatgacaagcttgatcggtctcatcaataggatccaacgagcctgcaccgttttgggcgatcacggtggcgagggcttgtcgctttgggaggctcttccctccgtcgccgtcgtcggtggacagagctcagggaaatcgtcggtgctagaaagtgtggtcggaagagattttctgcctcgtggatctggtattgttacacggaggccactagtgctgcaacttcacaagacggaagatgggacacaggagtatgctgagtttcttcacataccaagaaggagattcaccgactttgctgctgtgaggaaggaaatatcggatgaaacagatcgtataactgggaagacaaagcaaatttctaatattccaattcacctcagcatttattctccaaatgttgtgaacttaaccctcatagat

SEQ ID NO: 227910 - DNA, 634 bp, Glycine max
  unsure (1)..(634): unsure at all n locations
cgcgaaaccctagctgaaccctgtttcccttctccggccaccgtaatggatttcactccgccgccgatcgaggacggtttcaccgccgagaaactcttcacgcagggcttctcctacacatacgatgacgtcatctttctcccccactacatcgacttcgctgccgacgtcgtggacctctccacgcgcctcacgcgccgccttccccttgccgtgccgtttgttgcctctccgatggacaccgtgtcggagtccgccatggcctccgccatggcctccctcggcggcatcgccgtcgtccactccaacgtccccgccgccgtccaggcggccatcctccgcaaagcgaagtcccgccgcgtccccatcctctccgaccccgccttcgccgcaccttccgccgtcgtggagcacgatgacgccttcggggccttccccttccttctcgtcaccgacactggcacctncgccgggaaactcctcggctacgtcgcgaagagtgactggacgaatcataccgacaaggggcttgaagncggcgactacatggcgccgncttccagccagtgccatggaacgccgacctaaaccaaatatgaaatattgagagtgagaaagtgggctgggctttgga

SEQ ID NO: 227911 - DNA, 566 bp, Glycine max
  unsure (1)..(566): unsure at all n locations
cgcggcgctcgtggcgatcctccgcgacggcaaggggcgggagaggaaggaggccgccaccgctctctacgcgctctgctcttttccggataaccggagaagagccgtcaattgcggcgccgtgccgattctcctccaaaacgtcgaaattggacttgaacgctgtgttgaagtaattggatttttggcaaaatgcanagaagggagagaacaaatggaatgttatgacggttgcgttcagattctggttaacgttttgaggaatggtagctcgagggggattcaatatgcactctttgcactcacttcgctttgctcttataaccaggaaatggttctggtggctctggaagaaggggttctagaagcttctcttgggtttgtggaagatgataatgagaaagtgaggaggaacgcgtgtaatttgattaaggttttgcgtttcaaccacaatcgggtgaggtgatactgatgatgatgaaaaatggaaatgtggagtgtgcctgtgaagtatcaagnttgatgggaagaaagatttgttggctctctctgttgggtgagttttt

SEQ ID NO: 227912 - DNA, 516 bp, Glycine max
  unsure (1)..(516): unsure at all n locations
aaagcaaccacttgatcggtctcttaaacttcctaacattcctgctgtcgattccgatcctaggaggcgggatatggctgagcagcagggcgaacaacaccgactgcctcaagttcctgcagtggccgctcatcatcatcggcgtcagcatcatggtcgtgtccctggcggngttcgccggcgcgtgttaccgcaacaccttcctcatgcggctctacctcgtcgtcatgttcctggtcattgccgttctgatcgggttcatcatattcgcctacgttgtcaccgacaaggggtccggtcggagggtgatgaaccgcgcttacttggagtattatcttgaggactattcggggtggttggaggagcgcgtggcgagtgatagctactgggggaagattgtttcgtgtgttagggattctaaagcatgtgggaggatggggataaccattaatgggatgcccgagactcctgatatgttctacatcagacatctgacccctattcagtctggatgct

SEQ ID NO: 227913 - DNA, 490 bp, Glycine max
ggcaatcccttgtccttgaatctgaatctgctgttttggttgaattctgggcgccatggtgtggtccctgccgaatgattcaccctataatagatgaactggcaaagcaatatgctgggaagctcaagtgttacaaactcaacacggatgagagcccttcaaccgctactcggtatggaattcgaagcatccctactgttatgatcttcaagaatggtgagaagaaagatacagttattggtgctgtgcccaagtcaacattgactgcgagcatagaaaaattcgtatgaggtggtaagtaaagaaggcctttgctggaagtaaagctgttttttccccattagcttcttttcttctaagccccatgtctcaagtttcgataatttgtttactcaaatgctcatttatgctcctgtacagttattggatgctacctaattttatgtttttagattattcgagttaccaatatactaagtgaatttgctat

SEQ ID NO: 227914 - DNA, 388 bp, Glycine max
caccaattgactcttttttttttgcaggaaatttgtgaatcaggtggtgactggttacctgccaagtgtgatattggttttatttttgtgcgcagttccacccgtgatgatattattttctgctgtggagggttctatttcccgcagtgcaaggaagaagagtgcatgttttaaagtcttgtacttcacaatctggaacgtgttttttgttaatgtatttactggttctgttatcagtcagctctcagtcttttctagcgtaacagatctgcctgcccaacttgccaaggcagtgccagcacaggctactttcttcacaacttacattttatcatctggctgggcaagtttggcagttgaagttatgcaaattttccctttactacgc

SEQ ID NO: 227915 - DNA, 281 bp, Glycine max
ggagcagatgaaattaaagaagcagcaccgaaacaggatgaccagtaaaaatattttactgctaattagaattgaacttctcctccatatctttttgaagggagaaggtgtttgttgctaatatctctttggtactgagattttaggcattcatgtttgttatgattgtggatgtactgggccgtttttagtttgtccttccattttcaagtgttttccaaattgcctattttattaaggacgctgaagtttttattatatggaattggaattttaagatt

SEQ ID NO: 227916 - DNA, 597 bp, Glycine max
atcaaatgttataattggaaagctggttctcttcagcaaaagcttaccatcaaaatatgaagattgggaggcaggtaccaaagcattgcttgacaaagagtctttgataggtggtggatcaattggtacagtctaccgaactgattttgaaggcggcatctcaattgcagtgaagaagcttgagactctgggaaggatcagaaaccaagaggaatttgagcacgaaattggtcgactaggcaaccttcaacaccctcatttagttgcttttcaaggttactattggtcatcttcaatgcagttgattctatcagagtttgtcccaaatggaaatctgtatgataatctacatgggtttggctttcctggaaccagtactagtagaggcaatagggaattatattggtctagaaggttccaaatagcagtgggaaccgcgagagcccttgcttatctgcaccatgactgtagacctgcaattcttcatctcaacattaaatgctctaacattctgctagatgacaattatgaagcccagttgtctgattatgggtttaggaaagtacttcccattttggataattatggtctgaccaa

SEQ ID NO: 227917 - DNA, 582 bp, Glycine max
  unsure (1)..(582): unsure at all n locations
ggctcgagcggctcgagtacaagtcctcctttctcacagctaggtggtggtgattagtgtacatatatatatggttgaagtgggtatttatcagatccctacgagcactttcgacccatttgcggaggcaaaagaaacagatgcttccggagcaaaagagtatgtgcatattcgcatacaacagaggaatgggaagaagagtctgaccacagtgcaagggctgaagaaagagttcagctacgagaagatcctcaaagacctcaagaaagagttctgctgcaatggcaatgttgtgcatgacaaggagcttggcaagattatccaactccagggtgatcagcgcaagaacgtttctcacttcctcattcatgctcgccttgttaggaaggaccagatcaagattcatggttttaacccactaccactagctaccacctttcttctattatgaaattaaacctatggcagcgtttatgaaataagtaaggagcttgagtttggaatattgtgtcattttctatctgtatgattgaaaatccaagaatagtctatgagagtggttatatatnatactacttcatg

SEQ ID NO: 227918 - DNA, 503 bp, Glycine max
gattgcacaattctaagtagtaatatatataaccactctcaaagactattcttggattttcaatcatacagaaagaaaatgacaaaatattccaaactcaaactccttacttatttcataaacgctgccataggtttaatttcataatagaagaaaggtggtagctagtggtagtgggttaaaaccatgaatcttgatctggtccttcctaacaaggcgagcatgaatgaggaagtgagaaacgttcttgcgctgatcaccctggagttggataatcttgccaagctccttgtcatgcacaacattgccattgcagcagaactctttcttgaggtctttgaggatcttctcgtagctgaactctttcttcagcccttgcactgaggtcagactcttcttcccattcctctgttgtatgcggatatgcacatactcttttgccccgggagcatctgtttcttttgccttcgcaaatgggtcgaaagtgctcgtaggggatctga

SEQ ID NO: 227919 - DNA, 566 bp, Glycine max
tgcaagaactacaccaactaaaaccttctttttcaacttttttttttttttggtttgtttttcttcttcttctccttcttccaatccttaaggaaaaaagaaactaaagaaaaaaagtgagccatgtcaggcttgtataatcccaacttctctcctgctagagctgcttctcctcagattaggagcaatccagaagtggacagccagtacctatcagagttgctggcagaacatcagaagcttggacccttcatgcaagtgcttcccatatgcagccgcctcctaaatcaagaaatattaagagtttctggaatgttgtccaatcaaggttttggtgactttgatagactgcgacatagaagccctagtcctatggcttcttcaaaccttatgtccaatgtaagtgggacagggttgggtggatggaatagtcttcagcaagagagattatgtggagcccctggaatgacaatggactggcaaagtgcacctgcaagtcctagttcgttcactgttaagagaatcttgcgcttggaaattccagtagatacatatcccaatttcaa

SEQ ID NO: 227920 - DNA, 591 bp, Glycine max
aaggcctcaccgggttgatgaggacaacaatctctaagaacatgttccacagttatcaagtggggagtcaaaaggaggagattaatattctgcaatatgcagatgatacactgttttttggatctgcaactacggataatattagagtcctgaaatctatcctcagaatctttgagatggtgtccggtctcaagattaattatgccaaaagtcaatttgggtgcatggggaaatcagaggcttggtgtagggaggcagccctttttctcaactgtggtcagctggatatccccttttcctaccttggaatcccagtggggacaacatctaaaagctggaatactatctgccttcccaagaacaaatgggagcttgggattaaagacttgtccaagtttaatgaggccttgcttggtaaatggggttgggacttggcaaataaccaggatcagctttgggctagaatattaatgtccaaatatggaggatggaatgcattatgctatggcagaaacagagctgacttttccccttggtggaaggatttaagatatgttttccaacagcatcatagaaatggcatcttcaata

SEQ ID NO: 227921 - DNA, 602 bp, Glycine max
gatcccgagaaacagatattggaaccggcgataaaaggaacggttaatgtgttgaaggcggcgaaggaagcaggggtggagcgcgtggtggcgacttcatcgatttcgtcgattatgccaagtcctaattggccagctgataagattaaaggaagaagagtgtttggacgggaccttgaatactgcaagcaaaaggggttgtattatcccattgcaaagactctagcagagaaagcgggttgggactttgcgaaggagacaggttttgatgttgtcatgataaaccctggtacagcattgggccctctgcttcctccaagaatcaattcaagcatggctgtgcttgttagtgttctcaaagggggcaaagagacctacgaggacttctttatgggaacggctcacttcaaagacatagcattggcacatattttggcacttgagaacaagaaagcagcaggaaggcacttgtgtgtggaatctattcgtcactttagtgatcttgtggacaaggttgctgagttatacccttgatacgatgtggctaaattgccaaaggatacccaaccaggggttgtgagagcaagtggaaaggatgcatc

SEQ ID NO: 227922 - DNA, 610 bp, Glycine max
  unsure (1)..(610): unsure at all n locations
gaccaaccttacagcaatgagtcctttggttcaagtgcagaacatattcaaaaattgaacctagttagttaagttagtcttttttctcaagattgaagtcaagagagacttgtttattagtatttcttggccaaaacacagaaaagtagaaattgtggaatttagagtttgtggctgtgagcttcagagtataagtgtggtagcaaggttaacatttccttgactatcatttcttttccttctttctctcccactaaagatgtgaaatgtacaatgaatataggttttgatatggaacatgtagaatataaagtataaacagttttaataaaaacctatattcattgtacgtctccactcaagttaaaggaacaatgggctacttggatccagattattatactagtcagaagttgactgaaaagagtgatgtctatagttttggagtgctaatactggagctgattactgcaagaaagccaatagaacgagggaaatacattgtgaaagtggtcaggagtacaatagataagacataagacttgtatggtcttcacanaattattgacccggccatctgntcaggatcaacacttgagggttttgagaa

SEQ ID NO: 227923 - DNA, 487 bp, Glycine max
  unsure (1)..(487): unsure at all n locations
tgcaagccctgctgtccataatatgatgcaattactcattagatcagaaaatgatggtattctgtgtcccattccacagtaccctctgtactcagcctcaattgccctccatggtggctgcctggtaccttattatctagatgaagcaactggctgggggttggaaatacctgaactcaagaagcaattggaagctgccaagtctaaggcatcaatgatagggctttagtcgtaataaatcctggcaatccaacggggcaggttcttggtgaggcaaatcaccgagatatagtagagttttgcaagcaagaaggtttggttcttttagctgatgaggtatatcaagaaaatgtttatgttcctgagaagaaatttcactctttcaagaaggtgtctcggtccatgggatatggtgagaatgatatcaccttagtatcttttcaatcagtctccaaaggctatcancgggagtgtgggaaacgaggag

SEQ ID NO: 227924 - DNA, 362 bp, Glycine max
gctaatcgaacagcatgttgattagctatgttcaggcaaaaaaacaaacaaatgaaggaaatccagcgtttcgggtaaaactgtaaggttcgaaaagggaataggatataaagggattgatgatcttcctctctatgactaagtcagttggaatgggctatgacttgatatattatagggcctgaagaatgttgccagaggcaagggcctggttgattatctctttcaagcttcacaggagactgccactcactgtgcaaggatgagctctcttgagtaccttactactggactaaagcagtctgagttgcatgtcaacatgggtgggctctacattgtgcctgcttttatggacaagcttg

SEQ ID NO: 227925 - DNA, 584 bp, Glycine max
gtcacaataactgggcccataatttttgagaccatgcgtatgatcattgttacggccttggcctgcatcatcttatctgaacaactcttccttggaagtattattggagcaatagttgtggttcttgggctttatctagttgcgtggggaaaagctaaagaacgtagaggtctgatgacaccgtcctctgcagaaaataactttccagaagaccaacgacagctaccggtcacagctccaaggaatgatagcattaacaataataataaggcttaattagtccatcgccatgatgaaaaaagtgatgtggaaggcacagtatatcaagaagagaaagtcagctgaatgtaagtctaggcctctgctatgtttaattagacattgttgtagcattccatacaaatgatctaaggtcaatgtcatgcacattactaataccatgaaattggtgggataagtggcatgacgattgatgaaattcatcatatatataattaattagtggtcactttgagctgcatcattgttctggatttgaatgaacaaatgtgcttccgagtcatcatatagtaattcactcagtt

SEQ ID NO: 227926 - DNA, 584 bp, Glycine max
  unsure (1)..(584): unsure at all n locations
aataaggcgaatgaatctggtggcctggtggggagtggggactccgcgatcctcgacagtacaatttcaccgagttcccatcagcagtgcgaaggggagtcccatggctgaccccaagcgagtagttgtctgcggcggcggagtcatcggagtctccaccgcctactttctggcggagaagggcgccgacgtcacgctcatcgagaagtccgacgtggcatgcgccgcgtccggaaaagccggtggattcctcgccctcgattggtgcgacggaggaccgctggaagagctagctcgcacgagcttcaatctccaccgttcgctctccgaagaactggacggtccgcgatcgtacggttacagagccctcaccactctcagcctcaccgttgccgaatccgaaggctcctcttctgccacatcaacgttgccgtcttgggttaacggagcagctcgcagttgtaaaacgattggaacaccagaaacgacggcgcaggtgcacccgcggctcttcactcgcgcgctgattgatagagcggtggagaagcatggngtgaangtggagatggccaaactggaacggg

SEQ ID NO: 227927 - DNA, 564 bp, Glycine max
  unsure (1)..(564): unsure at all n locations
gacaaagtttttctgagaaaataaggattattattatcgagagaatggcaggctcctcggaggagggacaagtcattagctgtcacaccgttgacgcatggaacgatcaactccagaagggcaaccaatccaagaaactcattgttgtggattttactgcttcttggtgtggaccatgccgtttcattgcaccattcttggctgagctggctaagaagttcacaagtgtcgtattcctaaaggtggatgtggacgaattaaagagtgtttctcaagactgggctattgaggctatgcccacttttgtgtttgtgaaagagggaacacttctaagcaaagtggtgggagcaaagaaggatgagctgcagcagacaatagagaaatatgtggcttcagctagtgcttaatctttcaccttcaaaagagacataatatatatgctttctttttataatcttgtactagacttatgttggtatttctgttattgcaccaatcagcttttcaaatgtgatgactcttatcatctatntctgaatagtaactggtcctttcttgcgtctt

SEQ ID NO: 227928 - DNA, 564 bp, Glycine max
  unsure (1)..(564): unsure at all n locations
caacaatgtcttgaactcacaatacctcaaggcagcacaggagttgcttgatgaaatagtaaatgtccgaaaggctttgaagcaaactggtttggaaaagcaacagagtttccgtgatattggtttagatggctccaaagattcagatggaaaatctaccagccaatccgtgcagatatcttcaggccccaatggttctgctgcaaactcttcatgtgagctatcacctgcagaacggcagaatttgttggacaagaagacaaagcttttgtcaatgctggatgaggtggataaaagatacagacagtactgccaccaaatgcagattgtggtgtcatcttttgatatggttgctggatgtggagcagctgaaccatacactgcacttgccttgcgcacaatatcgcgccactttcggtgtttgcgcgatgccattagcggccaaattcaagtgactcaaaggaacctcggagaacaagagggaatacctcgtctccgctatgttgatcagcagcttcggcatcaaaagcccttcagcaactngggtgtatgagacaagcttgg

SEQ ID NO: 227929 - DNA, 534 bp, Glycine max
  unsure (1)..(534): unsure at all n locations
ctctccttggatggactggtttcatggagggttgcagtttcaggtggagcaccatctgtttccaaggctgccacggtgccatttgaggaagattgcgcctttggttaaggatctttgcaagaaacataatcttccttataattgtgtgtcgttctggaaggccaatgtgctgacgattcagaccttgaggaatgctgctttgcaggccagagacggttccaatccggttccaaagaatttggtttgggaggctgttaacactcatggatgaatgggggacctgagtggagtttcgtgtgattttgctgtcattgatagtttgatggaggtgtggtggtacttggtaggtagggacgaaattttatgtagttacataggtgcttttggtggtgttctcctatcagaattggagttttatatcattattaccttggattaccaaggtaaaacttcaaatcctgttggaggaaaagaccaaacgcatctaagaaactgcataagttntgtccggtaggtaatccttggtgagaataa

SEQ ID NO: 227930 - DNA, 563 bp, Glycine max
  unsure (1)..(563): unsure at all n locations
ggcgtcgtagggctttccaattgtgtgctctgccaatgataattggtgcttctatgagtgcggcaacaaacaacttgtttggcatgcttgtaggaaggttgtttgttgggactggcttgggcctgggccctcctgttgcctctctgtatgtgacagaggtttctcctgcttttgtgcggggcacctttggagctttcatccagattgccacatgccttggtctaatgggagctttatttattggaatccctgtcaaagaaatatctggatggtggcgggtttgtttttgggtatctaccattccagctgctatacttgccacagctatggtcttctgcgcagagagtccacattggttatacaagcaaggaagaactgctgaagcagaagctgagtttgagaggcttcttggtgtatcagaagcaaaatttgcaatgtcagagttatccaaggcagatagaggagacgatagtgatagtgtgaagctgtcngaattgcttcatggtcgtcattctaaagttgttgttatggatcaaccctatttgctttacaacagctatctg

SEQ ID NO: 227931 - DNA, 554 bp, Glycine max
ttcgtgttgtagctagctcctcgaaaatgctggcacgcctcgccgcgagtcgcttcaacgagatccgtcagattttccgtcagccttctagggctttctcaaccgctctgaactaccaccttgacacaccggacaacaaccctaaacttccatgggaattcaccgaggccaatcaagcaaaggttaaggagattttgtctcactatccatccaactataagcaatctgctacaattcctcttttagatcttgcccagcagcagcatggaggttggctacctgtttctgcaatggatgcggtagctaagattgtagaggttcctcccatacgggtgtatgaggttgccacattttactccatgttcaatcgagctaaggttgggaagtaccatctgttggtttgtggaacaacaccttgtatgataagaggttcacgaggaattgaagaagccttattgaaacacttgggagtgaagcgcaatgaagtaacaccagatggtttgttttctgttggagaaatggaatgcatgggatgctgtgtgaatgctcctatg

SEQ ID NO: 227932 - DNA, 447 bp, Glycine max
aaaagaacatgccaagaaatttatggggattatggaacaaatttttgaaatggaaaccatccaggacgggtgatacaaaaattggttgagcatttaacaatctgacaatgtttcaattaagggaagctccaacacatgcaagccttacatttttgaagggaaaaagtttttcacacttcagcaggaatccaggtcacgggaggggggaggcttgggctcacttaacaaaggagggttccctccttcagggccactcttaattcgggggggattttgggtgccgggcgggggcttctcaccctttctcagcttttctactatctcaactactttctttgggggtacatcttcaaaggaattataagtatatccctctgatccatttgaataatcagccactggaatcataggagcattcacacaggatcccatgcattccattttttc

SEQ ID NO: 227933 - DNA, 544 bp, Glycine max
tttgaggccaggcaagccccactcaaccaccacacctctcctcgttcacgctacccctttctgctcttcttctacctttcaagttttaaaagtataaagatggcagagacattcctatttacctcagagtcggtgaacgagggacaccctgacaagctctgcgaccaaatctccgatgctgtcctcgacgcttgcctcgagcaggacccagacagcaaagttgcctgcgaaacatgcaccaaaaccaacttggtcatggtcttcggagaaatcacgaccaaggccaacgttgactacgagaagatagtgcgtgacacctgcaggaacatcggcttcgtctcaaatgatgtgggactggatgccgacaactgcaaggtcctcgtcaacattgagcagcagagccctgatattgctcagggtgtacacggccaccttaccaaaaaacctgaagaaattggtgctggtgaccagcgtcacatgtttggctatgccactgatgaaacccctgaattgatgccattgagccatgttcttgcaacaaaac

SEQ ID NO: 227934 - DNA, 578 bp, Glycine max
aacttgaacatattcttttttttattgatattaagagacacattggtagggcatacatacaaacagagagtacatgtttttagttgatcacgtaaaaaattacaaaagaacatacaaataacaaaataggaggaagaggagagaaacacacagagtaagagacgtggaaagttatggatattagacatattataagggcaacgctcaaaaaacttccagcatagagcagtggaatgaattacttaggccttctcccacttgaggggtttgaccacttcccatgtgaagtcagggtcttctcttccaaagtgtccataggcagcagtcttcaaaaacctgttatttccacccctcttgagatcaaggttgatggagatcataccaggcctgaaatcaaagttttccttcacaatgttgagaatctccttatcatggatcttcccagtgccataggtgtcaacaaacacagacaaaggctcaggcacaccaatggcataagacacttgcacaatgcaccttctggcaagtccacttgccacaatgctcttagcagcctgtttcacaatgtaagcaccact

SEQ ID NO: 227935 - DNA, 407 bp, Glycine max
attcctcttaagcttgctactgagtttccacactgcataccttaggtcttccgaattcgaagttaatttgcaagatggctaaggaaaaggctcagatcaacattgtggtggttggtcatgtggaccctgaggaggcaaccaccattaacgagctgaagaagcctgttgtggagaaagaagctccagggcatgccatatgagggcatgcacgtacggcctcggaggggaaccagaaaattatgttaacaaaataatctggaaccctaatgtatcagtgtcatcatcagtgtgtagtttaagctagctttgctatggttacgttctttgagatgagagtcttgatgaacagtaccattctgatgtattgctttccttgaaagttaatgcatgcttcttatcttctgtct

SEQ ID NO: 227936 - DNA, 407 bp, Glycine max
agacagaagatttgaagcatgttttaactttcaaggaaagcaatacatcagaatggtactgttcatcaagactctcatctcaaagaacgtaaccatagcaaagctagcttaaactacacactgatgatgacactgatacattagggttccagattattttgttaacataattttctggttcccctccgaggccgtacgtgcatgccctcatatggcatgccctggagcttctttctccacaacaggcttcttcagctcgttaatggtggttgcctcctcagggtccacatgaccaaccaccacaatgttgatctgagccttttccttagccatcttgcaaattaacttcgaattcggaagacctaaggtatgcagtgtggaaactcagtagcaagcttaagaggaat

SEQ ID NO: 227937 - DNA, 534 bp, Glycine max
  unsure (1)..(534): unsure at all n locations
atcttcttcttttgttgtttgtgtgtttgttttttctctcacctgaaaatgtcttgctgcggtggtaactgtggttgcggaagcgcctgcaagtgcggcaacggctgcggaggctgcaagatgtacccagacttgagctacaccgagtcaaccaccaccgagaccttggtcatgggagtggcaccagttaaggctcaattcgagagtgctgaaatgggtgttcccgctgagaacgatggctgcaaatgtggagctaactgcacctgcaacccctgcacttgcaagtgaggtgttggagagctaaagcttcaagcagaaatggcccttagaaataatgataaaaactatatgtagtttcaaaacttcaaaattatgtagtatgtattatgttgcactctggtgttttgtgtctaaacaaacacccttagaataaagtggtcatttcttgcccttgagcaagttcaagtgttttggacttgtgatgggtgtgttaaggtcatggntgcctttttttatatatatatatatatataa

SEQ ID NO: 227938 - DNA, 500 bp, Glycine max
  unsure (1)..(500): unsure at all n locations
atagnactagtttaatattgtaagcagagattcataattcagattaactagccgaactttatacagaagcgaccaattaccaaacatttatatatatatatatatataaaaaaaggcaaccatgaccttaacacacccatcacaagtccaaaacacttgaacttgctcaagggcaagaaatgaccactttattctaagggtgtttgtttagacacaaaacaccagagtgcaacataatacatactacataattttgaagttttgaaactacatatagtttttatcattatttctaagggccatttctgcttgaagctttagctctccaacacctcacttgcaagtgcaggggttgcaggtgcagttagctccacatttgcagccatcgttctcagcgggaacacccatttcagcactctcgaattgagccttaactggtgccactcccatgaccaaggtctcggtggtggttgactcggtgtagctcaagtctgggtaca

SEQ ID NO: 227939 - DNA, 502 bp, Glycine max
gtgtgggtaaacggtcgaagcattggtcgccattggcctggatatatagcacatggtagttgcaatgcttgtaattatgctggatattatactgatacaaaatgccggacgaattgtggacaaccttctcagagatggtatcatgttcctcgctcatggctgagctcaggtggtaactccttggttgtgtttgaagaatggggaggtgaccctaatggaattgctttggtgaaaagaacatgaagtgtgatattttatgatgctctcttaaaaggcattgacaggcaatatatatcttgtaacaaatgtctaggaaatgcaaagaagctgtcaagtgagtcctatgcggttaggaccctatgatgcagcaatttaccaaatacgtgtggtttagatcatattaggttcagtatataaaaaatatttgaagttcataattggtgctccttgtcttctggttgttcaagtatacctcaaaagattgccaaagcctaatcatgca

SEQ ID NO: 227940 - DNA, 472 bp, Glycine max
caaaggaatatttattactttcaatctgtgcttacataataattataatgggaaaacacaattatttctggcagaatatagcaaatatactctccgacacattttgcgtgtctacaattctttccattgtatcatagtaaattaaataaatgtgtaagggctcaatcttcattgatacaagccctgtaatacatggggcaatattcagcacaatagcctgacttgactatgtacagtatacacagtctttgcgcatccaaattctcttatataaatctttgtttttggccaggcaatgcatgattaggccttggcaatcttttgaggtatacttgaacaaccagaagacaaggagcaccaattatgaacttcaaatattttttatatactgaacctaatatgatctaaaccacacgtatttggtaaattgctgcatcatagggtcctaaccgcataggactcacttgacagc

SEQ ID NO: 227941 - DNA, 604 bp, Glycine max
  unsure (1)..(604): unsure at all n locations
acccttcaatattaatattccgtgcaaaaaccaccaacaacaacatcaccaccaacaagaagaacaagattggcgttatgggtctcttcctttctaggaatttggcttgcaaattcatatacccttttcttttctccaagaaggtttccaaggatttgtttcccaagcagttggagaacatgatgtctctgatctctcctcgtactggcaggcatttgcagcgctatgacaatggctgtcgccaagttgtgggatgcattccttatagatacaagaacaatggtacacaggataaggaattggaggttcttgtgattagtgctcagaagggtcatggaatgcagttcccaaagggtggttgggaaactgatgaatccatggaacaagctgctttaagggagaccatagaagaagctggagttgttggcagtgttgaaagtaaactgggaaaatggtattacaagagcaaacgccaacccataatgcatgagggatacatgttccctntgcttgttaagaaggaattggataactggccagaaatgaacacangaaaacgaagatggatgactgttgatgaggcanaagtaatatgcccttatgc

SEQ ID NO: 227942 - DNA, 526 bp, Glycine max
ggactttccggcaacagagataagttcaaatgatggcgtctcactcctgcagtatatcaattgaaccaggggtccagtgggaacaatactagctacagttacagttcctgattataagcctgctcccgtggtgggtttcttttcatcaagagggccttcaacgctttcaagcaatattctcaagcctgatattgccgcaccgtgagcgaacattctcgctgcatggataggagatgacacatcataggttccaaaaggaagaaagccctgactatacaacataatctgaggaacttccatggctgctgcacatgtcgcatggcatgggtacatcgagaaaagacgatatctctgatgtagatggctgatgaatctgattgacaagtcatgacttctgcaattcaaaatgacaacttgaaggctcccatatcaactgattcaaggtcgatagccacaccctattgactattgagcatgggaaagttcacatctaaaccattggaaccagggctagtttatgaaacta

SEQ ID NO: 227943 - DNA, 614 bp, Glycine max
  unsure (1)..(614): unsure at all n locations
cgcgccgaagctggaggaagtgtacgccgaaatcttccgtgttctgaaaccgggggcgctctatgtttcctacgagtgggtgacgacggataagtaccgaggcgatgaccctgaacacgtggaggtcattcaggggattgagaggggggacgcgttgcctggccttagaaactacaccgacatagccgagacggcgcgtaaggtagggtttgctgttgtgaaggagcgggatctggctaagccgccggctcagccatggtggagccgattgaagatgggtaggatcgcctactggcggaaccatattgtggtcactgttctcgccgctttgggaatcgcgcccaaggggaccgtcgagttcatgagatgctcttcaagaccgctgactatttgaccagagggggtgactctggcattttctcgccgatgcacatgatcctctgcagaaagccccatgacaaggacgaccataactgagcgtttcattgggaaattccaaaactataacaaccaccaccttgtttctttccggtactctcttttttttntttcataattattattatctggggtttaacttattggtattagttattattattactatgaacttg

SEQ ID NO: 227944 - DNA, 518 bp, Glycine max
agcaattataaaaattttattgaaaagatcaaaatccaaattacaccaagttcatagtaataataataactaataacaataagttaaacccaagataataataattatgaaaaaaaaaaaagagagtaccggaaagaaacaaggtggtggttgttatagttttggaatttcccaatgaaacgctcagttatggtcgtccttgtcatggggctttctgcagaggatcatgtgcatcggcgagaaaatgccagagtcaccccctctggtcaaatagtcagcggtcttgaagagcatctcatgaacatcgacggtccccttgggcgcgattcccaaagcggcgagaacagtgaccacaatatggttccgccagtaggcgatcctacccatcttcaatcggctccaccatgggtgagccggcggcttagccagatcccgctccttcacaacagcaaaccctaccttacgcgccgtctcggctatgtcggtgtaggttctaaggccaggcaacgcgttccccc

SEQ ID NO: 227945 - DNA, 191 bp, Glycine max
gaaaaaggagagtgagttagtgagttgagaggcagaagaaaagaagaagaaaggtggagtgagtgagtgaatagaaaaaaaaaacccaccatggggaggcctccttgctgtgacaaagttggcatcaagaaaggtccatggacacctgaggaggatattatccttgtctcttacatccaagaacatggccc

SEQ ID NO: 227946 - DNA, 564 bp, Glycine max
gctaagcgaagatggtgtttgtcagggactcctatccagaatgcaattgatgatctctacagttacttcagatttctaagatatgacccttattctgaccatgcatcattttgtactagaattaagaacccaattagcagaaatccagcaaacgggtatagaaagttgcaagctgtcttgaagacaataatgttacgccgaacgaaaggtacacttcttgacggggaacctattatttccttgccgcctaagtatatagagctgaaaaaagttgatttttcaatggaggaacgtgatttctattccaaactagaggctgattcacgtgcacagtttcaggaatatgctgatgctggaactgtcaagcaaaattatgtcaacattttgctgatgcttctgcgccttagacaagcttgtgatcaccctctgcttgtcaagcgatacaattcaaactctctatggagatcttcggttgagatggcaaagaagcttcctcatgaaaaacaaatctctcttctgaaatgtttagaggtttcccttgccctctgtagcatttgtaatgat

SEQ ID NO: 227947 - DNA, 422 bp, Glycine max
aaacccaaccccaatccggtttggcgcgcccaaaagaaaggggggcggggtgccttcccttcccttaaaaaaaaagaagggcccccccggttagaaataaaaaagcaaggagcccccccccgccgcgggggttgggaaccggttcccgggaggggaggcatggaaaacggacgggcccatggcctggccctttggcaagggaagggtccttccatttcaaggcccggccgaaccccaatcctaagttcccggggcggggatgggaaagcattttttttgtgttggggaaaccaaaatcaatggccggggcggtacatcaccacgacgggaaaaggaaaaccctggcccaacccaaattaattggggtggaggccctcctccttttgtggggtgggagaaaaaagaaaagggccggaccgatt

SEQ ID NO: 227948 - DNA, 595 bp, Glycine max
tgatcactgggacatcctaagctgactgtgctgttcttatcattgattccactactggtggttttgaagctggaatttcaaaggatggacagactcgtgaacatgctctgctttcattcacccttggtgtgaaacagatgatttgttgctgtaacaagatggatgctactacaccaaagtactccaaggccaggtatgatgaaattgtgaaggaagtttcttcctatttgaagaaagtaggatacaaccctgacaagattccttttgttcctatatctggttttgagggagacaacatgattgagaggtccacaaaccttgactggtacaagggtcctactctgctagatgcacttgaccagatctctgagcccaagaggccttctgacaagcccctcaggctaccccttcaggatgtgtacaagattggaggaattggaactgtgcctgtgggaccggttgagactggtgtcttgaagccctgaatggtggtgacttttgcaccaactggactgacaaccgaagttaagtctgtggaaatgcaccatgaagctctcacagaggctctttcccgtgataatgtgggattcaatgt

SEQ ID NO: 227949 - DNA, 518 bp, Glycine max
gaacacaaattataagttgttatttaaaaagcaaaccaacaacgcaacggcaaagccctaaaactcgctgcgcttaacaaaaatgtaatcaggggttctcacaaacacaacacattaaaacagaatgataaaaggagtcttgccaccgtcgatcaagaacccaattctgggaacaaaagttgcgagatgatggtggagacttcaaactatgtccgaaaaacaagctacctagaaacgaagacacaagggcaagaaaccaacatttattgtaaccataagaaacgacatcccctgatgaaccaaaccgcacgattcacttcttcttctgggcagccttggtgaccttggctccagtaggatccttcttctccacgttcttgatgactcccacagcaacagtttgacgcatatccctgacagcaaagcgaccaagtggggggtactcagagaaagtttcaaccaccatgggtttggtcggaatcatcttaacaaaaccagcatcaccattcttcaaaaac

SEQ ID NO: 227950 - DNA, 513 bp, Glycine max
ggagaaggccgaggaagacagatccaaggtcgatgatctccgaggctctcccatgagcgtcggaaacctcgaagagctcatcgacgagaatcacgctattgtctcctcctccgttgggcctgagtactatgtcggaatcctgtctttcgttgataaggatcagttggagcctggttgtgctattttgatgcataataaggttctttctgttgttgggcttcttcaagatgaagttgatccaatggtctctgtcatgaaggttgagaaggctcctctggaatcttatgctgacattggtggtttagatgcccaaatacaggaaattaaagaagcagttgagctacccctgacgcatcctgaactatatgaagacattggtatcaagcctcctaaggggtcattttatatggagaacctggaactgggaagacattgcttgcgaaggctgtggcaaactcaacatcagcaacattcttgcgtgttggtggtagtgaactgatacaaagtacttgg

SEQ ID NO: 227951 - DNA, 562 bp, Glycine max
gaaattgaaagtatactatttttaattaaaatcgttgttgagattcaaagcccctaaaatacaactgacatttgttcgcagaatacaaatgaattggcatttgttcgcataactagaacgttaaaagaaagacaagagggccagagataatagaggatagtttttcacatatacagcccttcaggcaccccttctttcttcttaaacatcactttatccttggccttcttaaagtcggcatgagtcaccttcattcgacgttctcgtagagcaagtaaaccagcttcagtacatattgcctttatatcagctccggagaattcgtctttagtcataacaaattcttccaagttgacatcatcagctaatgtcatccttgacgtgtgtatctggaagatgcgtctccttgttttgatatcaggaagaggaaattctatcttcctgtcaattcgaccaggtcgtagcaaagctggatcaagactttcaattctgttggttgccagaatcactttcacatctcctcttgaatcaaaaccatctaactggttcagcaactctagca

SEQ ID NO: 227952 - DNA, 558 bp, Glycine max
  unsure (1)..(558): unsure at all n locations
gtttgaatttacttggtgtgaagggtgcaagcaaggagtcaccaggatcaaactcaagactcttggccaccattgttgctggatctgttttagcaggagagctgtctctgatgtctgccattgcagcagggcagctagtgaacagccatatgaaatacaacagatcaagcaaagatgtaaccaaaatatcataatcttgaggtcaaggacgtggttgcagtcattaattgtggactccagaataaataaaaaattgagggtaagcgaaatttgggaaggaaaatggagaaacattagattagattgttgtcatccacgtttggctttgcattgctgtctgtgtagatctttaattatttggagagaggaaagaagagttctactccacatgttccctgtgcccttctggatccttgctttctttgctgtatacttttcgttgcttgttctgccgagccattgagtgggtgttaacgctcttttttctcctcaccaagacattngacgtgttgtattgaaattcttttcccctatataatatggctagcatatctatca

SEQ ID NO: 227953 - DNA, 608 bp, Glycine max
tccacgtattcgtttccttcgtactccgtgtttacgtcgttcgtgtctggaaagtggggaaaaaagataacaccacaatttcaaagccccattgcttttccttctcctctaatccaatcgccacacacacttgcgagatctaattgttccagagaaccaacaatcaggggatggcggacgatgacaaagcggttggggaaggtgagatgaaagagacgacgggtggtaccagtccttctgggagtggaaagaagaagaacaaaggtttcttgttgcgtatttggaacgggatatttaggttacacggcgatgattttgagaagagactccagtacatttctaaagaggaagctcaagtcatgactagaatgaacaggagatcccgatcctggaggagaatttcccgcaatcttattgtattttctgtcatatttgaggtcgttgctgtagtttatgctattatgacaactagatcaatcgatctgaattggaaaatgagggcaatccgggtttcaccaatgtttcttttgcctgcactagcagctgctgcctatacaacatttgtcagcttcaccaaggatgtggatcgcagggataagaaaattctt

SEQ ID NO: 227954 - DNA, 549 bp, Glycine max
tgaggcaggcaaagtcattcaacatcctaatccgcctcatgaaaaccacccaattgatcaaccaactcaatgcacagctcctcactactaaatcaggcggcattaccattcttgcacccgatgacagttccttctcagaactcaaagcaggcttcctcaactctctttctgatggacagaagctcgagctcttacagttccatgttctttcagactacgtgtctagctccaattttgatactctgacgaatccagtgagaacacttgcaggggctaagccaggaaaggtggaactgaatgtgataagttatggtggggagtgtgaacatctcaacaggtgaggttaacaccaccatcactggcattgtatatactgataagcatcttgctatatataaagtggggaaggtgcttcttcctatggatttctttgctgtggccaaggcaccagcaaaggcaccttctctggcaccagaaccttcagcaaaggctcctaaagctgatagggatccattatccccagatacctcagaatcttctcaaactaat

SEQ ID NO: 227955 - DNA, 619 bp, Glycine max
attgatgacgactacgcagaccccagagtcaaacttgaggttgaccgtctcgtggaggatgagatgcgtcgcagcaccaagaagcccaccgatttcctcaaagatttccctcctcttcccaactccaatttccagcagaactacccaatgattgcgagagagtacgaacgtgtgagagccggaagacctcccgttgctcttgatagatcgcgctacgaattggaaatgccgccggcgaataaaaggaacgacgaaactgcttggaagcaagctcttcatagagctcaacacctgctgcaatatcagattatgaggatggaaaatttggatttgatgttaaaatatggtcccgatacctggaaacaacacaaccaaagattggaagtatacttatcaagaatgcagaaattagctcaggaacaaaatgaaaagattgaaaaagtaaaccgtgaaaggaaatatcatcagcaaaacactgcatatgagcttaatgcgttgtccatgcaatggaaggagctttgtcagaagaatatagacatcagtgctgcctgtgcttcagttggaaatcgcataaatgaattgaaagaggagcagcagaaagaggctggaactgggagct

SEQ ID NO: 227956 - DNA, 595 bp, Glycine max
  unsure (1)..(595): unsure at all n locations
gtgttcttctgttctctctgtttcttcagattttctccctcctcagcgcctgtgaagtttgattgcttcattctttgaagtgaatttgacaattaagtaaattggttgagaagggttcattcctcttcattggaagaataaaacaaatattgcaggtggattttttctgatggcaactaatgaaaatcttccaccaaatgtaataaagcaactagccaaggaattaaaaaatattgatgaatcacctcctgaggggattaaagttgtggtaaatgatgatgatttttcaataatatatgctgacattgaaggcccagctggaactccttatgataatggagttttccgcatgaagttgttattgtctcgtgatttccctcactctcctcctaaagggtttttccttacaaagattttccatccaaatattgcaaccaatggagagatttgtgtcaacacacttaaaaaggattggaaccctaaccttgggttgcgtcatgttctcattgntgttaggtgtctactaattgagccatttccagaatcagctctaaatgaaccaggctggaaactgctgcttgaaaatatgaggagt

SEQ ID NO: 227957 - DNA, 489 bp, Glycine max
gagaatccgaggcgaagagaagagaaaaattaagatggaggggaaggagcaggatgtgtcgctgggagcgaacaagttcccggagagacagccgattgggacggcggcgcagagccaagacgacggcaaggactaccaggagccggcgccggcgccactggttgacccgactgagtttacgtcatggtccttttacagagcacggatagcagagtttgtggccacttttctgtttctatacatcactgtcttaaccgtcatgggagtcgccggggctaagtctaagtgcagtaccgttgggattcaaggaatcgcttgggccttcggtggcatgatcttcgccctcgttgactgcaccgctggcatctcagggggacacataaacccggcggtgacatatgcgctgtttttggcgaggaagttgtcgttgcccatggcgattttctacattgtaatgcaatgcttgggtgctatttgtggcgctggcgt

SEQ ID NO: 227958 - DNA, 508 bp, Glycine max
gcatataagtctcgggggtaatttttgattttgcaaattagacaatcacagccgtacatcacacgtgagctgggcctcttccaacttaaaagcagaggataacattggcccatgacgcaacacatgcaccacctaataatcataattttacatgtttacatacaaaatacaaagactttaaattaaaattaaaaaaaaaaagataaacagatcatcttgatgaaatgaaaccgaaacccagaaacattggtttgattttttttggtgttcccaacttgattaagcatgaacggcttgattgaatcacttggacttgaagggaatggccctgattacgacctggtggtagagtgctgcaagtgcagcaccaatgaaaggtcccacccagaagatccagtgatcatcccaaccaaggtccttgttgaagatgataggggcaccaagactacgagcatggttgataccaacgccggtgatagggatggttgccaagagaaccaagaacacc

SEQ ID NO: 227959 - DNA, 466 bp, Glycine max
tgcaaattgttttgtttttgtttttgccatcaccattctccgttaacctaaagccaccttcgtcgatcggtgaaagagcaattgatgttcgattgaaatcaaaaatgagtttcgtgccaaaggagacaatcgaagtcatcgcacagagcatcggcatcaccaacttgtgccccgatgttgccctcgctctcgctcccgatctcgaatatcgcattcgcgaaatcatgcaggaatcggtaaaatgcatgcgccattcaatgagaacttttcttactacagaggatgtggatactgcacttgcattgagaaatttggagccaatatatgggtccacctctaatgatcctccgcagttcaaaagagctgctggacacaaggatttgttctacattgatgacaaagacgtggatatcaaagatatcattgaagctcctttaccaaaagcaccccttgatacatcaattac

SEQ ID NO: 227960 - DNA, 543 bp, Glycine max
aattatagtcagagtttcgtctcaataatttgtggaatatagatttctatgagatgtcaatataaattcttaaagtgaatcttcaattctaattatacaatagtgccaaaaacacttataaaactgcatataaatattttcataagtaaatgtattctattgctgtaaaaaaaaaagtaaatctattctatttttaagtaataagtgcataaatttcggtaaaaaaaaattataagtggataaataaatatgaagagtgtgtttctttacctgctgcatgcattagaaattatatataattttgatttttaacccatgatattgatgtgaagtattaattaattttgttgatgactatttttttaaaaaaaaattgattaatcatttttattaaatttttttatcttgattacattttttttcaccctcaaaactcaaatgcaagaacttgcttaaagaaccaaattcaatatcattagatcaataatttattatttgagttattgggtgaaatgttggtaattgatgtatatcacacattaa

SEQ ID NO: 227961 - DNA, 563 bp, Glycine max
  unsure (1)..(563): unsure at all n locations
aaggtgtaaactattagtgtctctgggtcctgcggattatttgttcttcattttttttatatgtccatggcctcatcaagtggaaactcctccattagcacaaaatctcagagctctggctccgagggtgatttgcaggttgtggtagacgagagaaagaagaagagaaaacaatcgaatcgcgaatcggcgagaagatctcggatgcgaaagcgtaagcacttggacgaactgacgaagcaggtttcacagctcgcaaagggcaacggcgaaatcctcggcaccatagacataaccacacagcattatctgaacgttgaggcagagaattcgattctgagggcccaaatggaggagcttagccaacggctccaatcgttaaacgacatcgtcgacggtatcatcaacctcaccaacgcaaccaccgcctacgaaagggactgttatctaacatgcgcacaaaatatcaccaccaagaacaacacgctctgtcttaaccaacaangccgttttcagtggtgaattgtcaccctcgctctgcctttgtggatctgacaataaaa

SEQ ID NO: 227962 - DNA, 509 bp, Glycine max
gctgcagatatgatgtatggtcacaataaccatcattatacagaaaatgatagtgcaacagataacacatcatctgagagtagctcctctttacaagaccgattgcttcgtcaaggaaaggatctgtatgatatggagccttcaagtcatcttacacctaatggatctcttccgcctgtcaatatcaagggtgcaaataacttgggatataaaccatcaggatatttgaaagtgaagggagatatataacatgctgctattactgctgttaaaaagcaattaggaaagcatgatcgggaagaccgtccactacttactgttgaattggatacaattcctcctgaggcatttgaatgccaaattgctgatctagctaatgaagcatactatgctgcacatcctgctcttccaaattctccagaagtctctgctgtgaaaaaacaatgcagtcttagatctagatatgattcatattttaccaaagtcagttgccaagattcacatatgga

SEQ ID NO: 227963 - DNA, 588 bp, Glycine max
gatcaaaacggcatgcactctcaactttttgcactatcaaagttggtggagttgctggatagtccattgcataactattttaagcagcgtgactgcttgaattatttcttttgtttccgctggattttgattcaatttaaaagggagtttgagtacgagaaaacaatgcgcttgtgggaagttttatggacacattatccgtctgagcatctgcacctgtatgtatgtgtggcaatcttgaaacgatatcgtggtaaaataattggagaggaaatggacttcgacacccttttgaagtttattaatgagctaagtggtcacatcaaccttgatgcaaccctcagagatgcagaggctctatgcatatgtgctggtgagaacggtgctgctcgcatacctgccggaaccccaccatcgttgcctgttgaagatggttctttttacgcccaacaagaacaagatgaaatattgtaaataaattcacatttataataaattgtttggtgatacttgaatatatcaacctaattgtgtatttgctcatccagtttaaatacgttgtagcatattaaatgcatttctttaatc

SEQ ID NO: 227964 - DNA, 543 bp, Glycine max
gggacatcatatatgattaaagaaatgcatttaatatgctaacaacgtatttaaactggaatgaggaaatacacaattaggttgatatattcaagtatcaccaaacaatttattataaatgtgaatttatttacaatatttcatcttgttcttgttgggcgtaaaaagaaccatcttcaacaggcaacgatggtggggttccgggaggtatgcgagcagcaccgttctcaccagcacatatgcatagagcctctgcatctctgagggttgcatcaaggttgatgtgaccacttagctcattaataaacttcaaaagggtgtcgaagtccatttcctctccaattattttaccacgatatcgtttcaagattgccacacatacatacaggtgcagatgctcagacggataatgtgtccataaaactttccacaagcgcattgttttctcgtactcaaactcccttttaaattgaatcaaaatccagcggaaacaaaagaaataattcaagcagtcacgctgctaaaaatagttatgcaatggac

SEQ ID NO: 227965 - DNA, 491 bp, Glycine max
atcttcttcccaaccactactactcactcactgcagatctcaattgcatcgctgtccatggctaccatcgttagcatcaaggcccgccagatcttcgacagtcgtggcaatccaactgtcgaggtggatttgacttgctccgatggtacttttgccagagctgctgttccaagtggtgcatccactgggatttatgaggcccttgaattgagagatggaggatctgactaccttggaaagggtgtatcaaaggctgttgacaatgtgaacaccgtcattggccctgctttgattggcaaggacccaactgagcagactgctattgacaacttaatggttcaacagcttgatggaactgttaacgaatggggttggtgcaagcaaaagctaggagcaaatgccatattggcagtgtctcttgcagtctgcaaagctggtgctagcgtcctgaaaattcctctttacaagcatattgctaatatcgcgggtaa

SEQ ID NO: 227966 - DNA, 431 bp, Glycine max
cggacccgaataatgatactacattgaattcaattgttggggaccaagtgagagagagagagcatgcccaaaatgataataatttaactttaaagagaacttcatgatcatcaaccatccaaggatttaagacgaaaggaacaagtccaaccctcgaaagtgaattaggaagaaaacacaaggaaggaaaaccatacacagaagaagattccagagaaattcaataatacacaatttttttttttttattttcatttccccccctctagtagtcagtggggggaagctgctcgtgggtgtggctgataaagacaacctcgtaaacaaggccagcgattccaccaccgatgagaggcccggcccagtagatccagtggttggtccaggttcagctcacgacagcaggcccaaatgtcacagcggggtttatg

SEQ ID NO: 227967 - DNA, 621 bp, Glycine max
  unsure (1)..(621): unsure at all n locations
gcgcgccagggcggcagctctcaacattgtccccacttcaacaggagcagcaaaggcagtggcccttgtcctcccaaccctcaagggcaaactcaatggcattgcactccgtgtgccaacaccaaacgtctcagtggtggacctcgttgttcaggtctcaaagaagacctttgcagaagaagtgaatgcagcattcagagagagtgcagacaatgagctccagggaatcctctctgtgtgtgatgagccacttgtgtctgttgacttcaggtgcactgatgtgtcctcaaccgttgactcatcgttgaccatggtcatgggagatgacatggttaaggtgattgcttggtatgacaatgagtggggctactcccaaagggttgtggatttggctgacattgttgccaacaagtggaagtgagagccatcaaattctgaattggtaattcaattattatatgtatgtaccatgccattgtagttttgtatgcttactactactactactaccactacaaacacttgntgcttcattnttcattctaaaacttgtactgagaaacagaaccatcaattntctctgccttctcattgtgcaataaaattcttaccttgaaatct

SEQ ID NO: 227968 - DNA, 477 bp, Glycine max
cagattctatggtaagaattttattgcacaatgagaaggcagagaaaattgatggttctgtttctcagtccaagttttagaatgaaaaatgaagcaccaagtgtttgtagtggtagtagtagtagtagtaagcatacaaaactacaatggcatggtacatacatataataattgaattaccaattcagaatttgatggctctcacttccacttgttggcaacaatgtcagccaaatccacaaccctttgggagtagccccactcattgtcataccaagcaatcaccttaaccatgtcatctcccatgaccatggtcaacgatgagtcaacggttgaggacacatcagtgcacctgaagtcaacagacacaagtggctcatcacacacagagaggattccctggagctcattgtctgcactctctctgaatgctgcattcactttttttgcaaggtcttctttgagacctgaacaacg

SEQ ID NO: 227969 - DNA, 428 bp, Glycine max
ttttttttttttttttttttttttttttatttttttttctttttttttttttttttttggttttccttgagaaaatttttttcccttttaccatttattaaaaagggacacctcaaaaaaaattttccaacacaaaaaaaaaaagccacttggcccccttcaattaaaaaaaaaggcgcccccaaaaaaaaacccccccccccaccaacggaaaaacggggcccccccaaaaaaaaaagattttcaaaagaaaaaaaacaaacccgggaacccaaaaaaaaaaaaagggttttcaaaaaaaaaggcacaaagggggaaaaaccccccaaaaaaaattgcccccccccccgagcgcttccctaaaccaaaagcccccaatggggtaaaaacaaactctttaaatttatgccaaaacggccccccccccc

SEQ ID NO: 227970 - DNA, 560 bp, Glycine max
cgattcgtttggtgaacggatttttaggtgtgattattacgttttttttttgttcaacaagctatggaggtttcggtgattggaagctcacaagcgaagctgggcgcgtctgaattggcttctagggaagttggattttgtaatctgaagaacaatttaagggttttgaatgatagagttagttttggtaggaataatatacggtgggagaaggctgggattagtttcactttgagggctcttcagactgaacctgttagagaggagaagaagccttctgggattggaacaagatccaaaacggtagatggtgtaagattatttgtggggcttcccctagatgcagtttcttatgactgcaagtcaataaaccatgctagagcaattgcagctggcctaaaagctttgaagctcttaggagttgaaggtgttgagctccctatttggtggggaattgctgagaaagatgccatgggacaatatgactggtcaggctatcttgctattgctgagatggtccagaacgttggtctcaagctccatgtttctctttgctttca

SEQ ID NO: 227971 - DNA, 442 bp, Glycine max
attatgtaatattggctggaatgtacaccacatgagcacaaatgacaaaaaggtaatctgccacccaactggctacataataagaaataactaaaaggtctacgcttgaggataaaccggcaaaaaagattctcatattgtgcttacaaaataacctgttctcaatctcatcccatgcactgatccaagggtataactaattgttatctacatgattatcatacattacgaatttacaaccattaggctgcttgcatgctcacacttgattcatggctcatatccatggcagattcggcgccttcttcctccttggccggtagatcatctgaatgcagttcaggttgcttaaggctccggacaaactcggtgaacaaaggaaaatgctctggagaaaagaaagatgctcccattctatgatatgtgaacaaatccaatacat

SEQ ID NO: 227972 - DNA, 549 bp, Glycine max
  unsure (1)..(549): unsure at all n locations
gcagacttaacaacagcacaaagcgggttactgtctgttcaagctaccatctctctctctctttcttagtgcctccttgccaggtgctgccactctctctttctctctcttcatccttctgttgggttggttgtggagtgttgttttctgttgtgcacgtgttgtcattttttaccctcgccacagatctgaagtgttcaagtttggattttgtgcttctggaagttaaaatggcccaagaaactttcctattcacatctgaatcagtgaacgaggggcaccctgacaagctctgtgaccagatctccgatgctgtgctcgatgcatgcttggagcaggaccctgacagcaaggttgcctgtgaaacctgcaccaagaccaacatggtgatggttttcggagagatcacaaccaaggccaacgtggactatgagaagattgtgcgtgacacatgcaggaacattggttttgtctctgatgatgttggtctngatgctgacaacttgcaggtcctcgtcaacattgagcaacagagtcctgatattgctc

SEQ ID NO: 227973 - DNA, 485 bp, Glycine max
agtaaaattgtatactctcttttatttgagattattacatattggtagcataaatcttgagagaacatttttttttgtttcatcatataaaatatatatgttctgaaagaacacatacaagtacacaaaaaaaagggggaaattcataaaaaaatacagaaaaaaaaaaacagaattgagtaagagggaaggaaacatagagaaaattttagcaatcagataataagaagccagtagtagtgcaaaagtcccttgccaagagtgttggaaccccttttagttaagcaggtaccttctcccccttgagtggcttcaccacttcccatgtgaagtcagggtcatctctgccaaagtgtccatatgcagcagtcttcaagaacctgccatttccacccctcttgagatcaaggttgatggagatcatgccaggcctgaagtcaaaactctccttcacaatgctgaggatttccttgcagggatcttcc

SEQ ID NO: 227974 - DNA, 542 bp, Glycine max
  unsure (1)..(542): unsure at all n locations
atcttcttattatagctcgaacccagaaaaactcttctctcgatccttctgaatttgcggatccagcattctatatccatatggcttcctcagaaagcacaaaacaagagggagtagttggtggtattggggagaaactcattccacttcatgaaaatgttctgcagaagcatgctgcattctttgacaagaatcacgatggtgttatttacccatgggagacatttcaaggcttacgtgaaattggaaatgggatcttgtcgtccgttggactttctctattcatcaatttggctcttagtcaaaccactcgaccaggaaagtttccatctctacttttcccaatagaaattaagaatatccaactcggcaaacacggcagtgacactggagcctatgatactgaaggaaggtttgttccttcaaaatttgaaggaattgtcacanaacattcacatactcatgcaaatgctttaacatatgatgagctaaaggagattgctaaagcaaatagagagcccaaagatttcaaaggaaggatt

SEQ ID NO: 227975 - DNA, 458 bp, Glycine max
caaatacgataaattaataacttagatacattatttaacttaaacaaataaacccaaatacaagctaaattgggaaattctaatgtattatggccatctatatattcttaaaaatcaacttcgccacccttgaacaagtaagcttcttccttttacacattattgtgtctatatatattaaagaaaaaatagatcactaactaaagattgaattaattctttttgcgtgcagaattttcctttttcaacatttcaaacaagcttccatcataaacacttcggattgtttccttctgtagtaagccattcttgtctttggcaagtttgtaaaggactttccattcaaccaagccaccaatccttcctttgaaatctttgggctctctatttgcttttagcatctcctttagctcatcatatgttaaagcatttggatgagtatgtgaatgttttgtgaa

SEQ ID NO: 227976 - DNA, 598 bp, Glycine max
gaaggccagaaaatcgaacttgtgcagttccacatattgcccgagtttgtgtccagctcaaactttgattctctaagcaaccctgtgcagacagtggccggtaaagatcccgcaaggcttccattgaacgtgaatgcattaggaaacagtgtcaacatttcaaccggggtcgtcaatgccaccgttctcggggtagtatactcagataacaaacttgggatttatcacgtggacaaggtgcttcttcctctagatttctttataaccaataaggctccagcttcagctccatcaactcttgcaaagtctcccaaagctgctaaggataactcttctgatgacgatcaagaagaaacaaatcagcatcagaataaatctggggcagtgagtgtggttagcattggtggagcaacgttgatgtcgcttgtgatagctttggttgcaaccatgttgagttgatccatttggcagctgcactttcaattgtatttgtcaaacacgccattaatttctttctttgtacccttttttgttaaaatttggatgtggttctgttttcttgggaatgggggtatatatgaaaaggacgtgaatactc

SEQ ID NO: 227977 - DNA, 515 bp, Glycine max
  unsure (1)..(515): unsure at all n locations
ctcgagccgaaagaaggcgtcttcataaacgcctttcttctccgtttccgtttcctcgttcgaattcgctttttgatctgcgaaaatgagagagtgcatctcgatccacattggtcaggctggtatccaggtcggaaatgcttgctgggagctctactgcctcgagcacggcatcgggcccgatgggcaaatgccaagtgacaagacagttggcggtggtgatgatgctttcaatactttcttcagcgagactggtgctggaaagcacgtgccacgtgcagtgtttgtagatcttgagcccactgttattgatgaggtgagaaccggaacttaccgccagcttttccacccagagcagctcatcagcggcaaagaagatgccgccaacaactgtgcccgtggccattataccattgggaaagagattgttgatctgtgcttggaccgcatcagaaagcttgctgancattgcactgggactcaggggtnttggtcttcaatgccgtggtgaggac

SEQ ID NO: 227978 - DNA, 533 bp, Glycine max
caatattgccattcagtttaggtacgtaacaggagcagcgaagcataaaagcaatgcatccaaattaaaaccacatcggtactggtacacatctgaacatcaaacacaacagaaaacagaccacaagaacaagaatctgaagtagattctagtagtcttcatcctcttcctggccctcaccagactcagcacccacttcttcataatccttctcaagggctgcaaggtcctcacgggcttcagaaaattcaccttcttccataccctcacccacgtaccagtggacaaaagcacgcttggcatacatgagatcaaacttgtgatcaatgcggccaaacacttcagccacactggtggagtttgaaatcatgcaaactgccctctgcaccttggcaaggtcgcctccaggaacaacggtaggtggctggtagttaataccacacttgaaaccagtagggcaccaatccacaaactgaatggtcctcttggtcctgatggtggcaacagcagcgtttacatctttgggcacaaca

SEQ ID NO: 227979 - DNA, 555 bp, Glycine max
aacagagagtgatttcagtgagtgatcggtgttcacttgatctcatcataatcgtcagcgtcaattgaagaagatgccgatcagaaacatcgccgtcggaaggcctgaagaggcgactcaccccgacacgttgaaggcggctttggctgagttcatctcaaccttcatcttcgtgttcgccggctcaggctccggcatcgcctacaacaagctcaccgacaacggcgctgccacccctgccggcctcatctccgcctccatcgcccatgcattcgccctcttcgtcgccgtctccgtcggcgccaacatctccggcggccacgtcaaccccgtcgtcaccttcggcgccttcgtcggcggcaacatcaccttcctccgcggcatcgtctacgtcatcgcccagctcctcggctccatcgtcgcctccctactcctggccttcgtcaccgcctccactgttccagcattcggactctccgctggagttggagttggcaacgccttggtgttggagatcgtgatgaccttcggtctggtgtacacggtctacgcaac

SEQ ID NO: 227980 - DNA, 532 bp, Glycine max
agctaaattacattaaacacctttcaaagtcttaagacataactgtcctagctctgtgaatcagaactcaaattattggcaaggtctttatcataccaagactaatgttccaactatcaacttatatatcacaccaaaaaccgcgcacccaaatctcaatgctcaaactcgtgtggatctccaggttttttccacttgaaaactttagtagggttcaacgggggtacggaagttagctccggcgtacactgcttcagcaccaagctcctcctcaattctcaagagctggttatatttagcaagacgctcagacctgcatggagctccagtcttaatttgacccgtagccaaaccaacagaaaggtcagcaatgaaggtatcctcagtctctccacttctgtgactggccatgacaccccatccagcttttttggacatcctgacagcttcaatactcttagtcacagaaccaatttggttgaccttgaggagaagagcattgcatgctttagtatcaattgccttctgaacc

SEQ ID NO: 227981 - DNA, 606 bp, Glycine max
  unsure (1)..(606): unsure at all n locations
gcaagaatgatagagtgcactctggcaagagaaaagttggctatgagcaatgttcgcttagttatgtctattgctcaaaaatatgataacctgggtgcagaaatgggcgatcttgttcagggtggcttgattggactactgcgtggtattgaaaaagtttgattcttcaaaagggtttaagatttcaacttatgtttattggtggatacgtcagggagtttcaagagctttagttgagaactcaagaacattaagattgcctgctcatttgcatgagaggctatctctaatccgcaatgcaaagtttagactagaagagagaggcattactccaactattgataggattgcaaataccttaacatgtctcaaaagaaagtcagaaatgctactgaggcaatcagcaaaactatctcgcttgatagagaagcattcccctctctgaatggtatacaaggagaaactcatcatagttatattgcggatggtcgagtggagaacatcccatggaatggagtagacgagtgggcactanacgacgaagtgaacatactcattaatgtgaccctttgtgaacgagagagagaaatattcgactttatatgg

SEQ ID NO: 227982 - DNA, 562 bp, Glycine max
aaaagtaatttttttatttttggagtattaaaacaaaaattacccatatttattggtactaaaaccatatttaaagggatttacaaatctccaatgttcccttatataattgtcctctttttgaatcaggaagtcaaatttctaggtacatacttcctctgtgtatatatacattgtaacatatttctatgatgagtccaaatttaatgtttcaatagcatggcttccatttgtctcttcctcgcagcatgttttagtttctccaatgcaacaagtccaacttgccttactctttctcttgacaaacctatccgtttactaatgtcttcccatgtaagaccttctttatccaatccataataaagtcgaataatttctctctctcgttccacaagggtcacattaatgagtttgttcacttcgtcctttagtgcccactcgtctactccattccatgggatgttctccactcgatcatccgcaatataactatgatgagtttctccttgtataccattcagagaggggaatgcttctctatcaagcgagatagttttgctga

SEQ ID NO: 227983 - DNA, 596 bp, Glycine max
  unsure (1)..(596): unsure at all n locations
ctgggccatcaaggccaaaaacggcggtgttttgcccctccacgatcccaagcccaaacccgaggccccggcccagaagccgcccaagttctacccggccgatgacgtgaagaagcccctcgtcaacaagcacaagcccaagcccgcgaaactcagggctagcattactccagggactgttctgatcctgcttgctgggaggttcaagggaaagagggttgttttcttgaagcagcttccatctggattgcttcttgtaacaggtccctttaagatcaatggggttcctctgagaagggtgaaccaatcgtatgttattggtacatccacaaaggtggatatctctgatgtcaatgttgataaatttgatgacaagtactttgccaaggaagctaagaaaaagaaaacaaagggcgaaggcgaattctttgaggcagagaaggaagagaaaaatgtgcttccccaagaaaagaaagatgaccaaaaaaccgtggacactgctttgttaaaggccattgagagtgttccagagctcaagtcttacttgggtgctaggttttcctttgaggcangagtgaagccccatgagctagttt

SEQ ID NO: 227984 - DNA, 510 bp, Glycine max
agaactacagtttaataaaatttctagaaagaaaaaactcttgaacaatgttcattaccatgatgaaaaaacagtacaactattgggaacaagctcgacaaaacagaatgaggaaaataattttagcactctagaaaactagctcatggggcttcactcctgccttcaaggaaaacctagcacccaagtaagacttgagctctggaacactctcaatggcctttaacaaagcagtgtccacggttttttggtcatctttcttttcttggggaagcacatttttctcctccttctctgcctcaaagaattcgccttcgccctttgttttctttttcttagcttccttggcaaagtacttgtcatcaaatttatcaacattgacatcagagatatccacctttgtggatgtaccaataacatacgattggttcacccttctcagaggaaccccattgatcttaaagggacctgttacaagaagcaatccagatggaagctgcttcagaaaac

SEQ ID NO: 227985 - DNA, 586 bp, Glycine max
  unsure (1)..(586): unsure at all n locations
ggttttctgaaagatgggaggtggcaaggacaagcaccatgatgaatctgacaaaggaattttttcacagcttgctcatggggtagctggtgcagcacatggtggacatgggtacccacctggggcttacccaccaccacctggggcataccctccgcaccaagggtaccctccacaacatgggtatcctccggctgggtaccctccacatcaaggttaccctcctgctggttacccaccagctggttatcctggttcatctcatgcaccaggttctcatgggcacggcggcatgggagcaatgctcaccgggggtgctgccgcggctgctgctgcttatggtgctcaccatgtctctcatggctcccatggctcctatggccaatatgctgcacatggtgctcacatgccccatggaaaattcaagcagcatggaaagcatggcaaattcngcaagcatggtggtgggttcaagaagtggaagtgaagaatgtgtatctaactatgattctaaaatgcagctctgtgtagagcttaaattcttataataaaccatactttggatgatgaaatccatcgatctatg

SEQ ID NO: 227986 - DNA, 377 bp, Glycine max
  unsure (1)..(377): unsure at all n locations
agaaaatgatggggaaagactatgttagaaaagggtcagggtccatgtttgatcttgaagagattgaagaagggcttgaagggtatgaggatctagagaaatcatccctcatgtcccagaaaagttttgagaagcgattcgggcagtcaccagtgttcattgcttccaccttgatggaaaatggaggacttcctgaaggcacaaatagccaatcattggttaaggaggccatccatgttataagctgtggctatgaagagaagactgaatggggcanagagattgggtggatttacggcttcgtcacagaagatattttgactggattcaagatgcactgcagaaggggggaaatcagtataattgcatgcccaaag

SEQ ID NO: 227987 - DNA, 540 bp, Glycine max
gcccgaaccgcatatatctgggttggaaactccgaaacacagtgccccgggcaatgcgcgtggccattccaccaaccgatttacgggccccagacgccgccgttagtttctcctaacggcgacgccggggttgacggaatggttattaacttggccacgcttctcgctggcacagttaccaaccctttcaacaacggttacttccagggtcccccaacggcgccgttagaggccgtttcggcttgcactggtgttttcggaagtgggtcgtacccgggttatccgggtcgggttctcgtggataaggcaaccggggcgagttacaatgcgcatggtgcgaatggaaggaggtatctcgtgccagcgatgtgggacccgcagacttcgacatgcaagaccctcgtctgaagactgccacgtggcgaggttgtgtaatggttgtagatattggtcgatgggaacggaaagcaggaatggataatagaggtggtgatggatttggttcggactttcgagtgtttctaaattttctatattctg

SEQ ID NO: 227988 - DNA, 537 bp, Glycine max
acatcatttagaaccatgtctttctctaccaaattgcctttggtcctattattttcatcccttttcatccatgcatctttggctgagatggtgtgtgaggacctgccaaaggaagtgtgtgctttctcagtagcttcatcagggaagaggtgtttgttggagactgagaaggcagccgacggtggcgtcgagtaccaatgccggacatcggaagtggtggtggagaggatggcagactacatagagacagaccaatgtgtggaggcatgtggggttgataggaactctgttgggatttcatctgatgccttctttgagcctcaattcaccggcaagctttgctctcctgcatgttaccagaagtgccccaacattgttgaccttttcttcaacttggctgctggagagggggtatttttgccagaactgtgtgaaaagcacaagaccaaccctcgtcgtgccatggttgaacttgtgagctcaggagctgcccctggccctgtttctgacgtgtcagaggccattattgcatcagca

SEQ ID NO: 227989 - DNA, 377 bp, Glycine max
tgagaacaatcgttggtgtggaacgtgacaatggtggcgacgaacgtgaaggcagaaaccatgtctctgatggacaagcgcagcgccttggaggctgagatgaactccatcatcgcccgcctctcccagcccggcgctcctggcctctccggaaatctcgtcgactctgagggttttccccgttccgatatcgacatccccgttgttcgagccgaacgacgtcgcctggcagagctgcgcagtgaccacaacgaagtaactgagaaaattaacctaaatattcagattctccattcggcaagactcggaaataggtcattgcccttcaagaattcaggtaacgatgatggttcagatactcagatcttatcaaacat

SEQ ID NO: 227990 - DNA, 550 bp, Glycine max
ataatgatcataaaaagagtaacacgttattgagtcaaagaaagtgcaccacaatcaaaggtcggctgtaatgtaattatttattacatatatggagtcttgccaagatgaatatcataaggtaaagaactcagggtgggaaatgcatcaaaaggaaaaaccgtgaccaccatcatgtgaaaaataagttcatggcacctacaagatccgaaaatggcatcccaatagtcctctgccttgccaaggtctaggtgtaatagttaagttgatcactgtgccttgcctcataataacaactggtactgcacaacccagatttgactgagcctcagaagaaagcctttggagcaaattatcacctgcttcaacattgccaaatttcaaaatttgatccccaagttgtaaaccatcctctactgctggtgatgcatctgctatctcatctaccattgcaaatggtctactaatcaacacgttcacattcattgagttgggagatcgtttcaaaaggacattttgtgatggtgttgatgcaacagtgtccatgttt

SEQ ID NO: 227991 - DNA, 567 bp, Glycine max
  unsure (1)..(567): unsure at all n locations
caacttctttgtggttggtaggggacaagggaacttcaaccccaaaaaggacaccaaaaagtttaatcttgtggatcctgtggagagaaacacagttggtgttccctctgggggatggactgctatcagattcagagctgataatccaggtgtttggtttatgcattgccatttggaaattcatacaacatggggattgaagatggcatttgtggtggacaatggtaaaggaccaaatgaatctctactaccacctgcaagtgatcttcccaagtgttgagaagaggactaatacacaatcttcgcttaaagaggaagagggggaaacatgtaaagaaaatataatttccaaagggagtgtgtaccatcaaggctaataacaagattttcttggagcaaataaaaaaggataagctgctaatagggaaaataagaccaattaacatgtcttcactgtctatgtttgttccctgtcattttttgcattatttgtacttctcatctctctccttgaaagataagtttggctcatgtaantatatatcagtgtgaatcaaaatttacagg

SEQ ID NO: 227992 - DNA, 616 bp, Glycine max
  unsure (1)..(616): unsure at all n locations
ctcagcgtcaagctaccaaagacgctggtgtcattgctggtctaaatgtgatgcgaattatcaatgagcctactgcagctgccattgcatatggtcttgataagaaggccacgagtgttggtgagaagaatgtgttgatttttgaccttggtggtgggacatttgatgtgtctttactcaccattgaggagggtatctttgaggtgaaagccactgctggtgacacccatcttggaggtgaagattttgataacaggatggtgaaccactttgttcaagagttcaagagaaagaacaagaaggacattagtggaaaccccagagcacttagaaggttgaggactgcttgtgagagggccaagagaacactttcatcgactgctcagaccaccattgaaattgattctctatacgagggaattgatttctactccactgttactcgtgccagatttgaggagctcaacatggatctcttcaggaaatgtatggagccggtggagaaatgtttgagggatgctaagatggacaanagaagtgttgatgatgttgtccttgatggtggttctaccagaattcccaggttcaacaactgctgcaggacttctttaatgga

SEQ ID NO: 227993 - DNA, 513 bp, Glycine max
agacaagatatgtcatttaacaagacagaagaattcctacaggtaaagtgcataacaattgagtataccatctaataatgaaaataacgcaaataacataatgcttaaagcaacgttcatatcagaagggaaaaatagtttgaatcccatccaacaaaaatcatgcgattaaaatccaattaaaaaagcataaagtaaaataagtttttaaaacaggtatctggaggaaagcaactacatttagtccacttcctcaatcttggggccagcaccacttccaccagaaggaggagcagcatactcatcctctgctgcaccagcaccacccacgtctggaccagcaccaccttggtacatcttggcaatgattggattgcagatgctttccaattccttcattttgtcctcaaactcatctgcttctgcaagctggttgctgtctaaccactggattgcttgctcaattgcatcctcaatcttcttcttgtcagccgggtcaagtttctcaccaat

SEQ ID NO: 227994 - DNA, 641 bp, Glycine max
  unsure (1)..(641): unsure at all n locations
ggaaaacttaagtacctacagaggatggcttacaccaacaccattgtttatccatggacttccatccctctgcttgcatactgcacaattccagctgtgtgtctcctgactggaaagttcatcatccccacactaaacaaccttgctagcatttggtttatggctctatttatctccatcattttaactagcgtgctggagctccgatggagtggtgttaccatcgaagccctttggcgtaacgagcaattttgggtcattggaggtgtttctgctcaccttttcgccgtgttccaaggcctcctcaaagttcttggtggagtagacaccaacttcactgtgacagcaaaagcagcagaggacactgaattcggagagctctatctcttcaagtggaccactcttctcatccctccaactactctcataatcttgaacatcgttggagtcgtggccggagtctctgatgccatcaacaatggatatggttcatggngacctttgtttgggaagctgctctttgccttctgggtcattgttcacttgtaccctttcctcaaaggtctcatgggacagcataacaggactcctaccattgtaagtgtgtggtcaatccttctagcatctattttctcattgat

SEQ ID NO: 227995 - DNA, 596 bp, Glycine max
ggcaaaaatattatttcttattttcaatagatgaaaaatcatctagtagcaccaaaacacagaacatgttttcccaaacaatgacaatggctatactacaatatatggttttgttgtatcatcaaatgaatacattccaatcagacccaactttcctcttttaagactatgtacacagataactcttctaattaaggcaaaccactcaatagcagtaagaaaataaaagcatgcacacaagtgcaattaactcttatcattgggacatcaacatggcctctccacagagtcttattagcattccaccccacattgtttgagcactggaccagtttgcttgggcaagaagggatcaatcctgacccaaatcaatgagaaaatagatgctagaaggattgaccacaacactacaatggtaggagtcctgttttgctttcccatgagacctttgaggaaagggtacaagtgaacaatgacccagaaggcaaagaacagcttcccaaacaaaggtccccatgaaccatatccattgttgatggcatcagagacttcggccacgactcccacgatgttcaagatatgagagtagttgaggg

SEQ ID NO: 227996 - DNA, 597 bp, Glycine max
gttctccgaaaccgaaccggttccttacatagatctggattacgcggccatggatccgaagacggagcagaaaagttccgccaccgccgacggcgtcgttccggtgcagagcaacttcgagccgttcacctacggttacaagtacaacactactctctcacagtcacagtctcatatgagccagagtgtatcttctccgtcgtcgatggaagttggagttgtgccggacgggaacacgatgtcggagatatcgaactgcagctacagcaaagtggcaccggtgacggtgacggcgcagttctcggcggcggatagggaggctagagtgttgaggtacagggagaagaggaagaaccgaaagttcgagaagaccattcgttacgcatcgagaaaagcgtatgccgaaacgaggccaagaatcaaaggaaggttcgcgaaacgcactgatgcggaccctctggctggatacggcgtcgttccgtcgtgttgatgattatcatatatatcatatatgaatatgaatgcttacttttttgctttcttatgttgcttctgctgctggatatatggactacgccttcttttggttgaattatg

SEQ ID NO: 227997 - DNA, 576 bp, Glycine max
ctggtgaaacaactcacaaagggttttatttgtataatgataaacggaaggctagtcctgatcctgaattgaagaactatattgagaaggctaggagcatttccggtgtctctgttgatcctaagcttgccaagttacaagaaaaggatatcatagagatgatattctttcctgtggtgaatgaggcttgtcgggtccttgatgaaggtatcgcagtcaaagcagcagatcttgatatttctgctatcatgggcatgggttttcccccttacaggggaggcatcatattctgggctgattctcttggatccaagtacatatattcaagattagagaaatggtcagagttgtatggggaattcttcaagccttgtgccaacttggctgcaagagctgccaaaggaattcctctgagtgcctctgtggagcaggtgaagtctcgcatgtaagaaaaaaatagctcattacgtgtttactggattgaattttcctttccccgttatatctcctttcagatggtaggaaatattggtgactgacttgagaatagcttaataatgtacgatgagaaaacat

SEQ ID NO: 227998 - DNA, 529 bp, Glycine max
aactaaaaatatttttactttttaccaaagaattatgctgttcaaatgttttctcatcgtacattattaagctattctcaagtcagtcaccaatatttcctaccatctgaaaggagatataacggggaaaggaaaattcaatccagtaaacacgtaatgagctatttttttcttacatgcgagacttcccctgctccacagaggcactcagaggaattcctttggcagctcttgcagccaagttggcacaaggcttgaagaattccccatacaactctgaccatttctctaatcttgaatatatgtacttggatccaagagaatcagcccagaatatgatgcctcccctgtaagggggaaaacccatgcccatgatagcagaaatatcaagatctgctgctttgactgcgataccttcatcaaggacccgacaagcctcattcaccacaggaaagaatatcatctctatgatatccttttcttgtaacttggcaagctaggatcaacagagacaccggaatgctctagc

SEQ ID NO: 227999 - DNA, 561 bp, Glycine max
gatgaattgatatccttttttttttttttgctcttggctcatgaaatcaagggattgaagtaagccctgagaattttgcaggattgaaaaggtgaaaataataagtctatcttgctaaacaattgcaaaatgagaacgtggtggcctaaggaacatggattctgaccttatgacatgactctgctattaatatgagctgcaataaggggtccaatattcccctccagaacataatttaggtctggcacctcaacgcctgtctttacatcatgtactaacttgtgcggatgagagacatacctccgaatttcttcttgccataaattgacaatgttttccttttgtatactttttatacttgcaactccttgttcctttgttgtcactagaagtttagctttcagtctgtttagtgctttcatcttatttgcaaagtggcttctctcacctcaagctgagaagattcatttggagaacctcttatcaagtagtgaactcctttttcccctgaaagatagccatatgcacactcaaattcaaactctataatagcaagaatta

SEQ ID NO: 228000 - DNA, 570 bp, Glycine max
  unsure (1)..(570): unsure at all n locations
ctcgagccgctcgagccgaatcggctcgagaccacactgaggagggagacagtggaaggaaggaacactcaaatcactgaaccagccatggctaccttctccaaggaacgcgagaactttgtatacgttgccaagttagctgaacaagctgaacgctatgatgaaatggtggaggccatgaagaaggtggcgaagctggacgttgagttgagtgtggaagagaggaacctgttctctgttgggtacaagaatgtggtggggtcacggagagcttcatggagaatcttgtcatcgatagagcagaaagaggattccaaagggaatgagttgcatgttaagcatatcagggattacaggaacaaggtggagttggagctgtccaacatttgcagtgacattatgataattttagatgagcatcttattccatccactaatattgcggagtccacagtgttttattataagatgaaaggagactattanccgtatttggcagaaattaaagctggcaatgaaaaagaagaggtggcagaacagtcacttaaagcatatcagacagcttctacc

SEQ ID NO: 228001 - DNA, 506 bp, Glycine max
gccaagtgaaagagagaagaaaagtcaaagacaatgtcagggatcattcacaagattgaggagacccttcatgtgggaggccacaagaaggaggaggagcacaagggtgagcagcaccatggtggagaatacaaaggggagcatcatggtgaacacagtactgaatacaaaggagagcatcatgttggtgagcacaagccggagcaccatggaggagaagagcacaaagaggggttcctagacaagatcaaggacaagatccacggcgaggagggtggcgccaccgccgagggcgagaagaagaagaagaagaaggagaagaagaagcatgaacatggccatgacagcagcagcagcagtgacagtgattagattatctcccactgctgcatcacctatatatcttataagggtgtatgggaccatagtagtgagggctgtgtctttctctttttttcctacttgtcatttatatttatgagcgagagaaatagtgcgtgtatctg

SEQ ID NO: 228002 - DNA, 365 bp, Glycine max
aaggataatatacaatccagcataaccaaagcagaggggttacaaaccaacgaaaccacagactaatagcactcgaattagcaaccagatacacgcactatttctctcgctcataaatataaatgacaagtaggaaaaaaagagaaagacacagccctcactactatggtcccatacaccttataagatatataggtgatgcagcagtgggagataatctaatcactgtcactgctgctgctgctgtcatggccatgttcatgcttcttcttctccttcttcttcttcttcttctcgccctcggcggtggcgccaccctcctcgccgtggatcttgcccttgatcttgactaggaaccccttttt

SEQ ID NO: 228003 - DNA, 507 bp, Glycine max
atcatggccacctctgctattcagcaatcagcattcgcaggtcaaactgctctgaagcagctcaatgagttggtccgcaagaccggtggcgccggcaaaggtcgcaccaacatgcgccgtaccgtcaagagtgctcctcagagcatttggtatggccctgatcgtcccaagtacctgggtccattctcagagcagattccgtcatacctgaccggagaattccccggtgactacggatgggacactgctggactatcagctgacccggaaaccttcgccaggaaccgggagctggaggtgattcacagcagatgggccatgcttggtgcacttggctgcaccttcccagagatccttgagaagaatggtgtgaaattcggcgaggccgtgtggttcaaggctggttcacagatcttctcggagggaggacttgactacttgggcaacccaaacctgatccatgctcaaagcatgcttgccatctggggctgttcaggtgtgctcatg

SEQ ID NO: 228004 - DNA, 492 bp, Glycine max
ctaatatatataatataatggttctcatacagattcttctggtacacaggtgtagttacattagagaaaatgggagcagaagattgcattgaattgcaatgctcattgtccagggacaaagttagtggcataagcccaagcattgttggcaacaggatcagcaacatggtcgtaaaggttctgaatagggcccttgccagtgacaatggcctgaacaaagaaaccaaacatggagaacatagccaagcgaccgttcttgagttccttgaccttcaactcagcgaatgcatcagggtcatcagccagaccaagagggtcaaatgcaccaccagggtagatagggtcaagtccttcaccaaggggtcctccaccaactctgtaaccttcaacaaaacccatgagcacaacctgaacagcccagatggcaaggatgctttgagcatggatcaggtttgggttgcccaagtagtcaagtcctcccttcgagaagat

SEQ ID NO: 228005 - DNA, 314 bp, Glycine max
aagaaaagaaaatcctcattttactgtgcagccaaacactctctctctggggctctaaaattctaaggttgcagagaaaatctgaatcatgtcatagcaagcgtctggccacaatcaacaaccgtgttacatcgattgagaccacctaactcacgctgttgtcatcaggcaagactgcatcgtttgggctcacagaaccatctgtccttagaacaaacccgaggagataactgccgtcatgaatgactataaagagcctgtatcactagctccaactgggatgcagctcgggggcacctaatatatgggccccc

SEQ ID NO: 228006 - DNA, 637 bp, Glycine max
  unsure (1)..(637): unsure at all n locations
agagaaagaggcagatagaaaaaaagagcgacttttgagttcaaaagatgactaacttcccattgatcaacttggagaagctcagtggtgaggaaagaaacgataccatggaaaaaattaaagatgcttgtgaaaactggggattctttgagctggtgaatcatggcattcctcatgacatattggacactgtggagaggttgaccaaagagcactacaggaaatgcatggaagagaggttcaaggaattagtggcaagcaaaggtctagatgctgtccaaactgaggtcaaggatatggactgggagagcaccttccacttgcgtcacctccctgaatcaaacatctcagagatccctgatctcattgatgagtacaggaaggtgatgaaggattttgctttgaggttagagaaactagcagagcagctgctggacttgttgtgtgagaatcttggcctagaggaagggtacctcaagaaggctttctatggatcaagaggaccaacttttggcaccaaggttgccaactacccttcatgccccaacccagagctggtgaagggtcttcgtncccacactgnatgccgtggcattatccttctcttttcagatgancaggtcagtggactgcagct

SEQ ID NO: 228007 - DNA, 508 bp, Glycine max
atatcctggattatttgattcacactgtatatataattacatgaagccaaaactatctttcaaggagagagatgagaagtacaaataatgcaaaaaatgacagggaaaaaacatagaaagtgaagacatgttaattggtcttattttccctattagcagcttatccttttttatttgctccaagaaaatcttgttattagccttgatggtacacactccctttggaaattatattttctttacatgtttccccctcttcctctttaagcgaagattgtgtattagtcctcttctcaacacttgggaagatcacttggaggtggaagtagagattcatttggtcctttaccattgtccaccacaaatgccatcttcaatccccatgttgaatgaatttccaaatggcaatgcataaaccaaacacctggattatcagctcttgaatctgatagcagtccatcccccagagggaacaccaactgtgtttttcttcccaggatcccacaga

SEQ ID NO: 228008 - DNA, 580 bp, Glycine max
  unsure (1)..(580): unsure at all n locations
cttttcttcattttctctcttcctctcaccgagtcacgcactcgcctcgactcgtacggactccgatcccccccgagtcacactcagccagcaccaccgcccgatccgacgatgtctcgcgcctcttccgccgcctccggcgagatcatgctgttcggggtcagagtcgtcgtcgattcgatgaggaagagcgtcagcatgaacaacctctcacagtacgaacatcctttagacgccaccaccaccaacaacaacaaagacgccgtcgccgccggctacgcctccgccgacgacgccgctcctcagaactccgggcgccaccgcgagcgcgagcgaaagcgaggagttccgtggacggaggaagaacacaagttgtttttggttggattgcagaaagtagggaaaggtgattggagaggaatctccaaaaactacgtcaaaacgcgaactccgacgcaggttgccagccatgctcagaagtactttcttcgacgaagcaacctcaatcgccgtcgccgtagatccagcctctntgacatcaccaccgacacggtctctgcaattccgatggaggaagaac

SEQ ID NO: 228009 - DNA, 632 bp, Glycine max
  unsure (1)..(632): unsure at all n locations
agcgtgaagtcattttaccatctgtaatctacatacaaaagattttgcggcgaaggccatttctcatcaagaaccttgaaaatgttatgcggaaattccttcagtccttggaacttttcgaggaaaatgagaggaaaaagttggcaatcttcacagcacttgctttctctcagaagctgtctggtctcccaccagaaactgtgttccaaccacttcttaaagataaccttgtggccaaagggctagttctgtcatttatgactgacttctttaaggagtatctgattgacaacagccttgatgatcttatttcaattctaaaacggggaaaagtgaaggaggacctttggaacattttcccccttacaaaaggacccatggaagctttctgtgagcatttcaccgaggaaggattggccgccttggtggattataatgaaaagaatattttggaggcgaaacttaaggaaatgaagttttctttaacagcacagataacagaggaggctgatacatctgaagtcattgagactgtgaagctgcgagttagagatgctaaattgccggaaatngaggtggtgcggatcttgtnggatggttccatggatgctgttcagagaactggaaaaatc

SEQ ID NO: 228010 - DNA, 554 bp, Glycine max
  unsure (1)..(554): unsure at all n locations
ttagtcttgactatgcactctttaggtctccttcggtggtagtgcaagatggttcacttggttaccgtaacctttttgatgctatggttgatgctgtttatgctgcgttggagaaatctggaggatggtcactgaacatagttgtgtctgagagtggatggccttcttctggtggaactgcaacttcacttgataatgcaagaacttacaacacaaacttggttcggaatgtgaagcaaggaacaccaaaaaggcctggtagaccccttgaaacttatgtgtttgccatgtttgaagaaaatcagaagcagccagagtatgagaagttttgggggctcttccttccaaataaacagctcaaatactctattaatttgaattagttattagaagtatatatagtttataagaaataagggctatgatttcaagtgaagcttccataattgacctagaagaggcagctatggagctntatctgaactgttggagtcaatatgtacccatttacgagcaaagttagctttaaataaagattttccttatcaatatnt

SEQ ID NO: 228011 - DNA, 513 bp, Glycine max
  unsure (1)..(513): unsure at all n locations
aatattgatttggaaaatctttatttaaagctaactttgctcgtaaatgggtacatattgactccaacagttcagataaagctccatagctgcctcttctaggtcaattatggaagcttcacttgaaatcatagcccttatttcttataaactatatatacttctaataactaattcaaattaatagagtatttgagctgtttatttggaaggaagagcccccaaaacttctcatactctggctgcttctgattttcttcaaacatggcaaacacataagtttcaaggggtctaccaggcctttttggtgttccttgcttcacattccgaaccaagtttgtgttgtaagttcttgcattatcaagtgaagttgcagttccaccagaagaaggccatccactctcagacacaactatgttcagtgaccatcctccagatttctccaacgcagcataaacagcatcaaccatagcatcaaaaggttacggtacncaagtgaaccatcttgcacta

SEQ ID NO: 228012 - DNA, 559 bp, Glycine max
aaaggttgcttggcggggataagattaaagattcaacaatggcctctgcttctgctactcttctcaagtcatctcctgttcttgacaagtgcgagtgggtcaaaggccagacccttcgccaacctctcgtgagatgtaacccttgctcagcatcagctctcaccatcaaagctgcttgctatgctgacgagctcgtcaaaaccgccaaaacagtggcctcaccggggcgtggtattttggcgatggatgagtcaaatgcaacctgcgggaagcgtttggcatctattgggttagagaacacagaagctaatcggcaggcataccgtaccctacttgtgacagtacctggtcttggtgaatacatctctggtgccattctctttgaggaaactctctaccaatccactgtcgatggaaggaagatcgtctacgtacttgttgaccaaaacattgttcccggtatcaaggtcgacaagggtttggtgcccctagctggttcgaacgatgagtcatggtgcccaggtcttgatggtcttgcgtctcgctcagctgcatacta

SEQ ID NO: 228013 - DNA, 532 bp, Glycine max
gagtaatcatatttttctttttatcaaagttccaagagtttcgaacatgatggtgcacgttgaagtccaagattcgtaattgattggctagaagttcattaagtagaaaaggtacaagtaataatcatcattaaaaatagtgtccaagactatataaaccacaaacacaatttagacaaattaatgttggatccttgggttactgtagcatgtgtggcaagatgatcttagtaggagtaacctttgacgaacattccccgagtggcttcctcagattcaccctcggcagtgtactttccaagctgagcgagtgagttggacttggcacggaaaaggagtgcatcttgagcagccttcacgttctcagggagtccaccccatgtcttaagcaggtgttttggagagctctggcgtaggagaaggacacgtgccatgggtttggagactggttcatagcattcaagttcaaggttgcttcaacctcagattgtccgccagacagaaacatgattccagggacagcaggtgggat

SEQ ID NO: 228014 - DNA, 569 bp, Glycine max
gctttagcaatgggcaaaattgttgtttgtgccaaccatccctcaaatgactttttcaagcagttcccaaattgttggacgtacgacgacgatgacggatttgttaaactcacactcaaggcactggctgaacaacctgcccagcctactgatgctcagagacatgacctatcttgggaggccgccacaaaacggtttcttaaggcagctgacttagacaagccgttagagagaaaattgtcaagaacaacttcaaactttctggctgcctccttaaatttgcaagagaaagtagatgaagcatcagcatatgtgcatcatgtagcttctgggtttgaagtatcaagaagaatctttggtgccattccagatagcttgcagccagatgaagagctacgcaaggagcttgggttgactgatgcttccacgaaataaagttaaagaaaaatgatgttggaatgctgtgatgttaattaaaatttgtagagattctatcttctatacatatataactaattagttacccttgcatttgaacggttgtgcttgtgcttacccatgtttacctt

SEQ ID NO: 228015 - DNA, 579 bp, Glycine max
agtagttaatttattgtttttttcactatgatgtacatgttgaagatagcagcaataaaaggtaaacatgggtaaagacaagcacaaccgttcaaatgcaagggtaactaattagttatatatgtatagaagatagaatctctacaaattttaattaacatcacagcattccaacatcatttttctttaactttatttcgtggaagcatcagtcaacccaagctccttgcgtagctcttcatctggctgcaagctatctggaatggcaccaaagattcttcttgatacttcaaacccagaagctacatgatgcacatatgctgatgcttcatctactttctcttgcaaatttaaggaggcagccagaaagtttgaagttgttcttgacaattttctctctaacggcttgtctaagtcagctgccttaagaaaccgttttgtggcggcctcccaagataggtcatgtctctgagcatcaataggctgggcaggttgttcagccagtgccttgagtgtgagtttaacaaatccgtcatcgtcgtcgtacgtcccacaatttgggaactgctttgaaaagtc

SEQ ID NO: 228016 - DNA, 351 bp, Glycine max
ataagtttgatctcatgtatgctaagagggcattcgtgcactggtatgtgggtgaaggtatggaagagggtgagttctcggaggctcgtgaggaccttgctgctcttgagaaggattatgaggaggttggtgccgagtctggtgatggagatgatgatggtgaaggagatgatgattattagagtgtgtcaaatatctcctatatcgtgtttgatgattagagtgtgtcaaatatctcctatatcgtgtttgatgatgtgcactttttcgttttcttttggacaaagttttatcatgtgtggtttttgaatgatgattgttaatcaatatatgtgctatgtaagtttctat

SEQ ID NO: 228017 - DNA, 349 bp, Glycine max
ataaacttatatagcacatatattgattaacaatcatcattcaaaaaccacacatgataaaactttgtccaaaagaaaacgaaaaagtgcacatcatcaaacacgatataggagatatttgacacactctaatcatcaaacacgatataggagatatttgacacactctaataatcatcatctccttcaccatcatcatctccatcaccagactcggcaccaacctcctcataatccttctcaagagcagcaaggtcctcacgagcctccgagaactcaccctcttccataccttcacccacataccagtgcacgaatgccctcttagcatacatgagatcaaacttat

SEQ ID NO: 228018 - DNA, 519 bp, Glycine max
ttcaggtactgcgtttcggaagcagacacagatggctcgtacgaagcaaaccgctcgtaagtccacaggaggaaaggctcctaggaagcagcttgcaaccaaggctgcacgtaagtctgcaccaactactggtggtgtgaagaagccccaccgttatcgtcctggtaccgttgctcttcgtgagattaggaaataccagaagagtaccgagcttttgatccggaagctccccttccagaggctggttcgtgaaattgctcaggacttcaagactgatctgcgtttccagagccacgccgtgcttgcattgcaagaagctgctgaggcataccttgttgggctctttgaggacactaacctgtgtgccattcacgcaagcgtgtaaccattatgcccaaggatattcagctggcaagaaggattcgtggtgagcgtgcttgagttggtggttggaaagatgaagatgattggtggctgccgttggtgtttttgtttttcagattcccttttttattcaat

SEQ ID NO: 228019 - DNA, 441 bp, Glycine max
agatggcaactgaatgttgtccaatacagtttctaaagtggctgcaacatcccgcaggtaaaaactaaaacagaagcattctaacacatacatatgtccaaaaatcaattacaagccaattttcttaaaggaagaaaacacagtcacggacacttagcagtatttgcctatatcccaattaatgctactaccagcagaaaacctaccctccctaacaaccccatctattgaataaaaaaaggaatctgaaaaacaaaaacaccaaccgcagccaccaatcatcttcatctttccaaccaccaactcaagcacgctcaccacgaatccttcttgccagctgaatatccttgggcataatggttacacgcttggcgtgaatggcacacaggttagtgtcctcaaagagcccaacaaggtatgcctcagcagcttcttgcaatg

SEQ ID NO: 228020 - DNA, 520 bp, Glycine max
attgacgctgacatgaacaatagagggaaggggcgtctgaagtatctcttgcagcagactgagctgtttgctcattttgcaaaaggggatcaatcttcgtctcagaagaagtcaaggggaaggggtcgccatgcatccaatttcaccgaggaagaagaaggatgaagaatacctaaagggagaagaagatggtctagcaaacacacgtctggtgacacaaccatcatgtatccaagggaaaatgagggattaccagctggctggactaaactggctcatacgattgtatgagaatggaataaatggaattctggctgatgaaatggggcttggtaaaacattgcaaactatatccttattaggttatttgcacgagttccgaggaatcaaaggtcctcatatggtggttgctccaaaatctactcttggaaattggatgaatgagattcggcgcttttgtccctgtcttcgtgcaatcaagtttcttggcaaccccgatgaaaggagacatatcagagat

SEQ ID NO: 228021 - DNA, 506 bp, Glycine max
aataatataaataatcaagctcaaccctgtggtatggtctatccagtgaacgaattttactaacaatgtgaattttcacaactctgcaagtaccttgtgcggttgtgcctagaactaagcatacttgaaacgacttctttgttgtctggaacatcttgtgattgtacggtagataaaaactctaatccagatccagagtcttcttcaaactttcatagaccacataagtaatgcttgcagctggcacaactttgaggagatttggaaagagtcccttgtagaaacctataaagccttcaagctgaaaagttctccgaaaggcatcaaacattcccttgtaagcatcggaagtgttggaaggttgtgcctgcagtcttgttcgaataacctgcaatggatagacacaagtagctccaacagccccagaaattgtcccacatcctagttgtactaaaggaccaggttcactatcctgaagaatatatctcttggatatatctttcatg

SEQ ID NO: 228022 - DNA, 432 bp, Glycine max
aattcttgccaactcattataccactagcattaaaaggggtaaaacggggggaaattgtataccaggtactcccactaaaaacagcacaaaagataggagattatcaggcatgcatttctcaagcactcaaacatctttcttcgcaacactgcagatcccgtgacttttgatactcacaagattattacactgcaatcaaagcattccagtccaggtcgatgcaaaaacttgtacagaagccaatgaaatatgcacgataacaagacattaagcaaagattagagaccctgttcaatgagataatcaccaagcctttcacctaccatgttgcattgacctggagtcattggttcataataaatgccaatgaacaaggccgcaccggtcttctttacagtaacaccaccaggacccttcttccctcgaatgac

SEQ ID NO: 228023 - DNA, 516 bp, Glycine max
  unsure (1)..(516): unsure at all n locations
aatatccattgcacctttctcttcctccgatggctaatctctcactcttgttcttcggtctcctcctattctccgctgccgtagccaccgtcgaacgaatcgacgatgaagacaaccttctgatccgtcaagtggtgccggacgcggaggaccaccacctgctcaacgcggagcaccacttctccgccttcaagacaaagttcgccaagacctacgccacgcaggaggagcacgaccaccgcttccgtatcttcaagaacaacttgctccgcgccaagtcgcaccagaaattggacccctccgccgtccacggcgtcaccaggttctccgatctcactccgtctgagtttcgcggccagttcctcggcctgaagccgctccgccttccctccgacgctcagaaggctccgatccttccgaccagcgaccttnctaccgatttcgattggcgcgaccatggagctgttaccggcgtcaagattcagggctcgtgcggatccgtgtggtcatttagcg

SEQ ID NO: 228024 - DNA, 499 bp, Glycine max
atgtgggatttcaaattaattttattcagggtacttgcaataactatcgataaccgtgggtaatatttgtagctagactagctagcatagagaattacagcataaaagcataaacatgggcttagcagtttcctcctccataacattatacatcatgtaaattatttacatacacactatactggtgcccctaccatgtttaggcatccatccttatatttaatggttagaaacatgtatagcagctacagttgagaccatcgagtccaccccacatacattgcgacctctgcagatcttgtaatatccttcttctccccagctctccccccatgaattctttatgatccagtaaggcttttccttaaaacgaattggagcataagcaccagatccatagcccaccaaaagaaccccatgatccaaatgcttgccgcagatgtatgggcatgagacgccaccaatatatgtctgcataaaaactgcattgataccaact

SEQ ID NO: 228025 - DNA, 574 bp, Glycine max
gtcgactctctcgatttactactccttaatggccctgcactattagttgatgttccaagagatacaaacatcagtgctggtgttatgaagtcattgaatattccgaggggcgtacgtcgtgtgctcttccgaacattaaatacttacaggcggcttatgtatcagaaggaatttgacacatgctatgtgggattcacagaagatggagcaaattggctagtggagaacactgacattaagcttgtgggaatagattatctatctgttgctgcttacgaccacttgattccagctcaccttgtttttctgaaaggcagggaaatcattctcgtggaaggcctgaagcttgatgatgtggcagcaggaatatatacggtccattgcttacctcttaggttggctggtgctgaaggatcacccataagatgcattctcatcaaataataagtcaacagctagcagtccaaatgccgacacgacatgcagcagtggtttatgcttggaaactgggtctaattacgagcataaggttgagtttcatgtagttttcttaaatacgaataagttggaaaat

SEQ ID NO: 228026 - DNA, 470 bp, Glycine max
acgcaagaataattgctatttgacatttggtataccttcactgcatattacatagtactttatatatcatccaatatccatactgctttatttctgaaatgatttggaggagcgtttatgcactttgctaagcatttatgataccttgctccaaatggacacgggacaccactttatatttatttttccaacttattcgtatttaagaaaactacattgaaactcaaccttatgctcgtaattaaaacccatttccaagcataaaccactgctgcatgtcgtgtcggcatttggactgctagctgttgacttattatttgatgagaatgcatcttatgggtgatccctcagcaccagccaacctaagaggtaagcaatggaccgtatatattcctgctgccacatcatcaagcttcaagccttccacgagaatgatttccctgcctttcagaaaaacaaggtgagctgga

SEQ ID NO: 228027 - DNA, 511 bp, Glycine max
gtcgactctctcgatttactactccttaatggccctgcactattagttgatgttccaagagatacaaacatcagtgctggtgttatgaagtcattgaatattccgaggggcgtacgtcgtgtgctcttccgaacattaaatacttacaggcggcttatgtatcataaggaatctgacacaagctatgtgggattcacagaagatggagcaaattggctagtggagaacactgacattaagcttgtgggaatagatgatctatctgttgctgcttacgaccacttgattccagctcaccttgattttctgaaaggcagggaaatcattctcgcggaaggcctgaagcttgatgatgtggcaccaggaatatatacggtacattgcttacctcttaggttggctggtgctgacggatcacccataagatgcattctcatcaaataataagtcaacagctagcagtgcatatgccgacacgacatgcaacaatgggttatgcttggaaatgggt

SEQ ID NO: 228028 - DNA, 535 bp, Glycine max
gcagagtgactcgtaccgggcaaccggatgttacaaccttctttgtgctggctttattcaaaccaatagcagaatagccattggagctgccatttctcctgtctcttcttatgatggcaaccaatatgacatcacaatcctcatttggaaggatccaaaagtggggaattggtggatgagttttggtgacaacacattggtagggtattggcccgcagagctattcacacacttagcagaccacgccacgatggtggagtggggaggagaaggttgtgaactcacgaaccaacggccaacacacctttacccaaatgggctctgggcacttcgcagaagatggtttcggaaaagcaagctacttccggaaccttcagaccgtagacacggataacaatctgagttctgtgcagggcatctcaaccttagccgaaaatacaaactgttacgacattaagagctactacagcaacgaatgttgcacctacttctactacggtgggcctgggaacactccacagtgcccatgattata

SEQ ID NO: 228029 - DNA, 487 bp, Glycine max
gaaactgaagtaaatctgatatatacgttatagacgtttataatcatgggcactgtggattgttcccaggcccaccgtagtagaagtaggtgccccattcgttgctgtagtagctcttaatgtcgtaacagtttgtattttcggctaaggttgagatgccctgcacagaactcagattgttatccgtgtctacggtctgaaggttccggaagtagcttgcttttccgaaaccatcttctgcgaagtgcccagagcccatttgggtaaaggtgtgttggccgttggttcgtgagttcacaacctctcctccccactccaccatcgtggcgtggtctgctaagtgtgtgaatagctctgcgggccaataccctaccaatgtgttgtcaccaaaactcatccaccaattccccacttttggatccttccaatgaggattgtgatgtcatattggttgccatcataagaagagacaggagaaatggcagct

SEQ ID NO: 228030 - DNA, 545 bp, Glycine max
cttaagcatgtatattgaaattctcgatatagatgctcatagttatttgcacaaaactggtaaaattccagatcaataaggattgcggcgaagccgcaaagatacaacattcattagggaaaacaggagtggggaaaaataaggggggaggggttgaggaagaatcaattgctcacagagcatgctaagacacctaaatattccacacacagttattgaaacaacccaatatagagaaaatttttctttggtgtattataatataaagcagaaccaaatgacttggaagattctactttcttataccattcacttggcaagttcgttgcggatgagttttgctgcggcaaccatgtttgtgagggctggcttcacctcagtgtacttacgggtcttgagcccacagtcagggttcacccacaagatgttcttctcgagcactgccagcatcttgttgattctgtcagcaatttcttcagttggtggtattcttggggagtggatgtcatagacaccagggccaattccagcaccatacttcacac

SEQ ID NO: 228031 - DNA, 507 bp, Glycine max
acttaacaacagcacaaagcgggttactgtctgttcaagctaccatctctctctctctttcttagtgcctccttgccagaagttaaaatggcccaagaaactttcctattcacatctgaatcagtgaacgaggggcaccctgacaagctctgtgaccagatctccgatgctgtgctcgatgcatgcttggagcaggaccctgacagcaaggttgcctgtgaaacctgcaccaagaccaacatggtgatggttttcggagagatcacaaccaaggccaacgtggactatgagaagattgtgcgtgacacatgcaggaacattggttttgtctctgatgatgttggtcttgatgctgacaactgcaaggtcctcgtcaacattgagcaacagagtcctgatattgctcaaggtgtgcacggccacctcacaaagaggcctgaggagattggtgctggtgaccaaggtcatatgttcggctatgccactgacgagactgccgagctcatg

SEQ ID NO: 228032 - DNA, 441 bp, Glycine max
ctgcaattcacatagtaaaaggggatactctctataatttgagattattacatatttctagcataaatcttgagagaacatttttttttgtttcatcatataaaatatatatgttctgaaagaacacatacaagtacacaaaaaaaagggggaaattcataaaaaaatacagaaaaaaaaaaaaacagaattgagtaagagggaaggaaacatagagaaaattttagcaatcagataataagaagccagtagtagtgcaaaagtcccttgccaagagtgttggaaccccttttagttaagcaggtaccttctcccccttgagtggcttcaccacttcccatgtgaagtcagggtcatctctgccaaagtgtccatatgcagcagtcttcaagaacctgccatttccaccccttttgagatcaaggttgatggagatcatgc

SEQ ID NO: 228033 - DNA, 523 bp, Glycine max
gttataacaagcaccaaccacaacgacttttcttggtctctacttcgcatttccgttctttgcttttctcgggctacgaaaaacgacgtcgttttcccaattttccccggcgaccgggaaatggtggagccggtggagcttcgcggcgaggagcagctctcgttgctgtcagattccagcaatggtgaccggtcgtggcggttgaacttcgacgggtttcagctatcttcggagcacacggagaagcaagtgaaaccccctcgcggactccatgactgttatggggttcttggtcaagaagataatattgcggagtactatcagcagcaggtagaagtgcttgagggctttactgaaatggatgctttagcagagcgtggttttattcctggaatgtcaaaggaggagcaagacaagttagcaagaagtgagactgttgccattagagtgtcaaacgcagcaaacatgggttcttttgttgccaaagtttatgcatcagtcagaagtggttccctagccatca

SEQ ID NO: 228034 - DNA, 525 bp, Glycine max
gccatttgggagttaggttctgcacgctctgcttccagcgagtgttctttcttcgtttcaacaccttaatttgcacacgctgcttcttcagcttgagaaatggcacaagaaacctttctattcacatctgaatctgtaaacgagggtcaccccgacaagctgtgcgaccagatctctgatgcagtgctcgatgcgtgccttgaacaggaccctgacagcaaggttgcctgtgagacatgcaccaagaccaacatggtcatggtctttggagagatcacaaccaaggccaacgtagactatgagaagattgtccgtgacacatgccgcgaaattggattcatctctgatgatgttggtcttgatgctgacaaatgcaaggtgttggtcaacattgagcagcagagccctgatatcgcccagggtgtgcacggtcacttcaccaagcgcccagaggaggttggtgctggtgaccagggtcacatgtttggctatgccactgatgaaacccctgagtacatgcccctc

SEQ ID NO: 228035 - DNA, 610 bp, Glycine max
  unsure (1)..(610): unsure at all n locations
tgcttccatcatgccagcagtaacgaagatatggaagcaagatggtctgttaggatttttccgaggtaatggattgaatgttgtgaaggtatcaccagaaagtgccatcaaattttatgcttttgaaatgctgaaaaaagttattggagaagcccacggcaacaagtcagatattggtacagctggtaggcttgttgcaggtggtacggctggtgcaattgcacaggctgctatctatccaatggatctcattaaaactaggttacagacttgtccctctgaaggtggaaaggttcctaagctgggaacacttacaatgaatatatgggttcaagagggacctcgagctttctacagagggcttgttccatctctgcttggcatgattccttatgctgccattgatctcactgcttatgataccatgaaagatatatccaagagatatattcttcaggatagtgaacctggtcctctagtacaactaggatgtgggacaatttctggngctgttggagctacttgtgtctatccattgcangttattcgaacaagactgcangcacaacctttcaacactttcgatgctttacagggaatgtttgatgcc

SEQ ID NO: 228036 - DNA, 371 bp, Glycine max
caaatctgttttcatccttctcatcatcaaaatcatataactcggcagtgtcatccatcttaaatttgatggcatcttcagtaaatttcttcatcttggcatctagctcagcagttgcctcctctcctttagcaataattctatcaatatcttcatctgtaattgtactatccttggaactgaaaaccatttcagccccaaatctaaccatttgaagcaattcatctttatttaccgtcttctgctcagccaatcgcccttgctgaatcaccagagcatcaagtgcaagctttttgtaggccctttcaatgactttctcttctattgtatactcagtacaaaatcggaaaacttgaacttctttcttttga

SEQ ID NO: 228037 - DNA, 602 bp, Glycine max
cggatgtgttttcaatagacaagcactttatggctacagtccaccttctatgcccaaattaccaaaatcatcatcctgctgttgctgcccctcaaagaagcaaaccaaagatgtctccgagctttatagagatgcaaagagggaagaacttgatgctgccatttttaatcttagggagattgacaactatgatgaatatgagaggtcaatgctgatttcacaaatgagctttgagaaaacatttggtttgtccactgttttcattgaatctacactgatggagaatggaggacttcctgaatcttctgatccctcgatgctgatcaaagaggccattcatgttattagctgtggttatgaagagaagactgcatggggaaaagagattggttggatctatggttcagttactgaggatatcttaacggggttcaagatgcaatgccgtggatggaggtcagtttactgcatgcccctaaggcctgcattcaaaggatcagcaccaatcaatctttctgatcgattgcaccaaagtcttcgttgggcccttggatcagttgaaattttctttagcagacattgccccctctggtatggttttg

SEQ ID NO: 228038 - DNA, 452 bp, Glycine max
  unsure (1)..(452): unsure at all n locations
cgcttgatctttacacatgaaatttagtccaatgcatggaaaaaacaagtaacaaccatgtttgcaaccatacttttaaaatgtttacacatttcaacaaagaactaatgcggctcaaatcaccatcaatcatcatcatccatatttttaagatatggtcaaaactttttatgtaggcaatgacttagcaatctatagaaatgcaggtctgggaaatgcttgcactgtcaggtctgctgataaaagggttaatcttgacccaaaccagagagaaaacagaagccaacagcactgaccacagaataacaatggttggagtgcggttttggcgacccatgagacccttgaggaatgggtagagatggaaaatgacccagaaggcaaagaagacctttccaaaagtggtccccatgattcatatcctccattgagtgcatcagaaaatncagcaa

SEQ ID NO: 228039 - DNA, 648 bp, Glycine max
  unsure (1)..(648): unsure at all n locations
aaacaatgataaaatcaattgcaacacaacattgaaagatcttgatctaaaatatgagtttcacatggataaaaaattgcgagaatccctactcaagcaaatttccctagattgcaagttcttggagtctcagcatataattgattacagccttctgttgggattacatttccgagctccagagaatatgaaggccttcgtggaacatcatgaatcagtgcagcgtcaggagagtttaccttctggagatgaagggcagctcttgattcttcctaaaggcttgctgttagtttcccatgaaccgagtatagtcaacacggctcctggaccccacattagagggaacacattgagagcatactccatgggtgataatgaagttgatcttctacttcccggtattgcaaggttgcgggtgcagcttggagtaaacatgccagctcaagctactcgcaggcttcaggaggataaggataaggtggaagcaaaagaagtagagctttttgaggtatatgatgttgtcctctacatgggcgtaattgatatattgcagaactattatctgagaaagaaaattgagcatgcatacaaatcgctgcaatttgaccctatgacnatatcagtagttgaacccaagattatgatgac

SEQ ID NO: 228040 - DNA, 576 bp, Glycine max
  unsure (1)..(576): unsure at all n locations
aaaaaaaactttcttccttttatttgaaacaaataattacatagatggattaagccaagaagtgacgtatgggagaaaaataaaatcagggggtcttggggaaaactttttcctctaaaaatttgatgaaacgttcatcataaatcttgggttcaactactgatattgtcatagggtcaaattgcagcgatttgtatgcatgctcaattttctttctcagattatagttctgcaatatatcaattacgcccatgtagaggacaacatcatatacctcaaaaagctctacttcttttgcctccaccttatccttatcctcctgaagcctgcgagtagcttgagctggcatgtttactccaagctgcacccgcaaccttgcaataccgggaagtagaagatcaacttcattatcacccatggagtatgctctcaatgtgttccctctaatgtggggtccaggagccgtgttgactatactcggttcatgggaaactaacagcaagcctttatgaagaatcaagagctgcccttcatctncagaaggtaaactcttctgacgctgcactgattcatgat

SEQ ID NO: 228041 - DNA, 428 bp, Glycine max
cttaagcatgttatttgaaaatctcgatatagatgctcatagttatttgcacaaaactggtaaaattccagatcaataaggattgcggcgaagccgcaaagatacaacattcattagggaaaacaggagtggggaaaaataaggggggaggggttgaggaagaatcaattgctcacagagcatgctaagacacctaaatattccacacacagttattgaaacaacccaatatagagaaaatttttctttggtgtattataatataaagcagaaccaaatgacttggaagattctactttcttataccattcacttggcaagttcgttgcggatgagttttgctgcggcaaccatgtttgtgagggctggcttcacctcagtgtacttacgggtcttgagcccacagtcagggttcacccacaagatgt

SEQ ID NO: 228042 - DNA, 459 bp, Glycine max
ttttttttttttttttttcttttttattatttttttttttttttttttttaatttcaggttttatttggttttttttaaagctattaaccctacccaaacccaacaaaaaaaaaaaaaaacacgatccccaccccccaccctcgccccatacaaccaaaaaaaaaaaaaaaaaaaaaaacaaaaaaaaaaaaaaaaaaaaaaaaaaaaaaaaacaaaaaaaaaaccaaaaaaaaaaaaaaagcccccccccccccccccccccgccccccccacaaccaaaacaacaaccacaaaaaaaataacaaaaaaaaaaaaacccccccccaaccacggggaaagacaaaaaaccaccccacccacccgaaaggcccgggcaccaaaacaaaaaccaaaaccccactgcccccgccgagcaatgccccccgacacccactcccaccctcccccccccccacccc

SEQ ID NO: 228043 - DNA, 600 bp, Glycine max
ggcgtagagaacagcaaagaaagaggaataatggagcaggaagagcacgaagtgtacggtgcagacattcccgacgaggagattgacatggacgcagacgccgagcaacaagatgagcaacttgcccccaatcacacaaacaaggaactggaggacatgaagaagaggctgaaggagatcgaggaggaagctagcgcccttcgcgaaatgcaggccaaggtcgagaaagagatgggcgctgttcaagattcgtcgggcacttccgcaactcaagctgaaaaggaggaagtggatgctcggtcaatctatgttggtaatgatgactatgcatgtacgcctgaagaagtccagcagcattttcagtcctgtggaactgtgaacagggtgacaatactgacagacaaatttggtcaaccaaaagggtttgcttatgtagagtttgttgagattgatgccgtgcagaatgctctcctgttaaatgaatcagaattgcatggtcgacaactgaaggtgtctgccaagcgtacaaatgttcctggaatgaagcaatattttggaagaagacctgctggtttccgatctatgaggcctttcatgtct

SEQ ID NO: 228044 - DNA, 625 bp, Glycine max
  unsure (1)..(625): unsure at all n locations
cacctttctcctaaaacatctccagtgggttcttcttcttctattacaacaacgtcgtccaagaccatgaccatggccatggccacgatcctgctcctgttcacggtcttcgcggtttcatcggccctagacatgtcgataatctcgtacgacaacgcccacgccgccacgtcgcgcagcgacgaggagctgatgtccatgtacgagcagtggctagtaaagcacggcaaggtgtacaacgcgctcggagagaaggagaagaggttccagatcttcaaggacaacctgcgattcatcgacgaccacaactcccaagaggaccgaacctacaagctcggactgaaccggttcgcggatctcaccaacgaggagtacagggccaagtacttgggaaccaagatcgatcccaaccggaggctcggcaagaccccgagcaaccgatacgcgccacgtgtcggcgacaaactacctgaatcggttgattggaggaaggaaggtgctgttcctccagtcaaagaccaaggaagctgtgggagcttgtgggcattctcagcaatcggtgcagtggaagggaataataagatagtgacaggtgaactgatnntcgtatcagaacaagaattgg

SEQ ID NO: 228045 - DNA, 520 bp, Glycine max
agcaaatgtaatagccagaatatcgggcaaatccaaataatgctgcattgtcacatagtctacataacctgggaaactaacagcaatcaaatatgttcgccatttggaattggaatttgaatacaaatacagtgcatcaataatataaccctatgtacacagccaatatctgactgaaatttgatacagaatagtatcaatttgtatcataataaaatggcacagagaaatttatgtgaaggtaaaggggaagtgtatcagctggtgttttaattcttcgtctttcatttacttcatcattggctccttcctgcacgttcacatttcctttatctgcttaagcactgctgaccttgttcttacgcccaaaggtccaatggggtttagccggagtacgcctcaatgccttcactccgaatgggttgttcttgctcttgagacaagttccagcataagtgttgcagatgggatagtcgttaggggcagcactgtagtggtcatcacagcaggtagcaccctc

SEQ ID NO: 228046 - DNA, 589 bp, Glycine max
  unsure (1)..(589): unsure at all n locations
ctcgagccgctctcagaaccctcgatcactcccacgcgctcctatatcctctccttcaccgtcgctctctccaacgatcacaacaacatcgtcatcccatggcaaacgccgcatctggtatggcagtccatgatgactgcaagttaaggtttttggagctgaagacaaagaggacacaccgtttcatagtttttaagattgaggagcagcagaagcaggtcattgtggagaagcttggtgagccagcccaaggctatgaagatttcactgccagccttcctgctgatgagtgccgttatgctgtttatgattttgagtatctgactgaagggaatgtccctaaaagcagaatttttttcattgcatggtcccctgacacatcaagggtgaggagcaagatgatctatgcaagctccaaagacagattcaagagggagctggatggaattcaagtagagctngcagcaactgatcctactgagatgggtcttgatgtgttcaaaagccgggccaactaaaatggatatagaaaatagtaggctttctggtgggagcagcactncttaagcctagttactcatggaaatat

SEQ ID NO: 228047 - DNA, 520 bp, Glycine max
gaagaattcccattttttgtctgataacacaaacagttacaaattcaactagtaagggataagacgactaaaatggcactcaaacgcaaggtcgtataaatcacaaatcataataaaacacactggaacaagcaaagcttgttaaaaggtgcaatagaatttatgccacaacttggaaaattgagagtttgggaccataactacccaagttgaccatcccacaaactaggatattttccatgagtaactaaggcttaaggagtgctgctcccaccagaaagcctactattttctataatcattttagttggcccggcttttgaacacatcaagacccatctcagtaggatcagttgcttgcagctctacttgaattccatccagctccctcttgaatctgtctttggagcttgcatagatcatcttgctcctcaccttgatgtgtcaggggaccatgcaatgaaaaaaattctgcttttaaggacatatcccttagtcagatactcaaatcataaacagc

SEQ ID NO: 228048 - DNA, 575 bp, Glycine max
gatgcgaccataattgtggtcacagagagccccaaaacattaatgttgcggctgaaatcatggtttgtgaattgttttttaaaaccttgcatctgggatcaagtccttttgaggagggattaagtgtttttcttgggatgcttgaattgtttgattggaagttattgaggttcctagttaaacgagtttggtgctttatgttgaaagggatctttgattgctggtgtttataacttttattcattatgcttcagctctgtttgttccttaacactttcacacgtatgtgatcttcaatgggttgttgcagctgatcatatacactaaggagaaaaatgccattctgtttacttatcctcctgttggatcctttactagtaccggtttggtggtttcctccaaattgcctagattttctgacatgtacacactcactatagccagcgcagatccaaaatcaatttctgcaaatgaaccagtacatttcaccaaagtgtcactcagtggttcactaaggactgaatcttagttgagggcctgttctggaaggatgttgaagctttgatagttcaata

SEQ ID NO: 228049 - DNA, 467 bp, Glycine max
atagtgctgaaaagctggtgaaagcgtgattccctcagttctatttttaaatgtctaagtatagaattataaaccatatcaagatatatgttttctcatccaaaaagtttcccgcagaaccaaagttcatgtctccatattacttgcccttctttggttctttagtatattgaactatcaaagcttcaacatccttccagaacaggccctcaactaagattccgtccttagtgaaccactgagtgacacttttggtgaaatgtactggttcatttgcagaaattgattttggatctgcgctggctatagtgagtgtgtacatgtcagaaaatctaggcaatttggaggaaaccaccaaaccggtactagtaaaggatccaacaggaggataagtaaacagaatggcatttttctccttagtgtatatgatcagctgcaacaacccattgaagatcacatacgtgtga

SEQ ID NO: 228050 - DNA, 324 bp, Glycine max
gtacctggactaggaattgtttcccatcgggctgaatatgtaccacatgggggttgacgaccatgagattgagcaagatcgtatactgattcaaaatgccgatcgaagtgtggacaagcttgtcatagatggtatcatgttccttgttcatgggtgggcgctagtggtaacttcttagatgtgcttgaaaaatggcgtggtgaccctaatggattttgaggacactttccaggtcaaacaaattacgctatggaggttcacccaggatatggtgctagtgctaataatcattacgtggagccagggtacgtgaaccaaggttat

SEQ ID NO: 228051 - DNA, 550 bp, Glycine max
  unsure (1)..(550): unsure at all n locations
ctcttgacatcgaacgccctacctacaccaacctgaaccgtctcgtttcccaggtgatatcatccctcactgcctctttgaggtttgatggagcactgaatgttgatgtgactgagtttcaaaccaacttggttccttacccaaggatccatttcatgctttcctcgtatgcccctgttatctctgccgagaaagcataccatgagcagctttccgttgctgagatcaccaacagtgccttcgagccatcctccatgatggcaaagtgtgaccctcgccacggcaagtacatggcgtgttgtttgatgtaccggggcgatgtcgtgcccaaggatgtgaatgctgctgtggccaccatcaagaccaagagaaccctccagttgtggattggtgcccactgggttcaagtgtggtataaactatcagcctcctactgttgttcctggaggtgaccttgccaaggtgcagagggctgtgtgcatgatttcgaactcactagtgtggctgaagtgttctccaggattgatcatanagttgacctcatgtatgc

SEQ ID NO: 228052 - DNA, 386 bp, Glycine max
cctcggggaattccaattccacattttcaagaaataaggaggcaaaaatgttcatatatgaattggaattatttgttttcttattaggcctatcctgaagccaaaggaaatgagatcggaattcctgggggaattgcaatttcacattttcaagaaataaggaggcaaaaatgttcatatatgaattggaattatttgttatcttattaggcctatcctgaagccaaaggaaatgagatcggaattcctcggggaatttcaattgcacattttcaagacataaggaggcaaaaatgttcatatatgaattggaatcatttggtcacctattaggcctatcctgaagccaaaggaaatgagatcggaattcctagggggtaccgagc

SEQ ID NO: 228053 - DNA, 589 bp, Glycine max
  unsure (1)..(589): unsure at all n locations
attaattgcaagaatggcacttcgttgcttggtgatgtccctttctgttctcttcactcttggtcttgcgagagaaagccatgccagagacgaagatttttggcatgctgtttggccaaacactcccattccaagttcattgcgagatcttctaaagcctggccctgcaagtgttgaaatcgatgatcaccctatgcaaattgaagaaacacagtacccgaaaaccttcttctataaagaagaccttcatccaggcaaaacaatgaaagtacaattcagcaagcctccctttcaacaaccatggggtgttggtacatggttaaaggaaattaaagacactactaaagaaggatatagttctgaagagctatgcatcaagaaagaagccattgagggagaagagaagttttgtgcaaaatccttgggaacagtaattggttttgccatttcaaagctgggaaagaacattcaagtactttcaagttcctttgtcaataagcaagaccaatacactgtggaaggagtgcagaatcttggagacanagcagtgatgtgtcataggctaaatttcagaactgcagtattttac

SEQ ID NO: 228054 - DNA, 471 bp, Glycine max
gagagagagaatacgaagcacactgtggacaggatgatgctctctttaagtagggaagcagatcttatcagtacacataggtaggttgaaattctagctctagcaatctagctagagaaggtagtacttgcacaacacacagcacatgataatttattttatacacaatctcattctcatggtgctcaagatgcatggactaattaagcaacaatgttggtctgataggcagtgtccacagataaattgggtacccataaaatggccttgcttccaaggaaatggcaaacagggttagttccaggatcaactcccataagttgatgaagcatttgatgattcattccagaagtatttgagtggcaaatagcaagtgcctgagttttggttccatcaccagccaccaatggaaccatgaaagctgttgtttcacggacttcatggccagtaaatactgcagttctgaaattt

SEQ ID NO: 228055 - DNA, 571 bp, Glycine max
  unsure (1)..(571): unsure at all n locations
gctttcctttgatctattctattcttcaatatcttagggttccgacagattccccatcaattcaaccacttgccgtgttagttgatccattcttataaaaagatcaaagactcattatttatagccaaaggccttctgggtcgtcgtgaatctatcttgtgtttgagagattaagacaaaactttttgctttgcaaatggctgctgcaactgctgcaactgcttcttggatgcgattcaaaggcggcaaggaaaggaagctaaccaagatgaataaatccaggattaattgctcttattcttcttcttcttctgtgatagatccttacaagaccttaagaataaaacgaggtgcctctgaatctgaggttaggaaggctttcagacagctcgctctgcagtaccatccagatgtgtgcagagggagcaattgtggngtgcagtttcacgaaatcaacgaggcttatgatgttgtgatgtccaaattgagaggagaatcaaatgaggcagaatcgtatgaggcttattatgatgctggaggcatcgatgagccactgaggggaatgaacgat

SEQ ID NO: 228056 - DNA, 530 bp, Glycine max
gtctcatgtacagaggtgacgtagtgcctaaagatgttaatgcagctgttggaattatcaagaccaagcgcactattcaatttgttgactggtgccccaccgggttcaagtgtggaatcaattaccagcctccgactgttgttccaggtggcgatcttgccaaggttcagagggccgtgtgcatgatctccaattccaccagtgttgttgaggtcttctctcgcatcgaccacaaatttgacctcatgtatgccaagagggcgttcgttcattggtatgttggtgagggtatggaagaaggggagttctctgaggcccgtgaagatcttgctgccctggagaaggattatgaggaagttggtgcagaggcaactgaagatggtgatgaaggagaggattatgattagaagtttgcactattatgttactttctgtgttgtttatcttctcgtgctctgtgtatcgatgtactttccgtggaacttgccttgttccagtacttatggagctttatgtgaagtgtggtgaaa

SEQ ID NO: 228057 - DNA, 440 bp, Glycine max
ggaaaaaagggttccctaagtttaatacatttaaaactttaaattacaccaagcaatttcaaataaatgttttcaccacacttcacataaagctccaaaagtaccggaacaaggcaagttccccggaaagtccaacgatacccagagcccgggaagaaaaaccccccagaaagttaccttattgggcaaacttctaaacataatcctctccttcatcaccattttcagttgcctttgcaccaacttccttataatccttttccagggcagcaagatcttcacgggcctcaaaaaactcccctttttccatacccttaccaacataccaatgaacgaacgcccttttggcatacatgagggcaaatttggggccgatgccagagaagaccccaacaacactggtggaattggagaacatgcacacggccctctgaaccttg

SEQ ID NO: 228058 - DNA, 589 bp, Glycine max
  unsure (1)..(589): unsure at all n locations
catgcacaccggtccctttgagtttgtttccaattattgcaagagcaagaagtggccttttccttaccttcaattaagcaaacatgaagcaaaaaatagttatcaagctgcaaatggactgcgacaaatgcagaaacaaagccctaaaaattgcagcagaagtacgaggtgtaactacggtgtccctggaaggggacgacaatgatcgcgtggcggtgagcggtgtgaacgtggacatggtttgcttggccaaccagctgaagaagaagttcagctccgtgacgattctcaccgtggtagacctagttaaagaggaggaggcgaagaagaagaaggacgaggaggagaagaagaagaaggaagaggccgagaagaagaggaaggaagaggaagaaaggttgaagaagatgctgcgttccgttctttgcaaaagtgtaaaagctccagttgccatggacatgtatgagtaagactacttcttggagtattattgcaacatgcaataatacctttcatacaattggattataaaacattngaacattaatcagtatattctaacgaagtgtgtggatcgatcctttttctt

SEQ ID NO: 228059 - DNA, 537 bp, Glycine max
  unsure (1)..(537): unsure at all n locations
gaccccttggattctacatctcgtatgctttccccccttattttgggtgcggatcactatgaaactgctcgtggtgtacagaaagtacttcagaactacaagaatcttcaagatatcattgctattttgggaatggatgagctcagtgaagatgataaattgactgttgcccgtgcccgtaagattcagcgattcttaagccagcctttccatgttgcagaagtcttcactggtgccccaggaaaatatgttgagttgaaggagaacatcaccagtttccagggtgtgttggatggcaaatacgatgacctcccagagcagtcgttttacatggttggcggtattgaagaggtcattgctaaggctgagaaaattgctaaggaatctgcagcgtcttaattacatacaacagccatgttctcattttaatcctttttttgtaattgctaaatttaataatttaggaactcttggcaatgccaaacgacaaaattttcaatnttttgggtatgaaaatgtgtcaggttattcccttcc

SEQ ID NO: 228060 - DNA, 590 bp, Glycine max
  unsure (1)..(590): unsure at all n locations
atcacactttctagatagctagccaaccagagtaagatctaaagatatttcttatatatcctatggtccgagagtgcccttgttctgcgccaaccctttcttccacatcttgcgtttcaacctcttcctctcttgagtccccttatcatcaaatacccttcttcttcaacctccaccaaattcaacccccacataacaaatctcctcccatcccatttttcagcaccaaagtttgaaacttttctcaattgggttgtagagagtttgactcatcaatttttatttttttatttttattttctctaaccaagtagaagtgcaataattaaatgtccaacatcttcttgttgttgatgtttgagattcatgtatccgattctcagtgaaatcttctttccgggtgtatgatcaattccactgttaggcgcaggacccatttagttcaatccttctcagttgccttcctctattggttgtactacgtttcatgatttctaacccttccttagcttaataatcatctatctaaaatatcataatatcttctactagctagttntatttttattatcacantanaatctatctgc

SEQ ID NO: 228061 - DNA, 595 bp, Glycine max
  unsure (1)..(595): unsure at all n locations
gcagaaggccctgaaaacagtttcaacactttcaggtgccaaatcattgttcaccctttttctttctaaatattctatgatatctaaatttctggtttgggaatgcccaaatctggagaatgtcaccaaattttaagatctggtgaagaagagtgatagttaacctgattgctgacgcaacctccaatcattgtcacgtgacattggagcagagatctatatatatagttattttcacgagtttaatttaattatttttgtccagtaaaatattttagcactattttttaaatcatattatataatcttataatcttattgcagaattacaatttttttaatagttatcatgattgtgatattcaaacttgttgaatgtgtttcgtacatgatgatgtgataagagtataaaaaaattactctcaaatgagtgaaacaatgttattgtaattattatattagatgcaaccatattaaatatttgggccattttgttacagagtactatgtcgtgtctttgtttagggatgaagacataccaaatgcgttataattaattatgatattttctaatnttttattctataataattga

SEQ ID NO: 228062 - DNA, 553 bp, Glycine max
ctgctttgcttcaccaccccccttgcttgcgtgggtagaaatgcaagaagcagggctgggaatgggaatgggaatgatgagcggagaagtatccgccgccggggaccaccaccgtcaagtgaaggcggagatagccaaccacccactctatgaacagcttctatctgcacacgtgtcatgcctccgcgtcgccacacctatcgatcagttgccgctcatcgacggacagttatcgcagtcccaccatctcctccgctcttatgcctcacaccattcccattccctctcgccccatgaccgacaagaacttgacaacttcatggcacaatatttgattgtgttatgtacgttcaaagagcagcttcagcaacatgtgagggtgcatgccgtggaggctgtgatggcctgccgtgatattgaaagtaccttgcaagctctgacaggagtcagtttgggagaaggaacaggtgcaacaatgtcagatgatgaagatgatttgcagatggatggctctttagatcagtctaacgctgacgggcatgacatgatggga

SEQ ID NO: 228063 - DNA, 604 bp, Glycine max
  unsure (1)..(604): unsure at all n locations
cacggctatggttgctggagtgaagttccagagaaagctgggcttcaaaggtgtggtaagagttgtcgcctgagatggattaattatttgaggcctgatattagaagaggcaggtttacacctgaagaggagaagttaattataagtcttcacggggtcgttggcaacagatgggctcacattgcaagccacttaccaggtagaactgacaacgaaataaagaactactggaattcttggatcaaaaagaaaattagaaagccttcttcggtgacttcatcaatgaccactacacaaagtgttgatcatcaccacccccagttcaattataattccaatcaactagatcactatggccaccaagaaaatttaacagcaaagccaccgatgcaagaaaccttattttccncgacgtgccccctatttatgtttgacactagttcattagatcaagggacaacaacagtagacaccaccaccaatgtacgaacagaattgttccaagattcattgggtttgagcagtactgaaacgtggaacttgagccaccatcaagtccatgttcttncttctcaactagcagcaacttttacagcagcaacag

SEQ ID NO: 228064 - DNA, 533 bp, Glycine max
  unsure (1)..(533): unsure at all n locations
gtgtgcttaaaccctagcccctcttctcttcattcttcactcaggaaacaagcataatggccttctgtaataaggttggaaatgtcttgaggcagggtgctgctcgcagcacacaagcacctgtttcatccatgcttaattacattcgctgcatgtcttcaagcaagctttttattggaggcctttcatatggagttgacgatcagtctcttaaggatgcattttctggctttggagatgtggttgatgcaaaagttataactgacagagactctggaagatcaaggggatttggatttgtcaacttctccaatgatgagtctgcaagttcggcactctctgcaatggatgggaaggatctagatgggcgaagcattagggtatcctatgcaaatgatagaccttctggacctcaatctggcggcggggcngtggtggttatcgcatgggggttttggcgcgggtggtgattttgcttctcgaatggtggttggtgattaattnntgtgtctctgcttagtttgagatatttt

SEQ ID NO: 228065 - DNA, 612 bp, Glycine max
  unsure (1)..(612): unsure at all n locations
gggatgagtatgtttggggaggcgcatggatgtactttgcaactggaaattcatcgtaccttaagcttgctactgctcctggcctggccaagcatgctggtgccttctggggaggccctgattatggggtactcagctgggataacaagcttgctggtgctcaggttcttctgagtcgtttgaggttgttcttgagtcctgggtatccatatgaagaaattttgaggacctttcacaatcagacaagcataatcatgtgctcctatctaccagttttcacaagctttaacagaaccaaaggtggcttgattcaattaaaccatggtaggcctcagcctctccaatatgtggtcaatgcggcctttttggctgccctatatagtgattatcttgatgctgctgatacacctgnatggtattgtggacctaatttcttttcaaccgacgtgctccgtagctttgccaagtcccagattgattacatccttggaaataacccaaggaaaatgangtatgtcgtaggttttggtaatcattacccaaaacacgtncaccatagaggagcatctgtaccgaagaacaagatcaagtatagctgtaaaggtggatgga

SEQ ID NO: 228066 - DNA, 537 bp, Glycine max
gggtaaaactgtgaaggcattttatgaaactgtcaaacaattacaagctgttcagtttttcatgtttaaagaatacaagatttgatttagatacatatatactatatgagtatcacaaaaaatttaaagagacacactctcaagtaccactttatcaattcttaatgctaatcttgagtcgatcattggccccaggcagctatattcagtggccaagctccacttctccaagcttttttttcttcaaaattaccctgatcttcaagttgatacaaaacaacgaaggttaacggtgcactcatatcatctggggtacttgctagaaagaaataaccaatggcacgatgagcttatggtttccatggcgctggaggtggtggcggtgtacgaaacattgggggaacagcagagaaaatggtatttttgtcaatagatgtgcctttgtcgcctgacaatgccactagtgcagcaactaaaccggcattttcagcaagtggtggctctgtgtaattgtaggttgtacgaacatcatggaag

SEQ ID NO: 228067 - DNA, 561 bp, Glycine max
ggcgaagcgaaacgctgtcgttgcgccaatcgcggcgttgttgttggtggtgctactcgcggcgagtgtggtggtggaggctcaggagaactcggacgtgaagacgctggtgaagcacatgcacgggaagaagtactgcgacaaaggatgggaatgtaagggctggtcaatttactgttgtaacctcactattactgattatttccagacctaccagttcgagaatctcttctccaagcggaactcgccggtggcgcacgccgtcggattttgggactaccactcgttcatcgccgctgccgcgcttttcgagccgcaagggttcggcaccaccgggaacaagacgatgcagatgatggagattgcggcgttcctcggacacgtcggcagcaagacctcttgtggttatggagtggctaccggaggacctttggcctggggtctttgttacaaccatgaaatgagtcctatgcagtcatactgtgatgactacttcaaactcacatacccctgtacacctggtgctgagtactatggtcgtggagctattcccattttctg

SEQ ID NO: 228068 - DNA, 517 bp, Glycine max
cttcacactgctgttgatctagttaacgagaccaagttggatgatgagatcaagtcatggctagcttttgctgcccaaaaaattgttgaagttaacgcattggctaaagcattgtctggccacaaggatgaggccttcttctctggtaatgctgctgctctggcttcaaggaagtcttctccaagagtgaccaacgaggctgttcagaaggctgctgctgcattgaagggttcagatcatcgccgtgcaacaaatgtcagtgccagactggattctcaacaaaagaagctcaaccttccaatcctgccaaccaccactattggatccttccctcagactgtagaactgaggagggtacgccgtgaattcaaggctaacaagatctccgaggaagagtatgtaaagtcaattaaggaggaaattcgcaaagttgttgagcttcaagaagagcttgatattgatgttcttgttcatggagaaccagagagaaatgatatggctgagtacttcggtgaac

SEQ ID NO: 228069 - DNA, 547 bp, Glycine max
  unsure (1)..(547): unsure at all n locations
ctttctccgagaacaaaaaaaaaaacgtgattcgctcttctcttcgaataaaccacaaaaccaacaaacgagaagaggagtgagagaagatggggttgtcgttcacgaagctgttcagcaggttgtttgcgaagaaggaaatgaggattctgatggtaggtctcgatgctgctggtaagacaaccatcttgtacaagctcaagcttggagaaatcgtcaccaccatccccaccatcggatttaatgttgagactgtggagtacaagaacatcagcttcactgtgtgggatgttggtggtcaggacaagatccgtcctctgtggaggcattatttccagaacactcagggtctcatttttgtggttgatagcaatgatagggatcgagtggttgaggcaagggatgagttgcacaggatgttgaatgaggatgaacttagagatgcntgtttgcttgtttttgccaacaagcaagatcttcctaatgcaatgaatgctgcagaaataactgacaagcttggacttcattcactccgtcaacgccactg

SEQ ID NO: 228070 - DNA, 478 bp, Glycine max
ggaacaggggactcttggcccaagagcaaaaactggcgcaattttctaatcctcattcaactatcatcaccaacaagcactccaagaacaaaacgcacggaaatattcaaccaaaaatcaaactaacaaaatgaacacaaacaaggcacgcacaagagggtccaagagttccaattatagctaaaagtattagctaatttaagcaatcatacaaacccaagttacacaaaagaagagaatacttctagcaagcattctgctattacaacattgacaagaaaggataagcatctttctccaagaaccgccatactcagcaggaaatcaccagacaagaccaaaaattttcaaatgtctcatgccttgctggcaatgttgttagaaagccagtccaaaccctcatagagaccctctccagaagttgcacaagtgctttggatataccagtggcgttgacggagtgaatgaagtccaagct

SEQ ID NO: 228071 - DNA, 596 bp, Glycine max
  unsure (1)..(596): unsure at all n locations
gactcattctatttgatttcttttttttttcctgtcaaacaagtcttctaaagatcacttattaagaattctaacttaacatataatatgatacacatgcagatattttgtggctgcattcagtgtttctggcctttatgctcttgtttctgctcttgcatctatctctgtcatccagaagccaggattcaaactgaagttcctcctccactttatcttctgggatgcagtaattaatcaattagcctttctttccacatttttattcatcttctctctcaactctcttgctttacactgtctaccatgacacggtgcagctgatattggggataacagcctcagcaacaggagcagcaggaagtgtggcatatattggtttaaagggcaacagccatgtgggttggattaaagtttgcaacatctacgacaagttctgtaggcatctagctggctcctagcagtggctttgtttggcagcattgtgactgtccttctcatctggctttcagctttcaccattcacagtcgagttccccaatagatggaaggatatggacatncagcatacatatgcactcaatccagattcacat

SEQ ID NO: 228072 - DNA, 591 bp, Glycine max
  unsure (1)..(591): unsure at all n locations
tcccagttggatgagatacttacaccggctgcttgcaccattgtttcatctctcagaaatgatcatgtcgactcctatgttctgtctgagtccagtctctttgtttatgcctacaagatcatcatcaaaacctgtggtactacaaagctactgcttgcaatcccacccatattgaaatttgctgaaatgctttccctcaatgttagatctgtgaattacaccaggggaagtttcatctttcccggtgctcagccctatccccatcgcaacttttctgaggaagttgctattcttgatggctactttggcaagcttagtgcaggaagcaatgcttatattttgggtggccaagacaaatcacagaactggcatgtctactctgcttctgcagattctgtaactccatgcgacaatgtttacactctagagatgtgcatgactggcctggatagagagaaagcacaggttttctacaaagaacaatctgcttcagctgccattatgactgttaattctggcattagaaaaattcttccagattctgagaattgtgactttgacttttgagccatgtgngttattcaatgaact

SEQ ID NO: 228073 - DNA, 609 bp, Glycine max
  unsure (1)..(609): unsure at all n locations
cgccatggaaccatttccctcataaaattctctcttcctttttgggttctcctcaatccattccaagcttcaatcttttctctcttctgccctctgcacctcccctcacacccttcctcattcgcaggaggtgaagatgtcgaccccggcaaggaagagactgatgagggattttaaaagattgcaacaagatcctcctgctggcatcagtggggctccccaagacaataatattatgctttggaatgctgttatctttggaccagatgacaccccttgggatggaggtacgtttaagttgacacttcagtttacagaggattatcctaataaaccacctactgtgcgttttgtttctcgaatgtttcatcctaacatttatgcggatggcagtatatgcttggacattttacagaatcagtggagccctatttatgacgtagctgcaattcttacctcaatccagtcattgctgntgtgatccaaacccaaattcaccagcaaattctgaagctgctcggatgttcagtgaaaacaagcgtgaatacaacagaagagtacgtgagattgttgagccagagtggactgctgactaatcatcatagataa

SEQ ID NO: 228074 - DNA, 575 bp, Glycine max
  unsure (1)..(575): unsure at all n locations
gtctaaagctattattaatagtttgacgatggttccaactattggtgatatatataggagctgtgaaatcaaatcaatagcctcatatggagtttttgtagagatagcacctggacgagagggactgtgtcatatcagtgaactgagttcaggttggctacccaaggcagaagatgttttcaaagtgggagatcgcattgatgtaaagcttatagagataaatgaaaagggacagctgcgccttagtcaccgagcactgcttcctgatacagaagcttcaccgaaggatggtttagtggaagaaaagactgaacagtctaaggataagtctagcactcccaatgtcacagcctcttctaaaaggagttcagaggatgattctgtgcttccttctaaaaagtttgtcaggagattggtcagctcttccctggataagcctttcactaacaaagacaagacanagaagagtagcaacaaagcagttggtaagtgtgtctggcaaagatgaaagcagtttggttagtggagaggcgtaaaactgataatatattttgcaaataagcagacaaatgatg

SEQ ID NO: 228075 - DNA, 498 bp, Glycine max
  unsure (1)..(498): unsure at all n locations
tgcatcttcttcttcttcgccggcgaagaagaagaagcccgcacctgctaagccccaacccaagcccaagcctaagcctaagcccaagcccgctgctaaagccaaggacactaaggcaactaagtcaaaggcaccagctaagcccaaggcagctgctaagcctaaagccaaagttccagccaagcccaagcccgcccctaaaccaaaggctgctgctgctgctgcttccaagcccaagcctgctgccgccaagcccaaagggactaagccagctgccaagcccaagcccaagcccgctgctaaaacaaaggctgctgctgccaagcccgcggcaaagcccaaagcgaagcccgccaaggcttcaaggaacgtcgacacggacttcaccagggaagaaagcagctcctgctgcgaagccggcagcgaagaaagtagcgcctgctaagaaagcgccagtgatgagtgtgaaacctangagtgtaaagtcttcagcgaaaa

SEQ ID NO: 228076 - DNA, 565 bp, Glycine max
catcaaccaaacaaacactctctcattaggtattccctcctaaaaaacaccaaaccctctcaaaccttaatttacccaaaatgataaaacactctcttttagtcttacccatctcattaacacttgtaatttctctcttgcattcaaccactttagcagcgatagctccggccaccgcaccggcacaagctccccccactactccagcggcctccgccccaacaccaccccagccctccggcggcaccaccgacatagtgcaagtccttcaacaagcgaactcgttcaacatcttcctccgcctcatgaaaaccacccaactaataaaccaactgaactcccagctcctaaccataaagtccggcgggctcaccatccttgccccagacgacggcgccttctaggagctgaagccggggttcctcaactccctatcggacggaaagaagctcgagctcgtgcagttccacgtgctccctgacttcgtctccgtctacaactttgacaccctcaccaaccctgttcggactctagcgggtaacaagccctgtaacgtcgaactcac

SEQ ID NO: 228077 - DNA, 535 bp, Glycine max
  unsure (1)..(535): unsure at all n locations
cgcagctgctccatcgttgctcngncagcncaccggagaaatacacggggacgacccgccgacacgaccagaagccaacccacaaccaaatatattaccaaggttcaaggccccccacacacccaggggaaaacggggaggccaggaaaaaacaaaccccaaccaacaacgaaaccaaacaccaaaaaagaaaacaccacacacaacccaaacccaacagcgagcccaaaacaacccaaaccacacaaccaaacacccaaaacccaaaagaaaggggcacacccagaacatgcacgcaacgacccaacaacccatagaaaagcacgaagggaaaaagccagccccgccaggcccgccgaaaaaaggggcaacccggaccccaaccacagggaaaacagaagccaccaacaccgaccacagaaaacaccggncggagcgccggaccacgccacccacgaaacccccgcggaaaggccacaaacgcgcaaaaaccccaaacgcacaaaaagacccctccccaaaacagggggccccc

SEQ ID NO: 228078 - DNA, 561 bp, Glycine max
  unsure (1)..(561): unsure at all n locations
aaaatgatggagaaggcttcagaaatttggagcatgatatcacaaggagcttacatttatgtgtgtggtgatgccaagggcatggccagggatgtacaccgcgccctgcacacaattttgcaagagcagggttctctcgatagttccaaggctgagagcatggtaaagaatctacaaactactggcagatatttgcgcgatgtatggtgatgatatctgaatgcaagccgtgggggtgacgaagatattaataaaacatagagttgtggctagaggattttgaaagggccttatttgtgccacctttcattagtgccctcaaaattgagggggggcgcttgttgccatcacgacgacatttcctacgattctttttcactatattttctaaaggattctttttggttcgtgtaatttattatatactgtttatacctagactatgaactattttacttcagttttctttntgtaatgtatgatgaacctcacagaaaggttcagagacgcagacaattccttgtactgtatgaactataaaaaaatgtctggaggtaaaga

SEQ ID NO: 228079 - DNA, 546 bp, Glycine max
atattacctccaaacatttttttatagttcatacagtacaaggaattgtctgcgtctctgaacctttctttgaggttcatcatacattacaaaaagaaaactgaagtaaaatagttcatagtctaggtataaacagtttataataaattacacgaaccaaaaagaatcctttagaaaatatagtgaaaaagaatcgcaggaaatgtcgtcgtgatggcaacaagcgccccccctcaattttgagggcactaatgaaaggtggcacaaataaggccctttcaaaatcctctagccacaactctatgttttattaatatcttcgtcacccccacggcttgcattcagatatcatcaccatacatcgcgcaaatatctgccagtagtttgtagattctttaccatgctctcagccttggaactatcgagagaaccctgctcttgcaaaattgtgtgcagggcgcggtgtacatccctggccatgcccttggcatcaccacacacataaatgtaactccttgtgatatcatgctccaaatttttgaagcc

SEQ ID NO: 228080 - DNA, 563 bp, Glycine max
caaccactcttaatttctctctgccttgtttatttacacacctctccaacctttcgctctcagggggatttgaatgcctctctctcctttacacatggccatcgtcgaggttgcacatcaaacaccaacaacaagttcctgaaaatgaaactaccgaggtaatgaagacccaggaaacagccccggaaccagtaccagccactgaggctccagcaacagaacaagcaacagctgatgatcctgctcaagaagaacagcccgcaactgaggttcctgccccagaatcaaccaccgaagcaccaaaggaagataccacctgtacaccaacaacagaaacagtggaaacaacaactacagaagaagccaagccagacgagcctaaagaagttgcagtcgagacccgtgaggtggtgacacaggagacagatgatgagaatccagcagcagaagagaaatcagaagagaaaactgcacaagtgaaagaagaagcagaagagcctaaagaaactactgacacagaaacagatatagcaccagcagcaaccacagatgatgagaacaaa

SEQ ID NO: 228081 - DNA, 452 bp, Glycine max
  unsure (1)..(452): unsure at all n locations
ttccttcacnnnagtttttttttcaaccgatatatacccccaacacaanaagaataaaggaaacgaaattaataaataaaaaaccaagcttttcaacatgacatgcaaaatggtagacctaatgatccccacaactaggaccatttctaaacctgtttttctcactcacactgtccataagtctaagcttcagttttctcaacaggaacctctactggggcttccactgtctcagctggtttgttctcttcctctgtggttgctgctggtgctgattctgtttctgtttcagaagctcctttaggctcttctgcttcttctttcacttcttcagtttttctcctctgatttcccctcagctgctggcttctcttcctctgtctcctttgtcaccaccctccttggactcaactgccaccttttttaggctcctctggcttggccaccttctg

SEQ ID NO: 228082 - DNA, 390 bp, Glycine max
tgaaattttcctaagtaggcactgccccctctggtatggattttctggaggccgtctcaaatggctacaaagaatggcttatataaacaccattgtctaccctttcacatcccttcctctcattgcttactgttctctgcctgcaatttgcctcctcacaggaaaatttatcataccaacgctttcccaaagaggggtccccaagactcataccctccattaagtgcattatacaatccagctacaacaccaaccatgttaacaacgattagggttgttggaggaatcaagagagtggtccactttacaaggttaagttccccaaacttactgtcctctgcaaccttaccagtgacagtgaacttggtgtcaacaccagcccacatctta

SEQ ID NO: 228083 - DNA, 229 bp, Glycine max
gcgatctagaacctctagccgcttctttgggcccttggatcaattgaaattttcctaagtaggcactgccccctctggcctggattatctggaggccgcctcacatggttacaaccaccggctcatataacacccactggcatccccttcacaccccttcctctcattgcttactgtcctctgcctgcaatatgcctcctcacaggaaagtttatcataccatcgctct

SEQ ID NO: 228084 - DNA, 602 bp, Glycine max
  unsure (1)..(602): unsure at all n locations
gaagcatttttgcaagaagaacctcttggaccagaagacatgtggtactgtcctggctgtaaagaacatcgtcaagctagtaagaagttagatctttggagacttcctgaaattttggtcattcatcttaagaggtttcaatacagtcgttacttgaaaaacaagctggagacatatgttgacttccctgtagataatctcgatttgtcagcttatattacctatgggaatgatgagtcttaccattacacactttatgctgtcagtaaccattatggaagcatgggaggtggtcattataccgcatttgtccatcgaggcggtgatcagtggtatgacttcgatgatagccatgttaatcccatcagcaaggagaagataaagtcttcagctgcctatgttcttttctacagaagaaatttcgaagtatcaacatagtgatatagtagcatgtagttcgaacagcctattgaagctagatgccattttattaactntattgccaccatagtcttacaaggatacagagggtaaactttggctaaaggtaagattattgcattgtgaccctgtggtcagagaatctagttgcagaaatagtc

SEQ ID NO: 228085 - DNA, 498 bp, Glycine max
  unsure (1)..(498): unsure at all n locations
aaaatgatggagaaggcttcagaaatttggagcatgatatcacaaggagcttacatttatgtgtgtggtgatgccaagggcatggccagggatgtacaccgcgccctgcacacaattttgcaagagcagggttctctcgatagttccaaggctgagagcatggtaaagaatctacaaactactggcagatatttgcgcgatgtatggtgatgatatctgaatgcaagccgtgggggtgacgaagatattaataaaacatagagttgtggctagaggattttgaaagggccttatttgtgccacctttcattagtgccctcaaaattgagggggggcgcttgttgccatcacgacgacatttcctacgattctttttcactatattttctaaaggattctttttggttcgtgtaatttattatatactgtttatacctagactatgaactattttacttcagttntctttttgtaatgtatgatgaaacctcaagaagg

SEQ ID NO: 228086 - DNA, 519 bp, Glycine max
  unsure (1)..(519): unsure at all n locations
tacaaaaactgaaccaattgtttgttttacggcaaggcaatctcaatcaaacatttccttttctggtgttaccaaagatagtgctggtgactatcaagactgtggtgcttcttcaatgcttctcatgggagaacctccctggtgtcctccttgccctgagagttctctgcattctgctaaccgaagcaatgctgtcatgcgctacaaggaaaaaaagaagacccggaagttcgagaagaaagtaagatatgcctctcgcaaggctagggctgatgtcagaaagcgtgtgaagggccgatttgtcaaagctggtgatgtctatgactatgaccctttgaaccaaaccagaagctactgagtgtacaacttttaaccatgttctgtaaaaaggaaagaatcactctatagttgcaaaagaaaagtaactcttacctgaaaaaatggatgaaatttgatgcattctttctccatgcaatgacaagctgtctgattntatgacaggggcataaattttcttca

SEQ ID NO: 228087 - DNA, 353 bp, Glycine max
atcaattataagcatgggattgcggtttacaccgtatgctgtgtcttgccggtttcgcaagtatggtgatgaccaagagaatctggtcttctaaggtgatgctatagtgtttttcaggggcacaggactcctaacgtatggattgagtaggatacccactgggtggcaccgtgcttagagtgccatactcttttccatcgcacctttgtggaaagctctacagtgctcacatgctttgaaaccgactctacactttttcataatcatcaaactttactactccatgtgctgggcttgccttcttcattgcaccagttgacactaaaattcctataaactctgctgggagcaac

SEQ ID NO: 228088 - DNA, 463 bp, Glycine max
acacagttctatgataagtttaacatccgccataatattgccgaactcctcgaatacttgtggcaagtccctagtcatcgtaatgcttggagacagattgctaaggaggaggaaaagggtgtctatctgaatttcttaaactttttgattaatgatagtatttatcttcttgatgaaagtctgaacaaaattcttgagctaaaagaattggaggctgagatgtcaaatacagttgagtgggagagacgaccagttcaagagaggcaggagaggacccggttattccattctcaagaaaatattattcggatagatatgaagttggcaaatgaagatgtcagcatgcttgcatttacttcagagcagattactgctccattcctacttcctgagatggttgaaagagtggctagcatgctcaattactttctgctgcaattggtgggtcctcaaagaaaatcgc

SEQ ID NO: 228089 - DNA, 492 bp, Glycine max
gtataaaatattttatatcgttgtattcaatggatgacttctttacattaactgttccaaatatctttacagccttaaaattctaatgatagcttcaattttttccaaaaatgattgaataagattaagttaaggttcaacatctaactttatgcgcatggcccgaatccatatttcattcgacaacttaggaaactcaagatattttcctaatcaatcaacattgtttccccatttgtagtctgaattgtggccttggtgctctgtaggcttaagtgtttcttcatttcctgagacctgacaaactcctcaattcttgcttttagctcatcgtcgggaatcaacatatccgcggtaagatgagaacggttgaatggattagtactatcactaagaagatgcctctgaatgacaggacgatcaaccgtgatccttgaaaaaggcaagataactggatccttatcaatgtgtattgaattggatcaaggaatt

SEQ ID NO: 228090 - DNA, 545 bp, Glycine max
ctcgagccgagtccttctcctcacacacataaaaacaaatatcctccacttcttctacccccagcagtagaacaagaggtgccggagcaagtttcgtcacgccggaacgatgaccggcggcggatccacggggaggttgccgacgtggaaggagagagagaacaacaagaggagagagagaagacgaagagcgattgcagctaagatctacactggccttcgagcccaggggaactacaagcttccaaagcactgcgacaacaacgaggtcctgaaagctctctgcgccgaagctggctggatcgtggaagaagatggcacaacttatcgaaagggatgtaagagacccacgagtgagattggaggaacaccactgaacttaagcgcgtgttcttccattcaggcaagtccacaatcctcgtcatacccgagtcctgtaccatcctaccatgctagcccaacctcttcctcgttcccaagccccacgcgcattgacggaaaccacccttcttcctttctcatcccattcattcgcaacataactt

SEQ ID NO: 228091 - DNA, 490 bp, Glycine max
gttcaaagatttcttcaaatgcaacctttccaacaattaacaaggcattacaatgaagtcaaattccaagtaatgtaacacctaacaactgctatataaatgaaaaactgtacacataaaaggaaaaatatagagaaattaagcataacaagaaccaattgccctgagggtagtagcagatccaagcaagggatgatttcaatagcatcatcaaatcaagcctttccaactcctagagtaagctccaaatcatccattccaacctcgtgtattctctcaccctcccagggtttcactctgccattctcgaagtcaaaatcggagcctcctctgcctctctcggcaacagaaccccactgcatgccttcctgggcagcgatctgctgcatcgcgggcttcatgaagttaaaggtaggcgaaggaagagcagccgccgccgcagccaccatcgtcgtctgaacctggaaactaacccagcggcccgaggcgg

SEQ ID NO: 228092 - DNA, 547 bp, Glycine max
  unsure (1)..(547): unsure at all n locations
gggggaagcaaggttgtacatttcagacctgaaagaaacttaaagtcaatgactgagacatcatcaaactgggatgatccaacatcaaacccatgtccaacctttcctgattgtggattcagacaaccaaacagtggagtagtcctttcttgcttagactgcttccttcgaaatgggtctctttactgttttgagtatgaggtttcaccatctgttttcctcagcagaataaggggtggcacatgcactactgcatcagctgacccaccagagactgttattcatcgagctatgtatcttcttcaaaacggctttggaaattataatgtttttcagaacaattgtgaggattttgccttgtactgcaaaactggtcttttgatacaagacaagcaaggggttggaagaagtggccaagcttcttctgttattggtgctccattggctgcaatgatctcttctcctctcaagttgttaatgccaagtcctgctggtgtcgctactgtaactgcangaatgtactgcatgagcagatatgcaactgata

SEQ ID NO: 228093 - DNA, 473 bp, Glycine max
gtctcaaaggaatacatcacattatagttactactataagtaataatattgttccattttcatcccagacacaacttgaataactagacaccaatcacagaagatataacatgaatgaagacatatctgctatgaactagtgtataactaacagtgacacatgcaacagtttcatgtgcatagtaaggatgaagagcaatgctagatcatctggtggtaatctgtctgtctggattttcatgttcagctacctcctcctcctcttgacaaatccatccaaggttcacagccaagtcttccactggcaccttgatcacatcacttctgacaccaatatcagttgcatatctgctcatgcagtacattcctgcagttacagtagcaacaccaacaggacttggcattaacaacttgagaggagaagagatcattgcagccaatggagcaccaataacagaagaagcttgggcact

SEQ ID NO: 228094 - DNA, 531 bp, Glycine max
tatgagtcgtcatcccgaggttaagtgggctcagaggcttgacaaggtctatatcacggtgcaattggctgattcaaaaaatgcaaaagtggatcttacgccagatggtatttttaccttctccggtagtgctggtgctgaagaccatcagtatgagctaaaactggagctctttgataaggttaacgttgaggagagcaaaattaatgtaggagagcgaagcatattcattgtagtgcagaaggcagaggatggatggtggaaaaggttactgcgtggagaaggcaagactccacattatgtgaaagtagattgggataaatgggtggatgaggatgaagatgagggtaatactggtgaagtggacttgggagggatggatttctcgaaatttggggggatgggtgctgatgcaatgggagggatggatgcaatgggaggcatgggtgggatggatttctctaaatttggtgggatgggtgatgcaatggatgacattgattagagtgacgatgaagagcatgaagtgtc

SEQ ID NO: 228095 - DNA, 610 bp, Glycine max
  unsure (1)..(610): unsure at all n locations
ggccttggaattccatgcattgccatgttgatatccatcgttgcctttgtgttgggctcaccactttataagaccgtaaaaccagaagggagccctttggttcgtttggcccaagtaaccgtggcagctataaagaaaaggaaggaggctttgccagaagatcccaagcttttgtaccataattgggaacttgatgcttcaatttctttagaagggaggcttctacactctgatcaatataaatggttggacaaagctgcaattgtcacagaggaggaggccaaagatccaactacaacaccaaaattatggaaattagccactgtccacagagttgaggagctaaaatccatcatcagaatgcttccaatttgggcatcaggaatcctgctcataacttcttcatcacatctgcacagttttgtgattcaacaagctcgcacgatggaccgtcacctctcttcctcgttccaaatttccccagccagcatgtccaatttcagcgtgctaaccatgatgtcaggagttgttctatatgaacgcctctttgntccctttgcgcgcagattcacagggaacccttctggaacacatgtttgcanagaatggg

SEQ ID NO: 228096 - DNA, 541 bp, Glycine max
aaacagtatacacgatctaccatgtgcttacatatgccatttgatgaggaaaagaacattccttaaagttcaacaatcaacaatgctaaaaactaatatcaaccccatcaattcattcatctttcgttaatcctctcttttcttcctccttaccatcatttaacttgtcatcagatgagacatgttcgttggcttgttccaaatcctcttccttgttcttttcactaatttcttccacggacttgtaagtgtaaaaccaagcacatataaaataataaacgagattcacaacttgaatcccactaacaagaaaataatagtagtccaatccacccctattgaggttcctatccggaagccaattattctccttgccagtgtacttatgcaccaatgacaccagcaatgtacccatgtagttcccaatggctgtggttatgcagtacagtgctgtagcactgcttctcatgctttcaggtgattgctcaagagaaattccaatgcccacagacatgaaaattcagccacccatgaggcaatc

SEQ ID NO: 228097 - DNA, 532 bp, Glycine max
  unsure (1)..(532): unsure at all n locations
ctcattgagaactcagatactaatcaaattgttgtgcctgataggaaaagctggaaaaatttatttgcatacatggggcctgggtttcttgtttccattgcatatatagatccaggaaacttcgagacggatcttcagtctggggcacaatataaatatgagttactttggatcatattgttggcttcatgtgcagctcttgtaattcaatcaatggcagctaatctcggggtggtcactggaaaacacttagcagagcactgtagagctgaatatccccgggtgcccaacttcatcctttggattattgctgaaattgccatagtgncctgtgacattcctgaagtaattgggacagcctttgcattgaacatgctcttcaacatacctgtttggattggtgttcttctgacaggactcagcacattgatgctcttagcattgcagcaatatggggttaggaaactcgaattcttgattgcatttttagtatttacaattgctgcatgntttatggttgagcttggatatg

SEQ ID NO: 228098 - DNA, 569 bp, Glycine max
  unsure (1)..(569): unsure at all n locations
ggacatgtgccagttgtgcgaccatattgcttccaatttggtcttcttcaccctcttagggtttgcatcagattcccctaattcttgcttgattttgcgctttcgctagattttcttcaaaatgactcaagatctagagatgaaggatcgctcaacgccttccaactccgtttcttcgcctgctccatctactctgcagcatttgaaggagatagcgtctcttatcgagaccggttcgtactcgaaggaagttcgtagaattgctcgcgctgttcgccttacaattgcgttgaggcggaaattgacagcatccgctatctcttcttttctcgatcatgttctcactcctggctctgaagttcacgccaaattgtctgcgtatcttcccaggatgatgatcatgagatggaagtggacgctgcaacatctgcgattcaaaccccagccaaacacttgttgcccgagctagaaatctactgttacctgcttgtactnccttttctgattgatcagaanaaatacagtgaggccaaagcttgttcctcagctagcanttgttggctgaagaa

SEQ ID NO: 228099 - DNA, 552 bp, Glycine max
  unsure (1)..(552): unsure at all n locations
ctcaattctcaagcaaacaaagtcggtgatgttgatcagagcggaaaacgtcgtcgtttgagagaaactgaacttcgaaggtgacaccctgccacattttcgaccaatcctagattaaaaattgtctctctctctttnntttnttttttctctctttctgtctgtgacggaaacagcaatgaggcagcacaagcaagtgtcctccattaaccggcgacccaccgttctttatctggtgtgcgtcgcagcattgttttccctcctcctcttctacacccaatcctctttcttctcaggcgccgtgtcttcagattcttcaaggatagatgccgtctcttcagatcgcgattccgaaacaatccacgttttgtctaactttcagtccagtgtgaagcaatgtgtggataacagggggcttggactcactgcacatgttattgaccattgcanattaatccttaaataccctgaaggtaccaacagcacttggtacaatgcacagtttaagaaatttgagcctttggagtaccaatatgatttgtgtgagacaat

SEQ ID NO: 228100 - DNA, 583 bp, Glycine max
  unsure (1)..(583): unsure at all n locations
ctcgatgttaaagcaaactacgcaattgcagtcgatcatagcggataacgtcgtcgtttgagagaaactgaacttcgaaggtgacaccctgccacattttcgaccaatcctagattaaaaattgtctctctctcttttttttttcttttctctctttctgtctgtgacggaaacagcaatgaggcagcacaagcaagtgtcctccattaaccggcgacccaccgttctttatctggtgtgcgtcgcagcattgttttccctcctcctcttctacacccaatcctctttcttctcaggcgccgtgtcttcagattcttcaaggatagatgccgtctcttcagatcgcgattccgaaacaatccacgttttgtctaactttcagtccagtgtgaagcaatgtgtggataacagggggcttggactcactgcacatgttattgaccattgcaaattaatccttaaataccctgaaggtaccaacagcacttggtacaatgcacagtttaagaaatttgagcctttggagtacaattatgatttgtgtgagacaatcctattgtgggaacagtntcgcaacatgact

SEQ ID NO: 228101 - DNA, 523 bp, Glycine max
gtttctcaggtgatttcttctttgactgcttccctgaggtttgatggggccctgaatgtggatgtgactgaattccagaccaacttggtcccatatcccagaatccatttcatgctttcctcctatgctccagttatctctgctgagaaggcctaccatgaacagctttcagtggctgaaattaccaacagtgctttcgagccatcgtccatgatggccaagtgtgaccctcgccacggaaagtacatggcatgttgcctgatgtaccgtggtgacgttgtgcccaaagatgtgaatgctgctgttgccaccatcaagaccaagaggacaattcagtttgtggattggtgccctactggtttcaagtgtggtattaactaccagccccctactgttgttcctggaggtgatcttgccaaggtgcagagggcagtttgcatgatttcaaacttcaccagtgtggctgaggtgtttggtcgcattgaccacagtttgatctcatgtatgccaagcgtgccttcgt

SEQ ID NO: 228102 - DNA, 448 bp, Glycine max
aggtcaaacaatggtcaaaatatatattgccattccgtttgggtctgtaacaaaagcagcgaagcataaaaacaatgcatccaaattaaaacccacaacggtactggtacatttgaacatcaaacacaacaacagaaaaagaccaccagaacaagaatctgaagtagattctagtagtcttcgtcctcatgctggccctcaccagactcagcacccacttcttcataatccttctcgagggctgcaagatcctcacgggcttctgaaaattcacctttttccataccctcacccacgtaccaatggacgaaggcacgcttggcatacatgagatcaaacttgtggtcaatgcgaccaaacacctcagccacactggtggagtttgaaatcatgcaaactgccctctgcaccttggcaagatcaccttcaggaacaacagtagggggct

SEQ ID NO: 228103 - DNA, 588 bp, Glycine max
  unsure (1)..(588): unsure at all n locations
atcacacataatataattccaaaatcactcctattgctatagcaatatgatgggtgacactgagatcaaaccatcagttgaagtagtcatatgtgcttccatgaacaataacaatagcgcaaacaaccacaccctcccaaccgacatcaccaagtcatcacaatcacacttaccaatcttgaccaagctccatgctggttactttttcatatgcctttcctttggtgcacaagctttgctctggaagagtttgagtaaacacaacaaggactcacaaactctctggcatggattcaatttgatgccttccattgcgtttctactactttggtgtgtggcactgctcactgccactactttgtctttactttacgtgctcaagtgcatctttcacttggacatggtgaaggaggagttctcacatcatgttggagtgaactgcatgtatgctccttggatttcttggcttctcatgcttcaatcagcacccatcatcgttcattcaacttcttgctacggagttctttgcttggccttttcgttggtatattgctgcttgacatanaactatatggacaatggttcaca

SEQ ID NO: 228104 - DNA, 541 bp, Glycine max
  unsure (1)..(541): unsure at all n locations
gataggtcaaacatcatcatgtcggacgaagagcaccatttcgagtccaaggcagacgccggtgcctccaaaacctaccctcagcaagccggtaccattcgcaagaacggctacatcgtcatcaaaggacgcccctgcaaggttgtggaagtttcgacttccaaaactggaaagcacggtcacgccaagtgccactttgttggaattgatattttcactgccaagaaacttgaggatattgtgccctcttctcacaactgtgatgttcctcatgtgaatcgtactgattaccagctcattgatattgctgaggatggatttttgagtctgcttactgaaaatgggaacaccaaggatgacctcaagcttcccactgatgagagtctgctcactcagataaaggatggatttgctgagggcaaggatcttgntgtgtctgtcatgtctgctatgggtgaggaacagatttgcgccctgaaggatattgggccaaagaactagcttttggtgctggcagcctgttgtttctatttaagcaaag

SEQ ID NO: 228105 - DNA, 495 bp, Glycine max
aaaaaaaaccttcccacatttgactcctcctttataacaaagtcataggacagcatagaaaaccagaaaaaatgtgatatagtttctgtgaccacatccataaacaccattgttaagactagtctgactagaatctataagccataagccaggtcttgaacaaaccaatataaaggcttacaaaaggatctttgcttaaatagaaacaacaggctgccagcaccaaaagctagttctttggcccaatatccttcagggcgcaaatctgttcctcacccatagcagacatgacagacacaacaagatccttgccctcagcaaatccatcctttatctgagtgagcagactctcatcagtgggaagcttgaggtcatccttggtgttcccattttcagtaagcagactcaaaaatccatcctcagcaatatcaatgagctggtaatcagtacgattcacatgaggaacatcacagttgtgagaagagggcacaatat

SEQ ID NO: 228106 - DNA, 553 bp, Glycine max
  unsure (1)..(553): unsure at all n locations
tcaaaacactcataacacaaagcacaaagcaaagctcatccttgagttaaaaaatggcagcagcttcttccatggctctctcatccccatccttggctggcaaggccgtgaagctgggcccatcagccccagaagtgggaagggtgagcatgaggaagaccgtcaccaagcaggtctcctcaggaagcccatggtacggcccagaccgagtcaagtacttgggcccattctctggcgagcccccgtcctacctaaccggtgagttcccaggcgactacggctgggacactgctgggctttccgcagacccagaaaccttcgccaagaaccgtgaactcgaagtgatccactccaggtgggccatgctcggagccttgggctgcgtcttcccggagttgctgtcccgcaacgggtgaagttcggagaagccgtgtggttcaaggccgggtcccagatcttcacgagggtgggctcgactacttgggcaacccaagcctgatccacgcccagagcatcctcgccatctgggccacacnaagtatcctaatgggtg

SEQ ID NO: 228107 - DNA, 601 bp, Glycine max
  unsure (1)..(601): unsure at all n locations
atcagttgctattgctggagctgcagtgcagtggcttagagacggtcttggcatcatttctagtgctgcagagatagaggagatggcattacaggttgaatccactggtggggtttactttgttcctgcttttaatggattgtttgccccatggtggcgtgaggatgctcgcggggtttgtattggaataacaaggtttacaagcaagggtcacattgcccgagctgtgcttgagagcatgtgtttccaagtgaaagatgtcttggattcaatgcataaagattcaggagaaagtgaatcccaaaaaacagagtttttgcttagagtggatggtggggcaactgtaaacaacctgctgatgcagattcaggcagatttggtgggatgtccagtaattagacctgctgacatagagacaacagcacttggagcagcctatgctgccggattagctactgggatttggaaagaagattttattttcaatactgaggagaagttgaagaatgctagagntttccgtcctgtaatgactgangaagtaaggaaaagaagttgactcttggtgcnagctgttagtaaaacttcgactagctgatct

SEQ ID NO: 228108 - DNA, 548 bp, Glycine max
  unsure (1)..(548): unsure at all n locations
gcgtcctcaggactgcccccactttttgaggattcaaaaatcaaaagtgctctccggaaggtttatgatttcaatgtaatgaaagttaaaggaggcagaatgggtgctgtaaatggcatgcatcccaaccgtaaggtggacgagacctgtatgcagtctcgagaagtatggacaggtgtgacctatggtcttgctgctacaatgatacttgcgggaatggaagaagaggccttcgcaactgccgagggaatatttctagcaggctggtcagaagatggatatgggtactggtttcagacaccagaggcatggacaatggatgggcactacaggtcccttatgtatatgaggcccctagctatttggggcatgcaatatgcaataaatcggcccaaggcaattcttgaggcccctaaaataaatataatggacagaatccacttatctnctgttattggaggatactctcataatgaacaggtgtgagaaagattacaacanaagccagatgctntaacanttctgtattncattgtgcttgctgatag

SEQ ID NO: 228109 - DNA, 576 bp, Glycine max
  unsure (1)..(576): unsure at all n locations
ggttttaaaaaatggctgatgctgaggacattcaacctcttgttgttgataatggaactggaatggtcaaggcgggttttgcaggtgatgacgctcctagggccgtgttccccagtattattgggcgaccacgccataccggtgtaatggttgggatgggtcagaaggatgcttacgtgggtgatgaagctcaatcaaaaaggggtatactcaccttgaagtatcctatagagcatggcatagtcagcaactgggatgatatggagaagatttggcatcacacattttacaatgagcttcgtgttgcccctgaagaacaccctgtacttcttaccgaggcacccctcaatcccaaggccaacagagagaagatgacccaaattatgtttgagactttcaatgtgcctgccatgtatgttgcaattcaggctgtcttgtctctgtatgccagtggaagaactacaggtattgtgcttgattctggtgatggtgtgagccacacagttcccatatatgaagggtatgctcttnctcatgcaattcttcggttggaccttgctgccgtgatttaacgag

SEQ ID NO: 228110 - DNA, 573 bp, Glycine max
aaaatggcccgatcatttatcaaaggccaatcttcggtagaagagaaggttcctttggaacacttatttctatttcagtataccgggtctctttctttcatttcaaaaaatttatagaatttcgattttgaaatgaaagaaaagtgtggggataaatataaatgacaaaaagatattggaacataatcttggaagagatgatggaagcaggagttcattttggccacggtactagaaaatggaatcctaaaatgtcaccttatatatctgcaaagcgtaagggtattcatattataaatcttattagaactgctcggtttttatcagaagcttgtgatttagtttttgatgcagcaagtgagggaaaacaattcttaattgttggtacaaaaaaaaaagcagcggatttagtagcacgggctgcaataagagctcggtgtcattatgttaataaaaagtggctcggcggtatgttaacgaattggtatactatagaaacacgacttcaaaagttcagggacttgagaatgcaacaaaagacggggagactcaatagttttccaaaaagagatg

SEQ ID NO: 228111 - DNA, 579 bp, Glycine max
  unsure (1)..(579): unsure at all n locations
cttgatccaaacatactaaatcatttgatgataaatgatattgaatattgcatggaggtgacaccaagcaattcgtttaatttaatgttacccacaacgaaatttaagcttcgggagattggtggagaccaagataaacacttgaaggacaatttcaaactcatcgatacaacaaacatgtgggtgagtttaagagccatcaagaggtttgttgacactgttgaagtaaggcagaagaagccctcattttcaaaggacacagcagctggaccagcaataaagttctttgataatgtatttggtgtctccgtgcccgaatctcgctttcttcccttggatgcaacatcagatctattacttcttcagtcagatctatacacttgtaagaaggtgttttaactcgaaatccagctagaactaaccctttaaatcctgtgatagacttgggacctgaattgaaaagtttggtgactttcaaagtcgcttcagatccattccaagcatcattgagttggacagtttgatggtgagaggtgatgtgttgtttgnggctaatattactttgaaggggcagtgact

SEQ ID NO: 228112 - DNA, 570 bp, Glycine max
cgtttccttcctctaacctaatcaaatcctctcctctcaaaccaattcccacttttcctctcttcgcctcccctcaggaaccaatgtccataatcaccccacgccgtcatcctcaaacgacacccttccgctagcaaaacgactgcggtttggtcgtcgtcttccccgaggcatgctcttgggatattattattcatcatcgtaatcacaccctacagagacgttgactttgtgctttttctgggaggggaacaaatggaccaagctcttctggacgacataatcaatcgccttctcgaagttcgcagccggccggggaagcaggtgcagctgtcggagtcggagatccgccatctctgtgccgcttccagagagattttcttgcagcaacctaatttgttggagcttgaagcacccattaagatttgcggtgatgtacatggtcaatattctgatcttttaagggcttttgagtatggtggactacctcccgaggccaactacttatttttggggggatatgtagatcgagggcagcagagtttggaaacaatatgccttctcctagca

SEQ ID NO: 228113 - DNA, 437 bp, Glycine max
gagaatcttataagtcagaatgacatataccagctactagtgtacaaaagaaaacaaggagaggctgtctacctcaaaatgcaaatttgtaccagtggaaaacaacagtctacatagttcatgatggtgtttccctttgtttttacaattccaaaatatcatgattaaatggaactctactttccttttcttcaactattacatcttcaagaccaagctgacggttgtggcatcaatttcaccaaaattaacttcatacttttgtacccaggaaggactttatgcctgctggagagtttcctggcttagtagtagtagtacttccaaagttgagctttgcttttttatcagctggctttaatatttggaaagagcacattagtgtctcatcaacactcattatagcgccagcattgtcaaactctccacaataatta

SEQ ID NO: 228114 - DNA, 568 bp, Glycine max
  unsure (1)..(568): unsure at all n locations
atcaaacaaagtttcagtttttggtgttccatttttcttcctccatctttatcttaaacataacttgaactctccattccttaaattttagctacgagctagttccgacacagacaaagcaatggcaaagaccgagttagaggtgactgttgagagcaagaacaaagacctcaagcacctggggtttgtgaggattgctgctattcaaacatttgtgattgtgtcaaatctgtatgagtacgcaaagcagaattctgggcctttgagatccgtcgtaggaacggttgagaacactgtaaccaccattctcggtcctgtctgcaacaaattcaaggacgtccctgatgatgtccttgtttttgttgacaaaaaggtggatgaagcttcccacaagttcgatgagcacgctcctccttttgctaaacacattgcggatcaagcaagggtgtgattagaaagtgacttgtgaggcanggaaagtagcaagtgaagcacaatctggggggccaagagcagctgttcattatgttgctacagaatcaaagcattttgtgttgataaattcagt

SEQ ID NO: 228115 - DNA, 528 bp, Glycine max
gcatataattggaggaagcaacctttatgagcattatcatccgcaccattcatttacataaaccctattttctacatggattagttacacagtcttgccaagtctttactaacttaaaagtttttctagtcacaaccaccacatgccccacaatgtcacaacccataaaacaaggtcactcaaaagcaaattttttgaagaagtaaagctcaatttaatcagaatcagatgattctgatctctgttcctcagaggctgcattatctcctttcaagttagcctctccctgcttgaatgccttggctatctcttcaatgggaatcaaaggtagatacccaacgaaactgtaacccttttgagtcatggccttgatcacatgattgtacttctctgaccagtgagcaacagtgggaattgccatctctgacagtgcatggaatggtggatagtgggttgagtccattccacaactttactgaatttatcaacacaaaatgctttgattctgtagcaacataatgaacagct

SEQ ID NO: 228116 - DNA, 510 bp, Glycine max
  unsure (1)..(510): unsure at all n locations
attacggcacggtgaaacgctacgagtttgaaatgcatagtaaggtctcaatggcatggattctcggacttggaccgagtttaggacttgttcgtgtcccgggaattgggctagtatacacagagcttgcaaatggagtaccccacatcttttctcacttcatcacaaacctaccagccatccattctgttgttgtctttgtatgtgtgaaatatctccctgtctacactgtcccagaagatgaaaggttccttgtaaaacggatcggaccaaagaacttccacatgtttcgatgcgtggcgcgatacggatacaaagacctgcacaagaaagatgaggattttgagaaaaagcttttccataacctctttgtgtttgtgaagcttgagtccatgatggaggggtgctcagattcagatgactacagcttatatgaggagcaaactgangggtcaaggcaggcctattgaacaatatgcaacccagcttcattgatatggatcaacagtt

SEQ ID NO: 228117 - DNA, 599 bp, Glycine max
  unsure (1)..(599): unsure at all n locations
ctcctctctgaattcctcttattcaggaatttggagagactgttgatatagaaaggtaggataaaccagtggccaaggaatatatggcgttttctatggttttcattgttagcaacattatgctgcttttcagttcagcatttgccaaaactgctagtcctccctctctgagcccaactccagcaccagccccggcacccgactacgtgaacctcaccgagttgctcagtgttgctggtccatttcacaccttccttggataccttgagtccaccaaagtgattgacactttccaaaaccaagccaacaacactgaagaaggaattaccatctttgttcctaaggacagtgccttcaatgctgtaaagaaaactgtcctatccaacctcacctctgaccagctaaagcaagtgatcctcttccatgccttgccacatttctattctcttgctgagttcacaagccttagccaaaccagctctactcccacatttgccggaggggattacactttgaatttcactgatgattctgggacagtgcacattagttcaagatggtctaagaccaangtgagcagtgctgttcatgccacagat

SEQ ID NO: 228118 - DNA, 555 bp, Glycine max
tcaaaacactcataacacaaagcacatagcaaagctcatccttgagttaaaaaatggcagcagcttcttccatggctctctcatccccatccttggctggcaaggccgtgaagctgggcccatcagccccagaagtgggaagggtgagcatgaggaagaccgtcaccaagcaggtctcctcaggaagcccatggtacggcccagaccgagtcaagtacttgggcccattctctggcgagcccccgtcctacctaaccggtgagttcccaggcgactacggctgggacactgctgggctttccgcagacccagaaaccttcgccaagaaccgtgaactcgaagtgatccactccaggtgggccatgctcggagccttgggctgcgtcttcccggagttgctgtcccgcaacggggtgaagttcggagaaaccgcgtggttcaaggccgggtcccagatcttcagcgagggtgggcttcactacttgggcaacccaagcctgatccacgcccaaagcattcttgccatctgggccacacaagttatcctaatgggtg

SEQ ID NO: 228119 - DNA, 543 bp, Glycine max
  unsure (1)..(543): unsure at all n locations
ccgtagcggacaccccccaaagatccccttccccagttcccaagaaagcagcctccccatccccttctggctcctccaaaaagaaagccccacttctctccgatgcctctctggacaaccctgatctcggcccattccttctcaagctggcccgcgacaccattgcctctggcgatggccccgccaaggccctcgacttcgccatccgggcctccacttcctttgagcgctgcgccatccagggcgagcccagcctcgacctcgccatgagcctccacgtcctcgccgccatctactgcagcctcggacgcttcgaagaagccgtccccgtcctcgaacgcgccatcctggtccccgacgtcgaccgcggccccgatcacgccctcgcctcgttctccggctacatgcagctcggcgacaccttctccatgctcggtcaggttgaccgatccatctnctgctacgaccaaggcctncagatccagatccaagcnctcggtgacaccgatccccgcgtcggtgaaacttgccgatacttgggcg

SEQ ID NO: 228120 - DNA, 595 bp, Glycine max
  unsure (1)..(595): unsure at all n locations
actttttctacttaccttttctcttaatccaaatacgatggcagccatggcaaccacaaccctctcttcaaaccccaaactctcattcttcaacggaaagcccgtcacatattcttcccgcgtcgcgcccaccaccaaattatcctcatccaaacaaggcacaatttccatgtccctaaccccacccccctacgacctccagtccttcaaattccagcccatcaaagaatccatcgtgtcacgggaaatgacgcgccgctacatgaccgacatgataacctacgccgacaccgacgtcgtaatcgtcggagccggttcggccgggctctcctgcgcgtacgagctcagcaagaaccccgccgtgagcgtggccatagtcgagcagtcagtgagccccggcggcggcgcgtggctcggcgggcagctcttctccgcgatggtggtccgcaagccggcgcacctcttcctcgacgagctcggcgtggcgtacgacgagcaagaggactacgttgtcataaagcacgctgctttgttcacgtncaccatcatgagcaggctcctcgcgaggcccaacgtgaagctcttcatcgcgtgg

SEQ ID NO: 228121 - DNA, 560 bp, Glycine max
attgaagtaatttcaggtattgtctccttcatcattcacatttttaaaaatttattctaaaattcaaatcataagcagagacaaaacagaaaagaaaaggtatataatttgaaacttaatttaagcatcaacaatttcctcagtgtccgcagaagccaaaataagctggggttcttcccttccaactccacacgttccatcaattgcattgttcctacccaaagccttcaacgccaaatgagccgccttctgccctgatatcatcatcgccccaaacgtcggacccattctcggggagccatcaatttctgcaacctccatgccagtgacaatcatgccaggcacaatctccctagtgagcctgacaatagcgtcctcagcagcattcatatccaaagccttcattccaggaacgctatcaatcatcccaatactcttcaacctcttaaccccagtggcgccaaagggtccatcgtgcccacaagagctcaccacaaccttcgccttcatcacgttggggtccatgcatgactgcgtgtcatgggtcatcgaaaccagag

SEQ ID NO: 228122 - DNA, 559 bp, Glycine max
  unsure (1)..(559): unsure at all n locations
ctctctttctctctctagaattctcagatttgcggggcgagatgatgcagcagccaggacccggcatggcacctcccaccatgggccagcagccgccgcaacagtaccagcagcctccgccgcagcagcagcaaccctacgtcatgatgccgccgcaggcccaggccccgcaggccatgtgggccccctccgcccagcctccgcctcagcagcagcccgccagcgccgacgaggtccgaaccctctggatcggggatctgcagtactggatggacgagaactatctctatacctgctttgctcacaccggcgaggttacatcggttaaagtaattcgaaacaagcaaactagtcaatctgaaggttatgggtttattgagtttaatagtcgtgctggagctgagagaattcttcaaacatataatggggcaataatgccaaatggggggcagagtttcaggttgaattgggcaacttttagtgctggtgagaggtcgcgccacgacgattcttcagattaccaccatattgctggtgactnggctgcagatgttactga

SEQ ID NO: 228123 - DNA, 552 bp, Glycine max
cgataaaatttaatgttattaagcaaacaaggggaaaaaagaaaaagagtagcagagtcggttttccacgagacgagaagagacacgcaactcgataagtatcacaaaagattacagaagaaaaggaacattctcttctcaactatatcctatttgttgctgttgctgaggtggttggtaaccaggataccccggataactgccatacatgttgggatcctgtccagcagcaggagcatacccataattttcataaccttgtgcagcatacccatagtatccaccaccagaaccagcaccaccattccactggtttggatctgcctgagcctgtttgtttgaaggactgcggccccatgaaagacgaacattttgaccacccaacagggtcccattcaacacccgaagtgcctcttcggcacagctcctgtctgcgaattggacaaacccacatcgcttgcctgctggaatcttcacatgcactaattctccatactggctgaaaacttgcctcagatgatcatcagtgacattaggatccaaattaccaac

SEQ ID NO: 228124 - DNA, 574 bp, Glycine max
  unsure (1)..(574): unsure at all n locations
gcgcaagtgaggaacaagcaagtgcttctaaaggactatgttaccggttttcccaaagaatccgacatgaatattgtcgaaagtaccataacattgaagcttccacaaggttccaatgatgtcttgctcaaaaatttgtacttgtcttgtgatccgtatatgaggaatctcatgaacaagcccgaaggccctcccaatagtcgtgcttacactcctggctctccattaataggatatggtgtgtctaaagtcctggaatctgggcacccagattataaggaaggtgatttagtgtggggctttaccaaatgggaagagtatagcttgttaccctcagctcaaatactcttcaaaattgagcacactgatgttccacttacctactacactggaattcttggtatgccaggagtgactgcatatgcaggtctatttgaagtaggatctcttcagaaaggagaaaatgtttttgtttcggctgcctctggcgcagttggtcaacttgttgggcaatttgctaaactgaatggttgntatgtagttggaagtgctggatctaaagagaaggtggatc

SEQ ID NO: 228125 - DNA, 493 bp, Glycine max
attcaagagaaacaactgtgcattacatttgatactgctctcaggactatcaagaacaaagagcatcatcatacagttgacgaaggtgactgcaaaggtgatgtcaagacagccaatttttcagcaaaaaaaccagaaataaaactgataacttcccattgaacacaagaaacaaatgctttttactcatgagaaacaacgagcacttgttttccaacattgcgaccgctaaaaaggccaaccaatgctgaaggtccattctcaagcccctcagctatgtcttccacatacacaaccttcccctctctgatatttggcaggagaaactccaagaacttgggatataggtgaacgaaatccatgaagttaaagccttgcaaacgaatccgcttatatatgatctgtgccaaatttgttacaccttcatgttgagtaagattatactgtgagatcattcccagacgggtatgcgaccacgactctcatgttcagg

SEQ ID NO: 228126 - DNA, 584 bp, Glycine max
  unsure (1)..(584): unsure at all n locations
gcggcgttgttctttctgctgctgcggctgtggttccggcggcgatgggacagcaatcgttgatctacagcttcgtcgctcgaggcaccgttatcctcgcggagtacaccgagttcaccggaaacttcaccggcgtggcggcgcagtgcctccagaaactcccttcctccaacaacaagttcacctacaactgcgatggccacaccttcaactacctcgtcgataacggattcacttactgtgtggttgccgttgagtctgctggacggcagattccaattgctttccttgaacgaatcaaggaggattttaccaagaaatatgctggaggaaaagcagcaacagcggctgctcagagcctcaacagagagtttggacctaagttgaaggagcagatgcagtactggtgttgatcacccagaggaaattagcaagcttgcaaaagtgaaggctcangtttcagaagtcaaggagttatgatggaaaatattgagaaggttcttgaccgtggggagaaaaatgaagctttggtggataaaacagagaaccttcgctctaggctcaagattcaggcagcagggaac

SEQ ID NO: 228127 - DNA, 538 bp, Glycine max
gcaaaaaaaagttatcacgaaaacaaactggttgcacgataagtagctgtccaaattacacagactaataaacctaacagttgtcccacatgtcatactcatagtccaaaagcacatatatccttacagatgaattgtgaaaatactcagattgagcttgcaagaaacattggatgcatctgacgataatgttgcctgggtgtgactacaaccattggctgatggagatggagtgttcaaaggaccctgcacccacccgagaacagatgattgacacgtgccttgacactcttgccactgtcttgagaagcatggaggaagcttaaaagaacatgtatgcctttagcaccaccacttacactggattgcagtgcactgttgatgaagcaacctccgagaaattcatgggaacgcctggggttctttgaatgctgacagactgctatatagatgataagagtaggactactggagggacaactacatggatggtgagattattgcgtgtgagtaccatacctaccaaccgtaacgtacc

SEQ ID NO: 228128 - DNA, 573 bp, Glycine max
  unsure (1)..(573): unsure at all n locations
gatcaaggtgaagtgctatgctacatggtgcggctggcgattcagcggttccgttccctcttcagacaccaccactgaggagtttctcaatgagaaccaagttgaccaccccgtgtggctcattgccactgtggggttgcaagaatcgatcatcaactccatcacggtttgcaagtacaagaagaatgaagggttggttgaaggaaccgagtgttcggtgtgtttgaacgagtttcaagaagaggagacattacgactcttgccaaagtgcaaccatgcttttcacgttccttgtattgacacttggttgagatcacacacaaattgccctctttgtcgtgccggtattgtttctaatagtgtcaattctgaagcaccagcacccgtgtcgaattcggagcaagaaaatgcaaatttggggaggaatcaagatacccttttggacaattcacggattaatgaaggtgggttaagcagcnacatggttgctgnggaatcaagtgaagcaatagatgaatcaaatttaagggatcggtanatgatgaaactcagaacaaatggggtctgatgaat

SEQ ID NO: 228129 - DNA, 577 bp, Glycine max
  unsure (1)..(577): unsure at all n locations
acaaaactcaccaacacatagatgctcgatcaaagcctagatttgatggaactgtacaagagcctcgaaagggaatcagaagtggtcatgtacctggtagcaaatgcatcccttttgcacagttgttagatagttcacagacattgttaccagcagatgagttgaagaagcgatttgaacaagaaggcatctctctggaaagcccagctgtgacttcatgtggaacaggcgtaactgcttgcattcttgcattgggtcttcatcgtcttagaaagtctgatgttgcagtttatgatggatcttggactgaatggggagcacaatcaaatacacctgttgacactttatgaattcaatacagctaaatttgcatgccaccaaaaagtatctgcaagtgaaggggctgttttcatttgtcaaacattttgaacacaccaatttttgtatgctttactgtttgttgttttggtttagttgtggttgagattcttgagaatngctaatatgttcaaatgttactaatattaaatcctatcatgtggcttataaatataatgataggatggttcaagaaaaa

SEQ ID NO: 228130 - DNA, 169 bp, Glycine max
tttcttttttttttttttttttttttttttttttttttttttttttttttttttttttttttttttttaaccggaatgcctcacaaaagttttattacaatgaaaggggttccagccagccgctttttttcccgaggaataaaaccactttctttttctttaataaccc

SEQ ID NO: 228131 - DNA, 521 bp, Glycine max
cggctcgagcgttgagaagggaagaggtacacatggcaagtggcaactgacctcattgttgatagttgatacttggcctcgaagatgcacttgctactatccaagtccccactattactgatacataattcttctatgctcctccaccgcttctctcctcttctcctccctccttttctctttcgccaaccccccttcccctcttcgaatttcaaacctctcacactcaaggtcctctccatggcatcgtctcattcctcccaccacatacacactaatcgactcgcttccgaacagagcccctatcttctccaacacgctcacaaccctgttgattggtatccctggggcgaagaagccttcgccgaagcgcgccggcgagacgcgcctatcttcttgtcaattggttacagcacttgtcactggtgtcatgttatggaggtcgagtctttcgaggatgaagcggttgccaagttgctgaacgattggttcgttagcattaaggtggatcgagaggagcg

SEQ ID NO: 228132 - DNA, 559 bp, Glycine max
tttttttttttttttttttttttttttttttttttttttctttaggcattgtaatcaacaattacatttcctttttctttcttgaatggacaatcaaaggagttgaagctcaatttaacctgtacatcatggttttcagtccaaatttaaatatgattttgcagtaactaaacttaatccaaaatcacgagccatttactcagccagcaaaccctccataacaatgagatttgacgcttgaactgaaaacctgcccatcaacattcgtacgctgatttcactgcatccctatcactttctggacctgggcttaaaaatatttgccttgtagtatctaagttcctcaatgctttctctaatgtcatctaaagctctgtgtgtttttaattttgaaggggctctctccttatctttgggataccagcgaatgcagagagctttaacactactaacatcaacaaccacatgagagaagagactcgccaattttggcatgtatttctgcaaaaattggtctagttaagacaggtcccggaacatttcaaagaggaacaatcgg

SEQ ID NO: 228133 - DNA, 532 bp, Glycine max
caaaacaaaagcagcgattagaaaaaatattacaatctaatctaagaataaagtaacgttttcaatataacatgaattagaaacttaacttcctcatgaccattaacttgctcaacaccaaaacccaacagaaaatgggattggccatatctcatttaaaaatttcaacgctacgtagtattccctccttcatccctctctttagcctttcaggagactacccctaagaatattttcaattttcaaacctaaataagattagccctcttcaaaaatctgattgttcgacaatagtagggccagatcgattccacataatcaagatacatctccactatccattcctgcaattctttcaacttttttcttgttagctgtttatagtctctattttttacgctcaatataggctgcagaacataagttgagatatcctctttgagcttgccacggaaaacgtagctgtgggccaaaatgcagtaagagggagaattcttgagtaatttgacagtctgtttgaagctgaaaacat

SEQ ID NO: 228134 - DNA, 467 bp, Glycine max
aggcaaaattttgaattttgtttttcaaaccggcattatttggttctccaaaagttcttcaagtttaaaaggccttaagggaaaaaatgaactccctttttttgtacaaaaaacctttttttttttgctaaatgaaaaaagatgattcatcttttacctggggtctagacaaaaaaattagtaaaaagggggttcaaactcctccccgacttacttttttacctctctatattttgccttaggggcctgttccccccccgggaaccccccgctgggggaccgggccctagaaccacctgaaatgggctctccaatctgggccccaattttgtttgcggactcaacctttgccttgatttcattaacattttcccctgacattgccggtctaaaaacccaaactgcatccccaatttttttggcccccttacggggaaattctttttttgtttaacctaaactttttt

SEQ ID NO: 228135 - DNA, 482 bp, Glycine max
aggaataagtaggctatacttcaacaaggagtttatatagtaagaaaggtacatccttggtaaaagcataaagcaaagctaatctaatggcacacacaaccatgagttcatgaaatccagtcattagttacattcgttgttggtgtgacaatatcttagtaaagtactcaaaatataaattaatagatataataaagtatctaaatgatggttcccccatcagacaaaagaccagttcatgaatacgaaggcaaggcagtgattggaatcatcatcatcgagaactttccatgcaatggcctgctcataagacactggtcgattcatacttgatacacatattcctgctggcagatatgcaaatccctgttgcattatcttggagaactcaatgcagagaaccttcctgccagcttcatcaagaactttatccagcattatgtcttgaagagcaacaagagtggtttcaagcatgtcaagtc

SEQ ID NO: 228136 - DNA, 333 bp, Glycine max
ggagctaagacagtacttcacgccaacatcaatgaatcaactgtatgaaatgatacagtttaagcggctaacgacactgggggggggagaaactgctgccatactgctcaaagatgggaaacattacccgatcgcgattgacattctacttaagactgcagcaaggactgtgcacactatgctgtgtgaagggtgctacctctagccatggagcaatgacctctgaaaggagccaccatgctacttctgtattgacaggatggctgataacatgcttgacaaatagatcacagacctcgactctgtgctggtggctgaggatgccgatggtga

SEQ ID NO: 228137 - DNA, 495 bp, Glycine max
agctcacaccccaagaagaacacctcgtcatggaccttcattccaaatggggaaatagatggtcaagaattgctcgcaggctaccagggcgaactgacaatgagattaagaattattggaggactcacatgaggaaaaagaaggctcaagagaaaaagcatgcatcagcagcatcgcctgtttcttctagttgtcaatcttcactgtcctcaaacaaccatgttgtggattcacatgcttccaaagaggttggagaagagagttgttatgacacaggtggatatgatgatggcatgatgatgggtttaattggtggtgaaaaggggtactccatggatgatatatggaaagatattatgtcagaagaagagaacaccatttattataataatcttcaacctgtctatgaagggcatagtgaagagggatgcaacttctcttgtccaccaccaccaatgattatgccttctccaccatcatgggatcaggacaaca

SEQ ID NO: 228138 - DNA, 554 bp, Glycine max
gcacggcatcgggcccgatgggcaaatgccaagtgacaagacagttggcggtggtgatgatgctttcaatactttcttcagcgagactggtgctggaaagcacgtgccacgtgcagtgtttgtagatcttgagcccactgttattgatgaggtgagaaccggaacttaccgccagcttttccacccagagcagctcatcagcggcaaagaagatgccgccaacaactttgcccgtggccattataccattgggaaagagattgttgatctgtgcttggaccgcatcagaaagcttgctgacaattgcactggactccaagggtttttggtcttcaatgccgttggtggaggaactggttctggacttggttcccttctcttggagcgtctctccgttgattatggcaagaaatcaaagcttggtttcacagtctacccctcttctcaggtgtccacctctgttgttgagccatacaacagtgtcctctccacccattctctcttggagcacaccgatgttgctgtcctcttggacaatgaagccatttatgaca

SEQ ID NO: 228139 - DNA, 430 bp, Glycine max
aaaacaacatagttcaatattgccattcagtttaggtacgtaacaggagcagcgaagcataaaagcaatgcatccaaattaaaaccacatcggtactggtacacatctgaacatcaaacacaacagaaaacagaccacaagaacaagaatttgaagtagattctagtagtcttcatccttttcctggccctcaccagactcagcacccacttctttataatccttcttaagggctgcaagggcctcacgggcttcaaaaaattcacctttttccataccctcacccacgtaccagtggacaaaagcacgcttggcatacatgagatcaaacttgtgatcaatgcgggcaaacacttcagccacactggtggaggttgaaatcatgcaaactgccctctgcaccttggcaagggcgcctccaggaacaacg

SEQ ID NO: 228140 - DNA, 586 bp, Glycine max
aaaaggccatataatttttttttatttgaaataatgtccgggatcatccacaagattgaggagaccctccatgtgggagggcacaagaaagaggagcacaaaggagaacaccatggtgagcacaaaggtgaacacaaaggagaacaccatggtgagcacaaaggtgaacacaaaggagaacaacaccatggggagcacaaggagggacttgtggataagatcaaggacaagatccatggtgatggccatgacaagggtgagaaaaagaagaagaaggacaagaagaagaaggagcatggacatgaccatcatggtcatagcagcagcagtgacagtgattagatcttatatgttaagcaggtgtacggtacgatggtagtgaggagccagaatccctcttcctgctttatgatataatacaaataaaatagcgattccggaaatcatgtctgtagctgctctttttatttatgtgataaatgtaaaacgctttggtttggctggcgcgtgtgcattagggttgaaaaataaatgttataattactcagaaaaaaaaaaaaaggggcgggcgcgctagtgagctcgt

SEQ ID NO: 228141 - DNA, 482 bp, Glycine max
ctgagtaattataacatttattttttcaacctaatgcacaacggccaagccaaaccaaagcgttttacatttatcacataaataaaaagagcagctacagacatgatttccggaatcgctattttatttgtattatatcataaagcaggaagagggattctggctcctcactaccatcgtaccgtacacctgcttaacatataagatctaatcactgtcactgctgctgctatgaccatgatggtcatgtccatgctccttcttcttcttgtccttcttcttctttttctcacccttgtcatggccatcaccatggatcttgtccttgatcttatccacaagtccctccttgtgctccccatggtgttgttctcctttgtgttcacctttgtgctcaccatggtgttctcctttgtgttcacctttgtgctcaccatgggggtctcctttgtgctcctctttcttgtgccctcccacatgga

SEQ ID NO: 228142 - DNA, 572 bp, Glycine max
gtggtgtggtggtggttgtcgtttttgaaatggcagcgtcgtcgtcagagaagcaagtggtggtgataggcatagacgacagcgagcagagcacgtacgcgttgaattgggctctggataactttttcccgagcccaattttcaagctcgttctcatccactccaggcccaccgccacctccgctgtgggcttcgccggccctggagccgctgaggtcttgcctattgtagattccgatttgagaaagattggcgccagagtcctcgaaaccgctaaacaactttgcatcaacaaatccgtaaatgatgtgacagcagaagtggtggaaggtgatcctagaaatgttctttgtgatgctgtagataagtaccgtgctgcaatgttggttgtgggtagtcatggttatggggctataaaaagggcggttttaggtagtgtcagtgactattgtgctcatcatgctcactgcactgtgatgatcgtgaagaagccaaaaatcaaacactgatctgtaatggctgcgtctatatagtacaacaataaacataatcctttcagcccaagaagagag

SEQ ID NO: 228143 - DNA, 514 bp, Glycine max
gcaataaactagtacaatatttttttactattttattttattaaggatgaaaagagcagtaatggaattgaactcatcagttcaagaacttttcgtgtacaatgtaaggtaaagtcctgatacgtacatattttctgatggttccatctttaaaaataaactgtgcctcaacgtatcaaaccataaagtcaataagccatatccatacaacaagcatagttacgaatttctgtgaacattattttctttctctcttctttggctgaaaggattatgtttattgttgtactatatagacgcagccattacagatcagtgtttgatttttggcttcttcacgatcatcacagtgcagtgagcatgatgagcacaatagtcactgacactacctaaaaccgccctttttatagccccataaccatgactacccacaaccaacattgcagcacggtacttatctacagcatcacaaagaacatttctaggatcaccttccaccacttctgctgtcaca

SEQ ID NO: 228144 - DNA, 548 bp, Glycine max
ctggggacccaaatttctaatatataaaaatataatggttctcatacagatttttctgctacacaggtgtagttacattagtgaaaatggagttaaacacaagggaactgcaaaagggagcagaagattgcattgcatgtaggcatcctcattgtccagggacaaagttagtggcataagcccaagcattgttggcaacaggatcagcaacgtggtcgtaaaggttctgaatagggcccttgccagtgacaatagcctgaacaaagaaaccaaacatggagaacatagccaagcgaccgttcttgagttccttgaccttcaactcagcgaatgcatcagggtcatcagccagaccaagagggtcaaaagcaccaccagggtagattgggtcaagtccttcaccaagtggtcctccaccaactctgtaaccttcaacaaaccccatgagcacaacctgaacagcccagatagcaaggatgctctgagcatggatcaggtttgggttgcccaagtagtcaaggcctccctctgagaagatctgtgcaccg

SEQ ID NO: 228145 - DNA, 561 bp, Glycine max
tttttttttttttttttttttttttttttttttttttttttttttttttttttttttttttttttttttttttttttttttggggaaaaccaaggtcgaaaaaaagtccccacccccaataaaaaccccggggcgtaaaaaaaaaaaaaggctcacaaaaaaaaccccagaaaaaattccttttttttttttaaaaaaaaaacccccgggggaaccaaaaaccctggggggggaaactataaaaacccccctgggggggaaaaaaaaccttccttattcaccccaaaccccccccgtttggggggtttggggatccctcccaaggtccccgggcccggcccaatttggtcccgggtttccaatggggccccccgggccccccccatttttaaaaccccgcccttaaaaaaaaaagggggggggggggggaaaaaaacctcgttttttttggggggaaaaaattggggcccccttgggggggaaaaaataaaaaaaaacaatgatggccccttccccacaaaagggggggggggaaaacccccccgggggtaaggggggttt

SEQ ID NO: 228146 - DNA, 524 bp, Glycine max
gcagacttaacaacagcacaaagcgggttactgtctgttcaagctaccatctctctctctctttcttagtgcctccttgccagaagttaaaatggcccaagaaactttcctattcacatctgaatcagtgaacgaggggcaccctgacaagctctgtgaccagatctccgatgctgtgctcgatgcatgcttggagcaggaccctgacagcaaggttgcctgtgaaacctgcaccaagaccaacatggtgatggttttcggagagatcacaaccaaggccaacgtggactatgagaagattgtgcgtgacacatgcaggaacattggttttgtctctgatgatgttggtcttgatgctgacaactgcaaggtcctcgtcaacattgagcaacagagtcctgatattgctcaaggtgtgcacggccacctcacaaagaggcctgaggagattggtgctggtgaccaaggtcatatgttcggctatgccactgacgagactcccgagctcatgcccttgagccatg

SEQ ID NO: 228147 - DNA, 508 bp, Glycine max
catcatataaaatatatatgttctgaaagaacacatacaagtacacaaaaaaaagggggaaattcataaaaaaatacagaaaaaaaaaaacagaattgagtaagagggaaggaaacatagagaaaattttagcaatcagataataagaagccagtagtagtgcaaaagtcccttgccaagagtgttggaaccccttttagttaagcaggtaccttctcccccttgagtggcttcaccacttcccatgtgaagtcagggtcatctctgccaaagtgtccatatgcagcagtcttcaagaacctgccatttccacccctcttgagatcaaggttgatggagatcatgccaggcctgaagtcaaaactctccttcacaatgctgaggatttccttgtcagggatcttcccagtgccataagtgttaacaaacacagacaagggctcaggcacaccaatggcataggaaacttgcacaattgccctcctagcaagtccatttgcaacaatgc

SEQ ID NO: 228148 - DNA, 520 bp, Glycine max
agctgctacaaaggtcaaaatggcacagaaagtggctcagggggttgctgagaaaagaagaggaagaaggggtccgggcagtgttattggatccagtgctgctggttgcatttgtgctttcctcacaatttttggtgttgggggagaggcattttctcggctatggagacttgggtttgttgccagtttctgtaccaagttgagtgacactgtctcaagtgagatcgggaaggcatatggaaaaacaacgtgagtggtgaattcaggtacctagttacaactttcaagatagtcccaagaggcacagaaggggctgttagtgttgaaggaacattggcaggaattttagcatccatagttcttgcacttgtcagttttctcatgggtgaggttggttcacatgaagcaattatatgtgtactagctgctcagattgctaatcttggcgagagcataattggtgctgcacttcaagagaaagaaggatttaaatggcttaacaatgatgcagtcaatgtca

SEQ ID NO: 228149 - DNA, 579 bp, Glycine max
  unsure (1)..(579): unsure at all n locations
agcttttcagctggatccagcaaaatggggagtcaatgtgcaatcattatctggatccccttctaacttccaagtttacactgctttattgaaacctcatgagagaattatggcacttgatcttccccatggtgggcatctatcgcatggttatcagactgacaccaagaagatatcggctgtatctatattctttgaaacaatgccatacagattgaatgagagcactggttatatcgattatgaccagttggagaaaagtgcagcactttttaggccaaaattaatagttgctggtgctagtgcttatgctcgcctttatgattatgcacgtgttcgcaaggtctgtgataagcagaaggcagttctgttggctgatatggcacatatcagtggattggttgctgccggtgttattccttctccttttgattatgcagatgttgtaacaaccacgacacataagtcacttcgtggaccacgtggngctatgattttcttcaggagggtgtgaaagagataaacaaacagggagggagtgttgtatgactttgagacaaaataaccagctgtttttct

SEQ ID NO: 228150 - DNA, 548 bp, Glycine max
ggaaattgaggaggaattaaggtaatttatttcaaatactagtacaaattcaccaaatagcaaaatccacatgctcgacctcctttttgctacatcagcagtacgatcacaaggaattttcaccatgaaatcaataatatatttgaaaagctgaagggaaatttctcccttttctctttcatttaaaccattgataatatcattctcattttcatccaagactccggtactatccattgagcaacgtgttgttattaattccaaaagcttccaaataatactccagaagaagttccatctgtcgcctttcacttaccatacttcattggttctatgttaaaaccaatagtgggaaacttcttagcataatcctcaacttcatgacagagattagcaatcttagattgaatttgttcatctgattgcatagctgccacaaaatctttcaactttgtaccattggtattttccttaatctgcaaggcttacttgacagccgcattaaaggattcagctactttttcaaaatctttctcaacaaatcccct

SEQ ID NO: 228151 - DNA, 541 bp, Glycine max
gacattctatgaataacatttccaaattgattaaaagaaatttcacatgaccactcttattaaactattatttcaacatagacaatgaaatccatggccaaacttcataaatcatggaccaaacctagttaagaagagaggcaatcaacaatccaacaatgagcacaagataaacgagacattgtgaggccgaagatgaattagatgaagaagaagatgatgatgcaggggaagaggtctcagagccagacactgttgtgatcttcaccttcatgccttgatcgcaatggcccattgtaccacatgcaaagtaacgtgtgccaggcttgttcagtttcacaacatcattgccactgctcattgagttcactgcattgccaagatcacaattcttgtactcactctcactacctagttcaaccacactatgcaaagaagagtacttgaaaacaagttgatcgccaaccttaaatgtttggcctgaaacccaagaattgaagtctgttgattcatcccaaccttggcttccaccaactacatg

SEQ ID NO: 228152 - DNA, 535 bp, Glycine max
gatcatcaaccatccaaggatttaagacgaaaggaacaagtacaaccctcgaaagtgaattaggaagaaaacacaaggaaggaaaaccatacacagaagaagattccagagaaattcaataatacacaatttttttttttttattttcatttccccccctctagtagtcagtggtgggaagctgctcgtgggtgtggctgataaagacaacctcgtaaacaaggccagcgattccaccaccgatgagaggcccggcccagtagatccagtggttggtccaggtccagctcacgacagcaggcccaaatgtcacagcggggttcatggccgctccagagaaggccccacccaacaaaatgttagcgccgacaatgaaaccaatggcgatgggagcaataattcccaaattacccttcttggggtcaatggcagttgcgtagaccgtgtacaccagaccgaaggtcatcacgatctccaacaccaaggcgttgccaactccaactccagcggagagtccgaatgctggaacagtgga

SEQ ID NO: 228153 - DNA, 550 bp, Glycine max
agaaaaatacttttctcatcttcattcaaagcatcataacttactttaagtatgcatagatttttttatgaggaattctttcatatccatctagagcagatttccattcttctatactttttccaaataagttggaacctattacttctaaaacaaatggaagacctgaagcataagttaccgctcgattcaaaatatcatgataacttggatcaattcctttttcaactcaaaagccttctgagtaagtaattgaagagcatgtttctcattcaactctctcaccttatatgttattttaacattgtgtagagctaacaaatgttcgtctcgagtggttatgatgattctactgccaagaccaaaccaatcagggctgccaataagtgcttgtaactgtttatcttcatcaacatcatctagaataagaagaacctttttttgcttgagcttacgctttataatgggaattccttctctccaatttgttaacttaatttctccagcggttttagaaagaaggaagctttggagtttttctaacccattt

SEQ ID NO: 228154 - DNA, 355 bp, Glycine max
aaaacaaggatttaatttgagattatgatgctctgccaaaacagattggttttgccaaatactcgaaattgcaaatagacccacgtcaaacgtactacaataaattccttacacaatataggcttggaataaaatgcaaaatattaaaaactccaaagcattgtttttggctcaagaaaataaaacacttattaattgggtaaactgaatcgaggcaaagcaagcccctcagaatccaagcttggggcgaccccagtgacggcgcttcgcgttgtacctgatggtggtgtcggtcctcatgcggatccagtaggggatgggcctgttctgcctcatctttttcgccaactttttt

SEQ ID NO: 228155 - DNA, 573 bp, Glycine max
taaaacagaagaagcaaagatgatattgcagttcttcgtgctttcacagagaggcgataacatcgtctaccgcgactatcgtggtgaagctcaaaaaggaagcgctgagacatttttccgaaaagtaaagttctggaaagaagatgctgagggagatgctccacctgtttttaatatagatggtgtgaactacttccacgtaaaggttgctggattgctatttgttgctactactagagtcaatgtctccccttctcttgttttggaacttttacaaagaattgcacgtgtcatcaaagattaccttggtgttctcaatgaagattcctttagaaagaacttcgtgctcgtttatgaattactggatgaagtcattgattttggttatgtgcaaacaacatccactgaggatttgaagtcatatgttttcaatgagccaatagtgattgatgctgcacggatgcctccacttggccctgcttccatttttatgcaagggaccaaacgaatgccaggtacagctattacaaagtctgtggttgctaatgaaacccgtggaagggaagagggatg

SEQ ID NO: 228156 - DNA, 537 bp, Glycine max
gtggaagtgaccgaaggaaagaaagaagtggaagtgatcgaagagaagaaggaaacagaagtgacagaagaaaagaaagaagtggaagtagaagtgagggaagagaagaaggaaagtgaagtgaaagaagaagaaaaaggtcgggaggttgttccagaggaagttgagatatggggaattcccctgctgggggacgagaggagcgatgtgattctgctaaagtttcttagggcaagggatttcaaggtgaaggaggccttgaacatgataagaaacacggtgcgatggagaaaggaatttggaatagagggtctagtggaggaagatcttggaagtgattgggagaaggtggtgttcaaggatggatacgacaaagaagggcacccggtgtactacaacgtctttggggagtttgaggacaaggagttgtacagcaagacgtttttggacgaggaaaagaggaacaagttcataaggtggaggattcagtcgttggagaagagcgttagaagccttgacttttcttcgaatgggata

SEQ ID NO: 228157 - DNA, 581 bp, Glycine max
tcgaaagtcggttgctgctagtttggtccaaggtgtttatgttctagagaaggacaggcaagaacggcgtgaaggtcctgatgctcttgcactgccttggtgggcgttcttccactttaagttgttttgttcgcttgtcgatgatgttgattcttccatctttggtgctatttatgagttcaagcctccatcatctatgtgcaatgacaccttacatagaagtccacgttatgtaattgccttccgagggactataaccaaggcagactcagtttcccgtgacatcaagttgggtatccattttgtgcgaaatgggcttcatcaaacttcacgtgctgagatagccatccaagctgttcgaaacatggtggctactgtgggtgcttccaatatctggttagctggccactcgctaggatcagcaatggcaatgctaaccgggaaaaccatggccaagactggcatatttattgagtcttttctcttcaaccctccatatgtatctgctcctattgagagaattaaggacaaaaaattgaaacatgggcttagatttgctggcagtgtagtaacaagctgga

SEQ ID NO: 228158 - DNA, 516 bp, Glycine max
gagaaaatcagagatttttatcattctatatattggggaatgaatattctacgccatcagtgcataaatgagtaatttacatttattgaaatcacaagctaaacttaaccatgaaaaaaaatgggataaataaaacggggaaagtaaataggtagcctcaaacgctcatttggttgaatgagaatcctatacccttttttctccaatgcagaagaacctgcctctgccaatgcttaataagaatactagtcttgacataatgctaagtggaaaattagatctgattagtccaagacttcagaaagccaaatgcttttccaaatggaaatctcagtctcactcttaatctttctgattcctccataaaaaccatctgcttcatttccttcctctctatgatctcttctacttataggtgttttcccccaacgcgagtcaggattgtactgattgaactctagcaccactgtgtcactactatgacaacggcagtaattttcattcccatcgcatact

SEQ ID NO: 228159 - DNA, 494 bp, Glycine max
gcaatcaattgggacaaaattctgataaaatttccattgcatcaacacagtaacattgcatagccaaacaataaattgtgagtatagggagaaaaaaaaaaacgaacagtttaggtattgatgagatggcattagacattgaatggagtagtagtagtagtagtcatgaaacacgcaaattattcatccacacccagcaagacatccactgaagggagtgattaacttaacaacactcttaagcttgaggcttctctgacttgagtggcttcacaacttcccaggtgaagtctgcatcatcccttccaaagggtccataagcagctgtcttgaggaacctatgaccacccctcttaaggtccaagttaatggtgatcattccaggtctgaagtcgaaattctccttcacaatttgcagaatctccttgtcaggaatcttcccagttccataagtgtccacaaacactgacaagggctcaaggacaccaatggca

SEQ ID NO: 228160 - DNA, 524 bp, Glycine max
aggcacgagataaccactttttaccatatatatatagagagagagaatacgaagcacactgatcacaggatgatgctctctttaagtagggaagcagatcttatcagtacacataggtaggttgaaattctagctctagcaatctagctagagaaggtagtacttgcacaacacacagcacatgataatttattttatacacaatctcattctcatggggctcaagatgcatggactaattaagcaacaatgttggtctgataggcagtgtccacagataaattgggtacccataaaatggccttgcttccaaggaaatggcaaacagggttagttccaggatcaactcccataagttgatgaagcatttgatgattcattccagaagtatttgagtggcaaatagcaagtgcctgagttttggttccatcaccagccaccaatggaaccatgaaagctgttgtttcacggacttcatggcagtaaatactgcagttcctgaatttagcctatgacacatcact

SEQ ID NO: 228161 - DNA, 518 bp, Glycine max
cttcaaacacgcaatctttattgtatacgagagaataataaagccaattctcaactcaaattgttcgttgcaaacgttgcaatgtttatgtgcgtaacggggtaatacaaaagataggaacaagtattgtttcagcttaacacgaaaggacaacacacacaaactttcctcattcaacaaattgcaacatccactgcaacatgtaacactcttacaaagcatttccttcacgaagattagaaaagaaaaaaaaaaatacttgcaagctcagaaaaacaaaactcaatatatttcaagactaaaaaatcggtaatgattttcaagcaatattgtggtatgggttaataataatagtataatctatatatatgaaggcaaacattatgcagcttgcttgagcttctttgtgatgccggcaatgtacttgccttggtggaatgcttgctgtaactcgagctcacttggctgtcttgagccgtcaccggcataagttccggcaccatatggacttccacctt

SEQ ID NO: 228162 - DNA, 430 bp, Glycine max
gaaaaccgaattatcatttattaactgtaacttgctttggaacaattcaagttcactaacaacatccatgaaatccaatcattaaaaattggaaaaccaaaccaaaccaaaccaaaccaaacttattccaacaccactcatcaaacagaaaaacaatccaaactttcaaaactcacaaactcaagaacaacttgaaattactactaacaaaaacaagaccaattggtcaaaaaccatgaatcttgatctggtccttcctgacaaggccagcctgaacgaggaagtgggagacgttcttacgctggtcgccttggagttggatgatcttgccaagctccttgtcctgcaccacggttccgttgcagcagaactccttcttgaggtccttgaggatcttctcgtagctgaactccttcttcagcccttgcac

SEQ ID NO: 228163 - DNA, 501 bp, Glycine max
ctcgtcaacattgagcagcagagccctgatattgctcagggtgtacacggccaccttaccaaaaaacctgaagaaattggtgctggtgaccagggtcacatgtttggctatgccactgatgaaacccctgaattgatgccattgagccatgttcttgcaacaaaactcggtgctcgtctcaccgaggttcgcaagaacggtacctgcccttggctgaggcctgatgggaagacccaagtgaccgttgagtattacaatgacaatggtgccagggttcctattcgtgtacacaccgtgctaatctccacccaacacgacgagactgtcaccaatgacgaaattgctgctgacctcaaagagcatgtgatcaagcctgtgatcccagagaagtaccttgatgagaagaccattttccacttgaacccttcaggccgttttgtcattggtggccctcatggcgatgctggtctcaccggccgcaagatcattatcgatacttat

SEQ ID NO: 228164 - DNA, 523 bp, Glycine max
  unsure (1)..(523): unsure at all n locations
tgctcatttacacacctctccaacctttcactttcagctttatttgaatccctctctctcctttccaaatggccagcgttgaggttgcacatcaaacaccaacaacagttccagaaaatgaaacaaccgaggtaatcaagacccaggaaacaaccccggaaccagtaccagccactgaggctcctgcaacagaacaagcagcagctgaggttcctgctcaagaagaacaacaagcaactgaggttcctgccccagaatcaaccaccgaagcaccaaaggaagaaaccaccgaagcaccaacaacagaaacagtagaaacaacaactacagaagaagccaagccagaggagcctaaagaagttgcagttgagaccgggagggtggtgacaaaggagacagaggaagagaagccagcagcagaagagaaatcagaggagaaaactgaagaagtgaaagaagaagcagaagagcctaangaaactactgaaacagaaacagaatcagcaccagcagcaaccacaga

SEQ ID NO: 228165 - DNA, 485 bp, Glycine max
aagcaagttataaagtaaatatcatttattcaaacctaaagaaacacaataacacattatcacaaactcatgtaaccctgccaataaaataaaccctgatccctaaactccagcaccagcagcaggttgctcacttcaatacacaactcctagaatttctcatgtcaccacgtggtaagcacgctgatgtggagccaagtgttgtgctcacacgtaggtataccctccataatacaaccaaagacttaaccatcatataataataatatattaataataaagtgaactaaagaaataaataaaaaaaaaagcttttcaacatgacatgcaaaatggtggacctaatgatccccacaactaggaccatttttaaacttgtttttctcactcacactggccataagtctaagcttcagttttctcaacaggaacctctactggggcttccactgtctcaactggcttgctctcttcctctggggttg

SEQ ID NO: 228166 - DNA, 355 bp, Glycine max
gtcaatctgcattttccatttctattattttttaacaaacacatttgtattacactgggtgaatcacgctactttgtacattgcagggaacaaaaattgaacccctttgcatttgttttatgtcatgacctctagtgcctctcttgtttgtccaagtagattgaaaactgttgctgctatgtgagatggtgtaagaccagctgcactcaattggtcaaccggtgatccatggtcaatgtaacaatcaggaagaacaattggcctccactttaatttcccatcaagaaggccatcaagggccatgaactgaacaacatgagatccgaatcctcctattgacccttcttccacagtg

SEQ ID NO: 228167 - DNA, 506 bp, Glycine max
aacaaagtatagagtgaaagaatgggtgagaaaagcaagattttgatcataggaggcaccggctacatcggcaaacatatagtggaagcaagcgcaaaggctggaaatcccacttttgctttggtgagggaatccacactctctgacccctccaaggcacaactcatccacaattttgaggctttgggcgttaatttggtccgcggggatctgtacgatcatgagaagttggtgaaagctatcaagcaagtagatgtcgtcatatccacgctgggtcacctgcagcttgccgatcagctcaagatcatcgctgccattaaggaagccggtaatgttaagaggtttttcccttcggaattcggtaacgacgtggatcgtgtccatgccgtggaaccagcaaaatctgcattagctatcaaagcccaaattcgacgcagcattgaagccgaaagcatcccctatacgtacgtttccagcaactacttcgctggctattttcttccaca

SEQ ID NO: 228168 - DNA, 516 bp, Glycine max
atctcaactcgtaagtcatttattatttttcaaccattcaagtaggaacattctacacatgaaaggcaagattacatcacatagcgatcttttgacataaaacacaatcttccactctccaaatcaacaactcagattatttaaatatccgatcacaagagcatctttctccttttaaattctcaagcgaactgaccaaggtattcttccacggtggtgtagttgacatccgggtacaactcagaagcctcaaccccgaaagatggctcaatctcaaagttggtgtggtcacccttcacgaacactgagtggttgattgctaataccacattgattggaagaggtgcctcttcgatgtccttgagaaccttctcctctggtacataaattttttcgagggtcttgccaatcttgttctcccacaaggccacaagctcgttgaacgagtaaatgttcttagggggcctgaggtagagaatcttgttcaatgtcctagggtcatccacagccctgatg

SEQ ID NO: 228169 - DNA, 551 bp, Glycine max
gtaacataacaaaaaagtagtggcttgtgttgtgtgactgagggccaaaggcaaaacatggaggtggatcagatgcagagagagtgcttggactacaccaaatccttattcttggagggcttcttggatggtcaatttcttcaacttcagcagctacaggatgagaacaacccggactttgtagttgaagtggtctctctcttctttgaagattctgagagacttctcaatgaccttacctttgctctaaatcagaaaagtattgacttcaaaaaagttgatgctcatgttcaccagctaaagggtagcagctcaagcataggtgctcagagggtaaagaattgttgcatttctttccgcaacttttgtgaggaacagaacatagacgcgtgcctcagttgtctgcaacaagtaaggcaagagtactgccatgttaagaataagtttgagacactgatcaggcttgagcaacagatcgtggcagctggtgggtcaatccccatgatggaatttagtttctaaggatgtgaatttgtagagaaggaaacaag

SEQ ID NO: 228170 - DNA, 504 bp, Glycine max
agatggaaacttatctgagttaggtcttcatgaaaatccatacattcatcagagacataaacataaaagagaattttcaccaaagatgaagtggatcacaaaatactcttggttccttctctacaaattcacatccttagaaactaaattccatcattgggattgacccaccagctgccacgatctgttgctcaagcctgatcagtgtctcaaacttattcttaacatggcaggactcttgccttacttggtgcagacaactgaggcacgcgtctatgttctgttcctcacaaaagttgcggaaagaaatgcaacaattctttaccctctgagcacctatgcttgagctgctaccctttagctggtgaacatgagcatcaacttttttgaagtcaatacttttctgattttgagcaaaggttaggtcattgagaagtctctcagaatcttcaaagaagagagagaccacttcaactacaaagtccgggttggtctcatcctgta

SEQ ID NO: 228171 - DNA, 557 bp, Glycine max
aagccagaacaaacattggagatattatatatatatatatatatatatatatataatcgtacaatttttcattttggaagtccaaatatacagaaaaataaaaaacataaaagcatttcaataagaatatatcaactatgctccctgctttatttctttttctgcactcttttcttaatagattttttcttcttctcttattcacaccaatgaacaatgagaatttttctccctttgcactaggcaatctataaacaacttgtgtgttgtccaattattccttggcagtgctgtttctttgccctgatgatgccattagcacagcaacagccactataaacataaacaacatactccctagcagtatatatgttcttcttgatgatttcctgtactctccaaacagaatcacgccccaaaaagtgcttacaagtggaagtgcctggactgcatctgctgctgcatatcctgctgcttgaccacccataaattgaagaccattcccaaacccacaaagtagaccagccaacaaggcccagactctgccatctgagtct

SEQ ID NO: 228172 - DNA, 411 bp, Glycine max
aaacacaacacaaaagcttattcattaggtctcatccattaatttccattggaggccgaaaaccgaaaccaaaaatccgggggggtgaaatttcaaaaagcaaaaacaaaggggaatggtgtttaagtacaaacaaacaaagggggggggggggtacaaatgctttggaaatttttcacacttaaaaacctgggggcttgttggggataaaacttttgccctgcacttggggaacgttggcgaatcccatgataccgatgaagccgcggggggatgcaatcttagccttttgaagctccttcaacacctgggaaggatcagggccacccaacataggggggttccacatgggccaggagcggccattgtattatcctggggacctgttgggctcacggggcacaaaaccgg

SEQ ID NO: 228173 - DNA, 558 bp, Glycine max
aataaaaatacttttttttttctcaaatatactcgagtctatccgaaatttggagaaagtagcttctcattgtcctttttcatttttaagaaaaaggaaaaggaattctagttgtagtcaagccctcatgaccagaaaatacaccgataaataggaggctgatagttgatatatgttctaagggtgatgcccaacagctttgccgcaaagcagaacattgttgggaatgtcatattcattagcaaggcttttctgtgcatcccacactctgagatagaactgttgcccaagatattgcctttcccatattgcagacctcaagttccacatgccttggttatccaaagacaccaatatagtagtccaggattttggatacacctgtgtagtgtgtctagtcagggcatccactagattatatgttttcctgctggcatctgtccactggccgaaaccatgaccaatgacccaaaaatcataacaatcaagatgccaagattgcatggtgttttcgttgttctggaaaataacctcaataaaatcatggagagaagtttg

SEQ ID NO: 228174 - DNA, 550 bp, Glycine max
  unsure (1)..(550): unsure at all n locations
cagcattcttctgcaattcaaatcaaattttcaaaccatggcttcctccaccaacgctcttcctcccaccggcaacggcctcatcgtgagcttcggcgagatgctcatcgatttcgtccccaccgtctccggcgtgtcccttgcggaggctccgggcttcctcaaggcccccggcggcgcccccgccaacgtcgccatcgccgtcgcgaggctcggcggaaaggcggcgttcgtcggaaagctcggcgacgacgagttcgggcacatgctggctggaatcctgaaggagaacgacgtgcgatccgacgggatcaacttcgaccagggcgcgcgcaccgcgctggcgttcgtgaccctacgcgccgacggagagcgtgagttcatgttctacagaaaccccagcgccgacatgctcctcacgcccgaagatctcaatctcgaactcatcagatctgcanaagtattccattatggatcgataagcttgatcgtggagccatgcagatcagcacacctgaaggcatggaagttgccaggaagcaggatgctt

SEQ ID NO: 228175 - DNA, 504 bp, Glycine max
ctggaccgccactcgaacagccccgaaccggtttacccgcgcctccggttcattcgaagctgcagcgcgtcgctcgcaccggctattctgggtaaacttgaggaggccttcggtgcgccagtgctggaggcttacgcgatgacggaagcgtcgcatttgatggcttcgaaccctttgccgcaagatgggccccacaaggccgggtcggttgggaaacccgtgggtcaagaaatggttatattggacgaaacgggtcgggttcaagatgctgaagttagtggagaggtttgcattaggggtcctaatgttacgaagggatataaaaataacgtggatgccaatacggcggcgtttttgtttggttggtttcacaccggtgatgttgggtacttggattctgatgggtatttgcatctcgtgggtcggatcaaggagctcatcaaccgaggaggagaaaagatatcaccaatagaagtggatgctgtccttctttcacacccagac

SEQ ID NO: 228176 - DNA, 541 bp, Glycine max
gagaaattatttaagatctttaaaaccttgaaaacattacactgtgaacatttcacatgaatcattgaaaactacaatatactgtatcctgtatgaaagaccatttgcagaaatatcctcctcctaaatgccaagttgccaaactactgttgaaatttatggtgtgtggactccaactatgtatggccaggtatagagtcttcaaatgtaggacttgagttgctcaaatttgagagacaaagtgttctgccacaagacgacgcaaaatctttccggtggcagtcttgggcaaagaatcggtaatgaagacctttttggggactttgaaagatgcaagattcttcttgcaatatcttagcaactctgcatcatcaatgtctgatccttctcttgggattacagcacagtatatctcctccccatactttggatcaggcactccaaaagcaactgcctgagcaatgtctgggtgtgaaagaaggacagcatccacttctattggtgatatcttttctcctcctcgggtgatgagctccttgat

SEQ ID NO: 228177 - DNA, 364 bp, Glycine max
  unsure (1)..(364): unsure at all n locations
ctctctgtcacttcctacacctgtttctttggactcttgcagtttctcgtcattgctttgctccttgaaagagacgcgcaggcatggcttttccactctggtggagaagctttcactattttatacgcgggagtggtggcatctggaattgccttcgctgtacaaatatggtgcattgacagaggtggtcctgtgtttgttgccgtctatcaacctgttcagacttttgttgtcgccatcatggcttccattgctttaggagaagagttttacttgggcgggatcattggtgccgtgttgattgtagcgggactgtacttttgntttttggggnagagtgaagagaggaagtttgcaagggagc

SEQ ID NO: 228178 - DNA, 505 bp, Glycine max
cagcagcagttacgactttgggattttacatatggcacttggccacaacacacagaggattcttcttatgctgggtaactcctggcaacacttcaggagcaatgtcttcctttttcattccttggggccattcccagtcaaaggaataaagaagattggcaagtttaagatccaatgcagcaaatgccatattcataccagggcacaatttacgaccggcaccgaatggaataaactcaaaatcttgtccataaagatctatggggcaatttaaaaacctctcaggtataaactcttctggatctttccaagccttaggatctctatgaattgcccaagcattcacatataataatgtcttggctggaatttcgtagccatctaacatgcattttttattcggttctctgggtataagtaggggtgctggtaagagcaatctaagggtgtcttttatcactgcccttaagtaggaaaacttttggatattatctttatgcaagaa

SEQ ID NO: 228179 - DNA, 566 bp, Glycine max
aaagtaattctccctatgatctcataaatatttcactttggaagaaaagatgtgagcagaggataggcaaaaagtgttacaaatgtcaaaccaacacaacagttataagttatacaatgattaaccagaaaagtcaactaagaaaaaattgattcaaaaagattattcaactataggttcttaactcttaaatctgctttgtgcctttagaaatttcttccaacagtcattcgccaagcatatggcaacttaaaaacatattggaaattaagaattgtgatctcaaattctactccatgactgcaacttctccagcagcttttattttttctattatttcatttgcctcctcttttgtgattccttgttttagcacaactggaactttttcaacaagatctttggcctctttcaatcctaggttagtaaatgctcttacctccttaatcaccttgatctttgcggcagcatcaaatttcttcaactttacatcaaaagctgttttctctggctttttttcctcaacctttggtccagcagtaccaccttttgtacccatgcccatg

SEQ ID NO: 228180 - DNA, 510 bp, Glycine max
ataggtaatagccatccatgaactttgatatcaatcatcctatgaagaaacagagaaattaaacaaggaggcatccatatgcctaatgaggaattaaaagtatagaatttcaagccaggaataattaaatgagaaagaaacagaaaacagatgttacatttttgaagaccaaattagtactacccttattgatcctaaccataccctcactgataataagattcataacactagtgccgtcaaattctgcttcagttgttgagaggtgcaggatatctgttgatgcaatcaagccaagggttcctagaaggcttggtgactcggcgcatggcgcgccaaaccacactgttgcacttgaagccagagccaaatgcgagttgccaaacacggtctcctcttctaacactctcttttgcttccatgtaagccaactcataccaaatgctgctgctagaggtgttgccaaagcgatgcagcgtcattctagacgcttcgatgttcttgtcactc

SEQ ID NO: 228181 - DNA, 516 bp, Glycine max
gtaaaaagcaagtaacattaagttggattcggatacacaagataattcacattatctgaagtacttcaccaaacacaaatctaaaaactctcaaaagtcatttcgttctttgacgctcactttccggggacgaagttggtggcataggcccaggcgttgttgttgacagggtcagcaaggtgatcggcgaggttctccaatggaccctttccggtgacaatggcctgaacaaagaagccaaacatagagaacatggccaatcgtccgttcttgagttccttcaccttaagctcagcaaaagcctctgggtcatcagcaaggcccaatgggtcgaagctgccacctgggtagattgggtcagtgacctcaccgagggggccaccagcaatacggtaaccttcaacggcacccattaggataacttgtgtggcccacatggcgaggatgctctgggcgtggatcaagcttgggttgcccaatagtcaagcccaccctcgctgaaaatttgggacccgg

SEQ ID NO: 228182 - DNA, 533 bp, Glycine max
  unsure (1)..(533): unsure at all n locations
cagaagaccaaatcgaggaatccggaaagggaagaagaagaagaagaagagaaaaaaacagaagatgggaatgaaacaagtcattaaaaacctcgacgcctttcctcgcgccgaggatcacttgttgcagaaaacccaatctggggctctcgtatccgtaattggtctcattataatggccacattgttcgttcacgagctcggttattatcttacaacttacaccgttcaccagatgtcagtggacttgaagcgaggggaaactcttccaattcatattaacatgacgtttccttctttaccttgtgatgttttgagtgtagatgccatcgatatgtcgggcaagcatgaggtggatcttgataccaacatatggaaacttcgcttgaacagttatggccatataattggcactgaatatatatctgatcttgttgaaaaggaacatacccatcacaagcatgatgataataaaaatcatgagcattcagaacagaagattcatttgcanaaccttgatgaatctactgaaa

SEQ ID NO: 228183 - DNA, 437 bp, Glycine max
gcaacagcagcaatgcccatgtcggcttcattcctttccctctcttgtgggctccgcgcccttctcaattagaataactaacctctttctttctttctctctcttctcattcacacaaaaaacataatgtctgtctcacgaccaaaggtggctcggcctcttgctctccatcatcacagtgcttatggcagcctcaccatgtctgtccacacatgcactcccttgcttggatccactcacaagctttgcttcatttcccccattaagctcaatgctcctcgctttaattcctctgacgtatctggctccgatcttttgaagaacaacatacccaaatcaaccaccaatctgcttattacgaaagaagaaggtgggcggctctatgaagacatgggattaggcaggtgctttgaagacatgtgtgcccagatgtatta

SEQ ID NO: 228184 - DNA, 439 bp, Glycine max
agaaaggtcaaaatcatctaaaaaattagattagagaagtacactaaaagcataaatgattgtcatatttgcaacaactgacaactaaaaggaaggattgggaattgtcattgttgactagttccatggataataataaatataatagaagaaaaacaaaacttaacctaaagaacaaatcctccttatattttgtctgtaacgtttgatctctagtgagtatactgaaaaagaacatgaatctaaaactgaaaactcctagcagatagatgcatgatgtcagacttaaaaaacattagacatgcgccgtgccttccgtgaattttgggtcctaacatttgttcttgccggcaggtccaattccaaaaccttttggatcagctgagacattctctataagctggctgcagtgtggatgagggctctcatctggaaactc

SEQ ID NO: 228185 - DNA, 470 bp, Glycine max
tccattctctctgtgtatttccctacctctcccttcaagatgcagatcttcgtcaagaccctcaccggcaagaccatcacccttgaggtggaaagctctgacaccatcgacaacgtcaaggccaagatccaggacaaggaaggaatccccccggaccagcaacgtctcattttcgccggaaagcaacttgaggacggccgtacccttgctgactacaacattcagaaggagagtactcttcacctcgtcctccgtctccgtggtggcatgcagatcttcgttaagacactcaccggcaagaccataaccctagaggttgaaagctccgacaccatcgataacgtcaaggccaagatccaggacaaggagggtatccccccggaccagcaacgtctcatcttcgccggaaagcagctcgaggacggccgcaccctcgccgactacaacatccagaaggaatcaacccttca

SEQ ID NO: 228186 - DNA, 565 bp, Glycine max
  unsure (1)..(565): unsure at all n locations
gattgttgtgactcgttcttcttcgtcgttatcttcttcttttgttgtttgtgtgtttgttttttctctcacctgaaaatgtcttgctgcggtggtaactgtggttgcggaagcgcctgcaagtgcggcaacggctgcggaggctgcaagatgtacccagacttgagctacaccgagtcaaccaccaccgagaccttggtcatgggagtggcaccagttaaggctcaattcgagagtgctgaaatgggtgttcccgctgagaacgatggctgcaaatgtggagctaactgcacctgcaacccctgcacttgcaagtgaggtgttggagagctaaagcttcaagcagaaatggcccttagaaataatgataaaaactatatgtagtttcaaaacttcaaaattatgtagtatgtattatgttgcactctggtgttttgtgtctaaacaaacacccttagataaagtggtcatttcttgcccttgagcaagttcaagtgttttggacttgtgatgggtgtgttaaggtcatggntgccttttttttatatatatatatatatataaa

SEQ ID NO: 228187 - DNA, 462 bp, Glycine max
ccagcaatagtactagtttaatattataagcagagattcataattcagattaactagccgaactttatacagaagcgaccaattaccaaacatttatatatatatatatatataaaaaaaaggcaaccatgaccttaacacacccatcacaagtccaaaacacttgaacttgctcaagggcaagaaatgaccactttattctaagggtgtttgtttagacacaaaacaccagagggcaacataatacatactacataattttgaagttttgaaactacatatagtttttatcattatttctaagggccatttctgcttgaagctttagctctccaacacctcacttgcaagtgcaggggttgcaggtgcagttagctccacatttgcagccatcgttctcagcgggaacacccatttcagcactctcgaattgagccttaactggtgccactcccatgacca

SEQ ID NO: 228188 - DNA, 556 bp, Glycine max
atggctacaggaagaagacaaaattactaacacaaaagaaacatctaagtaaatctgttgtgcgagattatatatatatttacacttgacattttcgcatctcagcttatccaacaaaaaaaaagtttgtcattatctctgatcacatcaacggagtctatttcagctccttcttcatttgtcaccattgcatcttttgcatcaaacccaaatttttcacctgcaatagtttttagttcctctattgaatcaggcaaccttattagcttcccagcttccatggaacatttttctcttctaactacagggtgacctctatatatgcttacccttggaaactttagtccactattagatcttcctccattgtgctcctgctcttgatgtctcccttttaatacaacttcactgagcatgacctcagttacattaattagatgcccaatttcacgcttctgcagcatttcatttaaggtggatgaacaaaattcatggttatgcacatcagagacatcagcaccattcatgacaagcaactgaaccatgtcaacatgat

SEQ ID NO: 228189 - DNA, 542 bp, Glycine max
  unsure (1)..(542): unsure at all n locations
gaaaaaataaagatgtttgggacaaagcccagaaaaataatttggtacttcaacttagaaccacgtgtaatatgaaccatcctactgagaagaaaacaaaagaaaggaaaggaacatgacaacgaacagaagtgacataactaaagaactaataaataataagctcatgtcagaaatctgcaaagacggtgaaaagatcaccattgatgtaatcattgtcgaccaaactcaccaagaagtagctgcccccaacctcttcaaccaatttcctggatgcatcaccctcagggtacaagcttgcccatcctcttgaccaaatttcaaatgcctcatccttccatacattgaagctgacaggatcaacaatggttggttgaattatctccttagctgggaagacaccccatgtcacagcattaacatcagtttgacccacattagatttccagctcccgtctttattcacagccatataagttaaagatgttcgatccttgcttttatcaacaagtgcatncagcttttccttagagcagaagaac

SEQ ID NO: 228190 - DNA, 509 bp, Glycine max
gtaaagagcaagtaacattaagttggattgggatacacaagataattcacattatctgaagtacattgcaataacatatacttcaccaaacacaaatctaaaaactctcaaaagtccacaagtcatccttttctttcatgctcacttgccggggacgaagttggtggcgtaggcccaggcattgttgttgactgggtccgcaaggtgatcagcaaggttctccaatggacccttaccggtgacaatggcctgaacaaagaacccaaacatagagaacatggccaatctcccgttcttgagttccttcaccttaagctcagcaaaagcctctgggtcatcagcaaggcccaatgggtcaaagctgccaccagggtagattgggtcagtgacctcaccgaggggcccaccagcaatacgattaccctcaacagcacccattaggataacttgggtggcccacatggcgaggatgctctgggcgtggacaaggcttgggttgcccaagtagt

SEQ ID NO: 228191 - DNA, 410 bp, Glycine max
ccttcatcattcacatttttaaaaatttattctaaaattcaaatcataagcagagacaaaacagaaaagaaaaggtatataatttgaaacttaatttaagcatcaacaatttccttagtgtccgcagaagccaaaataagctggggttcttcccttccaactccacacgttccatcaattgcattgttcctacccaaagccttcaacgccaaatgagccgccttctgccctgatatcatcatcgccccaaacgtcggacccattctgggggagccatcaatttctgcaacctccatgccagtgacaatcatgccaggcacaatctccctagtgagcctgacaatagcgtcctcagcagcattcatatccaaagcctttattcccaggaacgctttcaatcatcccaatac

SEQ ID NO: 228192 - DNA, 458 bp, Glycine max
gcagggtgcagaactggcagtggctcaagtatggagtggagctagatgaagatgggcttggagagaaagtgaacaaagacctttttgatagagtggttgaagaagagatggctaggattgaaaaggaagtgggaacagagaagttcgagaagggaatgtacaaggcggcttgcaagatcttcactcgccaatgcacgtccccaactcttgatgattttctcactttggatgcctataattacatagttgtgcatcacgccaaggaaggacccgtcaaagctttgaactaaggggttctttattgcctaatagttggatcacttggactctgtcttgtgtacttctagttgctgatgtgagaaaatcacaaatgcacgatggtgtcattgtgtctatgacttagtgattatcgacttatcgttattcaataaaaagaaaaaatatatatttttcgttct

SEQ ID NO: 228193 - DNA, 458 bp, Glycine max
agaacgaaaaatatatattttttctttttattgaataacgataagtcgataatcactaagtcatagacacaatgacaccatcgtgcatttgtgattttctcacatcagcaactagaagtacacaagacagagtccaagtgatccaactattaggcaataaagaaccccttagttcaaagctttgacgggtccttccttggcgtgatgcacaactatgtaattataggcatccaaagtgagaaaatcatcaagagttggggacgtgcattggcgagtgaagatcttgcaagccgccttgtacattcccttctcgaacttctctgttcccacttccttttcaatcctagccatctcttcttcaaccactctatcaaaaaggtctttgttcactttctctcccagcccatcttcatctagctccactccatacttgagccactgccagttctgcaccctgc

SEQ ID NO: 228194 - DNA, 600 bp, Glycine max
  unsure (1)..(600): unsure at all n locations
tatctctctctctctctctctttcctcccttccttccctctcaacttcattttcctttcaaatagtaacactagagaacaaaagctctggctagaacttgtaatgtatatgcaagccatcatcattcagaacaattagtgcatcatcctccttcaactgaagaactttatttaatttgctcctaaaatattttgtcagaggatgtggtgcagtaatcctttgccattccttctttatttttaagcttacagcatctgcaatcatctcttattattacttcaaagtggcgatcacactatcattcattcagctgatcttgaagattttgtggcaggcataaaacctgcaatgagatggctttcttcccagcaaatttcatgctccaaacccctcaccatgatgatcaccatcatcatcaacctccaccttctctcacctcaattctaccaacgtgtgcacctcaagaatatcatgngggagtgaccattctaggaaagagatccatgtcattttcatcagggattgagcatggagaagaggccaataatgctgaggaagatttgtctgatgatggatcacaagcaggggagaagaagagaa

SEQ ID NO: 228195 - DNA, 448 bp, Glycine max
acacgccaaatagcagttgcattactcaagtttcaagaaaacttggtacattaaccaacttagtgggaaaaaaaaagtgactagcccttaattcattcatataaaaattttcaagccccgccagaaaatttctacttgatatatatatatatatatatatatatatatacatatatcctattttatacaccaagttatcaaaacatgggtttttaatttaagaactcatcatcataataaagtattgtgtgataaattgatggacaccctcttgatttcacagggaaaaactactacatccaaatttttaaaattaattaactctctctctctctctctccctttgatttgaatcaattgaaatgctgctgctccaaccagggccaaaacccagattgatcattcatgccacaaaacatgttgcttaggctttcttttttgaccattg

SEQ ID NO: 228196 - DNA, 621 bp, Glycine max
cacacactgtgtttgtgaaactctcacacagacaagtcacaacaacaagtttctgttggtccaatggcatcagcaacaccccttttgaaagatgagctggacatcgtgatcccaacgatcaggaacctggatttcttggagatgtggaggccattctttgagccttaccatctcattattgtgcaagatggagacccttcaaagatcatcaaggtccctgaaggctttgactatgagctctacaaccgcaatgacatcaacaggatccttggccccaaggccaattgcatctccttcaaggactctgcatgccgttgctttggctacatggtctccaagaagaagtacatctacaccattgatgatgactgctttgttgccactgatccatccggacacaagattaatgcacttaagcagcatatagaaaacctgctctgcccatccacaccctactttttcaacaccctctatgaacctttccgagaaggtgcagattttgttcgcggttaccccttcagtctccgggaaggtgtaccaactgcagtttctcatggtctttggctcaacatcccagattacgatgctcctactcaggttgtgagccacttgagaggaaca

SEQ ID NO: 228197 - DNA, 403 bp, Glycine max
aatccaacatacaatttgagattcattagcacatggcgggaaccttattgagaaaaacagaatagctaacacatgaaatatgataagagagaaagtgaagaaaagtatgggtctaagattaatgaaggggtttgaaggaagtgagattcatgaaatggagccaaggcttctcccagacgatggcttcgtaactggccggggcggatccatccttggctttgaggacgagacggtagttggtgccggaaacgacctgagtctcgcccttgacgaccttgacaagggtgagcttggccccagaacgcttgttgtactcgctcagcgcgtagttggcgatctccgccacgtggctgtcgtttacgtccttgatggggcttcagccgcccagcgctgattccgaccg

SEQ ID NO: 228198 - DNA, 556 bp, Glycine max
  unsure (1)..(556): unsure at all n locations
gggaagtactgaaaagatcccaatcagcgctgaaagttcagaaaccaccatcgagataaaaattaaaacattggattctcaaacttacaccctcagagtggataaacagatgccagtccctgctctgaaagaacagattgcttctgtaactggagtgttatctgaacgacaacgcttaatttgccaaggaaaagttctaaaggatgatcagctcctgtctgcctatcatgttgaagatggtcacaccttgcatctggttgtgaggcaacctgatctaccaccaccaggaagtgtgtccaatcattcagtgactgaactgaattcaagcacaggccttggtcacgcaagtcaagtagcccctggtgtttttattgaaactttcaatgtgcctgttcagggtgatggagttgctcctgaaatcaataggattgtttctgctattctaggatctattggacttccaaattntgcgagtggcagtgaaggagggattgatgtcagggagcatgattcccaaggctctggaagaactttgggttctagtggaatattagat

SEQ ID NO: 228199 - DNA, 571 bp, Glycine max
gttctttgctgctttctgccctttttattaggaaaatgtcaagacaaagcatcctcagttgctatatgagtccaagttgtacagagttctccagggaggaagtaatgtctcttgtcatattaaattttttgtctttcttttattttcacgttgtgcagtgacacctacttttagtaattgatcttatttatacttatataacaatgcctatacaaatttggtattggcagctggaattccagatgttagatggtttggagtggagggagattacaatgttctagtgatggatctgcttggacctagtcttgaagatctatttaacttctgcagtagaaagctctcactaaagacagttctcatgcttgctgatcacatgatcaaccgtgttgggtttgttcattctaaatcatttcttcatcgggatatcaaaccagataatttcctcatgggcttgggaaggcgggcaaaccaggtttactgtattgattttggtttggccaagaaatatagagatagttcaacccatcaacacattccttacagggaaaacaagaatttaactgggact

SEQ ID NO: 228200 - DNA, 562 bp, Glycine max
  unsure (1)..(562): unsure at all n locations
ggttgttaatactacatccgaagaattgtctaatttagctatggaagtttcagtgtgggacctcgaaggcacatgtccacactacaaagttcatgaaaatctcactgcgctgccaaaaaaagtaacacctattgttgacatgaagtatctgaagtcaaaaaatcctaagccagtctactttcttcttctcaaactctacaaaatgtcagataatacaattttatctagaaacttttattggttgcatcttcctggtggagattacaagctattagagccgtataggaagaagaaaatacctctcaagataacatccgaagttttcattgaaggatccacttatatacttcaaatgcatgtgcaaaacacatctaaaaaaccagactctaaaagtttaacaatggtacacagttcaacagctagacaaagcagtggctgctttgttacagactctctggaaaccgtatatagtgggactggaaaagagcatgaagttggttggtttaaggggatacacacatgctttgctgggaaaagtcatggtcngaaggtttctgaaata

SEQ ID NO: 228201 - DNA, 482 bp, Glycine max
cgaaacgatcgcttttggaccccccgcctgaattactgctggtcagctactcactggtcggcgccctccttttttttttttcgtgaaatcttattaccaatgaagccaccaggccaaaacattatcatcttcaacaattgcactgcttgcaaaaacttgtgcaaaaaatatggtgattatctcgaaaaagctggggcagccttacaaacataacatgttgaaaggggaaaacaaaggccccaggttcaacgtaattgatgatttttttcaccaactgccacagtccatgaagacctgcgttattcatcatctccatggatgtcacgtctttcgttggcggccttggcctttgggagcatcttggcgaggtcttgctccccttgggcctcccatttaagaagctggtgggcacacaccgggccctaccccattccggccacgtgctgccacagatggaacatgtttgggagtttgcggaaagc

SEQ ID NO: 228202 - DNA, 621 bp, Glycine max
  unsure (1)..(621): unsure at all n locations
gggataggaatctttggcaccttagccatgagggagatattttggaagacccagctaatgagcctaaaaaggacatgtacataatgtctgtagaccctgaggatgctcctgatcaaccagaatatgtggaaattgggatagagtcagggcttcctgtttcagtgaatgggaggaggctttcaccagcatctttacttgctgagctcaatgagattggtggaaagcatggaattggcagggtcgacatggttgagaatcggcttgtaggtatgaagagccgtggagtgtacgaaactccaggaggaaccattctgtttgctgcagcacgcgagttggagtctttgacacttgatcgtgaaacaatacaagtcaaagattcattagcccttaaatatgcagagttagtgtatgctggcagatggtttgatccgcttcgggagtccatggatgcctttatgcagaagatcacggagaccacaacaggttctgtgactttgaaactntacaaaggttctgttactgcaaccagccgaacgagtccctttagcctgtataggcaagacatttcatcgtntgaaagtgggcagatatatgatcaagctgatgcctgtgggttcatca

SEQ ID NO: 228203 - DNA, 437 bp, Glycine max
tcctttttttttttttttttttttttttctttctaatatctgaacttgaatttcaggatgaatattaaatacgacttcattttattaaggttcgggtgaccggatcgactatcaatccatagtcctctctagcttaaagtgtaaacaagcaaagggacaatgaaatgaaatacatgtggaaatgaaacgaacacttagatgccctgttccccccttgctcggacccgcattggaagaccataaagcctgatgaacccagcatcatcagcttgatcatatatctgcccactttcaaacgatgaaatgtcttgcctatccaggctaaagggactccttccgctggttgcagaagcagaacctttgtaaagtttcaaagaaacacaaccagttgtggtctccgtgaacttctgcataaaggcatccatggactcccgagc

SEQ ID NO: 228204 - DNA, 497 bp, Glycine max
agaggagaacaggaaatgtcttgtgactttgaaaattgttgtactacaaaccatctaagaagcctcagtctcaggccaaatacacaaataaatatatacatgacaaacaggcagaaaggaacatgaagccagttgacaatagaatagacctacctaatggtgacaaacttgttggtgccatgttttgcccaataagtcctcaaatcaatcggattagaaaagttataaccctcagctgcaagtttctctaacactttcttaaatgctcctatactcattttccttccagctatcctagcaccacgccgcttggtactcataggcaaaggatacactgacatccctgtcgtgcaacatgcagactgccaaccgccagagccccatttataacactgttggtgcactccagtgcatgaacaaacaggaactggaatactagaaatatccatatcaattccgtttattacaatttcagtagttttctttggaacccttgc

SEQ ID NO: 228205 - DNA, 472 bp, Glycine max
ataaaaagttgatctaatctacgtatccttttactaacagttttattttttttggttttagccagctattggcatacatggggtaaccacattagatataatatattattatgatttaagatttcatggcccacttatactatatatcacattgaagatgccagccaaagtagtggatgatgatgataaagctatgatacaaaacgataagaaaaggagagcacatgtcatgggagctgctcatgaattaaaactcaacgtacgtgtaaccacatctgaactgaagagataaaaggattaaaacttaattagcactcgtatttaatttgattctctgcctgtctatttggctatgtctctaattacatcgaatcccatctccgttggatcggtggcctggagttcatagctgattccatccagcgctcttctcagcccatccttcgaagttgcgtatagaatcttagctcta

SEQ ID NO: 228206 - DNA, 559 bp, Glycine max
  unsure (1)..(559): unsure at all n locations
aaccactctaaatttctctctgtctcgtttacacatctctccaacctttcactttcgtttctcagttttattcgaatccctctctcaatctcctttccaaatggccagcgttgaggttgcacagcanacaccaacaacagttccagaaaatgaaacaaccgaggtaagcaagacccaggaaacaaccccagtcactgaggctcctgcaacagaacaaccagcagctgaggttcctgcaacagaacaaccagccgctgaggctcctgccccagaatcaaccaccgaagcaccaaaggaagaaaccaccgaggcaccaacagaaacagtagaaaaaacaactacagaagtagccccagaggagcctaaagaagttccagttgagaccgaggaggtggtggcaaaggagacagaggaagagaagccagcagaagagaaatcagaggagaaaactgaagaagtgaaagaagaagcagaggagcctaaagaaactactgaaacagaatcagcagcagcagcaccaccagcaaccacagaggaagagaacaaaccagctgagtca

SEQ ID NO: 228207 - DNA, 513 bp, Glycine max
ctgatgatagatgcattggacaaaattgaaaaggatttaaaaaaacctttactgagaaatgataagaaaggaatggaccttctcttggcagagtttgataagattaataagaaaattggaattcgaaaggaagatctaccaaagtatgaagaggagctagaacttaaagtagccaaagcacaactggaggagctgaagaaggatgctctctaggcaatggaaactcaaaagaaaagggaggaattcaaggatgagcctgaatcggtcgatgtcaaaactttggacatcagaaacttcctttaaaatgtcttcaggatgtttttgcacacactagaaattattgcatttggataatgatgaagctgtgttcaataagtagacaccactggtttgaagtgcaacattgatgccagtttgaatattcttgagttttttcaagatcttttttgtatttcagattccatgttaaactggaagttgaggctgtcaaattttctaaaaaaaaaaaaacca

SEQ ID NO: 228208 - DNA, 573 bp, Glycine max
gggaagccaaagcgaaaccctaaccctaacggagagatggcggagcacttggcatcgatattcgggacggagaaggacagggtgaactgtccgttctacttcaagatcggcgcgtgcaggcacggcgaccggtgctcccggcttcacacgaagcccacaattagcccaacgttggttctgtcgaacatgtaccagaggcccgacatgaacatgaacatcatcaccaaccccgatcagccccagccccaatctctcgaccccgataaggtccaggatcacttcgacgacttctacgaagatctctttgaggagcttagcaagtacggccccattcagagcttgaatatttgcgacaacctcgccgatcatatggttggaaatgtgtacgttcagtttagggaggaagaccatgcagccaacgccctcatgaatctgactgggaggttttattcaggtcgacccatcattgttgatttctctcctggtacggattttcgagaagctacttgtaggcaggatgaggaacatgtatgcaatcgaggtggctattgcaactcatgcacctaaagaaga

SEQ ID NO: 228209 - DNA, 590 bp, Glycine max
  unsure (1)..(590): unsure at all n locations
gaaaatcctcaattttctgagcagccaaacactctctctctgtctctcgaaaattctcagtttgcagagaaaatctgaatcatgtcgtggcaagcgtatgtcgacgatcaccttctgtgtgacatcgaaagtaaccacctcactcacgctgctatcatcggccaagacggcagcgtttgggctcagagtaccgacttccctcagttcaaacctgaggagataactgccatcatgaatgactttaatgagcctggatcacttgctccaactggattgtatctcggtggcaccaaatatatggtcatccagggtgaacccggtgctgtcattcgagggaagaagggtcctggtggtgttactgtgaagaagaccggtgcggccttgatcattggcatttatgatgaaccaatgactccaggtcaatgcaacatggtagttgaaaggcttggtgattatctcattgaacagggtctctaatctttgcttaatgtcttgttatcgtgcatatttcattggcttctgtacaagttnttgcatcgacctggactggaatgctctgattgcagtgtaataatnctgtgagtatgaaa

SEQ ID NO: 228210 - DNA, 499 bp, Glycine max
aaacggttacaacgctgtcacattatagttgaggaggctgggtataatttcctgattttcctcaaattacagacacaaatagggaattaagcccaaacacactttagactaaataaatagacacaggttgcccaagccaatggtcatttggatccaaaagcaaatgacaattttggtcgggatttgtttttacccaacaactttatttggtttagacgttcttgctcctcctcctgtttcttttttcgcatggcttcttccttctgtctttgcatctcttccagctctttatatccgtcttcctcccttctttgctgctctaaagctttccttctctgagcttcttcaaccttcctccggttctcctcaagcatcctttcaagatcttctttttttttacgggcttgctcctccttctgtttagcctcaataagggcagcttctttttctttttcagttgagctgcactttataataagtttttttcgtcccttttcaa

SEQ ID NO: 228211 - DNA, 426 bp, Glycine max
tcttaatccaaatacgatggcagccatggcaaccacaaccctctcttcaaaccccaaactctcattcttcaacggaaagcccgtcacatattcttcccgcgtcgcgcccaccaccaaattatcctcatccaaacaaggcacaatttccatgtccctaaccccacccccctacgacctccagtccttcaaattccagcccatcaaagaatccatcgtgtcacgggaaatgacgcgccgctacatgaccgacatgataacctacgccgacaccgacgtcgtaatcgtcggagccggttcggccgggctctcctgcgcgtacgagctcaacaagaaccccgccgggagcgtggccatagtcgagcagtcagtgagccccggcggcggcgcgtggctcggcgggcaactcttctccgcgatggtggtccg

SEQ ID NO: 228212 - DNA, 613 bp, Glycine max
ctctcatccagatcttgcaaaaaaaaaaaaacacaatggcagcgagcgctcccactccacgcgaagagttcgtgtacatggcgaagctggcggagcaggccgagcgctacgaggagatggtggagttcatggagaaggtctccgcctccgccgagagcgaggagctgaccgtggaggagcgcaacctcctctccgtcgcctacaagaacgtaatcggcgctcgccgcgcctcctggcgcatcatctcctccattgagcagaaggaggagagccgcggcaacgaggaccacgtcgccgtcatccgtgactaccgctccaagatcgaggccgagctctccaacatctgcgacggaatcctcaagctcctcgacacgcgcctcgtcccctccgccgcctccggcgactccaaggtcttctacctcaagatgaagggagactaccacaggtacctcgctgagttcaagaccggcgccgaccgcaaggaagccgccgagagcacgctctccgcctacaaagccgctcaggacattgctaacaccgagctgccttcaactcaccctatcaggctgggtcttgctctgaatttctctgggttttactatgagattcttaa

SEQ ID NO: 228213 - DNA, 556 bp, Glycine max
gaaaaggaaataataatggaaattcttcaaaaggaaaagatgagcaaaggttggaaacgaaggtatcctcatagcaattcatagggtgaaataagacaattatcaaaaatcatcgtcatcctcctctgcaatatgcttagccagctcttgctcttgctgttgtctctctcttctcttttcagcactttccttctctttgtgtgtgtttggtggaaaacgaagagctcgaaccgcctcattgtgcatgttaagacagaaagcaatccgagaattgaaggctgactgtggctcatttgtggagtaaatatctccagtttctttggacaccatccaaccattggcatgatccaatgtagcatcaattgcaccatcacgaatagcctttgatacaatgctctcagcatctgcaacaggatttgcagagttcagcctcagttttttagcaacatcagctagagagatgcgagaataggagatgctgatgttgcgtaaaccagtcctgatgacattatgccgcatacgaacaatcaaattatgggtttctgtctgcattaaa

SEQ ID NO: 228214 - DNA, 364 bp, Glycine max
gggtaaagctttaattaactttgggatttaaaaactagttgcaatgtaccatgaattgaaaagaccgcaaactaaaatagcccctaaaatgaaagacaaacaacttcttcaattttaacaaagcaaactcaacaaaagttttacttaatttagtcaaacagactgaaacccatgtcatcgtcagactcttcagcggggtcttcctttttttcctcctccttggctgcagccgctggagcaccaaatgcagcagcaggagcagcaacgggggcaacggcaaatttacttgggtccttcagatactccttgaccttgtctgcctccgggaaagaataatctgtctcaaccgcaacagcaagaacat

SEQ ID NO: 228215 - DNA, 541 bp, Glycine max
  unsure (1)..(541): unsure at all n locations
aggcgatggacctcggaacctatgaagtgccagaaggagtggacattctaggaagatacgatgcagagtttgcaaaaatcctcacaaaagacgctttgaaattcgttgctgagctgcaacgtgagttcaggagcgatatcaagcatgcattagagagcagaagagaggcaaagagaagttccatggaggggctctctcggggggtgagatcctgccgccagtcactttagaccaccggagggtgtgtgtgcacctgtcccaccatctgttgttgatgggaaagtggaaaacactgcccctgtggacagaaaaatggccatcaatgctctcaactctggagataaagactttatggctgatttagaagatgcactgtcaccgacctgngaaaatcttattagtggtcaagtgaacttgaaggatgctgtggatgggacaataagcttccatgacaaagtaagagacaggggtttacaagctcaatgatcagacagcaaagctttttgtgagaccaagaggttggcatctacctgaagcacat

SEQ ID NO: 228216 - DNA, 411 bp, Glycine max
gagaaatcaaaaccagacatgttttttggaagaacataaactgatttctgatcattttataggaacgaaaaatccatttttctcctttttattgaataacgataatcacaaagtcatacacataatcatgtgaatacgataaccaccgtgcacttgtgattttctcacaacagtaactttaagtacacaagacagagtccaagtgatccaaccattaggcaataatgaaccccttaattagttcgaagctttgacggttccttccttggggtgatgcaccactatgtaattataggcatccaaagtgagaaaatcattaagtgttagggacgcgcattggcgagtgaagatcttgcaagcctccttgtacaatcccttttttgaacttttctggtcccactttctttttaa

SEQ ID NO: 228217 - DNA, 564 bp, Glycine max
  unsure (1)..(564): unsure at all n locations
gctaccaagtcagaaagaaagccctatttatccattttaagtacttctgattattattgttcatttgtgtcttacattactcatttgttttcaaacctgtgataaaatttgatgcttcctcaactattatagatgatcagagcatgtgattataatgataatgcaatatgtttctttgtatatcagacaatattccgcaacccaaaagcaatcaaaccatatgctgttccatcccctgagcactgcaatctaccagcggctgctatgcatacatcttcacatatggttgaggttgttggtttgaatgcaccagcagctcaggttgcacagcacaagtggcaacccaacacacctgatggccagggtacaccatttttctttcaacatggaaaagctacatcaggctctgtgggtgggaatcttacacgcacgttcaaaggtcctgctggaactggcgaagagtggcaatatccccaagcattggctttttctgtttctggaattagaagccaagctattgtttctataacatgtnngacaagaaatataactggtatttcatgt

SEQ ID NO: 228218 - DNA, 423 bp, Glycine max
gctcccacgtcagatagaacgccctatttgttccttgtaagcacttctgcttattaatgatcatttgcgtgttacattactcatttgttctcaaccctgtgagaagaggcgatgcttgctcaactattatagatgatcagagcgtgtgattataatgatcacagcactctgtgtctctgtatatcagacaatattccgcaacccaaaagcaatcgaaccatatgctgtgacgtaccctgagcagtgctatctaccagcggctgctatgcatacatgttcacatataggatgaggatgttggtttgaatgcaccatcagctcatgttgcacagcacaagtggcaagccaacacacctgatggccagggtacaccatttttctttcatcatggaaaagctacatcacgctttgtgggtggggatc

SEQ ID NO: 228219 - DNA, 460 bp, Glycine max
agaagcacaaacagcttctaccgaacttgaagaagcttcttctctaccatgtgaagaagctcgtctgccgccggaaaactcgtcaaagtcaaaggctcgttcaagctcccacctaccagacctgctgcatcttcttcttcttcttcttcgccggcaaagaagaaaaagcccgcagctgccaagtccaagcctaagcctaagcccaagcccgctgcgaaagccaaggatactaaggcaactaaatcgaaggcaccagctaagcccaagccagctgctaagcctaaagccaaagctccagccaaggccaaacccgctgctaaaccaaaggcttctgctgctgccaagcccaagcctgctgccggcaagcccaaagccgctaaaccagctgccaagtccaagcctgctgctaaaacaaaggctgttcctgccaagcccgcggcaaagcccaaagccaagcccg

SEQ ID NO: 228220 - DNA, 282 bp, Glycine max
aagtagcttgtcttcacattattaccgtatgtttatgtttagctgcgatttagtgtcttgctcgagcaaaaaatgagaggtctgaataaatcggtttctgaaaccagtggtgttacttgttggaggagcattagctcttttttggacttttgatgttttctcttgtggagggggatcgagtttttggatttttatatactcgctgatgtacttggcttgaatacttgctaatgtacttgttattgattgttatagtagatatttgtccgtcctttttttcag

SEQ ID NO: 228221 - DNA, 535 bp, Glycine max
atcagcattggagttgccttcaatgtgatttttgctgattggatgatcacagtcttgttactaataattttcgtaggaattgcaaccaaggcattcttaaaaggagttgagacatggaaaaaagaaaccattatcaagaaggaaactgctagacaatcacaatttaatggcactgaaaggaccgcggaggtcgcatatgagcctctaccgggagggccaaacacaagcaatcataaagagcctaaaaaatccaaggaaacgggatcaattcttgagaatgttcgttggaaagcacttggagttcttttcactgtctgggtccttatacttgcctccgagattgcaaaaagtcacacaacaacttgttcagtggaatattgggtacttaatctattacaggtccctgtggcattaggagcgacttcatatcaagctgtgcttctgtacacagggcagagagtgatagcatccaaaggagatcaacgaactcaatggagagcgcaccagctaattatgtattgttcctgtggcatat

SEQ ID NO: 228222 - DNA, 591 bp, Glycine max
  unsure (1)..(591): unsure at all n locations
ggaatatggaatcaaggtgggaattgtgtgagaactaagccatctaggagtaatgagacaaggttagagggcactaatttggagctatatatgatccaattggaggaattcaagaaagctgaaaaggaaggtagaaagaagggtttgaaattgaagttacttgacaccacacaagcaatgttattgagaccagatggtcatccaagtagatatggacattggccacaagagaatgtaacattatataatgattgtgtgcattggtgtttgccaggacccatagacacatggagtgatttcttgctagaaatgttgaagatggaaggcgtgagatctgcaataagctaaatttataagtattattaatttaactatttttttcttgtaaattatcattgacaatattatttttgtaattttataaagatgaaatttgttatgccataataaagtgaatattttaaaaaattatagaaacaatcaagatatacatgttcaagagtttatctcaacgtgtattttatagcattctatgagatgnatacattatctcaaccattttgtactaaattttatgaataaaaaatgatg

SEQ ID NO: 228223 - DNA, 461 bp, Glycine max
cttttcaagccttaaatgagtaaaaaagagtgaagaaaggaaagaaaggagcaccatttttggtttgagaaacataattagcaagagagttcaaaatggggaagagagagtttaatggggtggtgttgatgatgctgtgtttgtgggtttgtggtgtcacagcctctgtgacttatgaccacaaagccattgtggttgatggcaagagaagaattttgatctctggctccattcattatcctagaagcacacctcaaatgtggccagaccttattcaaaaggccaaagatggaggccttgatgtcattcagacctatgtgttttggaatggccatgaaccttctcctggacaatactatttcgaagataggttcgacttggttaaattcgtgaagctcgcgcagcaagcaggcctctatgttcatctccgtattggtccctacatatgtgctgaatggaac

SEQ ID NO: 228224 - DNA, 617 bp, Glycine max
  unsure (1)..(617): unsure at all n locations
ctcattcccatgtctgataagatggacaaagcaacattactagggagtgtggtagaccatgtgaaagatctaaagcgaaaagccatggatgtcagcaaagccattactgttccaactgaaactgatgaagtaacaattgactaccaccaagctcaagatgaaagctacacaaaaaaagtgaacatattaaaggaaaacatcataatcaaagcttctgtttgctgtgatgatcgaccagaactgttccctgagctcatccaagtcctcaaagggttgagacttacagcagttaaagctgacatagccagtgttggtggcagaatcaaaagcatattggttctttgctcaaaggatagtgaagagaataatagtgtttgccttagcactctcaaacaatcacttaaatctgctgtgaacaaaattgcttcgatatccgtggcagcaaattgtcccactagaagtcagaggcagaggttcttcttgccttctcattacgtacaataattcattgcaattntctttttcatttttgtttttaattcttagaggggtcgtgtcactagctcacattattggtttcattntttcacatttgtttaccggtcagatataaaact

SEQ ID NO: 228225 - DNA, 571 bp, Glycine max
aacacaaacaaaagatcgacattttaacctctaataatttgacaatcatatttaacaaaaaaaaacatttaaaagattataaggatccatttgttctcatgaactgtgcagtgatcactagccgcaaagataaactaaatccatttcataacagacatcaagattatctcccatcttaatatttccaaagaaccctataccaattttacgggaaacaaacaaaaacaccgagtctgctagtctagtacaatgtaattttcaagtatctataatctcccttccccgctcaagaattcttccgctaacgaaaagaaaccccagtgaacaatatactgacgtcagtaatttgaacttcaaaacctctctccgaaacggaaaaacaatgcaccagttcctgagttgtgatcaacagcatattctgctctcactaaaccaagcttgacaccaagaccgtaggatgaaccatgacccattcgtctgtagacttctgtaggattacctttgacaccctttgaactccctagatcattgccatgttcagtaaatgcatacacatgcgtacctttaacag

SEQ ID NO: 228226 - DNA, 477 bp, Glycine max
cacaccaaaggatctgattcattaaaagcaatagattcttcacaaccacacaccactcacttgacatatatggaacacatacataatccatatagcattacttagtggtggggcatttcttacttttatttaatgcacaaacataacaagggcaggaaggaaaaccacaaaattaaaacgaagatcatatagctgttaataataacaacaacacatgcaacataaaaaccacatgcagttgtggtagtggcatcttcttcagattggaaacgcctcaatgatggaagggagagcgttgatcttgatgatgttgtaacgcgcgaaaccggtttccttgaacagccacttccagttctcttcggtcctctctttgccaccggcgttgtgagcgagaagcatcatgtcgaatgcgatgccaacgtctgtgaagagttcgttgccttcgggtcgaagaacgtgatccacgattatgacttt

SEQ ID NO: 228227 - DNA, 499 bp, Glycine max
  unsure (1)..(499): unsure at all n locations
cgaaaatgttgccgtttgctggtacncggctccggtaattaatttacctcggcgtgcgatcgaagcctcagctaagcttcggccgggctcggcccttctcttttattttttattttctaatttctctatttccgaatatcaatttatattctattatatataagtatgtagggtggcaagaatgacaactcaatataagatagtttaaaaggattactcaatgtattaagaagtttagaacagtgaaaattataatagttagttataatggattaatcaattttttttctacctgttcctgtagaaaaaagagatgcatctgtgtcttggataggcttacttcaaaaggacttttgcttccccagtgaatgtcttggtagaagatatgatttttttgaattgaggtttattcgggtttaaataagcacgtaactcaccaagaaatttccttacctgtccaatttctattgaataaagataacccttcgtcccaggataa

SEQ ID NO: 228228 - DNA, 493 bp, Glycine max
ggtaaaattccagatcaataaggattgcggcgaagccgcaaagatacaacattcattagggaaaacaggagtggggaaaaataaggggggaggggttgaggaagaatcaattgctcacagagcatgctaagacacctaaatattccacacacagttattgaaacaacccaatatagagaaaatttttctttggtgtattataatataaagcagaaccaaatgacttggaagattctactttcttataccattcacttggcaagttcgttgcggatgagttttgctgcggcaaccatgtttgtgagggctggcttcacctcagtgtacttacgggtcttgagcccacagtcagggttcacccacaagatgttcttctcgagcactgccagcatcttgttgattctgtcagcaatttcttcagttggtggtattcttggggagtggatgttatagacacccgggccaatttcagcaccatacttaacacctttgc

SEQ ID NO: 228229 - DNA, 590 bp, Glycine max
agcttgctttggatggacttctctccaaggtgccaattcccccgggcaatgtttatgcaatcaatgatgccctttcagccgagggagcggccaatgattacgagacatgtctcagacacttggtcaagaacagtattatagcttcatcgccagccaatggatttccaaaatttgatctaatgctgctgggcatgggccctgatggccacatagcttctttgttcccaggccatcctcttgtggaggaaaaacaaagatgggttaccttcattaaggactcccctaaaccacccccagagagaataactttcaccttaccagtgattaatacttctgcttatgcagcgcttgtggtgactggcaagggtaaagcagatgcagttcactctgtgttaggcaaatctcaaaattttgctaagcttcctgttggattggtttcacctgaaggagagttgaaatggttcttagacaaaggtgcagcctcaaagctggcagcttagccatgatcctatatgttgtgccagtgtatttaactatttacctttttgcaatattaagtgtgtatgagaagaagagacatatctagtact

SEQ ID NO: 228230 - DNA, 611 bp, Glycine max
  unsure (1)..(611): unsure at all n locations
ctcgagccgttcctttcctgttcatacttgtttcttcaatttcatttcttttattacttttcctctttgcattccaaatggccactgttgaggttgcacaacaaacaccaacaactgtgacagaaaatgaagcaaccgaggtaaccaagattgaggaaactaccccagaacaaccagctacccaggttactaccaccgaagaaccaaaggaagaaaccaccaaagaagcaaaagaggaagaagaagccccagttgagactaatgaggcaacagaagtgacagaggaagtgaagcctgaggtagaagagaacccagcacctgagagaacagaagaagaagaagtgaaagaggaaactaaagaaaccgaatcagcaccagtggaggaacagaagcaagaggagaacaaaccagctgaaaccgttgaggaaaccaaaacagaacatgtttctgttgagaagactgaagcttaagcccatggatacggtattattgaagtagatgaagtttcttgcatttttattttatttattattaatgttattattggaatggtaagtctctgggtatggctttccganntatatatatatatatatatatatatatatata

SEQ ID NO: 228231 - DNA, 445 bp, Glycine max
  unsure (1)..(445): unsure at all n locations
cgggggtagttctatagnactncacgtaggatgttcgcggccctcagccgtgaattcggatttcggctcggggccgaactggcagaggctaacgaattgaatggagctataaggctatgggcttggtgagaaagtgaacatatacctttgtgatggagtggatggagaagagatggttgggattggggtggaagtgggaccaaagacgttcacgaagggagtgtgcacggtgggttgcatgatcttcactggccaatggacgtgcacaactcttgatgatggtcatacttgggatgcgtataatcacatagcagggcatcacgccaaggcaggaccagaccatgctttgaactaagggggtctttgttgactacgagatggatcacttggacttggtcgagtgtactgtgcgttgctgatgtgagagaatcacaaatgcacgatg

SEQ ID NO: 228232 - DNA, 328 bp, Glycine max
tttctttttttttttttagaacgaaaaatatatattcttttctttatattgaataacgggtggtcgataatcactaagtcatagacacaatgacaccatcgtgcatttgtgattttctcacattagcaattagaagtacacaagacagagtccaagggatccatctattaggcaataaagaaccccttagatgaaagctttgacgggtcctttcttggcgtgatgcacaactatgtaattataggcatccaaagtgagaaaatcatcaagagttggggacgtgcattggcgagtgaagatcttggaagcccgcttggacattcccttt

SEQ ID NO: 228233 - DNA, 456 bp, Glycine max
atgagacatcagtgcctccttctggtctccctggtgttggtctcctacgctgcccggtcggaatcagcgctgggcggctggagccccatcaaggacgtaaacgacagccacgtggcggagatcgccaactacgcgctgagcgagtacgacaagcgttctggggccaagctcacccttgtcaaggtcgtcaagggcgagactcaggtcgtttccggcaccaactaccgtctcgtcctcaaagccaaggatggatccgccacggccagttacgaagccatcgtctgggagaagccttggctccatttcatgaatctcacttccttcaaaccccttcattaatcttagacccatacttttcttcactttctctcttatcatatttcatgtgttagctattctgtttttctaataaggttcctgtcatgtgctaatgaatctcaaattgtatgttggatt

SEQ ID NO: 228234 - DNA, 562 bp, Glycine max
gttctttccattattctacagtgtcctctctttggttctctattatttattgtgtcctccttttggctctctaatatttatttccaccgttttctcaaaacaaagcccctccaaattctccaacaaataataaccgaaatggccactgaaaagcttagaagtggtgccaacttccttgagaactctaaaccctactttgccatgattgctttacaatttggctatgcgggcatgaacattatcactaaggtttccctcaaccgtggcatgagccactatgtacttgttgtttatcgccatgcctttgccactgctgtcgtcgctccatttgccttcatccttgaaaggaaagctcaaccgaggataaaattcccaattttcatgcaaatatttttcctagctctacttgggcctgtgattgatcaaaacttctactatgctgggttgaaattaacctccccaaccttctcatgtgcaatgagcaacgtgcttcctgccatgactcttgttatggcagtattatgccggatggagaagattaacatgaagcaggtgagatgcc

SEQ ID NO: 228235 - DNA, 356 bp, Glycine max
attgaaactaggtgagagctcaaagaacggccatccctattcacatttcaatttggggtggtctttttcttctttggctaaacgttagatttggggggaggctcagggatagcctcattaaggatccgcgaagagaccttgttggaaacgcatatcatatcagtggaatccagaagcgattctgggttttcatcgaggggagcaccctttccaggcaaggggctctcgtgtgccacccatttatacactcgttctttgtgcttggcccaaaaaactgagggtaagcctcaaacgaccaagagggcaccaagcacaccttcacgaaaaatctgctctgtccggataaaggagcccat

SEQ ID NO: 228236 - DNA, 508 bp, Glycine max
caagagatcttgaaagtggcggtggaggaaccaagaataacagaactgcagaggaaaactactctgcacctgaatcttcccatgtttatgattctgagacccattggacatcatggctcgtgcctatgtttgtggttgctaatattgctgtctttgttattaccatgtacatcaacaattgtcccaggaacaaccttcgtttccaaggtcgctgcgtggccaggttccttggaaggttctcttttcagcctatgcaggagaatcccttgcttggtccttcttcttcaacattgaccaagatgggagcccttcgatgggataatgttgtgaatagacatcagggatggagactcttcacttgcatttggttacatgctggggttattcatttgctagctaatatgttgagtctggtcttcattggcattcgccttgaacagcaattcggatttattaagattggaatcatatacttggtgtccgggtttggtggaagtgtactgtcgtc

SEQ ID NO: 228237 - DNA, 432 bp, Glycine max
  unsure (1)..(432): unsure at all n locations
aacggtaccctcccctccggttccgtcaccggacgcttagcctctgtctacagtgaggtccaaaagacgcgcgtggaccacgcgctccctctcccctctgtcctcaagcatcccttcaccattctccacggtcctccaagctccgccgccggaaatccagacgagatcgcgaagctgtttccgcatttgttcggacaaccttccgctgcattggcgcgtagcgatgcggcgcagacgcagaagaagctgaagattggcgtggttttgtccggtggccaggctcccggaggccacaatgtcatttctggaatcttcgattacctgcaagagcgcgcaccaggaagcaccgttgtatggtttcaaaggtggacctgcgggcattatgaagtgcaaatacgtngagctcacctctgaatatatttatccttatag

SEQ ID NO: 228238 - DNA, 498 bp, Glycine max
  unsure (1)..(498): unsure at all n locations
ctgccatgaagtccgtgaaacaacagctttcatggttccattggtggctggtgatggaaccaaaactcaggcacttgctatttgccactcaaatacttctggaatgaatcatcaaatgcttcatcaacttatgggagttgatcctggaactaaccctgtttgccatttccttggaagcaaggccattttatgggtacccaatttatctgtggacactgcctatcagaccaacattgttgcttaattagtccatgcatcttgagcaccatgagaatgagattgtgtataaaataaattatcatgtgctgtgtgttgtgcaagtactaccttctctagctagattgctagagctagaatttcaacctacctatgtgtactgataagatctgcttccctacttaaagagagcatcatcctgtgatcagngngcttcgtattctctctctctatatatatatgngaaaaagtggttatctcgtgcctcgccttgagctatcc

SEQ ID NO: 228239 - DNA, 589 bp, Glycine max
aaagagctaacaagagattcaagaccggcatggctaatgaagaggaacagaaaaaccacctcttcggcatcaaagatctcggtcacaagactctccttcagagtgatgcactctatcagtatatacttgaaaccagtgtctatccaagagagcacgagtgcttgaaagagatacgcaagatgactgcaaaacacccactgaacatcatggcaacaccagcagacgaaggacaacttctgagcatgcttgttaagctcacgaattcaaagaacgccttggaaattggtgtattcactggttactctctgctctccactgccctggctcttccccctgatggaaagatcttggctttggatgtgaatcgcgaatactatgagttaggattgccaataattcaaaaagctggagtggctcacaagattgatttcagagaaggacctgctcttccgtttcttgacgagatgcttaaagatgaaaataaaaaggggtcgctggatttcgttctcgtggatgctgataaggacaattacttgaactaccacacgagggtactagagcttgtgaagaatggaggactgatcggata

SEQ ID NO: 228240 - DNA, 493 bp, Glycine max
ttctgtttcagggcctgctatggtgttttgaggtttgttatggagagtggtgctaagggatgcgaggtttgttctgcagaagggacttgggtttgaagtttgtgatattggggtgttgctttgtgtgatggttttggttgtttggtttgagcaggtcattgtgagtggaaaattgagagcccagagagccaaatgtatgaagtttaaggatgggtacatgatttcttctgggcgacctgtcagagattacattgactctgcagtgagacatgtgctactgagacaggtttttttatcttgtattctttgtagattcttgatactatttatctcttttgggttgttgattttactatgaaaagatgatgctaattggtattttgttgctgcctataaggtgttcttggcattaacgtgaagatcatgcttgattgggatcctaaggggaaacagggtcctaaaactcccctcgctgatcttgtcacaatccatt

SEQ ID NO: 228241 - DNA, 488 bp, Glycine max
gaaaaagataaaacaaattacttaaaatacttgtaaccgagtatgaaaatttcttcaaaatttaagaaactacaaaattttgaacttgtcaaaaaacattgcacaagaaaaactaggcactcagctactatgaattactgctccagtgtataacatttcatgcgacagggacagggacctcaatatcattattagcagccaaaactggggcaggtcggatgtattcctcctcctcctttggagaatggattgtgacaagatcagggaggggagttttaggaccctgtttccccttaggatcccaatcaagcatgatcttcaccttaatgccaagaacaccctatgaggcagcaacaaaataccaattagcatcatcttttcatagtaaaatcaacaacccaaaagagataaatagtttcaagaatcttcacagaattgaagataaagaaacctgtttaggagcacatgtctcactgcagagtcaatgt

SEQ ID NO: 228242 - DNA, 412 bp, Glycine max
cgtaagttgcccctgttgacccacccggaattaattactggctcgaccagctaactaactggtgggcggcctttctttttttttttttttgacacgaagacatcgctgactcatgataaatgtggcggccgtggttccatagctgtaaaaacttaaaaccagggcacaagtatgcgggttcccccctaacaaaagttcaacgatagagattatcgccagtttttctcaagcatggaacactgtattcgaaacacgcagacaccgtggctttggatacttacaagaccatcacactgttatggaagaaacccagttcaggctgatgcagaaacttgttcagaaggcaatgaaatatgcgcgattgcaagacattcagctatgattatagaccctgctcaatgagatgatgacc

SEQ ID NO: 228243 - DNA, 559 bp, Glycine max
gggagttatcaacacaaacccagtggagaagacttctgtggatagcggcttatctgaaagagggaagaaacagtctataaaatcagctttgatttgaaagaaatgggagcgtgtgacaagggctgttggatctggtctgctattactcagagagcttaccagactgctgagattattgcttctgttaatggagttacccgtagttatatagtcccagaatacagctttctggatgcccgtggattaggtgcctttgaaggaaaaaagttggaatatgtttcagaagtgtatgcatcagatggtatatctccgaacatcaagcctcctcccattaatgacggaactccgaatgagagtgttgcagatgtttttgttcgtgtgacacagctcatgtcaattcttgaaactcagtattcgggtgacaccgttattattgtgtcgccagattctgacaacttgacaatccttcaggcaggttttgataggactagacctttcgaagcacagggaactgtcttttgcacctggtgaaggtcgctttgttgatcccaatgacatt

SEQ ID NO: 228244 - DNA, 414 bp, Glycine max
gcagaaaaaatcatgaacaaagttagttccttcttattgtattcttttatgtgatgttcatatacacccataacaagaaaaaaatgggcaaccaggcataacagcctctatacaaataacattatagtagtaattataacacaaatatatgacggctgaaattcaatattcgttgtcttaattatcttctgacactctaataatatgaatccacagtattcattcattatccattgtccttgtaacttctctcttcttgtataatttctacccttctatgctggaatggctttgaaaatgtcatcgaaactgttctggtttgcaaaaatatccagaagagacagtgcctcaggcacactcagttcaagacggaacttagggccatcataatggtggaaaattggtctaaaggaa

SEQ ID NO: 228245 - DNA, 546 bp, Glycine max
agtcacaataaagagcactaagcaatattttatatgcatacaaaaggaggaagcaacctttatgagcattatccgcaccatttacataaatcgtatcttctacatggattctacatggattaattacatagtcttaccatgccttaacaagcttaaaagtatgtctagtcacaaccaccacattgcctagaatgtcacaacccacaaaacaagttcactcataagcaaatttttttgaagaagtaaagctgaatttaatcagaatcagatgcagattctaatctttgttcctcagaggctgcattatctccttttaagttcgcctctccctgcttgaatgccttggctatctcttcaatgggaatcaaaggtagatacccgacgaaactataacccttttgagtcatggccttgatcacatggttgtacttctctgaccagtgagcagcagtgggaactgctatctctgccaatgcatggaatggtggatagtgggtgagttcattccacaacttcaccgaatttatcaacacaaaatgctttgac

SEQ ID NO: 228246 - DNA, 578 bp, Glycine max
  unsure (1)..(578): unsure at all n locations
ggctttgaatctaatctgcgccgctgaggataagcattacgtcaaggccaccggcctccctcacggatgggatgttctcttctacatcttccagtttatccgcgtcgttttgctctttactgtcatcgttttgatagggacaggatggtcttttctcaaaccgtttttgcaggacagggagaagaaggtgttgatgattgtcatcccgcttcaggttctcgccaatttggcttccgttgtgatcggggaaacaggtcctttcatcaaagactgggttacttggaatcaggttttcttgcttgtggatattatctgctgctgtgccattattttccctattgtgtggtccataaggtcgttgagggaaacttcgaaaactgatgggaaggcttcgaggaatttggccaagttgactctgtttagacaattctacattgttgtcattggatacttgtatttcaccagaatagtggtgtttgctttgaggaccattgcggcttataagtaccaatgggtgagcaatgctgccgaggagaccgcgagtcttgcgttntatgttgncatgttctatatgttta

SEQ ID NO: 228247 - DNA, 405 bp, Glycine max
ctgcaacccctgcacttgcaagtgaggtgttggagagctaaagcttcaagcagaaatggcccttagaaataatgataaaaactatatgtagtttcaaaacttcaaaattatgtagtatgtattatgttgcactctggtgttttgtgtctaaacaaacacccttagaataaagtggtcatttcttgcccttgagcaagttcaagtgttttggacttgtgatgggtgtgttaaggtcatggttgccttttttttatatatatatatatatataaatgtttggtaattggtcgcttctgtataaagttcggctagttaatctgaattatgaatctctgcttaaaaaaaaaacaataataaaaaaaaaaacaaaagctggcaggacacaaaaaaaaacaaaaaaaataa

SEQ ID NO: 228248 - DNA, 512 bp, Glycine max
ggaagagtttgtggaatctagtgagagagagcagaggaaaaggggaagaaaaatgttgagtgcgacggcgatcggcgcgttattgggtttgggaacccagatgtactccaatgctctccgcaaactcccctacatgcgccatccgtgggagcacgtggtcggaatggggttgggcgcggtgtttgtgaaccagcttctgaaatgggaggcccaagtggagcaagacctcgacaagatgctcgaaaaggccaaggccgccaacgaaagacgttatatagatggagatgatgattaatgcatgtcttcatggattgtggcagctggtgaaaataatcatgaaatatgttgaacctgttgcctctggtttctgattcgatgatgttatgtttgtaaggctgttaaaactttttcgtgctaatcagcctattttttgcacaaggtcttgcaagcagcgaaatttgtgtagatgataatgttctggcctggtggcttcttggtgataagattatcac

SEQ ID NO: 228249 - DNA, 483 bp, Glycine max
aaaaaaaaaaaaaaaaaaaaaaaaaaaaaaaaaaaaaaaaaaaaaaaaaaaaaaaaaaaaaaaaaaaaaaaaaaaaaaaaaaaaaagacaaaaaaaaaaaaaaaaaactcataaacccataagggggggccccccccttttgggcttcttccccccggtatttttttcgggcccggtcccggggggggccccccttttccctttggggggtccttttaaacttgggggtaccttgggccttcctttttccctgggggaaattgttttcctttccaaatcccccccaaatttcgggcgggggccttaaaggttaaacccggggggccccatgggggggcccccccccctttattggggtggccctccctgccccttttccagggggaaaccctgttgggcccttttttttttttattccccccccccccgggggggggcgttttgtttttggcccccccgggggtgtttttttttccccggggg

SEQ ID NO: 228250 - DNA, 554 bp, Glycine max
tttttttttttttttttttttttttttttttcttcttctttttttttttttttttgggggttacttttctttttacttttttttttcatttcccccaatttcattttttttactatttttttttactcgggggccccaattccgagcctccacccccgggaggaacaaagaaaaccctttttaaggggacacaaaaaaaaaaacccggggcgcgcctataaaaacgcgggggggggaaaaaccccggggccacccaaaaaaacggggagaaaaaaaaaccccctctcccctcggggaaaaaaaaaaaaagggcccccccaaggaccctccccaaaaaaggggccctaaagaagggggaagggggcccccccccgggggaaacaaaaaccggggggggggggggggcccccccccggggccctttaattttttgcacccccaaagcccccccttttgtggatacactctcatttggggcaccgtgggggtttccccaaaaaaaaaaaaggggggcccccctaggggtcaaaatggggtttcccccccccccccac

SEQ ID NO: 228251 - DNA, 398 bp, Glycine max
agaagcacaagcagcttccaccgaacttcaagaagcttcttctctaccatttgaagaagctcgtcgccgccggaaaactcgtcaaagtcaaaggctcgttcaagctcccacctaccagacctgctgcatcttcttcttcttcttcttcgccggcaaagaagaaaaagcccgcagctgccaagtccaagcctaagcctaagcccaagcccgctgcgaaagccaaggatactaaggcaactaaatcgaaggcaccagctaagcccaagccagctgctaagcctaaagccaaagctccagccaaggccaaacccgctgctaaaccaaaggcttttgctgctgccaagcccaagcctgctgccgccaagcccaaagccgttaaaccagttgccaagtccaag

SEQ ID NO: 228252 - DNA, 529 bp, Glycine max
agcgaagagaatggctcccaagggtttaatctttttggctgtgttatgcttctcagcactgtcactgagtcgttgtcttgcggaggataatggacttgttatgaacttctacaaggaatcatgccctcaggctgaagacatcatcaaagaacaagtcaagcttctctacaagcgccacaagaacactgctttctcctggctcagaaacatcttccatgactgtgctgttcagagttgtgatgcttcactgttgctggactccacaagaaggagcttgtctgagaaggaaacagatagaagctctgggttgagaaatttcaggtacattgagaccatcaaagaagctttggaaagggaatgcccaagagttgtttcctgtgctgatatcctcgttctctctgccagagatggcattgtttcgctaggaggtccccatatccctcttaaaacaggaagaaaggatggtagaaggagcagagccgatgtggtagagcagttcctcccagaccacaatgaatccattttgcag

SEQ ID NO: 228253 - DNA, 196 bp, Glycine max
gcataatatcttacagaaaacatccacatacaaaaggggacgaaaattcaaggtcccaattacgcgggaagcaattaaggctcctcacggtgcttggtgtcaacaatgccctgatctctgatctcaccctctgggccaaagagagggttgtcctcagagagcaaaggcttggctctcgagaaccccctgtggaaat

SEQ ID NO: 228254 - DNA, 406 bp, Glycine max
gtaaaaggcaatttacttataacatccctcggcagcaaaggagcaaaactaaaaccctgtagctgcttgtgcaaaaagagttctcatacagcttataaaatagaaaagtcaccaccgcccatcaagaacccagttttgaaaggtaggtggctgcaatgaaatggctgatacataaaagtaaaactataacaagtaaaagcacctatactctcaaaaaataaaatactaataaggaaccactgttgtgtgtaactataaatgtaactatgatcgcatgtacttgaagaaacacaaaaatgtattcacttcttcttctgtgcagccttggtgaccttggctccagttgggtccttcttcttcacactcttgatgactccaacagccacagtttgtcgcatgtccctca

SEQ ID NO: 228255 - DNA, 260 bp, Glycine max
ataaaataaaatttggttgaggggcttaaaccccccaaagcaaaaaaagccccgggcgggaaaagaaaatacgcaaggggaagaacggccaccgaaaaaaaaacccaaaaaaggggaaaaaacagaaaagaacaaaaaaaaaacgggaaaaaaacaaaaagcagaaaaaaagaaaaaaggaggggaacacctcaaaagggggcccccaaaagaggggaaaaaaaaaaaaagagaaacgcggaaacccccacacggaaaaa

SEQ ID NO: 228256 - DNA, 591 bp, Glycine max
  unsure (1)..(591): unsure at all n locations
gttctagatcgcggccgctcgcgatctagaactaagtaagaagcagcattcagacagaaatgttttgcagtgctttgtttttgggcctaggaaggctggaaaatctgcattattgaattcttttattggaaggccatattctgaaagttacaatccaaccactgaagatcgttatgctgtaaatgtagttgatatttctatggaaaacagaaaatatctagtgctgagagagattcctgaagatggagttaggaagctcctatccaataaggagtctttggcctcatgtgacattgcagtttttgttcatgacaggtctgatgaatcctcatggagaacatcgtccgaactcttggttgaaattgctagccatggagaagataccggctttgaggtgccttgcctgatagttgcagctaaagatgatctggattcatttccaatggctatacaagagtcaactaaggttagtcaagatatgggagttgaggctcctatacctatcagtgtgaaattaggagatttcaacagtctgttccgtaaaattgtaacggctgctgagcatcctcatttaagcattccanaaactga

SEQ ID NO: 228257 - DNA, 482 bp, Glycine max
ggactctgttgaaagcaacggggacaccgaacttggtggattattttccagtgttgagggtgtttgatccacaagggatcaggaggcacaccaccaactacattgacaagttgttctatgtgttcgatcccatgattgatgaacgcatgaggaggaggggagagaagggttatgccactagccatgacatgttggatattttgctggatatttctgaccacagtagcgagaagattcataggaagcagatcaagcatttgttgcttgacctatttgttgcggggacggatgcaacagactacggcttagagagaacaatgacggaactaatgcacaatccacaatccattagaaaagctgacgaatgagatagcagaatcaataggagtagtgtaaccggtggaggaatcccacatggtcaggctgtcatacctgcaatgagtgataaaagaatctctgtgtatgcacccaccatcaccact
